United States Patent Application Publication US 2022/0162320 A1 - sequence listing, part 5

SEQ ID NO: 83301 - protein, 9 aa, Homo sapiens
  misc_feature: Table A; Target 83301; HLA-B*38:01; STRA8; ENSG00000146857; CTA
VSTPEEILF

SEQ ID NO: 83302 - protein, 9 aa, Homo sapiens
  misc_feature: Table A; Target 83302; HLA-B*57:01; STRA8; ENSG00000146857; CTA
VSTPEEILF

SEQ ID NO: 83303 - protein, 9 aa, Homo sapiens
  misc_feature: Table A; Target 83303; HLA-B*58:01; STRA8; ENSG00000146857; CTA
VSTPEEILF

SEQ ID NO: 83304 - protein, 9 aa, Homo sapiens
  misc_feature: Table A; Target 83304; HLA-C*02:02; STRA8; ENSG00000146857; CTA
VSTPEEILF

SEQ ID NO: 83305 - protein, 9 aa, Homo sapiens
  misc_feature: Table A; Target 83305; HLA-C*16:01; STRA8; ENSG00000146857; CTA
VSTPEEILF

SEQ ID NO: 83306 - protein, 8 aa, Homo sapiens
  misc_feature: Table A; Target 83306; HLA-A*23:01; STRA8; ENSG00000146857; CTA
VYSQSDLI

SEQ ID NO: 83307 - protein, 8 aa, Homo sapiens
  misc_feature: Table A; Target 83307; HLA-A*24:02; STRA8; ENSG00000146857; CTA
VYSQSDLI

SEQ ID NO: 83308 - protein, 8 aa, Homo sapiens
  misc_feature: Table A; Target 83308; HLA-C*04:01; STRA8; ENSG00000146857; CTA
VYSQSDLI

SEQ ID NO: 83309 - protein, 9 aa, Homo sapiens
  misc_feature: Table A; Target 83309; HLA-C*14:02; STRA8; ENSG00000146857; CTA
VYSQSDLIA

SEQ ID NO: 83310 - protein, 11 aa, Homo sapiens
  misc_feature: Table A; Target 83310; HLA-A*03:02; STRA8; ENSG00000146857; CTA
VYSQSDLIASK

SEQ ID NO: 83311 - protein, 11 aa, Homo sapiens
  misc_feature: Table A; Target 83311; HLA-A*33:01; STRA8; ENSG00000146857; CTA
VYSQSDLIASK

SEQ ID NO: 83312 - protein, 11 aa, Homo sapiens
  misc_feature: Table A; Target 83312; HLA-B*27:02; STRA8; ENSG00000146857; CTA
VYSQSDLIASK

SEQ ID NO: 83313 - protein, 11 aa, Homo sapiens
  misc_feature: Table A; Target 83313; HLA-B*38:01; STRA8; ENSG00000146857; CTA
YASMYSGNDSF

SEQ ID NO: 83314 - protein, 11 aa, Homo sapiens
  misc_feature: Table A; Target 83314; HLA-B*39:01; STRA8; ENSG00000146857; CTA
YASMYSGNDSF

SEQ ID NO: 83315 - protein, 11 aa, Homo sapiens
  misc_feature: Table A; Target 83315; HLA-C*03:03; STRA8; ENSG00000146857; CTA
YASMYSGNDSF

SEQ ID NO: 83316 - protein, 9 aa, Homo sapiens
  misc_feature: Table A; Target 83316; HLA-A*02:04; STRA8; ENSG00000146857; CTA
YLNFYKQTM

SEQ ID NO: 83317 - protein, 9 aa, Homo sapiens
  misc_feature: Table A; Target 83317; HLA-B*08:01; STRA8; ENSG00000146857; CTA
YLNFYKQTM

SEQ ID NO: 83318 - protein, 10 aa, Homo sapiens
  misc_feature: Table A; Target 83318; HLA-A*01:01; STRA8; ENSG00000146857; CTA
YSGNDSFPQN

SEQ ID NO: 83319 - protein, 10 aa, Homo sapiens
  misc_feature: Table A; Target 83319; HLA-A*01:01; STRA8; ENSG00000146857; CTA
YSQSDLIASK

SEQ ID NO: 83320 - protein, 10 aa, Homo sapiens
  misc_feature: Table A; Target 83320; HLA-A*03:02; STRA8; ENSG00000146857; CTA
YSQSDLIASK

SEQ ID NO: 83321 - protein, 10 aa, Homo sapiens
  misc_feature: Table A; Target 83321; HLA-A*11:01; STRA8; ENSG00000146857; CTA
YSQSDLIASK

SEQ ID NO: 83322 - protein, 10 aa, Homo sapiens
  misc_feature: Table A; Target 83322; HLA-A*68:01; STRA8; ENSG00000146857; CTA
YSQSDLIASK

SEQ ID NO: 83323 - protein, 10 aa, Homo sapiens
  misc_feature: Table A; Target 83323; HLA-B*27:02; STRA8; ENSG00000146857; CTA
YSQSDLIASK

SEQ ID NO: 83324 - protein, 10 aa, Homo sapiens
  misc_feature: Table A; Target 83324; HLA-C*07:06; STRA8; ENSG00000146857; CTA
YSQSDLIASK

SEQ ID NO: 83325 - protein, 11 aa, Homo sapiens
  misc_feature: Table A; Target 83325; HLA-A*01:01; STRA8; ENSG00000146857; CTA
YSQSDLIASKW

SEQ ID NO: 83326 - protein, 11 aa, Homo sapiens
  misc_feature: Table A; Target 83326; HLA-A*25:01; STRA8; ENSG00000146857; CTA
YSQSDLIASKW

SEQ ID NO: 83327 - protein, 11 aa, Homo sapiens
  misc_feature: Table A; Target 83327; HLA-A*32:01; STRA8; ENSG00000146857; CTA
YSQSDLIASKW

SEQ ID NO: 83328 - protein, 11 aa, Homo sapiens
  misc_feature: Table A; Target 83328; HLA-A*33:01; STRA8; ENSG00000146857; CTA
YSQSDLIASKW

SEQ ID NO: 83329 - protein, 11 aa, Homo sapiens
  misc_feature: Table A; Target 83329; HLA-B*44:02; STRA8; ENSG00000146857; CTA
YSQSDLIASKW

SEQ ID NO: 83330 - protein, 11 aa, Homo sapiens
  misc_feature: Table A; Target 83330; HLA-B*57:01; STRA8; ENSG00000146857; CTA
YSQSDLIASKW

SEQ ID NO: 83331 - protein, 11 aa, Homo sapiens
  misc_feature: Table A; Target 83331; HLA-C*07:01; STRA8; ENSG00000146857; CTA
YSQSDLIASKW

SEQ ID NO: 83332 - protein, 11 aa, Homo sapiens
  misc_feature: Table A; Target 83332; HLA-C*12:03; STRA8; ENSG00000146857; CTA
YSQSDLIASKW

SEQ ID NO: 83333 - protein, 11 aa, Homo sapiens
  misc_feature: Table A; Target 83333; HLA-C*16:04; STRA8; ENSG00000146857; CTA
YSQSDLIASKW

SEQ ID NO: 83334 - protein, 10 aa, Homo sapiens
  misc_feature: Table A; Target 83334; HLA-B*44:02; TDRD1; ENSG00000095627; TAA
ADIQSRNKHW

SEQ ID NO: 83335 - protein, 9 aa, Homo sapiens
  misc_feature: Table A; Target 83335; HLA-A*30:01; TDRD1; ENSG00000095627; TAA
ADKLVTFGL

SEQ ID NO: 83336 - protein, 9 aa, Homo sapiens
  misc_feature: Table A; Target 83336; HLA-B*37:01; TDRD1; ENSG00000095627; TAA
ADKLVTFGL

SEQ ID NO: 83337 - protein, 9 aa, Homo sapiens
  misc_feature: Table A; Target 83337; HLA-B*40:02; TDRD1; ENSG00000095627; TAA
ADKLVTFGL

SEQ ID NO: 83338 - protein, 9 aa, Homo sapiens
  misc_feature: Table A; Target 83338; HLA-A*30:01; TDRD1; ENSG00000095627; TAA
ADYGNIETL

SEQ ID NO: 83339 - protein, 9 aa, Homo sapiens
  misc_feature: Table A; Target 83339; HLA-B*37:01; TDRD1; ENSG00000095627; TAA
ADYGNIETL

SEQ ID NO: 83340 - protein, 9 aa, Homo sapiens
  misc_feature: Table A; Target 83340; HLA-B*38:01; TDRD1; ENSG00000095627; TAA
ADYGNIETL

SEQ ID NO: 83341 - protein, 9 aa, Homo sapiens
  misc_feature: Table A; Target 83341; HLA-B*40:01; TDRD1; ENSG00000095627; TAA
ADYGNIETL

SEQ ID NO: 83342 - protein, 9 aa, Homo sapiens
  misc_feature: Table A; Target 83342; HLA-B*40:02; TDRD1; ENSG00000095627; TAA
ADYGNIETL

SEQ ID NO: 83343 - protein, 9 aa, Homo sapiens
  misc_feature: Table A; Target 83343; HLA-B*49:01; TDRD1; ENSG00000095627; TAA
ADYGNIETL

SEQ ID NO: 83344 - protein, 9 aa, Homo sapiens
  misc_feature: Table A; Target 83344; HLA-C*12:03; TDRD1; ENSG00000095627; TAA
ADYGNIETL

SEQ ID NO: 83345 - protein, 9 aa, Homo sapiens
  misc_feature: Table A; Target 83345; HLA-A*30:01; TDRD1; ENSG00000095627; TAA
AEIGQPCCA

SEQ ID NO: 83346 - protein, 9 aa, Homo sapiens
  misc_feature: Table A; Target 83346; HLA-B*49:01; TDRD1; ENSG00000095627; TAA
AEIGQPCCA

SEQ ID NO: 83347 - protein, 10 aa, Homo sapiens
  misc_feature: Table A; Target 83347; HLA-A*30:01; TDRD1; ENSG00000095627; TAA
AEIGQPCCAF

SEQ ID NO: 83348 - protein, 10 aa, Homo sapiens
  misc_feature: Table A; Target 83348; HLA-B*44:02; TDRD1; ENSG00000095627; TAA
AEIGQPCCAF

SEQ ID NO: 83349 - protein, 10 aa, Homo sapiens
  misc_feature: Table A; Target 83349; HLA-B*44:03; TDRD1; ENSG00000095627; TAA
AEIGQPCCAF

SEQ ID NO: 83350 - protein, 10 aa, Homo sapiens
  misc_feature: Table A; Target 83350; HLA-C*16:04; TDRD1; ENSG00000095627; TAA
AEIGQPCCAF

SEQ ID NO: 83351 - protein, 10 aa, Homo sapiens
  misc_feature: Table A; Target 83351; HLA-A*30:01; TDRD1; ENSG00000095627; TAA
AELQASLSKY

SEQ ID NO: 83352 - protein, 10 aa, Homo sapiens
  misc_feature: Table A; Target 83352; HLA-A*30:02; TDRD1; ENSG00000095627; TAA
AELQASLSKY

SEQ ID NO: 83353 - protein, 10 aa, Homo sapiens
  misc_feature: Table A; Target 83353; HLA-B*15:03; TDRD1; ENSG00000095627; TAA
AELQASLSKY

SEQ ID NO: 83354 - protein, 10 aa, Homo sapiens
  misc_feature: Table A; Target 83354; HLA-B*18:01; TDRD1; ENSG00000095627; TAA
AELQASLSKY

SEQ ID NO: 83355 - protein, 10 aa, Homo sapiens
  misc_feature: Table A; Target 83355; HLA-B*27:02; TDRD1; ENSG00000095627; TAA
AELQASLSKY

SEQ ID NO: 83356 - protein, 10 aa, Homo sapiens
  misc_feature: Table A; Target 83356; HLA-B*40:01; TDRD1; ENSG00000095627; TAA
AELQASLSKY

SEQ ID NO: 83357 - protein, 10 aa, Homo sapiens
  misc_feature: Table A; Target 83357; HLA-B*49:01; TDRD1; ENSG00000095627; TAA
AELQASLSKY

SEQ ID NO: 83358 - protein, 10 aa, Homo sapiens
  misc_feature: Table A; Target 83358; HLA-C*16:04; TDRD1; ENSG00000095627; TAA
AELQASLSKY

SEQ ID NO: 83359 - protein, 9 aa, Homo sapiens
  misc_feature: Table A; Target 83359; HLA-A*30:01; TDRD1; ENSG00000095627; TAA
AEQWKTIEL

SEQ ID NO: 83360 - protein, 9 aa, Homo sapiens
  misc_feature: Table A; Target 83360; HLA-B*37:01; TDRD1; ENSG00000095627; TAA
AEQWKTIEL

SEQ ID NO: 83361 - protein, 9 aa, Homo sapiens
  misc_feature: Table A; Target 83361; HLA-B*40:01; TDRD1; ENSG00000095627; TAA
AEQWKTIEL

SEQ ID NO: 83362 - protein, 9 aa, Homo sapiens
  misc_feature: Table A; Target 83362; HLA-B*44:02; TDRD1; ENSG00000095627; TAA
AEQWKTIEL

SEQ ID NO: 83363 - protein, 9 aa, Homo sapiens
  misc_feature: Table A; Target 83363; HLA-B*44:03; TDRD1; ENSG00000095627; TAA
AEQWKTIEL

SEQ ID NO: 83364 - protein, 9 aa, Homo sapiens
  misc_feature: Table A; Target 83364; HLA-B*49:01; TDRD1; ENSG00000095627; TAA
AEQWKTIEL

SEQ ID NO: 83365 - protein, 9 aa, Homo sapiens
  misc_feature: Table A; Target 83365; HLA-B*40:02; TDRD1; ENSG00000095627; TAA
AERIMFSDL

SEQ ID NO: 83366 - protein, 9 aa, Homo sapiens
  misc_feature: Table A; Target 83366; HLA-B*49:01; TDRD1; ENSG00000095627; TAA
AERIMFSDL

SEQ ID NO: 83367 - protein, 10 aa, Homo sapiens
  misc_feature: Table A; Target 83367; HLA-B*44:03; TDRD1; ENSG00000095627; TAA
AESNSPPKEV

SEQ ID NO: 83368 - protein, 10 aa, Homo sapiens
  misc_feature: Table A; Target 83368; HLA-B*49:01; TDRD1; ENSG00000095627; TAA
AESNSPPKEV

SEQ ID NO: 83369 - protein, 9 aa, Homo sapiens
  misc_feature: Table A; Target 83369; HLA-C*14:02; TDRD1; ENSG00000095627; TAA
AFFAGDGSW

SEQ ID NO: 83370 - protein, 10 aa, Homo sapiens
  misc_feature: Table A; Target 83370; HLA-A*29:02; TDRD1; ENSG00000095627; TAA
AFFAGDGSWY

SEQ ID NO: 83371 - protein, 10 aa, Homo sapiens
  misc_feature: Table A; Target 83371; HLA-A*30:02; TDRD1; ENSG00000095627; TAA
AFFAGDGSWY

SEQ ID NO: 83372 - protein, 11 aa, Homo sapiens
  misc_feature: Table A; Target 83372; HLA-A*31:01; TDRD1; ENSG00000095627; TAA
AFFAGDGSWYR

SEQ ID NO: 83373 - protein, 8 aa, Homo sapiens
  misc_feature: Table A; Target 83373; HLA-C*12:03; TDRD1; ENSG00000095627; TAA
AGFAVGEQ

SEQ ID NO: 83374 - protein, 10 aa, Homo sapiens
  misc_feature: Table A; Target 83374; HLA-A*30:01; TDRD1; ENSG00000095627; TAA
AGFAVGEQSM

SEQ ID NO: 83375 - protein, 10 aa, Homo sapiens
  misc_feature: Table A; Target 83375; HLA-C*14:02; TDRD1; ENSG00000095627; TAA
AGFAVGEQSM

SEQ ID NO: 83376 - protein, 10 aa, Homo sapiens
  misc_feature: Table A; Target 83376; HLA-C*16:04; TDRD1; ENSG00000095627; TAA
AGFAVGEQSM

SEQ ID NO: 83377 - protein, 9 aa, Homo sapiens
  misc_feature: Table A; Target 83377; HLA-B*38:01; TDRD1; ENSG00000095627; TAA
AHIQTPEDF

SEQ ID NO: 83378 - protein, 10 aa, Homo sapiens
  misc_feature: Table A; Target 83378; HLA-B*38:01; TDRD1; ENSG00000095627; TAA
AHIQTPEDFF

SEQ ID NO: 83379 - protein, 11 aa, Homo sapiens
  misc_feature: Table A; Target 83379; HLA-A*03:01; TDRD1; ENSG00000095627; TAA
AIIQNVDVQQK

SEQ ID NO: 83380 - protein, 11 aa, Homo sapiens
  misc_feature: Table A; Target 83380; HLA-A*03:02; TDRD1; ENSG00000095627; TAA
AIIQNVDVQQK

SEQ ID NO: 83381 - protein, 11 aa, Homo sapiens
  misc_feature: Table A; Target 83381; HLA-A*68:01; TDRD1; ENSG00000095627; TAA
AIIQNVDVQQK

SEQ ID NO: 83382 - protein, 11 aa, Homo sapiens
  misc_feature: Table A; Target 83382; HLA-B*27:02; TDRD1; ENSG00000095627; TAA
AIIQNVDVQQK

SEQ ID NO: 83383 - protein, 11 aa, Homo sapiens
  misc_feature: Table A; Target 83383; HLA-C*07:06; TDRD1; ENSG00000095627; TAA
AIIQNVDVQQK

SEQ ID NO: 83384 - protein, 8 aa, Homo sapiens
  misc_feature: Table A; Target 83384; HLA-B*15:03; TDRD1; ENSG00000095627; TAA
AKYTSDDF

SEQ ID NO: 83385 - protein, 9 aa, Homo sapiens
  misc_feature: Table A; Target 83385; HLA-B*15:03; TDRD1; ENSG00000095627; TAA
AKYTVDQTW

SEQ ID NO: 83386 - protein, 9 aa, Homo sapiens
  misc_feature: Table A; Target 83386; HLA-B*58:01; TDRD1; ENSG00000095627; TAA
AKYTVDQTW

SEQ ID NO: 83387 - protein, 10 aa, Homo sapiens
  misc_feature: Table A; Target 83387; HLA-A*03:01; TDRD1; ENSG00000095627; TAA
ALKKLNDLNK

SEQ ID NO: 83388 - protein, 9 aa, Homo sapiens
  misc_feature: Table A; Target 83388; HLA-A*03:01; TDRD1; ENSG00000095627; TAA
ALNTEKMYR

SEQ ID NO: 83389 - protein, 9 aa, Homo sapiens
  misc_feature: Table A; Target 83389; HLA-A*03:02; TDRD1; ENSG00000095627; TAA
ALNTEKMYR

SEQ ID NO: 83390 - protein, 9 aa, Homo sapiens
  misc_feature: Table A; Target 83390; HLA-A*11:01; TDRD1; ENSG00000095627; TAA
ALNTEKMYR

SEQ ID NO: 83391 - protein, 9 aa, Homo sapiens
  misc_feature: Table A; Target 83391; HLA-A*31:01; TDRD1; ENSG00000095627; TAA
ALNTEKMYR

SEQ ID NO: 83392 - protein, 9 aa, Homo sapiens
  misc_feature: Table A; Target 83392; HLA-A*02:07; TDRD1; ENSG00000095627; TAA
ALPFQIIRC

SEQ ID NO: 83393 - protein, 8 aa, Homo sapiens
  misc_feature: Table A; Target 83393; HLA-B*07:02; TDRD1; ENSG00000095627; TAA
APKSRPPY

SEQ ID NO: 83394 - protein, 8 aa, Homo sapiens
  misc_feature: Table A; Target 83394; HLA-B*08:01; TDRD1; ENSG00000095627; TAA
APKSRPPY

SEQ ID NO: 83395 - protein, 9 aa, Homo sapiens
  misc_feature: Table A; Target 83395; HLA-B*27:05; TDRD1; ENSG00000095627; TAA
AQFSEDDQW

SEQ ID NO: 83396 - protein, 9 aa, Homo sapiens
  misc_feature: Table A; Target 83396; HLA-B*38:01; TDRD1; ENSG00000095627; TAA
AQFSEDDQW

SEQ ID NO: 83397 - protein, 8 aa, Homo sapiens
  misc_feature: Table A; Target 83397; HLA-C*05:01; TDRD1; ENSG00000095627; TAA
ASEESVLV

SEQ ID NO: 83398 - protein, 10 aa, Homo sapiens
  misc_feature: Table A; Target 83398; HLA-A*01:01; TDRD1; ENSG00000095627; TAA
ASEESVLVGY

SEQ ID NO: 83399 - protein, 10 aa, Homo sapiens
  misc_feature: Table A; Target 83399; HLA-A*11:01; TDRD1; ENSG00000095627; TAA
ASEESVLVGY

SEQ ID NO: 83400 - protein, 10 aa, Homo sapiens
  misc_feature: Table A; Target 83400; HLA-A*29:02; TDRD1; ENSG00000095627; TAA
ASEESVLVGY

SEQ ID NO: 83401 - protein, 10 aa, Homo sapiens
  misc_feature: Table A; Target 83401; HLA-A*30:02; TDRD1; ENSG00000095627; TAA
ASEESVLVGY

SEQ ID NO: 83402 - protein, 10 aa, Homo sapiens
  misc_feature: Table A; Target 83402; HLA-B*58:01; TDRD1; ENSG00000095627; TAA
ASEESVLVGY

SEQ ID NO: 83403 - protein, 10 aa, Homo sapiens
  misc_feature: Table A; Target 83403; HLA-C*05:01; TDRD1; ENSG00000095627; TAA
ASEESVLVGY

SEQ ID NO: 83404 - protein, 10 aa, Homo sapiens
  misc_feature: Table A; Target 83404; HLA-A*25:01; TDRD1; ENSG00000095627; TAA
ATKPLLMEQY

SEQ ID NO: 83405 - protein, 10 aa, Homo sapiens
  misc_feature: Table A; Target 83405; HLA-A*26:01; TDRD1; ENSG00000095627; TAA
ATKPLLMEQY

SEQ ID NO: 83406 - protein, 10 aa, Homo sapiens
  misc_feature: Table A; Target 83406; HLA-A*29:02; TDRD1; ENSG00000095627; TAA
ATKPLLMEQY

SEQ ID NO: 83407 - protein, 10 aa, Homo sapiens
  misc_feature: Table A; Target 83407; HLA-A*30:02; TDRD1; ENSG00000095627; TAA
ATKPLLMEQY

SEQ ID NO: 83408 - protein, 10 aa, Homo sapiens
  misc_feature: Table A; Target 83408; HLA-A*32:01; TDRD1; ENSG00000095627; TAA
ATKPLLMEQY

SEQ ID NO: 83409 - protein, 10 aa, Homo sapiens
  misc_feature: Table A; Target 83409; HLA-B*15:01; TDRD1; ENSG00000095627; TAA
ATKPLLMEQY

SEQ ID NO: 83410 - protein, 10 aa, Homo sapiens
  misc_feature: Table A; Target 83410; HLA-B*57:01; TDRD1; ENSG00000095627; TAA
ATKPLLMEQY

SEQ ID NO: 83411 - protein, 8 aa, Homo sapiens
  misc_feature: Table A; Target 83411; HLA-A*32:01; TDRD1; ENSG00000095627; TAA
ATSSAEQW

SEQ ID NO: 83412 - protein, 8 aa, Homo sapiens
  misc_feature: Table A; Target 83412; HLA-B*58:01; TDRD1; ENSG00000095627; TAA
ATSSAEQW

SEQ ID NO: 83413 - protein, 11 aa, Homo sapiens
  misc_feature: Table A; Target 83413; HLA-A*03:02; TDRD1; ENSG00000095627; TAA
AVEVELPNSGK

SEQ ID NO: 83414 - protein, 11 aa, Homo sapiens
  misc_feature: Table A; Target 83414; HLA-A*11:01; TDRD1; ENSG00000095627; TAA
AVEVELPNSGK

SEQ ID NO: 83415 - protein, 11 aa, Homo sapiens
  misc_feature: Table A; Target 83415; HLA-A*03:01; TDRD1; ENSG00000095627; TAA
AVGEQSMVTDK

SEQ ID NO: 83416 - protein, 11 aa, Homo sapiens
  misc_feature: Table A; Target 83416; HLA-A*03:02; TDRD1; ENSG00000095627; TAA
AVGEQSMVTDK

SEQ ID NO: 83417 - protein, 11 aa, Homo sapiens
  misc_feature: Table A; Target 83417; HLA-A*11:01; TDRD1; ENSG00000095627; TAA
AVGEQSMVTDK

SEQ ID NO: 83418 - protein, 9 aa, Homo sapiens
  misc_feature: Table A; Target 83418; HLA-A*24:02; TDRD1; ENSG00000095627; TAA
AYASEESVL

SEQ ID NO: 83419 - protein, 9 aa, Homo sapiens
  misc_feature: Table A; Target 83419; HLA-C*14:02; TDRD1; ENSG00000095627; TAA
AYASEESVL

SEQ ID NO: 83420 - protein, 9 aa, Homo sapiens
  misc_feature: Table A; Target 83420; HLA-C*16:02; TDRD1; ENSG00000095627; TAA
CCTELQKQV

SEQ ID NO: 83421 - protein, 8 aa, Homo sapiens
  misc_feature: Table A; Target 83421; HLA-B*37:01; TDRD1; ENSG00000095627; TAA
CEQTKQYL

SEQ ID NO: 83422 - protein, 9 aa, Homo sapiens
  misc_feature: Table A; Target 83422; HLA-B*38:01; TDRD1; ENSG00000095627; TAA
CHVLKEDAL

SEQ ID NO: 83423 - protein, 9 aa, Homo sapiens
  misc_feature: Table A; Target 83423; HLA-B*39:01; TDRD1; ENSG00000095627; TAA
CHVLKEDAL

SEQ ID NO: 83424 - protein, 10 aa, Homo sapiens
  misc_feature: Table A; Target 83424; HLA-A*29:02; TDRD1; ENSG00000095627; TAA
CMLTAELLEY

SEQ ID NO: 83425 - protein, 9 aa, Homo sapiens
  misc_feature: Table A; Target 83425; HLA-B*51:01; TDRD1; ENSG00000095627; TAA
CPLGVTKEI

SEQ ID NO: 83426 - protein, 10 aa, Homo sapiens
  misc_feature: Table A; Target 83426; HLA-B*56:01; TDRD1; ENSG00000095627; TAA
CPLGVTKEIA

SEQ ID NO: 83427 - protein, 9 aa, Homo sapiens
  misc_feature: Table A; Target 83427; HLA-A*31:01; TDRD1; ENSG00000095627; TAA
CQLADIQSR

SEQ ID NO: 83428 - protein, 9 aa, Homo sapiens
  misc_feature: Table A; Target 83428; HLA-B*15:01; TDRD1; ENSG00000095627; TAA
CQQKLPNGF

SEQ ID NO: 83429 - protein, 9 aa, Homo sapiens
  misc_feature: Table A; Target 83429; HLA-B*15:03; TDRD1; ENSG00000095627; TAA
CQQKLPNGF

SEQ ID NO: 83430 - protein, 10 aa, Homo sapiens
  misc_feature: Table A; Target 83430; HLA-A*11:01; TDRD1; ENSG00000095627; TAA
CTELQKQVEK

SEQ ID NO: 83431 - protein, 10 aa, Homo sapiens
  misc_feature: Table A; Target 83431; HLA-A*31:01; TDRD1; ENSG00000095627; TAA
CVAGIKLQAR

SEQ ID NO: 83432 - protein, 10 aa, Homo sapiens
  misc_feature: Table A; Target 83432; HLA-A*33:03; TDRD1; ENSG00000095627; TAA
CVAGIKLQAR

SEQ ID NO: 83433 - protein, 9 aa, Homo sapiens
  misc_feature: Table A; Target 83433; HLA-B*08:01; TDRD1; ENSG00000095627; TAA
DALKKLNDL

SEQ ID NO: 83434 - protein, 9 aa, Homo sapiens
  misc_feature: Table A; Target 83434; HLA-B*51:01; TDRD1; ENSG00000095627; TAA
DALKKLNDL

SEQ ID NO: 83435 - protein, 11 aa, Homo sapiens
  misc_feature: Table A; Target 83435; HLA-A*33:01; TDRD1; ENSG00000095627; TAA
DALKKLNDLNK

SEQ ID NO: 83436 - protein, 8 aa, Homo sapiens
  misc_feature: Table A; Target 83436; HLA-B*18:01; TDRD1; ENSG00000095627; TAA
DEFCGVVA

SEQ ID NO: 83437 - protein, 8 aa, Homo sapiens
  misc_feature: Table A; Target 83437; HLA-B*18:01; TDRD1; ENSG00000095627; TAA
DEHLVLKS

SEQ ID NO: 83438 - protein, 9 aa, Homo sapiens
  misc_feature: Table A; Target 83438; HLA-B*18:01; TDRD1; ENSG00000095627; TAA
DEHLVLKSA

SEQ ID NO: 83439 - protein, 8 aa, Homo sapiens
  misc_feature: Table A; Target 83439; HLA-B*18:01; TDRD1; ENSG00000095627; TAA
DELRMISS

SEQ ID NO: 83440 - protein, 9 aa, Homo sapiens
  misc_feature: Table A; Target 83440; HLA-B*18:01; TDRD1; ENSG00000095627; TAA
DELRMISST

SEQ ID NO: 83441 - protein, 10 aa, Homo sapiens
  misc_feature: Table A; Target 83441; HLA-B*18:01; TDRD1; ENSG00000095627; TAA
DELRMISSTF

SEQ ID NO: 83442 - protein, 10 aa, Homo sapiens
  misc_feature: Table A; Target 83442; HLA-B*44:02; TDRD1; ENSG00000095627; TAA
DELRMISSTF

SEQ ID NO: 83443 - protein, 10 aa, Homo sapiens
  misc_feature: Table A; Target 83443; HLA-B*44:03; TDRD1; ENSG00000095627; TAA
DELRMISSTF

SEQ ID NO: 83444 - protein, 9 aa, Homo sapiens
  misc_feature: Table A; Target 83444; HLA-B*18:01; TDRD1; ENSG00000095627; TAA
DHVLIEMGY

SEQ ID NO: 83445 - protein, 9 aa, Homo sapiens
  misc_feature: Table A; Target 83445; HLA-B*39:01; TDRD1; ENSG00000095627; TAA
DHVLIEMGY

SEQ ID NO: 83446 - protein, 11 aa, Homo sapiens
  misc_feature: Table A; Target 83446; HLA-B*38:01; TDRD1; ENSG00000095627; TAA
DHVLIEMGYGL

SEQ ID NO: 83447 - protein, 10 aa, Homo sapiens
  misc_feature: Table A; Target 83447; HLA-A*25:01; TDRD1; ENSG00000095627; TAA
DILEEEVVTF

SEQ ID NO: 83448 - protein, 10 aa, Homo sapiens
  misc_feature: Table A; Target 83448; HLA-A*26:01; TDRD1; ENSG00000095627; TAA
DILEEEVVTF

SEQ ID NO: 83449 - protein, 8 aa, Homo sapiens
  misc_feature: Table A; Target 83449; HLA-B*08:01; TDRD1; ENSG00000095627; TAA
DLIPKVLT

SEQ ID NO: 83450 - protein, 9 aa, Homo sapiens
  misc_feature: Table A; Target 83450; HLA-A*02:01; TDRD1; ENSG00000095627; TAA
DLIPKVLTL

SEQ ID NO: 83451 - protein, 9 aa, Homo sapiens
  misc_feature: Table A; Target 83451; HLA-A*02:03; TDRD1; ENSG00000095627; TAA
DLIPKVLTL

SEQ ID NO: 83452 - protein, 9 aa, Homo sapiens
  misc_feature: Table A; Target 83452; HLA-A*02:04; TDRD1; ENSG00000095627; TAA
DLIPKVLTL

SEQ ID NO: 83453 - protein, 9 aa, Homo sapiens
  misc_feature: Table A; Target 83453; HLA-A*25:01; TDRD1; ENSG00000095627; TAA
DLIPKVLTL

SEQ ID NO: 83454 - protein, 9 aa, Homo sapiens
  misc_feature: Table A; Target 83454; HLA-A*26:01; TDRD1; ENSG00000095627; TAA
DLIPKVLTL

SEQ ID NO: 83455 - protein, 9 aa, Homo sapiens
  misc_feature: Table A; Target 83455; HLA-A*33:01; TDRD1; ENSG00000095627; TAA
DLIPKVLTL

SEQ ID NO: 83456 - protein, 9 aa, Homo sapiens
  misc_feature: Table A; Target 83456; HLA-A*68:02; TDRD1; ENSG00000095627; TAA
DLIPKVLTL

SEQ ID NO: 83457 - protein, 9 aa, Homo sapiens
  misc_feature: Table A; Target 83457; HLA-B*08:01; TDRD1; ENSG00000095627; TAA
DLIPKVLTL

SEQ ID NO: 83458 - protein, 9 aa, Homo sapiens
  misc_feature: Table A; Target 83458; HLA-B*18:01; TDRD1; ENSG00000095627; TAA
DLIPKVLTL

SEQ ID NO: 83459 - protein, 9 aa, Homo sapiens
  misc_feature: Table A; Target 83459; HLA-B*51:01; TDRD1; ENSG00000095627; TAA
DLIPKVLTL

SEQ ID NO: 83460 - protein, 9 aa, Homo sapiens
  misc_feature: Table A; Target 83460; HLA-A*33:01; TDRD1; ENSG00000095627; TAA
DLNKSLAEH

SEQ ID NO: 83461 - protein, 10 aa, Homo sapiens
  misc_feature: Table A; Target 83461; HLA-A*33:01; TDRD1; ENSG00000095627; TAA
DLPNDRLVNK

SEQ ID NO: 83462 - protein, 9 aa, Homo sapiens
  misc_feature: Table A; Target 83462; HLA-A*33:01; TDRD1; ENSG00000095627; TAA
DLRSLQLKK

SEQ ID NO: 83463 - protein, 10 aa, Homo sapiens
  misc_feature: Table A; Target 83463; HLA-A*30:02; TDRD1; ENSG00000095627; TAA
DQLPPRSDFY

SEQ ID NO: 83464 - protein, 11 aa, Homo sapiens
  misc_feature: Table A; Target 83464; HLA-B*39:01; TDRD1; ENSG00000095627; TAA
DQSDPEDVGKM

SEQ ID NO: 83465 - protein, 9 aa, Homo sapiens
  misc_feature: Table A; Target 83465; HLA-B*08:01; TDRD1; ENSG00000095627; TAA
DQWYRASVL

SEQ ID NO: 83466 - protein, 8 aa, Homo sapiens
  misc_feature: Table A; Target 83466; HLA-A*01:01; TDRD1; ENSG00000095627; TAA
DTDVEVLY

SEQ ID NO: 83467 - protein, 8 aa, Homo sapiens
  misc_feature: Table A; Target 83467; HLA-C*03:03; TDRD1; ENSG00000095627; TAA
DTDVEVLY

SEQ ID NO: 83468 - protein, 8 aa, Homo sapiens
  misc_feature: Table A; Target 83468; HLA-C*04:01; TDRD1; ENSG00000095627; TAA
DTDVEVLY

SEQ ID NO: 83469 - protein, 8 aa, Homo sapiens
  misc_feature: Table A; Target 83469; HLA-C*05:01; TDRD1; ENSG00000095627; TAA
DTDVEVLY

SEQ ID NO: 83470 - protein, 9 aa, Homo sapiens
  misc_feature: Table A; Target 83470; HLA-A*01:01; TDRD1; ENSG00000095627; TAA
DTDVEVLYA

SEQ ID NO: 83471 - protein, 11 aa, Homo sapiens
  misc_feature: Table A; Target 83471; HLA-A*01:01; TDRD1; ENSG00000095627; TAA
DTDVEVLYADY

SEQ ID NO: 83472 - protein, 9 aa, Homo sapiens
  misc_feature: Table A; Target 83472; HLA-A*23:01; TDRD1; ENSG00000095627; TAA
DVADKLVTF

SEQ ID NO: 83473 - protein, 9 aa, Homo sapiens
  misc_feature: Table A; Target 83473; HLA-A*25:01; TDRD1; ENSG00000095627; TAA
DVADKLVTF

SEQ ID NO: 83474 - protein, 9 aa, Homo sapiens
  misc_feature: Table A; Target 83474; HLA-A*32:01; TDRD1; ENSG00000095627; TAA
DVADKLVTF

SEQ ID NO: 83475 - protein, 9 aa, Homo sapiens
  misc_feature: Table A; Target 83475; HLA-A*33:01; TDRD1; ENSG00000095627; TAA
DVADKLVTF

SEQ ID NO: 83476 - protein, 9 aa, Homo sapiens
  misc_feature: Table A; Target 83476; HLA-A*33:03; TDRD1; ENSG00000095627; TAA
DVADKLVTF

SEQ ID NO: 83477 - protein, 9 aa, Homo sapiens
  misc_feature: Table A; Target 83477; HLA-A*68:01; TDRD1; ENSG00000095627; TAA
DVADKLVTF

SEQ ID NO: 83478 - protein, 9 aa, Homo sapiens
  misc_feature: Table A; Target 83478; HLA-A*68:02; TDRD1; ENSG00000095627; TAA
DVADKLVTF

SEQ ID NO: 83479 - protein, 9 aa, Homo sapiens
  misc_feature: Table A; Target 83479; HLA-B*08:01; TDRD1; ENSG00000095627; TAA
DVADKLVTF

SEQ ID NO: 83480 - protein, 9 aa, Homo sapiens
  misc_feature: Table A; Target 83480; HLA-B*18:01; TDRD1; ENSG00000095627; TAA
DVADKLVTF

SEQ ID NO: 83481 - protein, 9 aa, Homo sapiens
  misc_feature: Table A; Target 83481; HLA-B*35:01; TDRD1; ENSG00000095627; TAA
DVADKLVTF

SEQ ID NO: 83482 - protein, 9 aa, Homo sapiens
  misc_feature: Table A; Target 83482; HLA-C*07:04; TDRD1; ENSG00000095627; TAA
DVADKLVTF

SEQ ID NO: 83483 - protein, 9 aa, Homo sapiens
  misc_feature: Table A; Target 83483; HLA-C*07:06; TDRD1; ENSG00000095627; TAA
DVADKLVTF

SEQ ID NO: 83484 - protein, 11 aa, Homo sapiens
  misc_feature: Table A; Target 83484; HLA-A*26:01; TDRD1; ENSG00000095627; TAA
DVADKLVTFGL

SEQ ID NO: 83485 - protein, 11 aa, Homo sapiens
  misc_feature: Table A; Target 83485; HLA-A*68:01; TDRD1; ENSG00000095627; TAA
DVADKLVTFGL

SEQ ID NO: 83486 - protein, 11 aa, Homo sapiens
  misc_feature: Table A; Target 83486; HLA-A*68:02; TDRD1; ENSG00000095627; TAA
DVADKLVTFGL

SEQ ID NO: 83487 - protein, 9 aa, Homo sapiens
  misc_feature: Table A; Target 83487; HLA-A*01:01; TDRD1; ENSG00000095627; TAA
DVEVLYADY

SEQ ID NO: 83488 - protein, 9 aa, Homo sapiens
  misc_feature: Table A; Target 83488; HLA-A*25:01; TDRD1; ENSG00000095627; TAA
DVEVLYADY

SEQ ID NO: 83489 - protein, 9 aa, Homo sapiens
  misc_feature: Table A; Target 83489; HLA-A*26:01; TDRD1; ENSG00000095627; TAA
DVEVLYADY

SEQ ID NO: 83490 - protein, 9 aa, Homo sapiens
  misc_feature: Table A; Target 83490; HLA-A*25:01; TDRD1; ENSG00000095627; TAA
DVKETSVPL

SEQ ID NO: 83491 - protein, 9 aa, Homo sapiens
  misc_feature: Table A; Target 83491; HLA-A*26:01; TDRD1; ENSG00000095627; TAA
DVKETSVPL

SEQ ID NO: 83492 - protein, 9 aa, Homo sapiens
  misc_feature: Table A; Target 83492; HLA-A*33:01; TDRD1; ENSG00000095627; TAA
DVKETSVPL

SEQ ID NO: 83493 - protein, 9 aa, Homo sapiens
  misc_feature: Table A; Target 83493; HLA-A*33:03; TDRD1; ENSG00000095627; TAA
DVKETSVPL

SEQ ID NO: 83494 - protein, 9 aa, Homo sapiens
  misc_feature: Table A; Target 83494; HLA-B*08:01; TDRD1; ENSG00000095627; TAA
DVKETSVPL

SEQ ID NO: 83495 - protein, 10 aa, Homo sapiens
  misc_feature: Table A; Target 83495; HLA-A*26:01; TDRD1; ENSG00000095627; TAA
DVKETSVPLG

SEQ ID NO: 83496 - protein, 11 aa, Homo sapiens
  misc_feature: Table A; Target 83496; HLA-A*68:01; TDRD1; ENSG00000095627; TAA
DVKETSVPLGV

SEQ ID NO: 83497 - protein, 11 aa, Homo sapiens
  misc_feature: Table A; Target 83497; HLA-A*33:01; TDRD1; ENSG00000095627; TAA
DVLIDEHLVLK

SEQ ID NO: 83498 - protein, 10 aa, Homo sapiens
  misc_feature: Table A; Target 83498; HLA-A*33:01; TDRD1; ENSG00000095627; TAA
DVQQKKAHVL

SEQ ID NO: 83499 - protein, 10 aa, Homo sapiens
  misc_feature: Table A; Target 83499; HLA-B*08:01; TDRD1; ENSG00000095627; TAA
DVQQKKAHVL

SEQ ID NO: 83500 - protein, 8 aa, Homo sapiens
  misc_feature: Table A; Target 83500; HLA-C*14:02; TDRD1; ENSG00000095627; TAA
DYGNIETL

SEQ ID NO: 83501 - protein, 9 aa, Homo sapiens
  misc_feature: Table A; Target 83501; HLA-C*14:02; TDRD1; ENSG00000095627; TAA
DYIPVKGEV

SEQ ID NO: 83502 - protein, 11 aa, Homo sapiens
  misc_feature: Table A; Target 83502; HLA-A*24:02; TDRD1; ENSG00000095627; TAA
DYIPVKGEVCI

SEQ ID NO: 83503 - protein, 8 aa, Homo sapiens
  misc_feature: Table A; Target 83503; HLA-B*08:01; TDRD1; ENSG00000095627; TAA
EAITRFQM

SEQ ID NO: 83504 - protein, 8 aa, Homo sapiens
  misc_feature: Table A; Target 83504; HLA-C*16:01; TDRD1; ENSG00000095627; TAA
EAITRFQM

SEQ ID NO: 83505 - protein, 9 aa, Homo sapiens
  misc_feature: Table A; Target 83505; HLA-B*08:01; TDRD1; ENSG00000095627; TAA
EAITRFQMC

SEQ ID NO: 83506 - protein, 9 aa, Homo sapiens
  misc_feature: Table A; Target 83506; HLA-A*30:01; TDRD1; ENSG00000095627; TAA
EEAITRFQM

SEQ ID NO: 83507 - protein, 9 aa, Homo sapiens
  misc_feature: Table A; Target 83507; HLA-B*18:01; TDRD1; ENSG00000095627; TAA
EEAITRFQM

SEQ ID NO: 83508 - protein, 9 aa, Homo sapiens
  misc_feature: Table A; Target 83508; HLA-B*37:01; TDRD1; ENSG00000095627; TAA
EEAITRFQM

SEQ ID NO: 83509 - protein, 9 aa, Homo sapiens
  misc_feature: Table A; Target 83509; HLA-B*40:01; TDRD1; ENSG00000095627; TAA
EEAITRFQM

SEQ ID NO: 83510 - protein, 9 aa, Homo sapiens
  misc_feature: Table A; Target 83510; HLA-B*44:02; TDRD1; ENSG00000095627; TAA
EEAITRFQM

SEQ ID NO: 83511 - protein, 9 aa, Homo sapiens
  misc_feature: Table A; Target 83511; HLA-B*44:03; TDRD1; ENSG00000095627; TAA
EEAITRFQM

SEQ ID NO: 83512 - protein, 9 aa, Homo sapiens
  misc_feature: Table A; Target 83512; HLA-B*49:01; TDRD1; ENSG00000095627; TAA
EEEVVTFAV

SEQ ID NO: 83513 - protein, 9 aa, Homo sapiens
  misc_feature: Table A; Target 83513; HLA-B*44:02; TDRD1; ENSG00000095627; TAA
EEIIPLNRI

SEQ ID NO: 83514 - protein, 9 aa, Homo sapiens
  misc_feature: Table A; Target 83514; HLA-B*44:03; TDRD1; ENSG00000095627; TAA
EEIIPLNRI

SEQ ID NO: 83515 - protein, 9 aa, Homo sapiens
  misc_feature: Table A; Target 83515; HLA-B*49:01; TDRD1; ENSG00000095627; TAA
EEIIPLNRI

SEQ ID NO: 83516 - protein, 10 aa, Homo sapiens
  misc_feature: Table A; Target 83516; HLA-B*18:01; TDRD1; ENSG00000095627; TAA
EEIIPLNRIY

SEQ ID NO: 83517 - protein, 10 aa, Homo sapiens
  misc_feature: Table A; Target 83517; HLA-C*16:04; TDRD1; ENSG00000095627; TAA
EEIIPLNRIY

SEQ ID NO: 83518 - protein, 8 aa, Homo sapiens
  misc_feature: Table A; Target 83518; HLA-B*37:01; TDRD1; ENSG00000095627; TAA
EESVLVGY

SEQ ID NO: 83519 - protein, 8 aa, Homo sapiens
  misc_feature: Table A; Target 83519; HLA-B*44:02; TDRD1; ENSG00000095627; TAA
EESVLVGY

SEQ ID NO: 83520 - protein, 8 aa, Homo sapiens
  misc_feature: Table A; Target 83520; HLA-B*44:03; TDRD1; ENSG00000095627; TAA
EESVLVGY

SEQ ID NO: 83521 - protein, 8 aa, Homo sapiens
  misc_feature: Table A; Target 83521; HLA-C*04:01; TDRD1; ENSG00000095627; TAA
EESVLVGY

SEQ ID NO: 83522 - protein, 8 aa, Homo sapiens
  misc_feature: Table A; Target 83522; HLA-C*16:04; TDRD1; ENSG00000095627; TAA
EESVLVGY

SEQ ID NO: 83523 - protein, 9 aa, Homo sapiens
  misc_feature: Table A; Target 83523; HLA-B*44:02; TDRD1; ENSG00000095627; TAA
EESVLVGYV

SEQ ID NO: 83524 - protein, 9 aa, Homo sapiens
  misc_feature: Table A; Target 83524; HLA-B*44:03; TDRD1; ENSG00000095627; TAA
EESVLVGYV

SEQ ID NO: 83525 - protein, 9 aa, Homo sapiens
  misc_feature: Table A; Target 83525; HLA-B*49:01; TDRD1; ENSG00000095627; TAA
EESVLVGYV

SEQ ID NO: 83526 - protein, 11 aa, Homo sapiens
  misc_feature: Table A; Target 83526; HLA-B*18:01; TDRD1; ENSG00000095627; TAA
EESVLVGYVDY

SEQ ID NO: 83527 - protein, 11 aa, Homo sapiens
  misc_feature: Table A; Target 83527; HLA-B*44:02; TDRD1; ENSG00000095627; TAA
EESVLVGYVDY

SEQ ID NO: 83528 - protein, 11 aa, Homo sapiens
  misc_feature: Table A; Target 83528; HLA-B*44:03; TDRD1; ENSG00000095627; TAA
EESVLVGYVDY

SEQ ID NO: 83529 - protein, 8 aa, Homo sapiens
  misc_feature: Table A; Target 83529; HLA-B*18:01; TDRD1; ENSG00000095627; TAA
EEVTADEL

SEQ ID NO: 83530 - protein, 8 aa, Homo sapiens
  misc_feature: Table A; Target 83530; HLA-B*40:01; TDRD1; ENSG00000095627; TAA
EEVTADEL

SEQ ID NO: 83531 - protein, 10 aa, Homo sapiens
  misc_feature: Table A; Target 83531; HLA-B*40:01; TDRD1; ENSG00000095627; TAA
EEVTADELRM

SEQ ID NO: 83532 - protein, 10 aa, Homo sapiens
  misc_feature: Table A; Target 83532; HLA-B*44:03; TDRD1; ENSG00000095627; TAA
EEVTADELRM

SEQ ID NO: 83533 - protein, 11 aa, Homo sapiens
  misc_feature: Table A; Target 83533; HLA-B*44:02; TDRD1; ENSG00000095627; TAA
EEVTADELRMI

SEQ ID NO: 83534 - protein, 11 aa, Homo sapiens
  misc_feature: Table A; Target 83534; HLA-B*44:03; TDRD1; ENSG00000095627; TAA
EEVTADELRMI

SEQ ID NO: 83535 - protein, 11 aa, Homo sapiens
  misc_feature: Table A; Target 83535; HLA-B*49:01; TDRD1; ENSG00000095627; TAA
EEVTADELRMI

SEQ ID NO: 83536 - protein, 11 aa, Homo sapiens
  misc_feature: Table A; Target 83536; HLA-C*16:04; TDRD1; ENSG00000095627; TAA
EEVTADELRMI

SEQ ID NO: 83537 - protein, 8 aa, Homo sapiens
  misc_feature: Table A; Target 83537; HLA-A*30:01; TDRD1; ENSG00000095627; TAA
EEVVTFAV

SEQ ID NO: 83538 - protein, 8 aa, Homo sapiens
  misc_feature: Table A; Target 83538; HLA-B*18:01; TDRD1; ENSG00000095627; TAA
EEVVTFAV

SEQ ID NO: 83539 - protein, 8 aa, Homo sapiens
  misc_feature: Table A; Target 83539; HLA-B*49:01; TDRD1; ENSG00000095627; TAA
EEVVTFAV

SEQ ID NO: 83540 - protein, 10 aa, Homo sapiens
  misc_feature: Table A; Target 83540; HLA-B*49:01; TDRD1; ENSG00000095627; TAA
EEVVTFAVEV

SEQ ID NO: 83541 - protein, 9 aa, Homo sapiens
  misc_feature: Table A; Target 83541; HLA-A*68:02; TDRD1; ENSG00000095627; TAA
EIAIWAERI

SEQ ID NO: 83542 - protein, 9 aa, Homo sapiens
  misc_feature: Table A; Target 83542; HLA-A*26:01; TDRD1; ENSG00000095627; TAA
EIIPLNRIY

SEQ ID NO: 83543 - protein, 9 aa, Homo sapiens
  misc_feature: Table A; Target 83543; HLA-B*44:02; TDRD1; ENSG00000095627; TAA
EIIPLNRIY

SEQ ID NO: 83544 - protein, 9 aa, Homo sapiens
  misc_feature: Table A; Target 83544; HLA-B*44:03; TDRD1; ENSG00000095627; TAA
EIIPLNRIY

SEQ ID NO: 83545 - protein, 11 aa, Homo sapiens
  misc_feature: Table A; Target 83545; HLA-A*68:02; TDRD1; ENSG00000095627; TAA
EIIPLNRIYHL

SEQ ID NO: 83546 - protein, 9 aa, Homo sapiens
  misc_feature: Table A; Target 83546; HLA-A*01:01; TDRD1; ENSG00000095627; TAA
EIISPNLFY

SEQ ID NO: 83547 - protein, 9 aa, Homo sapiens
  misc_feature: Table A; Target 83547; HLA-A*25:01; TDRD1; ENSG00000095627; TAA
EIISPNLFY

SEQ ID NO: 83548 - protein, 9 aa, Homo sapiens
  misc_feature: Table A; Target 83548; HLA-A*26:01; TDRD1; ENSG00000095627; TAA
EIISPNLFY

SEQ ID NO: 83549 - protein, 9 aa, Homo sapiens
  misc_feature: Table A; Target 83549; HLA-A*29:02; TDRD1; ENSG00000095627; TAA
EIISPNLFY

SEQ ID NO: 83550 - protein, 10 aa, Homo sapiens
  misc_feature: Table A; Target 83550; HLA-A*68:02; TDRD1; ENSG00000095627; TAA
EIISPNLFYA

SEQ ID NO: 83551 - protein, 11 aa, Homo sapiens
  misc_feature: Table A; Target 83551; HLA-A*68:02; TDRD1; ENSG00000095627; TAA
EIISPNLFYAL

SEQ ID NO: 83552 - protein, 9 aa, Homo sapiens
  misc_feature: Table A; Target 83552; HLA-A*23:01; TDRD1; ENSG00000095627; TAA
EIKGTVTEF

SEQ ID NO: 83553 - protein, 9 aa, Homo sapiens
  misc_feature: Table A; Target 83553; HLA-A*25:01; TDRD1; ENSG00000095627; TAA
EIKGTVTEF

SEQ ID NO: 83554 - protein, 9 aa, Homo sapiens
  misc_feature: Table A; Target 83554; HLA-A*32:01; TDRD1; ENSG00000095627; TAA
EIKGTVTEF

SEQ ID NO: 83555 - protein, 9 aa, Homo sapiens
  misc_feature: Table A; Target 83555; HLA-A*33:01; TDRD1; ENSG00000095627; TAA
EIKGTVTEF

SEQ ID NO: 83556 - protein, 9 aa, Homo sapiens
  misc_feature: Table A; Target 83556; HLA-A*33:03; TDRD1; ENSG00000095627; TAA
EIKGTVTEF

SEQ ID NO: 83557 - protein, 9 aa, Homo sapiens
  misc_feature: Table A; Target 83557; HLA-A*68:01; TDRD1; ENSG00000095627; TAA
EIKGTVTEF

SEQ ID NO: 83558 - protein, 9 aa, Homo sapiens
  misc_feature: Table A; Target 83558; HLA-B*08:01; TDRD1; ENSG00000095627; TAA
EIKGTVTEF

SEQ ID NO: 83559 - protein, 9 aa, Homo sapiens
  misc_feature: Table A; Target 83559; HLA-B*15:01; TDRD1; ENSG00000095627; TAA
EIKGTVTEF

SEQ ID NO: 83560 - protein, 9 aa, Homo sapiens
  misc_feature: Table A; Target 83560; HLA-B*46:01; TDRD1; ENSG00000095627; TAA
EIKGTVTEF

SEQ ID NO: 83561 - protein, 9 aa, Homo sapiens
  misc_feature: Table A; Target 83561; HLA-C*01:02; TDRD1; ENSG00000095627; TAA
EIKGTVTEF

SEQ ID NO: 83562 - protein, 9 aa, Homo sapiens
  misc_feature: Table A; Target 83562; HLA-C*07:04; TDRD1; ENSG00000095627; TAA
EIKGTVTEF

SEQ ID NO: 83563 - protein, 9 aa, Homo sapiens
  misc_feature: Table A; Target 83563; HLA-C*07:06; TDRD1; ENSG00000095627; TAA
EIKGTVTEF

SEQ ID NO: 83564 - protein, 9 aa, Homo sapiens
  misc_feature: Table A; Target 83564; HLA-C*14:02; TDRD1; ENSG00000095627; TAA
EIKGTVTEF

SEQ ID NO: 83565 - protein, 10 aa, Homo sapiens
  misc_feature: Table A; Target 83565; HLA-A*33:03; TDRD1; ENSG00000095627; TAA
EIKGTVTEFK

SEQ ID NO: 83566 - protein, 10 aa, Homo sapiens
  misc_feature: Table A; Target 83566; HLA-A*68:01; TDRD1; ENSG00000095627; TAA
EIKGTVTEFK

SEQ ID NO: 83567 - protein, 9 aa, Homo sapiens
  misc_feature: Table A; Target 83567; HLA-A*33:01; TDRD1; ENSG00000095627; TAA
EILPNGHVK

SEQ ID NO: 83568 - protein, 9 aa, Homo sapiens
  misc_feature: Table A; Target 83568; HLA-A*33:03; TDRD1; ENSG00000095627; TAA
EILPNGHVK

SEQ ID NO: 83569 - protein, 9 aa, Homo sapiens
  misc_feature: Table A; Target 83569; HLA-A*68:01; TDRD1; ENSG00000095627; TAA
EILPNGHVK

SEQ ID NO: 83570 - protein, 10 aa, Homo sapiens
  misc_feature: Table A; Target 83570; HLA-A*68:02; TDRD1; ENSG00000095627; TAA
EILPNGHVKV

SEQ ID NO: 83571 - protein, 11 aa, Homo sapiens
  misc_feature: Table A; Target 83571; HLA-A*26:01; TDRD1; ENSG00000095627; TAA
ELIDKSETPHV

SEQ ID NO: 83572 - protein, 9 aa, Homo sapiens
  misc_feature: Table A; Target 83572; HLA-A*25:01; TDRD1; ENSG00000095627; TAA
ELNGSSSQL

SEQ ID NO: 83573 - protein, 9 aa, Homo sapiens
  misc_feature: Table A; Target 83573; HLA-A*26:01; TDRD1; ENSG00000095627; TAA
ELNGSSSQL

SEQ ID NO: 83574 - protein, 9 aa, Homo sapiens
  misc_feature: Table A; Target 83574; HLA-A*01:01; TDRD1; ENSG00000095627; TAA
ELQASLSKY

SEQ ID NO: 83575 - protein, 9 aa, Homo sapiens
  misc_feature: Table A; Target 83575; HLA-A*25:01; TDRD1; ENSG00000095627; TAA
ELQASLSKY

SEQ ID NO: 83576 - protein, 9 aa, Homo sapiens
  misc_feature: Table A; Target 83576; HLA-A*26:01; TDRD1; ENSG00000095627; TAA
ELQASLSKY

SEQ ID NO: 83577 - protein, 9 aa, Homo sapiens
  misc_feature: Table A; Target 83577; HLA-A*30:02; TDRD1; ENSG00000095627; TAA
ELQASLSKY

SEQ ID NO: 83578 - protein, 9 aa, Homo sapiens
  misc_feature: Table A; Target 83578; HLA-A*33:03; TDRD1; ENSG00000095627; TAA
ELQASLSKY

SEQ ID NO: 83579 - protein, 9 aa, Homo sapiens
  misc_feature: Table A; Target 83579; HLA-B*15:01; TDRD1; ENSG00000095627; TAA
ELQASLSKY

SEQ ID NO: 83580 - protein, 9 aa, Homo sapiens
  misc_feature: Table A; Target 83580; HLA-B*44:02; TDRD1; ENSG00000095627; TAA
ELQASLSKY

SEQ ID NO: 83581 - protein, 9 aa, Homo sapiens
  misc_feature: Table A; Target 83581; HLA-B*44:03; TDRD1; ENSG00000095627; TAA
ELQASLSKY

SEQ ID NO: 83582 - protein, 9 aa, Homo sapiens
  misc_feature: Table A; Target 83582; HLA-C*07:04; TDRD1; ENSG00000095627; TAA
ELQASLSKY

SEQ ID NO: 83583 - protein, 9 aa, Homo sapiens
  misc_feature: Table A; Target 83583; HLA-A*02:04; TDRD1; ENSG00000095627; TAA
ELQVHVQGL

SEQ ID NO: 83584 - protein, 9 aa, Homo sapiens
  misc_feature: Table A; Target 83584; HLA-A*25:01; TDRD1; ENSG00000095627; TAA
ELQVHVQGL

SEQ ID NO: 83585 - protein, 9 aa, Homo sapiens
  misc_feature: Table A; Target 83585; HLA-B*08:01; TDRD1; ENSG00000095627; TAA
ELQVHVQGL

SEQ ID NO: 83586 - protein, 9 aa, Homo sapiens
  misc_feature: Table A; Target 83586; HLA-A*25:01; TDRD1; ENSG00000095627; TAA
ELRMISSTF

SEQ ID NO: 83587 - protein, 9 aa, Homo sapiens
  misc_feature: Table A; Target 83587; HLA-A*26:01; TDRD1; ENSG00000095627; TAA
ELRMISSTF

SEQ ID NO: 83588 - protein, 9 aa, Homo sapiens
  misc_feature: Table A; Target 83588; HLA-A*25:01; TDRD1; ENSG00000095627; TAA
ELTDLSTCY

SEQ ID NO: 83589 - protein, 9 aa, Homo sapiens
  misc_feature: Table A; Target 83589; HLA-A*26:01; TDRD1; ENSG00000095627; TAA
ELTDLSTCY

SEQ ID NO: 83590 - protein, 9 aa, Homo sapiens
  misc_feature: Table A; Target 83590; HLA-A*29:02; TDRD1; ENSG00000095627; TAA
ELTDLSTCY

SEQ ID NO: 83591 - protein, 9 aa, Homo sapiens
  misc_feature: Table A; Target 83591; HLA-A*30:02; TDRD1; ENSG00000095627; TAA
ELTDLSTCY

SEQ ID NO: 83592 - protein, 9 aa, Homo sapiens
  misc_feature: Table A; Target 83592; HLA-B*15:01; TDRD1; ENSG00000095627; TAA
ELTDLSTCY

SEQ ID NO: 83593 - protein, 9 aa, Homo sapiens
  misc_feature: Table A; Target 83593; HLA-B*18:01; TDRD1; ENSG00000095627; TAA
ELTDLSTCY

SEQ ID NO: 83594 - protein, 9 aa, Homo sapiens
  misc_feature: Table A; Target 83594; HLA-C*07:04; TDRD1; ENSG00000095627; TAA
ELTDLSTCY

SEQ ID NO: 83595 - protein, 9 aa, Homo sapiens
  misc_feature: Table A; Target 83595; HLA-A*33:01; TDRD1; ENSG00000095627; TAA
ENKLPPHES

SEQ ID NO: 83596 - protein, 11 aa, Homo sapiens
  misc_feature: Table A; Target 83596; HLA-A*33:01; TDRD1; ENSG00000095627; TAA
ENKLPPHESLR

SEQ ID NO: 83597 - protein, 9 aa, Homo sapiens
  misc_feature: Table A; Target 83597; HLA-A*33:01; TDRD1; ENSG00000095627; TAA
ENKSSIETK

SEQ ID NO: 83598 - protein, 9 aa, Homo sapiens
  misc_feature: Table A; Target 83598; HLA-A*33:03; TDRD1; ENSG00000095627; TAA
ENKSSIETK

SEQ ID NO: 83599 - protein, 9 aa, Homo sapiens
  misc_feature: Table A; Target 83599; HLA-A*68:02; TDRD1; ENSG00000095627; TAA
ENSSLVELI

SEQ ID NO: 83600 - protein, 11 aa, Homo sapiens
  misc_feature: Table A; Target 83600; HLA-B*27:02; TDRD1; ENSG00000095627; TAA
ENSSLVELIDK

SEQ ID NO: 83601 - protein, 11 aa, Homo sapiens
  misc_feature: Table A; Target 83601; HLA-A*33:03; TDRD1; ENSG00000095627; TAA
EPFNFEKNENK

SEQ ID NO: 83602 - protein, 11 aa, Homo sapiens
  misc_feature: Table A; Target 83602; HLA-A*68:01; TDRD1; ENSG00000095627; TAA
EPFNFEKNENK

SEQ ID NO: 83603 - protein, 10 aa, Homo sapiens
  misc_feature: Table A; Target 83603; HLA-A*01:01; TDRD1; ENSG00000095627; TAA
ESVLVGYVDY

SEQ ID NO: 83604 - protein, 10 aa, Homo sapiens
  misc_feature: Table A; Target 83604; HLA-A*25:01; TDRD1; ENSG00000095627; TAA
ESVLVGYVDY

SEQ ID NO: 83605 - protein, 10 aa, Homo sapiens
  misc_feature: Table A; Target 83605; HLA-A*26:01; TDRD1; ENSG00000095627; TAA
ESVLVGYVDY

SEQ ID NO: 83606 - protein, 10 aa, Homo sapiens
  misc_feature: Table A; Target 83606; HLA-A*25:01; TDRD1; ENSG00000095627; TAA
ETKDVEVNNK

SEQ ID NO: 83607 - protein, 10 aa, Homo sapiens
  misc_feature: Table A; Target 83607; HLA-A*26:01; TDRD1; ENSG00000095627; TAA
ETKDVEVNNK

SEQ ID NO: 83608 - protein, 10 aa, Homo sapiens
  misc_feature: Table A; Target 83608; HLA-A*33:01; TDRD1; ENSG00000095627; TAA
ETKDVEVNNK

SEQ ID NO: 83609 - protein, 10 aa, Homo sapiens
  misc_feature: Table A; Target 83609; HLA-A*33:03; TDRD1; ENSG00000095627; TAA
ETKDVEVNNK

SEQ ID NO: 83610 - protein, 10 aa, Homo sapiens
  misc_feature: Table A; Target 83610; HLA-A*68:01; TDRD1; ENSG00000095627; TAA
ETKDVEVNNK

SEQ ID NO: 83611 - protein, 10 aa, Homo sapiens
  misc_feature: Table A; Target 83611; HLA-C*07:06; TDRD1; ENSG00000095627; TAA
ETKDVEVNNK

SEQ ID NO: 83612 - protein, 9 aa, Homo sapiens
  misc_feature: Table A; Target 83612; HLA-A*33:01; TDRD1; ENSG00000095627; TAA
ETPHVSVSK

SEQ ID NO: 83613 - protein, 9 aa, Homo sapiens
  misc_feature: Table A; Target 83613; HLA-A*33:03; TDRD1; ENSG00000095627; TAA
ETPHVSVSK

SEQ ID NO: 83614 - protein, 9 aa, Homo sapiens
  misc_feature: Table A; Target 83614; HLA-A*68:01; TDRD1; ENSG00000095627; TAA
ETPHVSVSK

SEQ ID NO: 83615 - protein, 9 aa, Homo sapiens
  misc_feature: Table A; Target 83615; HLA-C*07:06; TDRD1; ENSG00000095627; TAA
ETPHVSVSK

SEQ ID NO: 83616 - protein, 10 aa, Homo sapiens
  misc_feature: Table A; Target 83616; HLA-A*25:01; TDRD1; ENSG00000095627; TAA
ETPHVSVSKV

SEQ ID NO: 83617 - protein, 10 aa, Homo sapiens
  misc_feature: Table A; Target 83617; HLA-A*26:01; TDRD1; ENSG00000095627; TAA
ETPHVSVSKV

SEQ ID NO: 83618 - protein, 10 aa, Homo sapiens
  misc_feature: Table A; Target 83618; HLA-A*68:02; TDRD1; ENSG00000095627; TAA
ETPHVSVSKV

SEQ ID NO: 83619 - protein, 11 aa, Homo sapiens
  misc_feature: Table A; Target 83619; HLA-A*68:01; TDRD1; ENSG00000095627; TAA
ETSVPLGVEGK

SEQ ID NO: 83620 - protein, 9 aa, Homo sapiens
  misc_feature: Table A; Target 83620; HLA-A*01:01; TDRD1; ENSG00000095627; TAA
ETYANVHEK

SEQ ID NO: 83621 - protein, 9 aa, Homo sapiens
  misc_feature: Table A; Target 83621; HLA-A*03:01; TDRD1; ENSG00000095627; TAA
ETYANVHEK

SEQ ID NO: 83622 - protein, 9 aa, Homo sapiens
  misc_feature: Table A; Target 83622; HLA-A*03:02; TDRD1; ENSG00000095627; TAA
ETYANVHEK

SEQ ID NO: 83623 - protein, 9 aa, Homo sapiens
  misc_feature: Table A; Target 83623; HLA-A*11:01; TDRD1; ENSG00000095627; TAA
ETYANVHEK

SEQ ID NO: 83624 - protein, 9 aa, Homo sapiens
  misc_feature: Table A; Target 83624; HLA-A*25:01; TDRD1; ENSG00000095627; TAA
ETYANVHEK

SEQ ID NO: 83625 - protein, 9 aa, Homo sapiens
  misc_feature: Table A; Target 83625; HLA-A*26:01; TDRD1; ENSG00000095627; TAA
ETYANVHEK

SEQ ID NO: 83626 - protein, 9 aa, Homo sapiens
  misc_feature: Table A; Target 83626; HLA-A*33:01; TDRD1; ENSG00000095627; TAA
ETYANVHEK

SEQ ID NO: 83627 - protein, 9 aa, Homo sapiens
  misc_feature: Table A; Target 83627; HLA-A*33:03; TDRD1; ENSG00000095627; TAA
ETYANVHEK

SEQ ID NO: 83628 - protein, 9 aa, Homo sapiens
  misc_feature: Table A; Target 83628; HLA-A*68:01; TDRD1; ENSG00000095627; TAA
ETYANVHEK

SEQ ID NO: 83629 - protein, 9 aa, Homo sapiens
  misc_feature: Table A; Target 83629; HLA-C*07:06; TDRD1; ENSG00000095627; TAA
ETYANVHEK

SEQ ID NO: 83630 - protein, 9 aa, Homo sapiens
  misc_feature: Table A; Target 83630; HLA-A*25:01; TDRD1; ENSG00000095627; TAA
EVLEYMNQL

SEQ ID NO: 83631 - protein, 9 aa, Homo sapiens
  misc_feature: Table A; Target 83631; HLA-A*26:01; TDRD1; ENSG00000095627; TAA
EVLEYMNQL

SEQ ID NO: 83632 - protein, 9 aa, Homo sapiens
  misc_feature: Table A; Target 83632; HLA-A*33:01; TDRD1; ENSG00000095627; TAA
EVLEYMNQL

SEQ ID NO: 83633 - protein, 9 aa, Homo sapiens
  misc_feature: Table A; Target 83633; HLA-A*33:03; TDRD1; ENSG00000095627; TAA
EVLEYMNQL

SEQ ID NO: 83634 - protein, 9 aa, Homo sapiens
  misc_feature: Table A; Target 83634; HLA-A*68:01; TDRD1; ENSG00000095627; TAA
EVLEYMNQL

SEQ ID NO: 83635 - protein, 9 aa, Homo sapiens
  misc_feature: Table A; Target 83635; HLA-A*68:02; TDRD1; ENSG00000095627; TAA
EVLEYMNQL

SEQ ID NO: 83636 - protein, 9 aa, Homo sapiens
  misc_feature: Table A; Target 83636; HLA-B*35:03; TDRD1; ENSG00000095627; TAA
EVLEYMNQL

SEQ ID NO: 83637 - protein, 9 aa, Homo sapiens
  misc_feature: Table A; Target 83637; HLA-C*01:02; TDRD1; ENSG00000095627; TAA
EVLEYMNQL

SEQ ID NO: 83638 - protein, 9 aa, Homo sapiens
  misc_feature: Table A; Target 83638; HLA-C*07:06; TDRD1; ENSG00000095627; TAA
EVLEYMNQL

SEQ ID NO: 83639 - protein, 11 aa, Homo sapiens
  misc_feature: Table A; Target 83639; HLA-A*33:01; TDRD1; ENSG00000095627; TAA
EVNIKPGNNVR

SEQ ID NO: 83640 - protein, 11 aa, Homo sapiens
  misc_feature: Table A; Target 83640; HLA-A*33:03; TDRD1; ENSG00000095627; TAA
EVNIKPGNNVR

SEQ ID NO: 83641 - protein, 9 aa, Homo sapiens
  misc_feature: Table A; Target 83641; HLA-A*26:01; TDRD1; ENSG00000095627; TAA
EVTADELRM

SEQ ID NO: 83642 - protein, 10 aa, Homo sapiens
  misc_feature: Table A; Target 83642; HLA-A*25:01; TDRD1; ENSG00000095627; TAA
EVTADELRMI

SEQ ID NO: 83643 - protein, 9 aa, Homo sapiens
  misc_feature: Table A; Target 83643; HLA-A*25:01; TDRD1; ENSG00000095627; TAA
EVTENGIGV

SEQ ID NO: 83644 - protein, 9 aa, Homo sapiens
  misc_feature: Table A; Target 83644; HLA-A*26:01; TDRD1; ENSG00000095627; TAA
EVTENGIGV

SEQ ID NO: 83645 - protein, 9 aa, Homo sapiens
  misc_feature: Table A; Target 83645; HLA-A*68:01; TDRD1; ENSG00000095627; TAA
EVTENGIGV

SEQ ID NO: 83646 - protein, 9 aa, Homo sapiens
  misc_feature: Table A; Target 83646; HLA-A*68:02; TDRD1; ENSG00000095627; TAA
EVTENGIGV

SEQ ID NO: 83647 - protein, 11 aa, Homo sapiens
  misc_feature: Table A; Target 83647; HLA-A*25:01; TDRD1; ENSG00000095627; TAA
EVTENGIGVEL

SEQ ID NO: 83648 - protein, 11 aa, Homo sapiens
  misc_feature: Table A; Target 83648; HLA-A*26:01; TDRD1; ENSG00000095627; TAA
EVTENGIGVEL

SEQ ID NO: 83649 - protein, 11 aa, Homo sapiens
  misc_feature: Table A; Target 83649; HLA-A*33:03; TDRD1; ENSG00000095627; TAA
EVTENGIGVEL

SEQ ID NO: 83650 - protein, 11 aa, Homo sapiens
  misc_feature: Table A; Target 83650; HLA-A*68:01; TDRD1; ENSG00000095627; TAA
EVTENGIGVEL

SEQ ID NO: 83651 - protein, 11 aa, Homo sapiens
  misc_feature: Table A; Target 83651; HLA-A*68:02; TDRD1; ENSG00000095627; TAA
EVTENGIGVEL

SEQ ID NO: 83652 - protein, 11 aa, Homo sapiens
  misc_feature: Table A; Target 83652; HLA-B*39:01; TDRD1; ENSG00000095627; TAA
EVTENGIGVEL

SEQ ID NO: 83653 - protein, 10 aa, Homo sapiens
  misc_feature: Table A; Target 83653; HLA-A*68:01; TDRD1; ENSG00000095627; TAA
EVVGSKGDRK

SEQ ID NO: 83654 - protein, 9 aa, Homo sapiens
  misc_feature: Table A; Target 83654; HLA-A*25:01; TDRD1; ENSG00000095627; TAA
EVVTFAVEV

SEQ ID NO: 83655 - protein, 9 aa, Homo sapiens
  misc_feature: Table A; Target 83655; HLA-A*26:01; TDRD1; ENSG00000095627; TAA
EVVTFAVEV

SEQ ID NO: 83656 - protein, 9 aa, Homo sapiens
  misc_feature: Table A; Target 83656; HLA-A*33:03; TDRD1; ENSG00000095627; TAA
EVVTFAVEV

SEQ ID NO: 83657 - protein, 9 aa, Homo sapiens
  misc_feature: Table A; Target 83657; HLA-A*68:01; TDRD1; ENSG00000095627; TAA
EVVTFAVEV

SEQ ID NO: 83658 - protein, 9 aa, Homo sapiens
  misc_feature: Table A; Target 83658; HLA-B*13:02; TDRD1; ENSG00000095627; TAA
EVVTFAVEV

SEQ ID NO: 83659 - protein, 9 aa, Homo sapiens
  misc_feature: Table A; Target 83659; HLA-C*07:06; TDRD1; ENSG00000095627; TAA
EVVTFAVEV

SEQ ID NO: 83660 - protein, 11 aa, Homo sapiens
  misc_feature: Table A; Target 83660; HLA-A*68:02; TDRD1; ENSG00000095627; TAA
EVVTFAVEVEL

SEQ ID NO: 83661 - protein, 9 aa, Homo sapiens
  misc_feature: Table A; Target 83661; HLA-A*33:01; TDRD1; ENSG00000095627; TAA
EYCNAPKSR

SEQ ID NO: 83662 - protein, 9 aa, Homo sapiens
  misc_feature: Table A; Target 83662; HLA-A*33:03; TDRD1; ENSG00000095627; TAA
EYCNAPKSR

SEQ ID NO: 83663 - protein, 10 aa, Homo sapiens
  misc_feature: Table A; Target 83663; HLA-A*23:01; TDRD1; ENSG00000095627; TAA
EYMNQLSASL

SEQ ID NO: 83664 - protein, 10 aa, Homo sapiens
  misc_feature: Table A; Target 83664; HLA-A*24:02; TDRD1; ENSG00000095627; TAA
EYMNQLSASL

SEQ ID NO: 83665 - protein, 10 aa, Homo sapiens
  misc_feature: Table A; Target 83665; HLA-A*33:03; TDRD1; ENSG00000095627; TAA
EYMNQLSASL

SEQ ID NO: 83666 - protein, 10 aa, Homo sapiens
  misc_feature: Table A; Target 83666; HLA-C*14:02; TDRD1; ENSG00000095627; TAA
EYMNQLSASL

SEQ ID NO: 83667 - protein, 11 aa, Homo sapiens
  misc_feature: Table A; Target 83667; HLA-A*33:03; TDRD1; ENSG00000095627; TAA
EYMNQLSASLK

SEQ ID NO: 83668 - protein, 8 aa, Homo sapiens
  misc_feature: Table A; Target 83668; HLA-B*39:01; TDRD1; ENSG00000095627; TAA
FAGDGSWY

SEQ ID NO: 83669 - protein, 8 aa, Homo sapiens
  misc_feature: Table A; Target 83669; HLA-C*07:01; TDRD1; ENSG00000095627; TAA
FAGDGSWY

SEQ ID NO: 83670 - protein, 8 aa, Homo sapiens
  misc_feature: Table A; Target 83670; HLA-B*35:03; TDRD1; ENSG00000095627; TAA
FAVGEQSM

SEQ ID NO: 83671 - protein, 8 aa, Homo sapiens
  misc_feature: Table A; Target 83671; HLA-B*39:01; TDRD1; ENSG00000095627; TAA
FAVGEQSM

SEQ ID NO: 83672 - protein, 8 aa, Homo sapiens
  misc_feature: Table A; Target 83672; HLA-C*03:04; TDRD1; ENSG00000095627; TAA
FAVGEQSM

SEQ ID NO: 83673 - protein, 9 aa, Homo sapiens
  misc_feature: Table A; Target 83673; HLA-B*35:03; TDRD1; ENSG00000095627; TAA
FAVGEQSMV

SEQ ID NO: 83674 - protein, 9 aa, Homo sapiens
  misc_feature: Table A; Target 83674; HLA-B*51:01; TDRD1; ENSG00000095627; TAA
FAVGEQSMV

SEQ ID NO: 83675 - protein, 9 aa, Homo sapiens
  misc_feature: Table A; Target 83675; HLA-C*02:02; TDRD1; ENSG00000095627; TAA
FAVGEQSMV

SEQ ID NO: 83676 - protein, 9 aa, Homo sapiens
  misc_feature: Table A; Target 83676; HLA-C*03:03; TDRD1; ENSG00000095627; TAA
FAVGEQSMV

SEQ ID NO: 83677 - protein, 9 aa, Homo sapiens
  misc_feature: Table A; Target 83677; HLA-C*03:04; TDRD1; ENSG00000095627; TAA
FAVGEQSMV

SEQ ID NO: 83678 - protein, 9 aa, Homo sapiens
  misc_feature: Table A; Target 83678; HLA-C*12:03; TDRD1; ENSG00000095627; TAA
FAVGEQSMV

SEQ ID NO: 83679 - protein, 9 aa, Homo sapiens
  misc_feature: Table A; Target 83679; HLA-C*16:02; TDRD1; ENSG00000095627; TAA
FAVGEQSMV

SEQ ID NO: 83680 - protein, 9 aa, Homo sapiens
  misc_feature: Table A; Target 83680; HLA-C*16:04; TDRD1; ENSG00000095627; TAA
FAVGEQSMV

SEQ ID NO: 83681 - protein, 9 aa, Homo sapiens
  misc_feature: Table A; Target 83681; HLA-A*29:02; TDRD1; ENSG00000095627; TAA
FFAGDGSWY

SEQ ID NO: 83682 - protein, 11 aa, Homo sapiens
  misc_feature: Table A; Target 83682; HLA-A*02:01; TDRD1; ENSG00000095627; TAA
FLLCEQTKQYL

SEQ ID NO: 83683 - protein, 11 aa, Homo sapiens
  misc_feature: Table A; Target 83683; HLA-A*03:02; TDRD1; ENSG00000095627; TAA
FLLNNSTNQNK

SEQ ID NO: 83684 - protein, 9 aa, Homo sapiens
  misc_feature: Table A; Target 83684; HLA-A*02:03; TDRD1; ENSG00000095627; TAA
FLNLPFQGI

SEQ ID NO: 83685 - protein, 9 aa, Homo sapiens
  misc_feature: Table A; Target 83685; HLA-A*02:04; TDRD1; ENSG00000095627; TAA
FLNLPFQGI

SEQ ID NO: 83686 - protein, 9 aa, Homo sapiens
  misc_feature: Table A; Target 83686; HLA-A*02:07; TDRD1; ENSG00000095627; TAA
FLNLPFQGI

SEQ ID NO: 83687 - protein, 9 aa, Homo sapiens
  misc_feature: Table A; Target 83687; HLA-A*02:01; TDRD1; ENSG00000095627; TAA
FMLNQNVML

SEQ ID NO: 83688 - protein, 9 aa, Homo sapiens
  misc_feature: Table A; Target 83688; HLA-A*02:04; TDRD1; ENSG00000095627; TAA
FMLNQNVML

SEQ ID NO: 83689 - protein, 9 aa, Homo sapiens
  misc_feature: Table A; Target 83689; HLA-A*02:07; TDRD1; ENSG00000095627; TAA
FMLNQNVML

SEQ ID NO: 83690 - protein, 9 aa, Homo sapiens
  misc_feature: Table A; Target 83690; HLA-A*23:01; TDRD1; ENSG00000095627; TAA
FMLNQNVML

SEQ ID NO: 83691 - protein, 9 aa, Homo sapiens
  misc_feature: Table A; Target 83691; HLA-B*55:01; TDRD1; ENSG00000095627; TAA
FMLNQNVML

SEQ ID NO: 83692 - protein, 9 aa, Homo sapiens
  misc_feature: Table A; Target 83692; HLA-C*14:02; TDRD1; ENSG00000095627; TAA
FMLNQNVML

SEQ ID NO: 83693 - protein, 11 aa, Homo sapiens
  misc_feature: Table A; Target 83693; HLA-A*02:01; TDRD1; ENSG00000095627; TAA
FMLNQNVMLSV

SEQ ID NO: 83694 - protein, 8 aa, Homo sapiens
  misc_feature: Table A; Target 83694; HLA-B*08:01; TDRD1; ENSG00000095627; TAA
FQIIRCSL

SEQ ID NO: 83695 - protein, 9 aa, Homo sapiens
  misc_feature: Table A; Target 83695; HLA-A*01:01; TDRD1; ENSG00000095627; TAA
FSDLRSLQL

SEQ ID NO: 83696 - protein, 9 aa, Homo sapiens
  misc_feature: Table A; Target 83696; HLA-A*02:07; TDRD1; ENSG00000095627; TAA
FSDLRSLQL

SEQ ID NO: 83697 - protein, 9 aa, Homo sapiens
  misc_feature: Table A; Target 83697; HLA-C*03:03; TDRD1; ENSG00000095627; TAA
FSDLRSLQL

SEQ ID NO: 83698 - protein, 9 aa, Homo sapiens
  misc_feature: Table A; Target 83698; HLA-C*03:04; TDRD1; ENSG00000095627; TAA
FSDLRSLQL

SEQ ID NO: 83699 - protein, 9 aa, Homo sapiens
  misc_feature: Table A; Target 83699; HLA-C*05:01; TDRD1; ENSG00000095627; TAA
FSDLRSLQL

SEQ ID NO: 83700 - protein, 9 aa, Homo sapiens
  misc_feature: Table A; Target 83700; HLA-C*16:01; TDRD1; ENSG00000095627; TAA
FSDLRSLQL

SEQ ID NO: 83701 - protein, 10 aa, Homo sapiens
  misc_feature: Table A; Target 83701; HLA-A*01:01; TDRD1; ENSG00000095627; TAA
FSDLRSLQLK

SEQ ID NO: 83702 - protein, 8 aa, Homo sapiens
  misc_feature: Table A; Target 83702; HLA-C*03:03; TDRD1; ENSG00000095627; TAA
FTSLGPPL

SEQ ID NO: 83703 - protein, 8 aa, Homo sapiens
  misc_feature: Table A; Target 83703; HLA-C*03:04; TDRD1; ENSG00000095627; TAA
FTSLGPPL

SEQ ID NO: 83704 - protein, 9 aa, Homo sapiens
  misc_feature: Table A; Target 83704; HLA-A*26:01; TDRD1; ENSG00000095627; TAA
FVANVIPAE

SEQ ID NO: 83705 - protein, 10 aa, Homo sapiens
  misc_feature: Table A; Target 83705; HLA-A*26:01; TDRD1; ENSG00000095627; TAA
FVANVIPAEG

SEQ ID NO: 83706 - protein, 10 aa, Homo sapiens
  misc_feature: Table A; Target 83706; HLA-A*68:02; TDRD1; ENSG00000095627; TAA
FVANVIPAEG

SEQ ID NO: 83707 - protein, 10 aa, Homo sapiens
  misc_feature: Table A; Target 83707; HLA-B*27:05; TDRD1; ENSG00000095627; TAA
FVANVIPAEG

SEQ ID NO: 83708 - protein, 10 aa, Homo sapiens
  misc_feature: Table A; Target 83708; HLA-C*02:02; TDRD1; ENSG00000095627; TAA
FVANVIPAEG

SEQ ID NO: 83709 - protein, 10 aa, Homo sapiens
  misc_feature: Table A; Target 83709; HLA-A*01:01; TDRD1; ENSG00000095627; TAA
FVDYGNIEEV

SEQ ID NO: 83710 - protein, 10 aa, Homo sapiens
  misc_feature: Table A; Target 83710; HLA-A*02:01; TDRD1; ENSG00000095627; TAA
FVDYGNIEEV

SEQ ID NO: 83711 - protein, 10 aa, Homo sapiens
  misc_feature: Table A; Target 83711; HLA-A*02:07; TDRD1; ENSG00000095627; TAA
FVDYGNIEEV

SEQ ID NO: 83712 - protein, 8 aa, Homo sapiens
  misc_feature: Table A; Target 83712; HLA-B*37:01; TDRD1; ENSG00000095627; TAA
GDFYVQLY

SEQ ID NO: 83713 - protein, 8 aa, Homo sapiens
  misc_feature: Table A; Target 83713; HLA-B*15:03; TDRD1; ENSG00000095627; TAA
GEVCIAKY

SEQ ID NO: 83714 - protein, 8 aa, Homo sapiens
  misc_feature: Table A; Target 83714; HLA-B*18:01; TDRD1; ENSG00000095627; TAA
GEVCIAKY

SEQ ID NO: 83715 - protein, 9 aa, Homo sapiens
  misc_feature: Table A; Target 83715; HLA-C*01:02; TDRD1; ENSG00000095627; TAA
GFAVGEQSM

SEQ ID NO: 83716 - protein, 9 aa, Homo sapiens
  misc_feature: Table A; Target 83716; HLA-C*14:02; TDRD1; ENSG00000095627; TAA
GFAVGEQSM

SEQ ID NO: 83717 - protein, 10 aa, Homo sapiens
  misc_feature: Table A; Target 83717; HLA-A*03:01; TDRD1; ENSG00000095627; TAA
GINGEVVGSK

SEQ ID NO: 83718 - protein, 10 aa, Homo sapiens
  misc_feature: Table A; Target 83718; HLA-A*03:02; TDRD1; ENSG00000095627; TAA
GINGEVVGSK

SEQ ID NO: 83719 - protein, 10 aa, Homo sapiens
  misc_feature: Table A; Target 83719; HLA-A*11:01; TDRD1; ENSG00000095627; TAA
GINGEVVGSK

SEQ ID NO: 83720 - protein, 10 aa, Homo sapiens
  misc_feature: Table A; Target 83720; HLA-A*30:02; TDRD1; ENSG00000095627; TAA
GINGEVVGSK

SEQ ID NO: 83721 - protein, 9 aa, Homo sapiens
  misc_feature: Table A; Target 83721; HLA-A*02:01; TDRD1; ENSG00000095627; TAA
GITKNVHTV

SEQ ID NO: 83722 - protein, 9 aa, Homo sapiens
  misc_feature: Table A; Target 83722; HLA-A*02:03; TDRD1; ENSG00000095627; TAA
GITKNVHTV

SEQ ID NO: 83723 - protein, 9 aa, Homo sapiens
  misc_feature: Table A; Target 83723; HLA-A*02:04; TDRD1; ENSG00000095627; TAA
GITKNVHTV

SEQ ID NO: 83724 - protein, 9 aa, Homo sapiens
  misc_feature: Table A; Target 83724; HLA-B*13:02; TDRD1; ENSG00000095627; TAA
GITKNVHTV

SEQ ID NO: 83725 - protein, 9 aa, Homo sapiens
  misc_feature: Table A; Target 83725; HLA-B*55:01; TDRD1; ENSG00000095627; TAA
GITKNVHTV

SEQ ID NO: 83726 - protein, 9 aa, Homo sapiens
  misc_feature: Table A; Target 83726; HLA-C*16:02; TDRD1; ENSG00000095627; TAA
GITKNVHTV

SEQ ID NO: 83727 - protein, 10 aa, Homo sapiens
  misc_feature: Table A; Target 83727; HLA-A*03:01; TDRD1; ENSG00000095627; TAA
GLAKNITPQR

SEQ ID NO: 83728 - protein, 11 aa, Homo sapiens
  misc_feature: Table A; Target 83728; HLA-A*03:01; TDRD1; ENSG00000095627; TAA
GLKPSGQDSKK

SEQ ID NO: 83729 - protein, 11 aa, Homo sapiens
  misc_feature: Table A; Target 83729; HLA-A*03:02; TDRD1; ENSG00000095627; TAA
GLQATSSAEQW

SEQ ID NO: 83730 - protein, 9 aa, Homo sapiens
  misc_feature: Table A; Target 83730; HLA-A*02:07; TDRD1; ENSG00000095627; TAA
GMPENQEKL

SEQ ID NO: 83731 - protein, 9 aa, Homo sapiens
  misc_feature: Table A; Target 83731; HLA-B*07:02; TDRD1; ENSG00000095627; TAA
GPPLRSTTC

SEQ ID NO: 83732 - protein, 9 aa, Homo sapiens
  misc_feature: Table A; Target 83732; HLA-B*56:01; TDRD1; ENSG00000095627; TAA
GPPLRSTTC

SEQ ID NO: 83733 - protein, 9 aa, Homo sapiens
  misc_feature: Table A; Target 83733; HLA-C*07:02; TDRD1; ENSG00000095627; TAA
GPPLRSTTC

SEQ ID NO: 83734 - protein, 9 aa, Homo sapiens
  misc_feature: Table A; Target 83734; HLA-A*03:01; TDRD1; ENSG00000095627; TAA
GSWYRALVK

SEQ ID NO: 83735 - protein, 9 aa, Homo sapiens
  misc_feature: Table A; Target 83735; HLA-A*11:01; TDRD1; ENSG00000095627; TAA
GTLPNHPNF

SEQ ID NO: 83736 - protein, 9 aa, Homo sapiens
  misc_feature: Table A; Target 83736; HLA-A*23:01; TDRD1; ENSG00000095627; TAA
GTLPNHPNF

SEQ ID NO: 83737 - protein, 9 aa, Homo sapiens
  misc_feature: Table A; Target 83737; HLA-A*24:02; TDRD1; ENSG00000095627; TAA
GTLPNHPNF

SEQ ID NO: 83738 - protein, 9 aa, Homo sapiens
  misc_feature: Table A; Target 83738; HLA-A*29:02; TDRD1; ENSG00000095627; TAA
GTLPNHPNF

SEQ ID NO: 83739 - protein, 9 aa, Homo sapiens
  misc_feature: Table A; Target 83739; HLA-A*30:02; TDRD1; ENSG00000095627; TAA
GTLPNHPNF

SEQ ID NO: 83740 - protein, 9 aa, Homo sapiens
  misc_feature: Table A; Target 83740; HLA-A*31:01; TDRD1; ENSG00000095627; TAA
GTLPNHPNF

SEQ ID NO: 83741 - protein, 9 aa, Homo sapiens
  misc_feature: Table A; Target 83741; HLA-A*32:01; TDRD1; ENSG00000095627; TAA
GTLPNHPNF

SEQ ID NO: 83742 - protein, 9 aa, Homo sapiens
  misc_feature: Table A; Target 83742; HLA-B*57:01; TDRD1; ENSG00000095627; TAA
GTLPNHPNF

SEQ ID NO: 83743 - protein, 9 aa, Homo sapiens
  misc_feature: Table A; Target 83743; HLA-B*58:01; TDRD1; ENSG00000095627; TAA
GTLPNHPNF

SEQ ID NO: 83744 - protein, 9 aa, Homo sapiens
  misc_feature: Table A; Target 83744; HLA-C*02:02; TDRD1; ENSG00000095627; TAA
GTLPNHPNF

SEQ ID NO: 83745 - protein, 9 aa, Homo sapiens
  misc_feature: Table A; Target 83745; HLA-C*16:01; TDRD1; ENSG00000095627; TAA
GTLPNHPNF

SEQ ID NO: 83746 - protein, 10 aa, Homo sapiens
  misc_feature: Table A; Target 83746; HLA-A*11:01; TDRD1; ENSG00000095627; TAA
GTLPNHPNFR

SEQ ID NO: 83747 - protein, 10 aa, Homo sapiens
  misc_feature: Table A; Target 83747; HLA-A*31:01; TDRD1; ENSG00000095627; TAA
GTLPNHPNFR

SEQ ID NO: 83748 - protein, 9 aa, Homo sapiens
  misc_feature: Table A; Target 83748; HLA-B*13:02; TDRD1; ENSG00000095627; TAA
GTSDTDVEV

SEQ ID NO: 83749 - protein, 11 aa, Homo sapiens
  misc_feature: Table A; Target 83749; HLA-A*01:01; TDRD1; ENSG00000095627; TAA
GTSDTDVEVLY

SEQ ID NO: 83750 - protein, 11 aa, Homo sapiens
  misc_feature: Table A; Target 83750; HLA-A*03:02; TDRD1; ENSG00000095627; TAA
GTSDTDVEVLY

SEQ ID NO: 83751 - protein, 11 aa, Homo sapiens
  misc_feature: Table A; Target 83751; HLA-A*11:01; TDRD1; ENSG00000095627; TAA
GTSDTDVEVLY

SEQ ID NO: 83752 - protein, 11 aa, Homo sapiens
  misc_feature: Table A; Target 83752; HLA-A*26:01; TDRD1; ENSG00000095627; TAA
GTSDTDVEVLY

SEQ ID NO: 83753 - protein, 11 aa, Homo sapiens
  misc_feature: Table A; Target 83753; HLA-A*29:02; TDRD1; ENSG00000095627; TAA
GTSDTDVEVLY

SEQ ID NO: 83754 - protein, 11 aa, Homo sapiens
  misc_feature: Table A; Target 83754; HLA-A*30:02; TDRD1; ENSG00000095627; TAA
GTSDTDVEVLY

SEQ ID NO: 83755 - protein, 9 aa, Homo sapiens
  misc_feature: Table A; Target 83755; HLA-A*11:01; TDRD1; ENSG00000095627; TAA
GTVDVADKL

SEQ ID NO: 83756 - protein, 9 aa, Homo sapiens
  misc_feature: Table A; Target 83756; HLA-A*25:01; TDRD1; ENSG00000095627; TAA
GTVDVADKL

SEQ ID NO: 83757 - protein, 9 aa, Homo sapiens
  misc_feature: Table A; Target 83757; HLA-A*68:02; TDRD1; ENSG00000095627; TAA
GTVDVADKL

SEQ ID NO: 83758 - protein, 9 aa, Homo sapiens
  misc_feature: Table A; Target 83758; HLA-B*27:05; TDRD1; ENSG00000095627; TAA
GTVDVADKL

SEQ ID NO: 83759 - protein, 9 aa, Homo sapiens
  misc_feature: Table A; Target 83759; HLA-B*40:01; TDRD1; ENSG00000095627; TAA
GTVDVADKL

SEQ ID NO: 83760 - protein, 9 aa, Homo sapiens
  misc_feature: Table A; Target 83760; HLA-B*58:01; TDRD1; ENSG00000095627; TAA
GTVDVADKL

SEQ ID NO: 83761 - protein, 9 aa, Homo sapiens
  misc_feature: Table A; Target 83761; HLA-C*03:04; TDRD1; ENSG00000095627; TAA
GTVDVADKL

SEQ ID NO: 83762 - protein, 9 aa, Homo sapiens
  misc_feature: Table A; Target 83762; HLA-C*07:06; TDRD1; ENSG00000095627; TAA
GTVDVADKL

SEQ ID NO: 83763 - protein, 8 aa, Homo sapiens
  misc_feature: Table A; Target 83763; HLA-C*05:01; TDRD1; ENSG00000095627; TAA
GVDQTVDV

SEQ ID NO: 83764 - protein, 9 aa, Homo sapiens
  misc_feature: Table A; Target 83764; HLA-C*05:01; TDRD1; ENSG00000095627; TAA
GVDQTVDVV

SEQ ID NO: 83765 - protein, 10 aa, Homo sapiens
  misc_feature: Table A; Target 83765; HLA-C*05:01; TDRD1; ENSG00000095627; TAA
GVDQTVDVVV

SEQ ID NO: 83766 - protein, 9 aa, Homo sapiens
  misc_feature: Table A; Target 83766; HLA-A*25:01; TDRD1; ENSG00000095627; TAA
GVKPSLGIW

SEQ ID NO: 83767 - protein, 9 aa, Homo sapiens
  misc_feature: Table A; Target 83767; HLA-B*57:01; TDRD1; ENSG00000095627; TAA
GVKPSLGIW

SEQ ID NO: 83768 - protein, 9 aa, Homo sapiens
  misc_feature: Table A; Target 83768; HLA-A*25:01; TDRD1; ENSG00000095627; TAA
GVTKEIAIW

SEQ ID NO: 83769 - protein, 9 aa, Homo sapiens
  misc_feature: Table A; Target 83769; HLA-B*57:01; TDRD1; ENSG00000095627; TAA
GVTKEIAIW

SEQ ID NO: 83770 - protein, 9 aa, Homo sapiens
  misc_feature: Table A; Target 83770; HLA-B*58:01; TDRD1; ENSG00000095627; TAA
GVTKEIAIW

SEQ ID NO: 83771 - protein, 9 aa, Homo sapiens
  misc_feature: Table A; Target 83771; HLA-A*32:01; TDRD1; ENSG00000095627; TAA
GVVAHIQTP

SEQ ID NO: 83772 - protein, 10 aa, Homo sapiens
  misc_feature: Table A; Target 83772; HLA-A*23:01; TDRD1; ENSG00000095627; TAA
GYVDYGNFEI

SEQ ID NO: 83773 - protein, 10 aa, Homo sapiens
  misc_feature: Table A; Target 83773; HLA-A*24:02; TDRD1; ENSG00000095627; TAA
GYVDYGNFEI

SEQ ID NO: 83774 - protein, 11 aa, Homo sapiens
  misc_feature: Table A; Target 83774; HLA-A*24:02; TDRD1; ENSG00000095627; TAA
GYVDYGNFEIL

SEQ ID NO: 83775 - protein, 9 aa, Homo sapiens
  misc_feature: Table A; Target 83775; HLA-B*44:02; TDRD1; ENSG00000095627; TAA
HEHILLFLL

SEQ ID NO: 83776 - protein, 8 aa, Homo sapiens
  misc_feature: Table A; Target 83776; HLA-B*18:01; TDRD1; ENSG00000095627; TAA
HELQVHVQ

SEQ ID NO: 83777 - protein, 10 aa, Homo sapiens
  misc_feature: Table A; Target 83777; HLA-A*30:01; TDRD1; ENSG00000095627; TAA
HELQVHVQGL

SEQ ID NO: 83778 - protein, 10 aa, Homo sapiens
  misc_feature: Table A; Target 83778; HLA-B*18:01; TDRD1; ENSG00000095627; TAA
HELQVHVQGL

SEQ ID NO: 83779 - protein, 10 aa, Homo sapiens
  misc_feature: Table A; Target 83779; HLA-B*37:01; TDRD1; ENSG00000095627; TAA
HELQVHVQGL

SEQ ID NO: 83780 - protein, 10 aa, Homo sapiens
  misc_feature: Table A; Target 83780; HLA-B*40:01; TDRD1; ENSG00000095627; TAA
HELQVHVQGL

SEQ ID NO: 83781 - protein, 10 aa, Homo sapiens
  misc_feature: Table A; Target 83781; HLA-B*40:02; TDRD1; ENSG00000095627; TAA
HELQVHVQGL

SEQ ID NO: 83782 - protein, 10 aa, Homo sapiens
  misc_feature: Table A; Target 83782; HLA-B*44:02; TDRD1; ENSG00000095627; TAA
HELQVHVQGL

SEQ ID NO: 83783 - protein, 10 aa, Homo sapiens
  misc_feature: Table A; Target 83783; HLA-B*44:03; TDRD1; ENSG00000095627; TAA
HELQVHVQGL

SEQ ID NO: 83784 - protein, 10 aa, Homo sapiens
  misc_feature: Table A; Target 83784; HLA-B*49:01; TDRD1; ENSG00000095627; TAA
HELQVHVQGL

SEQ ID NO: 83785 - protein, 8 aa, Homo sapiens
  misc_feature: Table A; Target 83785; HLA-B*13:02; TDRD1; ENSG00000095627; TAA
HLALPFQI

SEQ ID NO: 83786 - protein, 9 aa, Homo sapiens
  misc_feature: Table A; Target 83786; HLA-B*35:01; TDRD1; ENSG00000095627; TAA
HPGDFYVQL

SEQ ID NO: 83787 - protein, 9 aa, Homo sapiens
  misc_feature: Table A; Target 83787; HLA-B*35:03; TDRD1; ENSG00000095627; TAA
HPGDFYVQL

SEQ ID NO: 83788 - protein, 10 aa, Homo sapiens
  misc_feature: Table A; Target 83788; HLA-A*29:02; TDRD1; ENSG00000095627; TAA
HPGDFYVQLY

SEQ ID NO: 83789 - protein, 10 aa, Homo sapiens
  misc_feature: Table A; Target 83789; HLA-B*35:01; TDRD1; ENSG00000095627; TAA
HPGDFYVQLY

SEQ ID NO: 83790 - protein, 10 aa, Homo sapiens
  misc_feature: Table A; Target 83790; HLA-B*55:01; TDRD1; ENSG00000095627; TAA
HPGDFYVQLY

SEQ ID NO: 83791 - protein, 9 aa, Homo sapiens
  misc_feature: Table A; Target 83791; HLA-A*03:02; TDRD1; ENSG00000095627; TAA
HVLKEDALK

SEQ ID NO: 83792 - protein, 8 aa, Homo sapiens
  misc_feature: Table A; Target 83792; HLA-C*03:04; TDRD1; ENSG00000095627; TAA
HVSVSKVL

SEQ ID NO: 83793 - protein, 9 aa, Homo sapiens
  misc_feature: Table A; Target 83793; HLA-C*07:06; TDRD1; ENSG00000095627; TAA
HWSEEAITR

SEQ ID NO: 83794 - protein, 10 aa, Homo sapiens
  misc_feature: Table A; Target 83794; HLA-A*24:02; TDRD1; ENSG00000095627; TAA
HWSEEAITRF

SEQ ID NO: 83795 - protein, 10 aa, Homo sapiens
  misc_feature: Table A; Target 83795; HLA-B*57:01; TDRD1; ENSG00000095627; TAA
IAKYTVDQTW

SEQ ID NO: 83796 - protein, 10 aa, Homo sapiens
  misc_feature: Table A; Target 83796; HLA-B*58:01; TDRD1; ENSG00000095627; TAA
IAKYTVDQTW

SEQ ID NO: 83797 - protein, 8 aa, Homo sapiens
  misc_feature: Table A; Target 83797; HLA-B*27:02; TDRD1; ENSG00000095627; TAA
IDEHLVLK

SEQ ID NO: 83798 - protein, 9 aa, Homo sapiens
  misc_feature: Table A; Target 83798; HLA-A*30:01; TDRD1; ENSG00000095627; TAA
IEEVTADEL

SEQ ID NO: 83799 - protein, 9 aa, Homo sapiens
  misc_feature: Table A; Target 83799; HLA-A*23:01; TDRD1; ENSG00000095627; TAA
IELPVDKTI

SEQ ID NO: 83800 - protein, 9 aa, Homo sapiens
  misc_feature: Table A; Target 83800; HLA-A*30:01; TDRD1; ENSG00000095627; TAA
IELPVDKTI

SEQ ID NO: 83801 - protein, 9 aa, Homo sapiens
  misc_feature: Table A; Target 83801; HLA-B*18:01; TDRD1; ENSG00000095627; TAA
IELPVDKTI

SEQ ID NO: 83802 - protein, 9 aa, Homo sapiens
  misc_feature: Table A; Target 83802; HLA-B*40:01; TDRD1; ENSG00000095627; TAA
IELPVDKTI

SEQ ID NO: 83803 - protein, 9 aa, Homo sapiens
  misc_feature: Table A; Target 83803; HLA-B*44:02; TDRD1; ENSG00000095627; TAA
IELPVDKTI

SEQ ID NO: 83804 - protein, 9 aa, Homo sapiens
  misc_feature: Table A; Target 83804; HLA-B*44:03; TDRD1; ENSG00000095627; TAA
IELPVDKTI

SEQ ID NO: 83805 - protein, 9 aa, Homo sapiens
  misc_feature: Table A; Target 83805; HLA-B*49:01; TDRD1; ENSG00000095627; TAA
IELPVDKTI

SEQ ID NO: 83806 - protein, 11 aa, Homo sapiens
  misc_feature: Table A; Target 83806; HLA-A*30:01; TDRD1; ENSG00000095627; TAA
IELPVDKTIQA

SEQ ID NO: 83807 - protein, 11 aa, Homo sapiens
  misc_feature: Table A; Target 83807; HLA-B*49:01; TDRD1; ENSG00000095627; TAA
IELPVDKTIQA

SEQ ID NO: 83808 - protein, 9 aa, Homo sapiens
  misc_feature: Table A; Target 83808; HLA-B*40:02; TDRD1; ENSG00000095627; TAA
IEMGYGLKP

SEQ ID NO: 83809 - protein, 9 aa, Homo sapiens
  misc_feature: Table A; Target 83809; HLA-B*49:01; TDRD1; ENSG00000095627; TAA
IEMGYGLKP

SEQ ID NO: 83810 - protein, 8 aa, Homo sapiens
  misc_feature: Table A; Target 83810; HLA-A*30:01; TDRD1; ENSG00000095627; TAA
IETKDVEV

SEQ ID NO: 83811 - protein, 8 aa, Homo sapiens
  misc_feature: Table A; Target 83811; HLA-B*40:01; TDRD1; ENSG00000095627; TAA
IETKDVEV

SEQ ID NO: 83812 - protein, 8 aa, Homo sapiens
  misc_feature: Table A; Target 83812; HLA-B*49:01; TDRD1; ENSG00000095627; TAA
IETKDVEV

SEQ ID NO: 83813 - protein, 9 aa, Homo sapiens
  misc_feature: Table A; Target 83813; HLA-B*49:01; TDRD1; ENSG00000095627; TAA
IETLPLCRV

SEQ ID NO: 83814 - protein, 10 aa, Homo sapiens
  misc_feature: Table A; Target 83814; HLA-A*03:02; TDRD1; ENSG00000095627; TAA
IIQNVDVQQK

SEQ ID NO: 83815 - protein, 10 aa, Homo sapiens
  misc_feature: Table A; Target 83815; HLA-A*11:01; TDRD1; ENSG00000095627; TAA
IIQNVDVQQK

SEQ ID NO: 83816 - protein, 10 aa, Homo sapiens
  misc_feature: Table A; Target 83816; HLA-A*68:01; TDRD1; ENSG00000095627; TAA
IIQNVDVQQK

SEQ ID NO: 83817 - protein, 10 aa, Homo sapiens
  misc_feature: Table A; Target 83817; HLA-B*27:02; TDRD1; ENSG00000095627; TAA
IIQNVDVQQK

SEQ ID NO: 83818 - protein, 10 aa, Homo sapiens
  misc_feature: Table A; Target 83818; HLA-C*07:06; TDRD1; ENSG00000095627; TAA
IIQNVDVQQK

SEQ ID NO: 83819 - protein, 11 aa, Homo sapiens
  misc_feature: Table A; Target 83819; HLA-A*03:02; TDRD1; ENSG00000095627; TAA
IIQNVDVQQKK

SEQ ID NO: 83820 - protein, 11 aa, Homo sapiens
  misc_feature: Table A; Target 83820; HLA-A*11:01; TDRD1; ENSG00000095627; TAA
IIQNVDVQQKK

SEQ ID NO: 83821 - protein, 11 aa, Homo sapiens
  misc_feature: Table A; Target 83821; HLA-A*68:01; TDRD1; ENSG00000095627; TAA
IIQNVDVQQKK

SEQ ID NO: 83822 - protein, 11 aa, Homo sapiens
  misc_feature: Table A; Target 83822; HLA-A*68:02; TDRD1; ENSG00000095627; TAA
IISDVLIDEHL

SEQ ID NO: 83823 - protein, 8 aa, Homo sapiens
  misc_feature: Table A; Target 83823; HLA-A*29:02; TDRD1; ENSG00000095627; TAA
IISPNLFY

SEQ ID NO: 83824 - protein, 9 aa, Homo sapiens
  misc_feature: Table A; Target 83824; HLA-A*03:02; TDRD1; ENSG00000095627; TAA
IITVKVVDK

SEQ ID NO: 83825 - protein, 8 aa, Homo sapiens
  misc_feature: Table A; Target 83825; HLA-B*15:03; TDRD1; ENSG00000095627; TAA
IKGTVTEF

SEQ ID NO: 83826 - protein, 9 aa, Homo sapiens
  misc_feature: Table A; Target 83826; HLA-A*02:07; TDRD1; ENSG00000095627; TAA
ILEEEVVTF

SEQ ID NO: 83827 - protein, 9 aa, Homo sapiens
  misc_feature: Table A; Target 83827; HLA-A*23:01; TDRD1; ENSG00000095627; TAA
ILEEEVVTF

SEQ ID NO: 83828 - protein, 9 aa, Homo sapiens
  misc_feature: Table A; Target 83828; HLA-A*32:01; TDRD1; ENSG00000095627; TAA
ILEEEVVTF

SEQ ID NO: 83829 - protein, 9 aa, Homo sapiens
  misc_feature: Table A; Target 83829; HLA-B*15:01; TDRD1; ENSG00000095627; TAA
ILEEEVVTF

SEQ ID NO: 83830 - protein, 9 aa, Homo sapiens
  misc_feature: Table A; Target 83830; HLA-B*15:03; TDRD1; ENSG00000095627; TAA
ILEEEVVTF

SEQ ID NO: 83831 - protein, 9 aa, Homo sapiens
  misc_feature: Table A; Target 83831; HLA-B*35:01; TDRD1; ENSG00000095627; TAA
ILEEEVVTF

SEQ ID NO: 83832 - protein, 9 aa, Homo sapiens
  misc_feature: Table A; Target 83832; HLA-B*38:01; TDRD1; ENSG00000095627; TAA
ILEEEVVTF

SEQ ID NO: 83833 - protein, 9 aa, Homo sapiens
  misc_feature: Table A; Target 83833; HLA-B*55:01; TDRD1; ENSG00000095627; TAA
ILEEEVVTF

SEQ ID NO: 83834 - protein, 9 aa, Homo sapiens
  misc_feature: Table A; Target 83834; HLA-B*58:01; TDRD1; ENSG00000095627; TAA
ILEEEVVTF

SEQ ID NO: 83835 - protein, 9 aa, Homo sapiens
  misc_feature: Table A; Target 83835; HLA-C*03:03; TDRD1; ENSG00000095627; TAA
ILEEEVVTF

SEQ ID NO: 83836 - protein, 9 aa, Homo sapiens
  misc_feature: Table A; Target 83836; HLA-C*05:01; TDRD1; ENSG00000095627; TAA
ILEEEVVTF

SEQ ID NO: 83837 - protein, 9 aa, Homo sapiens
  misc_feature: Table A; Target 83837; HLA-C*07:04; TDRD1; ENSG00000095627; TAA
ILEEEVVTF

SEQ ID NO: 83838 - protein, 9 aa, Homo sapiens
  misc_feature: Table A; Target 83838; HLA-A*02:07; TDRD1; ENSG00000095627; TAA
ILPNGHVKV

SEQ ID NO: 83839 - protein, 9 aa, Homo sapiens
  misc_feature: Table A; Target 83839; HLA-A*02:01; TDRD1; ENSG00000095627; TAA
IMFSDLRSL

SEQ ID NO: 83840 - protein, 9 aa, Homo sapiens
  misc_feature: Table A; Target 83840; HLA-A*02:03; TDRD1; ENSG00000095627; TAA
IMFSDLRSL

SEQ ID NO: 83841 - protein, 9 aa, Homo sapiens
  misc_feature: Table A; Target 83841; HLA-A*02:04; TDRD1; ENSG00000095627; TAA
IMFSDLRSL

SEQ ID NO: 83842 - protein, 9 aa, Homo sapiens
  misc_feature: Table A; Target 83842; HLA-A*03:01; TDRD1; ENSG00000095627; TAA
IMFSDLRSL

SEQ ID NO: 83843 - protein, 9 aa, Homo sapiens
  misc_feature: Table A; Target 83843; HLA-B*46:01; TDRD1; ENSG00000095627; TAA
IMFSDLRSL

SEQ ID NO: 83844 - protein, 11 aa, Homo sapiens
  misc_feature: Table A; Target 83844; HLA-A*02:01; TDRD1; ENSG00000095627; TAA
IMFSDLRSLQL

SEQ ID NO: 83845 - protein, 9 aa, Homo sapiens
  misc_feature: Table A; Target 83845; HLA-B*07:02; TDRD1; ENSG00000095627; TAA
IPKVLTLNV

SEQ ID NO: 83846 - protein, 9 aa, Homo sapiens
  misc_feature: Table A; Target 83846; HLA-B*08:01; TDRD1; ENSG00000095627; TAA
IPKVLTLNV

SEQ ID NO: 83847 - protein, 9 aa, Homo sapiens
  misc_feature: Table A; Target 83847; HLA-B*51:01; TDRD1; ENSG00000095627; TAA
IPKVLTLNV

SEQ ID NO: 83848 - protein, 9 aa, Homo sapiens
  misc_feature: Table A; Target 83848; HLA-B*54:01; TDRD1; ENSG00000095627; TAA
IPKVLTLNV

SEQ ID NO: 83849 - protein, 9 aa, Homo sapiens
  misc_feature: Table A; Target 83849; HLA-B*56:01; TDRD1; ENSG00000095627; TAA
IPKVLTLNV

SEQ ID NO: 83850 - protein, 9 aa, Homo sapiens
  misc_feature: Table A; Target 83850; HLA-C*07:02; TDRD1; ENSG00000095627; TAA
IPKVLTLNV

SEQ ID NO: 83851 - protein, 9 aa, Homo sapiens
  misc_feature: Table A; Target 83851; HLA-B*08:01; TDRD1; ENSG00000095627; TAA
IPLNRIYHL

SEQ ID NO: 83852 - protein, 9 aa, Homo sapiens
  misc_feature: Table A; Target 83852; HLA-B*35:03; TDRD1; ENSG00000095627; TAA
IPVKGEVCI

SEQ ID NO: 83853 - protein, 9 aa, Homo sapiens
  misc_feature: Table A; Target 83853; HLA-B*51:01; TDRD1; ENSG00000095627; TAA
IPVKGEVCI

SEQ ID NO: 83854 - protein, 9 aa, Homo sapiens
  misc_feature: Table A; Target 83854; HLA-B*55:01; TDRD1; ENSG00000095627; TAA
IPVKGEVCI

SEQ ID NO: 83855 - protein, 9 aa, Homo sapiens
  misc_feature: Table A; Target 83855; HLA-B*56:01; TDRD1; ENSG00000095627; TAA
IPVKGEVCI

SEQ ID NO: 83856 - protein, 10 aa, Homo sapiens
  misc_feature: Table A; Target 83856; HLA-B*54:01; TDRD1; ENSG00000095627; TAA
IPVKGEVCIA

SEQ ID NO: 83857 - protein, 10 aa, Homo sapiens
  misc_feature: Table A; Target 83857; HLA-B*56:01; TDRD1; ENSG00000095627; TAA
IPVKGEVCIA

SEQ ID NO: 83858 - protein, 8 aa, Homo sapiens
  misc_feature: Table A; Target 83858; HLA-B*13:02; TDRD1; ENSG00000095627; TAA
IQANVLEI

SEQ ID NO: 83859 - protein, 9 aa, Homo sapiens
  misc_feature: Table A; Target 83859; HLA-A*30:01; TDRD1; ENSG00000095627; TAA
IQANVLEII

SEQ ID NO: 83860 - protein, 9 aa, Homo sapiens
  misc_feature: Table A; Target 83860; HLA-B*13:02; TDRD1; ENSG00000095627; TAA
IQANVLEII

SEQ ID NO: 83861 - protein, 9 aa, Homo sapiens
  misc_feature: Table A; Target 83861; HLA-B*38:01; TDRD1; ENSG00000095627; TAA
IQANVLEII

SEQ ID NO: 83862 - protein, 9 aa, Homo sapiens
  misc_feature: Table A; Target 83862; HLA-C*06:02; TDRD1; ENSG00000095627; TAA
IQANVLEII

SEQ ID NO: 83863 - protein, 9 aa, Homo sapiens
  misc_feature: Table A; Target 83863; HLA-A*03:02; TDRD1; ENSG00000095627; TAA
IQNVDVQQK

SEQ ID NO: 83864 - protein, 9 aa, Homo sapiens
  misc_feature: Table A; Target 83864; HLA-A*11:01; TDRD1; ENSG00000095627; TAA
IQNVDVQQK

SEQ ID NO: 83865 - protein, 9 aa, Homo sapiens
  misc_feature: Table A; Target 83865; HLA-A*31:01; TDRD1; ENSG00000095627; TAA
IQNVDVQQK

SEQ ID NO: 83866 - protein, 9 aa, Homo sapiens
  misc_feature: Table A; Target 83866; HLA-B*27:05; TDRD1; ENSG00000095627; TAA
IQNVDVQQK

SEQ ID NO: 83867 - protein, 9 aa, Homo sapiens
  misc_feature: Table A; Target 83867; HLA-C*07:06; TDRD1; ENSG00000095627; TAA
IQNVDVQQK

SEQ ID NO: 83868 - protein, 10 aa, Homo sapiens
  misc_feature: Table A; Target 83868; HLA-A*03:01; TDRD1; ENSG00000095627; TAA
ISNPGLFTSL

SEQ ID NO: 83869 - protein, 10 aa, Homo sapiens
  misc_feature: Table A; Target 83869; HLA-A*23:01; TDRD1; ENSG00000095627; TAA
ISNPGLFTSL

SEQ ID NO: 83870 - protein, 10 aa, Homo sapiens
  misc_feature: Table A; Target 83870; HLA-A*24:02; TDRD1; ENSG00000095627; TAA
ISNPGLFTSL

SEQ ID NO: 83871 - protein, 10 aa, Homo sapiens
  misc_feature: Table A; Target 83871; HLA-A*25:01; TDRD1; ENSG00000095627; TAA
ISNPGLFTSL

SEQ ID NO: 83872 - protein, 10 aa, Homo sapiens
  misc_feature: Table A; Target 83872; HLA-A*31:01; TDRD1; ENSG00000095627; TAA
ISNPGLFTSL

SEQ ID NO: 83873 - protein, 10 aa, Homo sapiens
  misc_feature: Table A; Target 83873; HLA-A*32:01; TDRD1; ENSG00000095627; TAA
ISNPGLFTSL

SEQ ID NO: 83874 - protein, 10 aa, Homo sapiens
  misc_feature: Table A; Target 83874; HLA-B*07:02; TDRD1; ENSG00000095627; TAA
ISNPGLFTSL

SEQ ID NO: 83875 - protein, 10 aa, Homo sapiens
  misc_feature: Table A; Target 83875; HLA-B*15:03; TDRD1; ENSG00000095627; TAA
ISNPGLFTSL

SEQ ID NO: 83876 - protein, 10 aa, Homo sapiens
  misc_feature: Table A; Target 83876; HLA-B*46:01; TDRD1; ENSG00000095627; TAA
ISNPGLFTSL

SEQ ID NO: 83877 - protein, 10 aa, Homo sapiens
  misc_feature: Table A; Target 83877; HLA-B*57:01; TDRD1; ENSG00000095627; TAA
ISNPGLFTSL

SEQ ID NO: 83878 - protein, 10 aa, Homo sapiens
  misc_feature: Table A; Target 83878; HLA-B*58:01; TDRD1; ENSG00000095627; TAA
ISNPGLFTSL

SEQ ID NO: 83879 - protein, 10 aa, Homo sapiens
  misc_feature: Table A; Target 83879; HLA-C*01:02; TDRD1; ENSG00000095627; TAA
ISNPGLFTSL

SEQ ID NO: 83880 - protein, 10 aa, Homo sapiens
  misc_feature: Table A; Target 83880; HLA-C*02:02; TDRD1; ENSG00000095627; TAA
ISNPGLFTSL

SEQ ID NO: 83881 - protein, 10 aa, Homo sapiens
  misc_feature: Table A; Target 83881; HLA-C*03:03; TDRD1; ENSG00000095627; TAA
ISNPGLFTSL

SEQ ID NO: 83882 - protein, 10 aa, Homo sapiens
  misc_feature: Table A; Target 83882; HLA-C*03:04; TDRD1; ENSG00000095627; TAA
ISNPGLFTSL

SEQ ID NO: 83883 - protein, 10 aa, Homo sapiens
  misc_feature: Table A; Target 83883; HLA-C*12:03; TDRD1; ENSG00000095627; TAA
ISNPGLFTSL

SEQ ID NO: 83884 - protein, 10 aa, Homo sapiens
  misc_feature: Table A; Target 83884; HLA-C*14:02; TDRD1; ENSG00000095627; TAA
ISNPGLFTSL

SEQ ID NO: 83885 - protein, 9 aa, Homo sapiens
  misc_feature: Table A; Target 83885; HLA-A*02:07; TDRD1; ENSG00000095627; TAA
ISPNLFYAL

SEQ ID NO: 83886 - protein, 9 aa, Homo sapiens
  misc_feature: Table A; Target 83886; HLA-A*24:02; TDRD1; ENSG00000095627; TAA
ISPNLFYAL

SEQ ID NO: 83887 - protein, 9 aa, Homo sapiens
  misc_feature: Table A; Target 83887; HLA-C*01:02; TDRD1; ENSG00000095627; TAA
ISPNLFYAL

SEQ ID NO: 83888 - protein, 8 aa, Homo sapiens
  misc_feature: Table A; Target 83888; HLA-C*03:04; TDRD1; ENSG00000095627; TAA
ISSTFLNL

SEQ ID NO: 83889 - protein, 10 aa, Homo sapiens
  misc_feature: Table A; Target 83889; HLA-B*57:01; TDRD1; ENSG00000095627; TAA
ISSTFLNLPF

SEQ ID NO: 83890 - protein, 8 aa, Homo sapiens
  misc_feature: Table A; Target 83890; HLA-C*16:02; TDRD1; ENSG00000095627; TAA
ITKNVHTV

SEQ ID NO: 83891 - protein, 9 aa, Homo sapiens
  misc_feature: Table A; Target 83891; HLA-B*08:01; TDRD1; ENSG00000095627; TAA
ITPQRQSAL

SEQ ID NO: 83892 - protein, 9 aa, Homo sapiens
  misc_feature: Table A; Target 83892; HLA-B*46:01; TDRD1; ENSG00000095627; TAA
ITPQRQSAL

SEQ ID NO: 83893 - protein, 9 aa, Homo sapiens
  misc_feature: Table A; Target 83893; HLA-C*03:04; TDRD1; ENSG00000095627; TAA
ITPQRQSAL

SEQ ID NO: 83894 - protein, 9 aa, Homo sapiens
  misc_feature: Table A; Target 83894; HLA-C*14:02; TDRD1; ENSG00000095627; TAA
ITPQRQSAL

SEQ ID NO: 83895 - protein, 9 aa, Homo sapiens
  misc_feature: Table A; Target 83895; HLA-C*16:01; TDRD1; ENSG00000095627; TAA
ITPQRQSAL

SEQ ID NO: 83896 - protein, 8 aa, Homo sapiens
  misc_feature: Table A; Target 83896; HLA-C*03:04; TDRD1; ENSG00000095627; TAA
ITSSHLAL

SEQ ID NO: 83897 - protein, 9 aa, Homo sapiens
  misc_feature: Table A; Target 83897; HLA-A*68:02; TDRD1; ENSG00000095627; TAA
ITVKVVDKL

SEQ ID NO: 83898 - protein, 9 aa, Homo sapiens
  misc_feature: Table A; Target 83898; HLA-B*40:01; TDRD1; ENSG00000095627; TAA
ITVKVVDKL

SEQ ID NO: 83899 - protein, 9 aa, Homo sapiens
  misc_feature: Table A; Target 83899; HLA-B*58:01; TDRD1; ENSG00000095627; TAA
ITVKVVDKL

SEQ ID NO: 83900 - protein, 9 aa, Homo sapiens
  misc_feature: Table A; Target 83900; HLA-A*02:07; TDRD1; ENSG00000095627; TAA
IVDILEEEV

SEQ ID NO: 83901 - protein, 9 aa, Homo sapiens
  misc_feature: Table A; Target 83901; HLA-C*05:01; TDRD1; ENSG00000095627; TAA
IVDILEEEV

SEQ ID NO: 83902 - protein, 11 aa, Homo sapiens
  misc_feature: Table A; Target 83902; HLA-A*03:01; TDRD1; ENSG00000095627; TAA
IVVDKSDLIPK

SEQ ID NO: 83903 - protein, 11 aa, Homo sapiens
  misc_feature: Table A; Target 83903; HLA-A*03:02; TDRD1; ENSG00000095627; TAA
IVVDKSDLIPK

SEQ ID NO: 83904 - protein, 11 aa, Homo sapiens
  misc_feature: Table A; Target 83904; HLA-A*31:01; TDRD1; ENSG00000095627; TAA
IVVDKSDLIPK

SEQ ID NO: 83905 - protein, 11 aa, Homo sapiens
  misc_feature: Table A; Target 83905; HLA-A*33:01; TDRD1; ENSG00000095627; TAA
IVVDKSDLIPK

SEQ ID NO: 83906 - protein, 11 aa, Homo sapiens
  misc_feature: Table A; Target 83906; HLA-A*68:01; TDRD1; ENSG00000095627; TAA
IVVDKSDLIPK

SEQ ID NO: 83907 - protein, 11 aa, Homo sapiens
  misc_feature: Table A; Target 83907; HLA-B*27:02; TDRD1; ENSG00000095627; TAA
IVVDKSDLIPK

SEQ ID NO: 83908 - protein, 11 aa, Homo sapiens
  misc_feature: Table A; Target 83908; HLA-A*24:02; TDRD1; ENSG00000095627; TAA
IYHLNRNIDLF

SEQ ID NO: 83909 - protein, 8 aa, Homo sapiens
  misc_feature: Table A; Target 83909; HLA-A*30:02; TDRD1; ENSG00000095627; TAA
IYSPGEFY

SEQ ID NO: 83910 - protein, 8 aa, Homo sapiens
  misc_feature: Table A; Target 83910; HLA-C*14:02; TDRD1; ENSG00000095627; TAA
IYSPGEFY

SEQ ID NO: 83911 - protein, 9 aa, Homo sapiens
  misc_feature: Table A; Target 83911; HLA-A*30:02; TDRD1; ENSG00000095627; TAA
KAHVLYIDY

SEQ ID NO: 83912 - protein, 11 aa, Homo sapiens
  misc_feature: Table A; Target 83912; HLA-A*30:02; TDRD1; ENSG00000095627; TAA
KATKPLLMEQY

SEQ ID NO: 83913 - protein, 11 aa, Homo sapiens
  misc_feature: Table A; Target 83913; HLA-A*03:01; TDRD1; ENSG00000095627; TAA
KDLPNDRLVNK

SEQ ID NO: 83914 - protein, 11 aa, Homo sapiens
  misc_feature: Table A; Target 83914; HLA-A*31:01; TDRD1; ENSG00000095627; TAA
KDLPNDRLVNK

SEQ ID NO: 83915 - protein, 8 aa, Homo sapiens
  misc_feature: Table A; Target 83915; HLA-B*37:01; TDRD1; ENSG00000095627; TAA
KDVEVNNK

SEQ ID NO: 83916 - protein, 9 aa, Homo sapiens
  misc_feature: Table A; Target 83916; HLA-B*44:03; TDRD1; ENSG00000095627; TAA
KEILPNGHV

SEQ ID NO: 83917 - protein, 9 aa, Homo sapiens
  misc_feature: Table A; Target 83917; HLA-B*49:01; TDRD1; ENSG00000095627; TAA
KEILPNGHV

SEQ ID NO: 83918 - protein, 11 aa, Homo sapiens
  misc_feature: Table A; Target 83918; HLA-B*49:01; TDRD1; ENSG00000095627; TAA
KEILPNGHVKV

SEQ ID NO: 83919 - protein, 9 aa, Homo sapiens
  misc_feature: Table A; Target 83919; HLA-A*02:03; TDRD1; ENSG00000095627; TAA
KETSVPLGV

SEQ ID NO: 83920 - protein, 9 aa, Homo sapiens
  misc_feature: Table A; Target 83920; HLA-A*30:01; TDRD1; ENSG00000095627; TAA
KETSVPLGV

SEQ ID NO: 83921 - protein, 9 aa, Homo sapiens
  misc_feature: Table A; Target 83921; HLA-A*32:01; TDRD1; ENSG00000095627; TAA
KETSVPLGV

SEQ ID NO: 83922 - protein, 9 aa, Homo sapiens
  misc_feature: Table A; Target 83922; HLA-B*13:02; TDRD1; ENSG00000095627; TAA
KETSVPLGV

SEQ ID NO: 83923 - protein, 9 aa, Homo sapiens
  misc_feature: Table A; Target 83923; HLA-B*37:01; TDRD1; ENSG00000095627; TAA
KETSVPLGV

SEQ ID NO: 83924 - protein, 9 aa, Homo sapiens
  misc_feature: Table A; Target 83924; HLA-B*40:01; TDRD1; ENSG00000095627; TAA
KETSVPLGV

SEQ ID NO: 83925 - protein, 9 aa, Homo sapiens
  misc_feature: Table A; Target 83925; HLA-B*40:02; TDRD1; ENSG00000095627; TAA
KETSVPLGV

SEQ ID NO: 83926 - protein, 9 aa, Homo sapiens
  misc_feature: Table A; Target 83926; HLA-B*44:02; TDRD1; ENSG00000095627; TAA
KETSVPLGV

SEQ ID NO: 83927 - protein, 9 aa, Homo sapiens
  misc_feature: Table A; Target 83927; HLA-B*44:03; TDRD1; ENSG00000095627; TAA
KETSVPLGV

SEQ ID NO: 83928 - protein, 9 aa, Homo sapiens
  misc_feature: Table A; Target 83928; HLA-B*49:01; TDRD1; ENSG00000095627; TAA
KETSVPLGV

SEQ ID NO: 83929 - protein, 9 aa, Homo sapiens
  misc_feature: Table A; Target 83929; HLA-C*02:02; TDRD1; ENSG00000095627; TAA
KETSVPLGV

SEQ ID NO: 83930 - protein, 9 aa, Homo sapiens
  misc_feature: Table A; Target 83930; HLA-C*16:02; TDRD1; ENSG00000095627; TAA
KETSVPLGV

SEQ ID NO: 83931 - protein, 9 aa, Homo sapiens
  misc_feature: Table A; Target 83931; HLA-C*16:04; TDRD1; ENSG00000095627; TAA
KETSVPLGV

SEQ ID NO: 83932 - protein, 8 aa, Homo sapiens
  misc_feature: Table A; Target 83932; HLA-B*18:01; TDRD1; ENSG00000095627; TAA
KETYANVH

SEQ ID NO: 83933 - protein, 10 aa, Homo sapiens
  misc_feature: Table A; Target 83933; HLA-B*40:01; TDRD1; ENSG00000095627; TAA
KGMPENQEKL

SEQ ID NO: 83934 - protein, 10 aa, Homo sapiens
  misc_feature: Table A; Target 83934; HLA-B*58:01; TDRD1; ENSG00000095627; TAA
KGMPENQEKL

SEQ ID NO: 83935 - protein, 10 aa, Homo sapiens
  misc_feature: Table A; Target 83935; HLA-A*03:01; TDRD1; ENSG00000095627; TAA
KIITVKVVDK

SEQ ID NO: 83936 - protein, 10 aa, Homo sapiens
  misc_feature: Table A; Target 83936; HLA-A*03:02; TDRD1; ENSG00000095627; TAA
KIITVKVVDK

SEQ ID NO: 83937 - protein, 10 aa, Homo sapiens
  misc_feature: Table A; Target 83937; HLA-A*11:01; TDRD1; ENSG00000095627; TAA
KIITVKVVDK

SEQ ID NO: 83938 - protein, 9 aa, Homo sapiens
  misc_feature: Table A; Target 83938; HLA-B*15:03; TDRD1; ENSG00000095627; TAA
KKLPAGNSV

SEQ ID NO: 83939 - protein, 9 aa, Homo sapiens
  misc_feature: Table A; Target 83939; HLA-A*02:01; TDRD1; ENSG00000095627; TAA
KLAELQASL

SEQ ID NO: 83940 - protein, 9 aa, Homo sapiens
  misc_feature: Table A; Target 83940; HLA-A*02:03; TDRD1; ENSG00000095627; TAA
KLAELQASL

SEQ ID NO: 83941 - protein, 9 aa, Homo sapiens
  misc_feature: Table A; Target 83941; HLA-A*02:04; TDRD1; ENSG00000095627; TAA
KLAELQASL

SEQ ID NO: 83942 - protein, 9 aa, Homo sapiens
  misc_feature: Table A; Target 83942; HLA-A*02:07; TDRD1; ENSG00000095627; TAA
KLAELQASL

SEQ ID NO: 83943 - protein, 9 aa, Homo sapiens
  misc_feature: Table A; Target 83943; HLA-A*03:01; TDRD1; ENSG00000095627; TAA
KLAELQASL

SEQ ID NO: 83944 - protein, 9 aa, Homo sapiens
  misc_feature: Table A; Target 83944; HLA-A*03:02; TDRD1; ENSG00000095627; TAA
KLAELQASL

SEQ ID NO: 83945 - protein, 9 aa, Homo sapiens
  misc_feature: Table A; Target 83945; HLA-A*32:01; TDRD1; ENSG00000095627; TAA
KLAELQASL

SEQ ID NO: 83946 - protein, 9 aa, Homo sapiens
  misc_feature: Table A; Target 83946; HLA-B*07:02; TDRD1; ENSG00000095627; TAA
KLAELQASL

SEQ ID NO: 83947 - protein, 9 aa, Homo sapiens
  misc_feature: Table A; Target 83947; HLA-B*08:01; TDRD1; ENSG00000095627; TAA
KLAELQASL

SEQ ID NO: 83948 - protein, 9 aa, Homo sapiens
  misc_feature: Table A; Target 83948; HLA-B*13:02; TDRD1; ENSG00000095627; TAA
KLAELQASL

SEQ ID NO: 83949 - protein, 9 aa, Homo sapiens
  misc_feature: Table A; Target 83949; HLA-B*15:01; TDRD1; ENSG00000095627; TAA
KLAELQASL

SEQ ID NO: 83950 - protein, 9 aa, Homo sapiens
  misc_feature: Table A; Target 83950; HLA-B*15:03; TDRD1; ENSG00000095627; TAA
KLAELQASL

SEQ ID NO: 83951 - protein, 9 aa, Homo sapiens
  misc_feature: Table A; Target 83951; HLA-B*40:01; TDRD1; ENSG00000095627; TAA
KLAELQASL

SEQ ID NO: 83952 - protein, 9 aa, Homo sapiens
  misc_feature: Table A; Target 83952; HLA-B*46:01; TDRD1; ENSG00000095627; TAA
KLAELQASL

SEQ ID NO: 83953 - protein, 9 aa, Homo sapiens
  misc_feature: Table A; Target 83953; HLA-B*55:01; TDRD1; ENSG00000095627; TAA
KLAELQASL

SEQ ID NO: 83954 - protein, 9 aa, Homo sapiens
  misc_feature: Table A; Target 83954; HLA-B*58:01; TDRD1; ENSG00000095627; TAA
KLAELQASL

SEQ ID NO: 83955 - protein, 9 aa, Homo sapiens
  misc_feature: Table A; Target 83955; HLA-C*01:02; TDRD1; ENSG00000095627; TAA
KLAELQASL

SEQ ID NO: 83956 - protein, 9 aa, Homo sapiens
  misc_feature: Table A; Target 83956; HLA-C*02:02; TDRD1; ENSG00000095627; TAA
KLAELQASL

SEQ ID NO: 83957 - protein, 9 aa, Homo sapiens
  misc_feature: Table A; Target 83957; HLA-C*16:01; TDRD1; ENSG00000095627; TAA
KLAELQASL

SEQ ID NO: 83958 - protein, 11 aa, Homo sapiens
  misc_feature: Table A; Target 83958; HLA-A*03:01; TDRD1; ENSG00000095627; TAA
KLAELQASLSK

SEQ ID NO: 83959 - protein, 11 aa, Homo sapiens
  misc_feature: Table A; Target 83959; HLA-A*03:02; TDRD1; ENSG00000095627; TAA
KLAELQASLSK

SEQ ID NO: 83960 - protein, 11 aa, Homo sapiens
  misc_feature: Table A; Target 83960; HLA-A*11:01; TDRD1; ENSG00000095627; TAA
KLAELQASLSK

SEQ ID NO: 83961 - protein, 11 aa, Homo sapiens
  misc_feature: Table A; Target 83961; HLA-A*03:02; TDRD1; ENSG00000095627; TAA
KLENKSSIETK

SEQ ID NO: 83962 - protein, 10 aa, Homo sapiens
  misc_feature: Table A; Target 83962; HLA-A*02:01; TDRD1; ENSG00000095627; TAA
KLLDHVLIEM

SEQ ID NO: 83963 - protein, 10 aa, Homo sapiens
  misc_feature: Table A; Target 83963; HLA-A*02:03; TDRD1; ENSG00000095627; TAA
KLLDHVLIEM

SEQ ID NO: 83964 - protein, 10 aa, Homo sapiens
  misc_feature: Table A; Target 83964; HLA-A*02:04; TDRD1; ENSG00000095627; TAA
KLLDHVLIEM

SEQ ID NO: 83965 - protein, 10 aa, Homo sapiens
  misc_feature: Table A; Target 83965; HLA-A*02:07; TDRD1; ENSG00000095627; TAA
KLLDHVLIEM

SEQ ID NO: 83966 - protein, 10 aa, Homo sapiens
  misc_feature: Table A; Target 83966; HLA-A*03:01; TDRD1; ENSG00000095627; TAA
KLLDHVLIEM

SEQ ID NO: 83967 - protein, 9 aa, Homo sapiens
  misc_feature: Table A; Target 83967; HLA-A*02:01; TDRD1; ENSG00000095627; TAA
KLLELPMQA

SEQ ID NO: 83968 - protein, 9 aa, Homo sapiens
  misc_feature: Table A; Target 83968; HLA-A*02:03; TDRD1; ENSG00000095627; TAA
KLNDLNKSL

SEQ ID NO: 83969 - protein, 9 aa, Homo sapiens
  misc_feature: Table A; Target 83969; HLA-A*02:04; TDRD1; ENSG00000095627; TAA
KLNDLNKSL

SEQ ID NO: 83970 - protein, 9 aa, Homo sapiens
  misc_feature: Table A; Target 83970; HLA-A*31:01; TDRD1; ENSG00000095627; TAA
KLNDLNKSL

SEQ ID NO: 83971 - protein, 9 aa, Homo sapiens
  misc_feature: Table A; Target 83971; HLA-A*32:01; TDRD1; ENSG00000095627; TAA
KLNDLNKSL

SEQ ID NO: 83972 - protein, 9 aa, Homo sapiens
  misc_feature: Table A; Target 83972; HLA-C*01:02; TDRD1; ENSG00000095627; TAA
KLNDLNKSL

SEQ ID NO: 83973 - protein, 11 aa, Homo sapiens
  misc_feature: Table A; Target 83973; HLA-C*01:02; TDRD1; ENSG00000095627; TAA
KLPAGNSVSPP

SEQ ID NO: 83974 - protein, 9 aa, Homo sapiens
  misc_feature: Table A; Target 83974; HLA-A*02:01; TDRD1; ENSG00000095627; TAA
KLQARVVEV

SEQ ID NO: 83975 - protein, 9 aa, Homo sapiens
  misc_feature: Table A; Target 83975; HLA-A*02:03; TDRD1; ENSG00000095627; TAA
KLQARVVEV

SEQ ID NO: 83976 - protein, 9 aa, Homo sapiens
  misc_feature: Table A; Target 83976; HLA-A*02:04; TDRD1; ENSG00000095627; TAA
KLQARVVEV

SEQ ID NO: 83977 - protein, 9 aa, Homo sapiens
  misc_feature: Table A; Target 83977; HLA-A*02:07; TDRD1; ENSG00000095627; TAA
KLQARVVEV

SEQ ID NO: 83978 - protein, 9 aa, Homo sapiens
  misc_feature: Table A; Target 83978; HLA-B*08:01; TDRD1; ENSG00000095627; TAA
KLQARVVEV

SEQ ID NO: 83979 - protein, 9 aa, Homo sapiens
  misc_feature: Table A; Target 83979; HLA-B*37:01; TDRD1; ENSG00000095627; TAA
KLQARVVEV

SEQ ID NO: 83980 - protein, 9 aa, Homo sapiens
  misc_feature: Table A; Target 83980; HLA-A*02:01; TDRD1; ENSG00000095627; TAA
KLVENSLSI

SEQ ID NO: 83981 - protein, 9 aa, Homo sapiens
  misc_feature: Table A; Target 83981; HLA-A*02:03; TDRD1; ENSG00000095627; TAA
KLVENSLSI

SEQ ID NO: 83982 - protein, 9 aa, Homo sapiens
  misc_feature: Table A; Target 83982; HLA-A*02:07; TDRD1; ENSG00000095627; TAA
KLVENSLSI

SEQ ID NO: 83983 - protein, 9 aa, Homo sapiens
  misc_feature: Table A; Target 83983; HLA-B*13:02; TDRD1; ENSG00000095627; TAA
KLVENSLSI

SEQ ID NO: 83984 - protein, 9 aa, Homo sapiens
  misc_feature: Table A; Target 83984; HLA-B*46:01; TDRD1; ENSG00000095627; TAA
KLVENSLSI

SEQ ID NO: 83985 - protein, 9 aa, Homo sapiens
  misc_feature: Table A; Target 83985; HLA-B*49:01; TDRD1; ENSG00000095627; TAA
KLVENSLSI

SEQ ID NO: 83986 - protein, 9 aa, Homo sapiens
  misc_feature: Table A; Target 83986; HLA-B*55:01; TDRD1; ENSG00000095627; TAA
KLVENSLSI

SEQ ID NO: 83987 - protein, 9 aa, Homo sapiens
  misc_feature: Table A; Target 83987; HLA-B*58:01; TDRD1; ENSG00000095627; TAA
KLVENSLSI

SEQ ID NO: 83988 - protein, 10 aa, Homo sapiens
  misc_feature: Table A; Target 83988; HLA-A*02:01; TDRD1; ENSG00000095627; TAA
KLVQNKIITV

SEQ ID NO: 83989 - protein, 10 aa, Homo sapiens
  misc_feature: Table A; Target 83989; HLA-A*02:03; TDRD1; ENSG00000095627; TAA
KLVQNKIITV

SEQ ID NO: 83990 - protein, 10 aa, Homo sapiens
  misc_feature: Table A; Target 83990; HLA-A*02:04; TDRD1; ENSG00000095627; TAA
KLVQNKIITV

SEQ ID NO: 83991 - protein, 10 aa, Homo sapiens
  misc_feature: Table A; Target 83991; HLA-A*02:07; TDRD1; ENSG00000095627; TAA
KLVQNKIITV

SEQ ID NO: 83992 - protein, 10 aa, Homo sapiens
  misc_feature: Table A; Target 83992; HLA-B*55:01; TDRD1; ENSG00000095627; TAA
KLVQNKIITV

SEQ ID NO: 83993 - protein, 11 aa, Homo sapiens
  misc_feature: Table A; Target 83993; HLA-A*03:01; TDRD1; ENSG00000095627; TAA
KLVQNKIITVK

SEQ ID NO: 83994 - protein, 9 aa, Homo sapiens
  misc_feature: Table A; Target 83994; HLA-A*03:01; TDRD1; ENSG00000095627; TAA
KLVTFGLAK

SEQ ID NO: 83995 - protein, 9 aa, Homo sapiens
  misc_feature: Table A; Target 83995; HLA-A*03:02; TDRD1; ENSG00000095627; TAA
KLVTFGLAK

SEQ ID NO: 83996 - protein, 9 aa, Homo sapiens
  misc_feature: Table A; Target 83996; HLA-A*11:01; TDRD1; ENSG00000095627; TAA
KLVTFGLAK

SEQ ID NO: 83997 - protein, 10 aa, Homo sapiens
  misc_feature: Table A; Target 83997; HLA-A*03:02; TDRD1; ENSG00000095627; TAA
KMTEPFNFEK

SEQ ID NO: 83998 - protein, 9 aa, Homo sapiens
  misc_feature: Table A; Target 83998; HLA-B*56:01; TDRD1; ENSG00000095627; TAA
KPGNNVRPA

SEQ ID NO: 83999 - protein, 10 aa, Homo sapiens
  misc_feature: Table A; Target 83999; HLA-B*07:02; TDRD1; ENSG00000095627; TAA
KPSDVKETSV

SEQ ID NO: 84000 - protein, 10 aa, Homo sapiens
  misc_feature: Table A; Target 84000; HLA-B*55:01; TDRD1; ENSG00000095627; TAA
KPSDVKETSV

SEQ ID NO: 84001 - protein, 10 aa, Homo sapiens
  misc_feature: Table A; Target 84001; HLA-B*56:01; TDRD1; ENSG00000095627; TAA
KPSDVKETSV

SEQ ID NO: 84002 - protein, 10 aa, Homo sapiens
  misc_feature: Table A; Target 84002; HLA-C*07:02; TDRD1; ENSG00000095627; TAA
KPSDVKETSV

SEQ ID NO: 84003 - protein, 10 aa, Homo sapiens
  misc_feature: Table A; Target 84003; HLA-A*03:01; TDRD1; ENSG00000095627; TAA
KSDCPLGVTK

SEQ ID NO: 84004 - protein, 10 aa, Homo sapiens
  misc_feature: Table A; Target 84004; HLA-A*03:02; TDRD1; ENSG00000095627; TAA
KSDCPLGVTK

SEQ ID NO: 84005 - protein, 10 aa, Homo sapiens
  misc_feature: Table A; Target 84005; HLA-A*11:01; TDRD1; ENSG00000095627; TAA
KSDCPLGVTK

SEQ ID NO: 84006 - protein, 9 aa, Homo sapiens
  misc_feature: Table A; Target 84006; HLA-C*05:01; TDRD1; ENSG00000095627; TAA
KSDLIPKVL

SEQ ID NO: 84007 - protein, 9 aa, Homo sapiens
  misc_feature: Table A; Target 84007; HLA-A*01:01; TDRD1; ENSG00000095627; TAA
KSETPHVSV

SEQ ID NO: 84008 - protein, 9 aa, Homo sapiens
  misc_feature: Table A; Target 84008; HLA-B*58:01; TDRD1; ENSG00000095627; TAA
KSETPHVSV

SEQ ID NO: 84009 - protein, 9 aa, Homo sapiens
  misc_feature: Table A; Target 84009; HLA-C*05:01; TDRD1; ENSG00000095627; TAA
KSETPHVSV

SEQ ID NO: 84010 - protein, 11 aa, Homo sapiens
  misc_feature: Table A; Target 84010; HLA-A*03:02; TDRD1; ENSG00000095627; TAA
KSETPHVSVSK

SEQ ID NO: 84011 - protein, 11 aa, Homo sapiens
  misc_feature: Table A; Target 84011; HLA-A*11:01; TDRD1; ENSG00000095627; TAA
KSETPHVSVSK

SEQ ID NO: 84012 - protein, 9 aa, Homo sapiens
  misc_feature: Table A; Target 84012; HLA-A*31:01; TDRD1; ENSG00000095627; TAA
KSRPPYRPR

SEQ ID NO: 84013 - protein, 9 aa, Homo sapiens
  misc_feature: Table A; Target 84013; HLA-A*03:01; TDRD1; ENSG00000095627; TAA
KTIELPVDK

SEQ ID NO: 84014 - protein, 9 aa, Homo sapiens
  misc_feature: Table A; Target 84014; HLA-A*03:02; TDRD1; ENSG00000095627; TAA
KTIELPVDK

SEQ ID NO: 84015 - protein, 9 aa, Homo sapiens
  misc_feature: Table A; Target 84015; HLA-A*11:01; TDRD1; ENSG00000095627; TAA
KTIELPVDK

SEQ ID NO: 84016 - protein, 9 aa, Homo sapiens
  misc_feature: Table A; Target 84016; HLA-A*32:01; TDRD1; ENSG00000095627; TAA
KTMEIKGTV

SEQ ID NO: 84017 - protein, 11 aa, Homo sapiens
  misc_feature: Table A; Target 84017; HLA-B*57:01; TDRD1; ENSG00000095627; TAA
KVLTLNVGDEF

SEQ ID NO: 84018 - protein, 9 aa, Homo sapiens
  misc_feature: Table A; Target 84018; HLA-A*32:01; TDRD1; ENSG00000095627; TAA
KVNPLEWTW

SEQ ID NO: 84019 - protein, 9 aa, Homo sapiens
  misc_feature: Table A; Target 84019; HLA-B*57:01; TDRD1; ENSG00000095627; TAA
KVNPLEWTW

SEQ ID NO: 84020 - protein, 9 aa, Homo sapiens
  misc_feature: Table A; Target 84020; HLA-B*58:01; TDRD1; ENSG00000095627; TAA
KVNPLEWTW

SEQ ID NO: 84021 - protein, 9 aa, Homo sapiens
  misc_feature: Table A; Target 84021; HLA-A*31:01; TDRD1; ENSG00000095627; TAA
KYCDQLPPR

SEQ ID NO: 84022 - protein, 10 aa, Homo sapiens
  misc_feature: Table A; Target 84022; HLA-A*31:01; TDRD1; ENSG00000095627; TAA
KYTSDDFWYR

SEQ ID NO: 84023 - protein, 8 aa, Homo sapiens
  misc_feature: Table A; Target 84023; HLA-B*58:01; TDRD1; ENSG00000095627; TAA
KYTVDQTW

SEQ ID NO: 84024 - protein, 9 aa, Homo sapiens
  misc_feature: Table A; Target 84024; HLA-A*03:01; TDRD1; ENSG00000095627; TAA
LADIQSRNK

SEQ ID NO: 84025 - protein, 9 aa, Homo sapiens
  misc_feature: Table A; Target 84025; HLA-A*03:02; TDRD1; ENSG00000095627; TAA
LADIQSRNK

SEQ ID NO: 84026 - protein, 9 aa, Homo sapiens
  misc_feature: Table A; Target 84026; HLA-A*11:01; TDRD1; ENSG00000095627; TAA
LADIQSRNK

SEQ ID NO: 84027 - protein, 8 aa, Homo sapiens
  misc_feature: Table A; Target 84027; HLA-C*05:01; TDRD1; ENSG00000095627; TAA
LAELQASL

SEQ ID NO: 84028 - protein, 11 aa, Homo sapiens
  misc_feature: Table A; Target 84028; HLA-A*01:01; TDRD1; ENSG00000095627; TAA
LAELQASLSKY

SEQ ID NO: 84029 - protein, 8 aa, Homo sapiens
  misc_feature: Table A; Target 84029; HLA-B*08:01; TDRD1; ENSG00000095627; TAA
LAGVKPSL

SEQ ID NO: 84030 - protein, 8 aa, Homo sapiens
  misc_feature: Table A; Target 84030; HLA-B*46:01; TDRD1; ENSG00000095627; TAA
LAGVKPSL

SEQ ID NO: 84031 - protein, 8 aa, Homo sapiens
  misc_feature: Table A; Target 84031; HLA-C*01:02; TDRD1; ENSG00000095627; TAA
LAGVKPSL

SEQ ID NO: 84032 - protein, 8 aa, Homo sapiens
  misc_feature: Table A; Target 84032; HLA-C*03:03; TDRD1; ENSG00000095627; TAA
LAGVKPSL

SEQ ID NO: 84033 - protein, 8 aa, Homo sapiens
  misc_feature: Table A; Target 84033; HLA-C*03:04; TDRD1; ENSG00000095627; TAA
LAGVKPSL

SEQ ID NO: 84034 - protein, 8 aa, Homo sapiens
  misc_feature: Table A; Target 84034; HLA-C*16:01; TDRD1; ENSG00000095627; TAA
LAGVKPSL

SEQ ID NO: 84035 - protein, 9 aa, Homo sapiens
  misc_feature: Table A; Target 84035; HLA-A*31:01; TDRD1; ENSG00000095627; TAA
LAKNITPQR

SEQ ID NO: 84036 - protein, 9 aa, Homo sapiens
  misc_feature: Table A; Target 84036; HLA-A*33:01; TDRD1; ENSG00000095627; TAA
LAKNITPQR

SEQ ID NO: 84037 - protein, 9 aa, Homo sapiens
  misc_feature: Table A; Target 84037; HLA-A*33:03; TDRD1; ENSG00000095627; TAA
LAKNITPQR

SEQ ID NO: 84038 - protein, 9 aa, Homo sapiens
  misc_feature: Table A; Target 84038; HLA-A*68:01; TDRD1; ENSG00000095627; TAA
LAKNITPQR

SEQ ID NO: 84039 - protein, 9 aa, Homo sapiens
  misc_feature: Table A; Target 84039; HLA-C*07:06; TDRD1; ENSG00000095627; TAA
LAKNITPQR

SEQ ID NO: 84040 - protein, 8 aa, Homo sapiens
  misc_feature: Table A; Target 84040; HLA-B*51:01; TDRD1; ENSG00000095627; TAA
LALPFQII

SEQ ID NO: 84041 - protein, 9 aa, Homo sapiens
  misc_feature: Table A; Target 84041; HLA-B*57:01; TDRD1; ENSG00000095627; TAA
LALPFQIIR

SEQ ID NO: 84042 - protein, 10 aa, Homo sapiens
  misc_feature: Table A; Target 84042; HLA-A*02:04; TDRD1; ENSG00000095627; TAA
LALPFQIIRC

SEQ ID NO: 84043 - protein, 9 aa, Homo sapiens
  misc_feature: Table A; Target 84043; HLA-B*35:03; TDRD1; ENSG00000095627; TAA
LAYASEESV

SEQ ID NO: 84044 - protein, 9 aa, Homo sapiens
  misc_feature: Table A; Target 84044; HLA-B*46:01; TDRD1; ENSG00000095627; TAA
LAYASEESV

SEQ ID NO: 84045 - protein, 9 aa, Homo sapiens
  misc_feature: Table A; Target 84045; HLA-B*51:01; TDRD1; ENSG00000095627; TAA
LAYASEESV

SEQ ID NO: 84046 - protein, 9 aa, Homo sapiens
  misc_feature: Table A; Target 84046; HLA-C*02:02; TDRD1; ENSG00000095627; TAA
LAYASEESV

SEQ ID NO: 84047 - protein, 9 aa, Homo sapiens
  misc_feature: Table A; Target 84047; HLA-C*03:03; TDRD1; ENSG00000095627; TAA
LAYASEESV

SEQ ID NO: 84048 - protein, 9 aa, Homo sapiens
  misc_feature: Table A; Target 84048; HLA-C*03:04; TDRD1; ENSG00000095627; TAA
LAYASEESV

SEQ ID NO: 84049 - protein, 9 aa, Homo sapiens
  misc_feature: Table A; Target 84049; HLA-C*16:04; TDRD1; ENSG00000095627; TAA
LAYASEESV

SEQ ID NO: 84050 - protein, 10 aa, Homo sapiens
  misc_feature: Table A; Target 84050; HLA-B*27:05; TDRD1; ENSG00000095627; TAA
LAYASEESVL

SEQ ID NO: 84051 - protein, 10 aa, Homo sapiens
  misc_feature: Table A; Target 84051; HLA-B*35:03; TDRD1; ENSG00000095627; TAA
LAYASEESVL

SEQ ID NO: 84052 - protein, 10 aa, Homo sapiens
  misc_feature: Table A; Target 84052; HLA-C*02:02; TDRD1; ENSG00000095627; TAA
LAYASEESVL

SEQ ID NO: 84053 - protein, 10 aa, Homo sapiens
  misc_feature: Table A; Target 84053; HLA-C*03:03; TDRD1; ENSG00000095627; TAA
LAYASEESVL

SEQ ID NO: 84054 - protein, 10 aa, Homo sapiens
  misc_feature: Table A; Target 84054; HLA-C*03:04; TDRD1; ENSG00000095627; TAA
LAYASEESVL

SEQ ID NO: 84055 - protein, 8 aa, Homo sapiens
  misc_feature: Table A; Target 84055; HLA-B*18:01; TDRD1; ENSG00000095627; TAA
LDHVLIEM

SEQ ID NO: 84056 - protein, 8 aa, Homo sapiens
  misc_feature: Table A; Target 84056; HLA-B*37:01; TDRD1; ENSG00000095627; TAA
LDHVLIEM

SEQ ID NO: 84057 - protein, 8 aa, Homo sapiens
  misc_feature: Table A; Target 84057; HLA-B*18:01; TDRD1; ENSG00000095627; TAA
LEAPPCKM

SEQ ID NO: 84058 - protein, 8 aa, Homo sapiens
  misc_feature: Table A; Target 84058; HLA-B*49:01; TDRD1; ENSG00000095627; TAA
LEAPPCKM

SEQ ID NO: 84059 - protein, 8 aa, Homo sapiens
  misc_feature: Table A; Target 84059; HLA-B*18:01; TDRD1; ENSG00000095627; TAA
LEEEVVTF

SEQ ID NO: 84060 - protein, 8 aa, Homo sapiens
  misc_feature: Table A; Target 84060; HLA-B*37:01; TDRD1; ENSG00000095627; TAA
LEEEVVTF

SEQ ID NO: 84061 - protein, 8 aa, Homo sapiens
  misc_feature: Table A; Target 84061; HLA-B*40:01; TDRD1; ENSG00000095627; TAA
LEEEVVTF

SEQ ID NO: 84062 - protein, 8 aa, Homo sapiens
  misc_feature: Table A; Target 84062; HLA-B*49:01; TDRD1; ENSG00000095627; TAA
LEEEVVTF

SEQ ID NO: 84063 - protein, 9 aa, Homo sapiens
  misc_feature: Table A; Target 84063; HLA-B*49:01; TDRD1; ENSG00000095627; TAA
LEEEVVTFA

SEQ ID NO: 84064 - protein, 8 aa, Homo sapiens
  misc_feature: Table A; Target 84064; HLA-A*30:01; TDRD1; ENSG00000095627; TAA
LEIISPNL

SEQ ID NO: 84065 - protein, 8 aa, Homo sapiens
  misc_feature: Table A; Target 84065; HLA-B*18:01; TDRD1; ENSG00000095627; TAA
LEIISPNL

SEQ ID NO: 84066 - protein, 8 aa, Homo sapiens
  misc_feature: Table A; Target 84066; HLA-B*40:01; TDRD1; ENSG00000095627; TAA
LEIISPNL

SEQ ID NO: 84067 - protein, 8 aa, Homo sapiens
  misc_feature: Table A; Target 84067; HLA-B*49:01; TDRD1; ENSG00000095627; TAA
LEIISPNL

SEQ ID NO: 84068 - protein, 9 aa, Homo sapiens
  misc_feature: Table A; Target 84068; HLA-B*18:01; TDRD1; ENSG00000095627; TAA
LEIISPNLF

SEQ ID NO: 84069 - protein, 9 aa, Homo sapiens
  misc_feature: Table A; Target 84069; HLA-B*44:02; TDRD1; ENSG00000095627; TAA
LEIISPNLF

SEQ ID NO: 84070 - protein, 9 aa, Homo sapiens
  misc_feature: Table A; Target 84070; HLA-B*44:03; TDRD1; ENSG00000095627; TAA
LEIISPNLF

SEQ ID NO: 84071 - protein, 9 aa, Homo sapiens
  misc_feature: Table A; Target 84071; HLA-B*49:01; TDRD1; ENSG00000095627; TAA
LEIISPNLF

SEQ ID NO: 84072 - protein, 10 aa, Homo sapiens
  misc_feature: Table A; Target 84072; HLA-A*29:02; TDRD1; ENSG00000095627; TAA
LEIISPNLFY

SEQ ID NO: 84073 - protein, 10 aa, Homo sapiens
  misc_feature: Table A; Target 84073; HLA-B*44:02; TDRD1; ENSG00000095627; TAA
LEIISPNLFY

SEQ ID NO: 84074 - protein, 10 aa, Homo sapiens
  misc_feature: Table A; Target 84074; HLA-B*44:03; TDRD1; ENSG00000095627; TAA
LEIISPNLFY

SEQ ID NO: 84075 - protein, 8 aa, Homo sapiens
  misc_feature: Table A; Target 84075; HLA-B*18:01; TDRD1; ENSG00000095627; TAA
LELPMQAI

SEQ ID NO: 84076 - protein, 8 aa, Homo sapiens
  misc_feature: Table A; Target 84076; HLA-B*49:01; TDRD1; ENSG00000095627; TAA
LELPMQAI

SEQ ID NO: 84077 - protein, 9 aa, Homo sapiens
  misc_feature: Table A; Target 84077; HLA-A*30:01; TDRD1; ENSG00000095627; TAA
LENSSLVEL

SEQ ID NO: 84078 - protein, 9 aa, Homo sapiens
  misc_feature: Table A; Target 84078; HLA-B*18:01; TDRD1; ENSG00000095627; TAA
LENSSLVEL

SEQ ID NO: 84079 - protein, 9 aa, Homo sapiens
  misc_feature: Table A; Target 84079; HLA-B*40:01; TDRD1; ENSG00000095627; TAA
LENSSLVEL

SEQ ID NO: 84080 - protein, 9 aa, Homo sapiens
  misc_feature: Table A; Target 84080; HLA-B*40:02; TDRD1; ENSG00000095627; TAA
LENSSLVEL

SEQ ID NO: 84081 - protein, 9 aa, Homo sapiens
  misc_feature: Table A; Target 84081; HLA-B*44:02; TDRD1; ENSG00000095627; TAA
LENSSLVEL

SEQ ID NO: 84082 - protein, 9 aa, Homo sapiens
  misc_feature: Table A; Target 84082; HLA-B*44:03; TDRD1; ENSG00000095627; TAA
LENSSLVEL

SEQ ID NO: 84083 - protein, 9 aa, Homo sapiens
  misc_feature: Table A; Target 84083; HLA-B*49:01; TDRD1; ENSG00000095627; TAA
LENSSLVEL

SEQ ID NO: 84084 - protein, 10 aa, Homo sapiens
  misc_feature: Table A; Target 84084; HLA-B*49:01; TDRD1; ENSG00000095627; TAA
LENSSLVELI

SEQ ID NO: 84085 - protein, 9 aa, Homo sapiens
  misc_feature: Table A; Target 84085; HLA-A*30:01; TDRD1; ENSG00000095627; TAA
LEYMNQLSA

SEQ ID NO: 84086 - protein, 9 aa, Homo sapiens
  misc_feature: Table A; Target 84086; HLA-B*49:01; TDRD1; ENSG00000095627; TAA
LEYMNQLSA

SEQ ID NO: 84087 - protein, 8 aa, Homo sapiens
  misc_feature: Table A; Target 84087; HLA-C*03:04; TDRD1; ENSG00000095627; TAA
LIDEHLVL

SEQ ID NO: 84088 - protein, 8 aa, Homo sapiens
  misc_feature: Table A; Target 84088; HLA-C*05:01; TDRD1; ENSG00000095627; TAA
LIDEHLVL

SEQ ID NO: 84089 - protein, 9 aa, Homo sapiens
  misc_feature: Table A; Target 84089; HLA-A*01:01; TDRD1; ENSG00000095627; TAA
LIDEHLVLK

SEQ ID NO: 84090 - protein, 9 aa, Homo sapiens
  misc_feature: Table A; Target 84090; HLA-A*02:07; TDRD1; ENSG00000095627; TAA
LIDEHLVLK

SEQ ID NO: 84091 - protein, 9 aa, Homo sapiens
  misc_feature: Table A; Target 84091; HLA-A*03:01; TDRD1; ENSG00000095627; TAA
LIDEHLVLK

SEQ ID NO: 84092 - protein, 9 aa, Homo sapiens
  misc_feature: Table A; Target 84092; HLA-A*03:02; TDRD1; ENSG00000095627; TAA
LIDEHLVLK

SEQ ID NO: 84093 - protein, 9 aa, Homo sapiens
  misc_feature: Table A; Target 84093; HLA-A*11:01; TDRD1; ENSG00000095627; TAA
LIDEHLVLK

SEQ ID NO: 84094 - protein, 9 aa, Homo sapiens
  misc_feature: Table A; Target 84094; HLA-C*05:01; TDRD1; ENSG00000095627; TAA
LIDEHLVLK

SEQ ID NO: 84095 - protein, 8 aa, Homo sapiens
  misc_feature: Table A; Target 84095; HLA-B*51:01; TDRD1; ENSG00000095627; TAA
LIPKVLTL

SEQ ID NO: 84096 - protein, 8 aa, Homo sapiens
  misc_feature: Table A; Target 84096; HLA-C*05:01; TDRD1; ENSG00000095627; TAA
LLDAGFAV

SEQ ID NO: 84097 - protein, 9 aa, Homo sapiens
  misc_feature: Table A; Target 84097; HLA-A*01:01; TDRD1; ENSG00000095627; TAA
LLDHVLIEM

SEQ ID NO: 84098 - protein, 9 aa, Homo sapiens
  misc_feature: Table A; Target 84098; HLA-A*02:01; TDRD1; ENSG00000095627; TAA
LLDHVLIEM

SEQ ID NO: 84099 - protein, 9 aa, Homo sapiens
  misc_feature: Table A; Target 84099; HLA-A*02:07; TDRD1; ENSG00000095627; TAA
LLDHVLIEM

SEQ ID NO: 84100 - protein, 9 aa, Homo sapiens
  misc_feature: Table A; Target 84100; HLA-C*05:01; TDRD1; ENSG00000095627; TAA
LLDHVLIEM

SEQ ID NO: 84101 - protein, 11 aa, Homo sapiens
  misc_feature: Table A; Target 84101; HLA-A*01:01; TDRD1; ENSG00000095627; TAA
LLDHVLIEMGY

SEQ ID NO: 84102 - protein, 10 aa, Homo sapiens
  misc_feature: Table A; Target 84102; HLA-A*03:01; TDRD1; ENSG00000095627; TAA
LLNNSTNQNK

SEQ ID NO: 84103 - protein, 10 aa, Homo sapiens
  misc_feature: Table A; Target 84103; HLA-A*03:02; TDRD1; ENSG00000095627; TAA
LLNNSTNQNK

SEQ ID NO: 84104 - protein, 9 aa, Homo sapiens
  misc_feature: Table A; Target 84104; HLA-B*08:01; TDRD1; ENSG00000095627; TAA
LNKLVENSL

SEQ ID NO: 84105 - protein, 9 aa, Homo sapiens
  misc_feature: Table A; Target 84105; HLA-B*56:01; TDRD1; ENSG00000095627; TAA
LPAGNSVSP

SEQ ID NO: 84106 - protein, 8 aa, Homo sapiens
  misc_feature: Table A; Target 84106; HLA-B*54:01; TDRD1; ENSG00000095627; TAA
LPFQGIRC

SEQ ID NO: 84107 - protein, 8 aa, Homo sapiens
  misc_feature: Table A; Target 84107; HLA-B*56:01; TDRD1; ENSG00000095627; TAA
LPFQGIRC

SEQ ID NO: 84108 - protein, 10 aa, Homo sapiens
  misc_feature: Table A; Target 84108; HLA-B*07:02; TDRD1; ENSG00000095627; TAA
LPFQGIRCQL

SEQ ID NO: 84109 - protein, 10 aa, Homo sapiens
  misc_feature: Table A; Target 84109; HLA-C*07:02; TDRD1; ENSG00000095627; TAA
LPFQGIRCQL

SEQ ID NO: 84110 - protein, 8 aa, Homo sapiens
  misc_feature: Table A; Target 84110; HLA-B*51:01; TDRD1; ENSG00000095627; TAA
LPFQIIRC

SEQ ID NO: 84111 - protein, 8 aa, Homo sapiens
  misc_feature: Table A; Target 84111; HLA-B*54:01; TDRD1; ENSG00000095627; TAA
LPFQIIRC

SEQ ID NO: 84112 - protein, 8 aa, Homo sapiens
  misc_feature: Table A; Target 84112; HLA-B*56:01; TDRD1; ENSG00000095627; TAA
LPFQIIRC

SEQ ID NO: 84113 - protein, 8 aa, Homo sapiens
  misc_feature: Table A; Target 84113; HLA-B*51:01; TDRD1; ENSG00000095627; TAA
LPMQAIKC

SEQ ID NO: 84114 - protein, 8 aa, Homo sapiens
  misc_feature: Table A; Target 84114; HLA-B*54:01; TDRD1; ENSG00000095627; TAA
LPMQAIKC

SEQ ID NO: 84115 - protein, 8 aa, Homo sapiens
  misc_feature: Table A; Target 84115; HLA-B*56:01; TDRD1; ENSG00000095627; TAA
LPMQAIKC

SEQ ID NO: 84116 - protein, 9 aa, Homo sapiens
  misc_feature: Table A; Target 84116; HLA-B*51:01; TDRD1; ENSG00000095627; TAA
LPMQAIKCV

SEQ ID NO: 84117 - protein, 9 aa, Homo sapiens
  misc_feature: Table A; Target 84117; HLA-B*54:01; TDRD1; ENSG00000095627; TAA
LPMQAIKCV

SEQ ID NO: 84118 - protein, 9 aa, Homo sapiens
  misc_feature: Table A; Target 84118; HLA-B*56:01; TDRD1; ENSG00000095627; TAA
LPMQAIKCV

SEQ ID NO: 84119 - protein, 10 aa, Homo sapiens
  misc_feature: Table A; Target 84119; HLA-B*07:02; TDRD1; ENSG00000095627; TAA
LPMQAIKCVL

SEQ ID NO: 84120 - protein, 10 aa, Homo sapiens
  misc_feature: Table A; Target 84120; HLA-B*35:03; TDRD1; ENSG00000095627; TAA
LPMQAIKCVL

SEQ ID NO: 84121 - protein, 10 aa, Homo sapiens
  misc_feature: Table A; Target 84121; HLA-C*07:02; TDRD1; ENSG00000095627; TAA
LPMQAIKCVL

SEQ ID NO: 84122 - protein, 11 aa, Homo sapiens
  misc_feature: Table A; Target 84122; HLA-B*54:01; TDRD1; ENSG00000095627; TAA
LPMQAIKCVLA

SEQ ID NO: 84123 - protein, 9 aa, Homo sapiens
  misc_feature: Table A; Target 84123; HLA-A*03:02; TDRD1; ENSG00000095627; TAA
LPNDRLVNK

SEQ ID NO: 84124 - protein, 9 aa, Homo sapiens
  misc_feature: Table A; Target 84124; HLA-B*07:02; TDRD1; ENSG00000095627; TAA
LPNGFKAEI

SEQ ID NO: 84125 - protein, 9 aa, Homo sapiens
  misc_feature: Table A; Target 84125; HLA-B*08:01; TDRD1; ENSG00000095627; TAA
LPNGFKAEI

SEQ ID NO: 84126 - protein, 9 aa, Homo sapiens
  misc_feature: Table A; Target 84126; HLA-B*35:03; TDRD1; ENSG00000095627; TAA
LPNGFKAEI

SEQ ID NO: 84127 - protein, 9 aa, Homo sapiens
  misc_feature: Table A; Target 84127; HLA-B*51:01; TDRD1; ENSG00000095627; TAA
LPNGFKAEI

SEQ ID NO: 84128 - protein, 9 aa, Homo sapiens
  misc_feature: Table A; Target 84128; HLA-B*54:01; TDRD1; ENSG00000095627; TAA
LPNGFKAEI

SEQ ID NO: 84129 - protein, 9 aa, Homo sapiens
  misc_feature: Table A; Target 84129; HLA-B*56:01; TDRD1; ENSG00000095627; TAA
LPNGFKAEI

SEQ ID NO: 84130 - protein, 9 aa, Homo sapiens
  misc_feature: Table A; Target 84130; HLA-C*07:02; TDRD1; ENSG00000095627; TAA
LPNGFKAEI

SEQ ID NO: 84131 - protein, 8 aa, Homo sapiens
  misc_feature: Table A; Target 84131; HLA-B*08:01; TDRD1; ENSG00000095627; TAA
LPNGHVKV

SEQ ID NO: 84132 - protein, 8 aa, Homo sapiens
  misc_feature: Table A; Target 84132; HLA-B*51:01; TDRD1; ENSG00000095627; TAA
LPNGHVKV

SEQ ID NO: 84133 - protein, 8 aa, Homo sapiens
  misc_feature: Table A; Target 84133; HLA-B*56:01; TDRD1; ENSG00000095627; TAA
LPNGHVKV

SEQ ID NO: 84134 - protein, 10 aa, Homo sapiens
  misc_feature: Table A; Target 84134; HLA-B*54:01; TDRD1; ENSG00000095627; TAA
LPPRSDFYPA

SEQ ID NO: 84135 - protein, 9 aa, Homo sapiens
  misc_feature: Table A; Target 84135; HLA-B*08:01; TDRD1; ENSG00000095627; TAA
LPVDKTIQA

SEQ ID NO: 84136 - protein, 9 aa, Homo sapiens
  misc_feature: Table A; Target 84136; HLA-B*35:01; TDRD1; ENSG00000095627; TAA
LPVDKTIQA

SEQ ID NO: 84137 - protein, 9 aa, Homo sapiens
  misc_feature: Table A; Target 84137; HLA-B*35:03; TDRD1; ENSG00000095627; TAA
LPVDKTIQA

SEQ ID NO: 84138 - protein, 9 aa, Homo sapiens
  misc_feature: Table A; Target 84138; HLA-B*51:01; TDRD1; ENSG00000095627; TAA
LPVDKTIQA

SEQ ID NO: 84139 - protein, 9 aa, Homo sapiens
  misc_feature: Table A; Target 84139; HLA-B*54:01; TDRD1; ENSG00000095627; TAA
LPVDKTIQA

SEQ ID NO: 84140 - protein, 9 aa, Homo sapiens
  misc_feature: Table A; Target 84140; HLA-B*55:01; TDRD1; ENSG00000095627; TAA
LPVDKTIQA

SEQ ID NO: 84141 - protein, 9 aa, Homo sapiens
  misc_feature: Table A; Target 84141; HLA-B*56:01; TDRD1; ENSG00000095627; TAA
LPVDKTIQA

SEQ ID NO: 84142 - protein, 11 aa, Homo sapiens
  misc_feature: Table A; Target 84142; HLA-B*51:01; TDRD1; ENSG00000095627; TAA
LPVDKTIQANV

SEQ ID NO: 84143 - protein, 11 aa, Homo sapiens
  misc_feature: Table A; Target 84143; HLA-B*56:01; TDRD1; ENSG00000095627; TAA
LPVDKTIQANV

SEQ ID NO: 84144 - protein, 8 aa, Homo sapiens
  misc_feature: Table A; Target 84144; HLA-A*30:02; TDRD1; ENSG00000095627; TAA
LQASLSKY

SEQ ID NO: 84145 - protein, 8 aa, Homo sapiens
  misc_feature: Table A; Target 84145; HLA-A*32:01; TDRD1; ENSG00000095627; TAA
LQASLSKY

SEQ ID NO: 84146 - protein, 8 aa, Homo sapiens
  misc_feature: Table A; Target 84146; HLA-B*15:01; TDRD1; ENSG00000095627; TAA
LQASLSKY

SEQ ID NO: 84147 - protein, 8 aa, Homo sapiens
  misc_feature: Table A; Target 84147; HLA-B*15:03; TDRD1; ENSG00000095627; TAA
LQASLSKY

SEQ ID NO: 84148 - protein, 8 aa, Homo sapiens
  misc_feature: Table A; Target 84148; HLA-B*46:01; TDRD1; ENSG00000095627; TAA
LQASLSKY

SEQ ID NO: 84149 - protein, 8 aa, Homo sapiens
  misc_feature: Table A; Target 84149; HLA-C*02:02; TDRD1; ENSG00000095627; TAA
LQASLSKY

SEQ ID NO: 84150 - protein, 8 aa, Homo sapiens
  misc_feature: Table A; Target 84150; HLA-C*07:04; TDRD1; ENSG00000095627; TAA
LQASLSKY

SEQ ID NO: 84151 - protein, 8 aa, Homo sapiens
  misc_feature: Table A; Target 84151; HLA-C*16:02; TDRD1; ENSG00000095627; TAA
LQASLSKY

SEQ ID NO: 84152 - protein, 10 aa, Homo sapiens
  misc_feature: Table A; Target 84152; HLA-B*58:01; TDRD1; ENSG00000095627; TAA
LQATSSAEQW

SEQ ID NO: 84153 - protein, 10 aa, Homo sapiens
  misc_feature: Table A; Target 84153; HLA-C*16:04; TDRD1; ENSG00000095627; TAA
LQATSSAEQW

SEQ ID NO: 84154 - protein, 8 aa, Homo sapiens
  misc_feature: Table A; Target 84154; HLA-B*15:01; TDRD1; ENSG00000095627; TAA
LQVHVQGL

SEQ ID NO: 84155 - protein, 9 aa, Homo sapiens
  misc_feature: Table A; Target 84155; HLA-A*01:01; TDRD1; ENSG00000095627; TAA
LSASLKETY

SEQ ID NO: 84156 - protein, 9 aa, Homo sapiens
  misc_feature: Table A; Target 84156; HLA-A*26:01; TDRD1; ENSG00000095627; TAA
LSASLKETY

SEQ ID NO: 84157 - protein, 9 aa, Homo sapiens
  misc_feature: Table A; Target 84157; HLA-A*29:02; TDRD1; ENSG00000095627; TAA
LSASLKETY

SEQ ID NO: 84158 - protein, 9 aa, Homo sapiens
  misc_feature: Table A; Target 84158; HLA-A*30:02; TDRD1; ENSG00000095627; TAA
LSASLKETY

SEQ ID NO: 84159 - protein, 9 aa, Homo sapiens
  misc_feature: Table A; Target 84159; HLA-A*32:01; TDRD1; ENSG00000095627; TAA
LSASLKETY

SEQ ID NO: 84160 - protein, 9 aa, Homo sapiens
  misc_feature: Table A; Target 84160; HLA-B*15:01; TDRD1; ENSG00000095627; TAA
LSASLKETY

SEQ ID NO: 84161 - protein, 9 aa, Homo sapiens
  misc_feature: Table A; Target 84161; HLA-B*15:03; TDRD1; ENSG00000095627; TAA
LSASLKETY

SEQ ID NO: 84162 - protein, 9 aa, Homo sapiens
  misc_feature: Table A; Target 84162; HLA-B*18:01; TDRD1; ENSG00000095627; TAA
LSASLKETY

SEQ ID NO: 84163 - protein, 9 aa, Homo sapiens
  misc_feature: Table A; Target 84163; HLA-B*46:01; TDRD1; ENSG00000095627; TAA
LSASLKETY

SEQ ID NO: 84164 - protein, 9 aa, Homo sapiens
  misc_feature: Table A; Target 84164; HLA-B*57:01; TDRD1; ENSG00000095627; TAA
LSASLKETY

SEQ ID NO: 84165 - protein, 9 aa, Homo sapiens
  misc_feature: Table A; Target 84165; HLA-B*58:01; TDRD1; ENSG00000095627; TAA
LSASLKETY

SEQ ID NO: 84166 - protein, 9 aa, Homo sapiens
  misc_feature: Table A; Target 84166; HLA-C*02:02; TDRD1; ENSG00000095627; TAA
LSASLKETY

SEQ ID NO: 84167 - protein, 9 aa, Homo sapiens
  misc_feature: Table A; Target 84167; HLA-C*07:04; TDRD1; ENSG00000095627; TAA
LSASLKETY

SEQ ID NO: 84168 - protein, 9 aa, Homo sapiens
  misc_feature: Table A; Target 84168; HLA-C*12:03; TDRD1; ENSG00000095627; TAA
LSASLKETY

SEQ ID NO: 84169 - protein, 9 aa, Homo sapiens
  misc_feature: Table A; Target 84169; HLA-C*16:01; TDRD1; ENSG00000095627; TAA
LSASLKETY

SEQ ID NO: 84170 - protein, 9 aa, Homo sapiens
  misc_feature: Table A; Target 84170; HLA-C*16:02; TDRD1; ENSG00000095627; TAA
LSASLKETY

SEQ ID NO: 84171 - protein, 9 aa, Homo sapiens
  misc_feature: Table A; Target 84171; HLA-C*16:04; TDRD1; ENSG00000095627; TAA
LSASLKETY

SEQ ID NO: 84172 - protein, 9 aa, Homo sapiens
  misc_feature: Table A; Target 84172; HLA-A*01:01; TDRD1; ENSG00000095627; TAA
LSISNPGLF

SEQ ID NO: 84173 - protein, 9 aa, Homo sapiens
  misc_feature: Table A; Target 84173; HLA-A*23:01; TDRD1; ENSG00000095627; TAA
LSISNPGLF

SEQ ID NO: 84174 - protein, 9 aa, Homo sapiens
  misc_feature: Table A; Target 84174; HLA-B*57:01; TDRD1; ENSG00000095627; TAA
LSISNPGLF

SEQ ID NO: 84175 - protein, 9 aa, Homo sapiens
  misc_feature: Table A; Target 84175; HLA-B*58:01; TDRD1; ENSG00000095627; TAA
LSISNPGLF

SEQ ID NO: 84176 - protein, 9 aa, Homo sapiens
  misc_feature: Table A; Target 84176; HLA-C*02:02; TDRD1; ENSG00000095627; TAA
LSISNPGLF

SEQ ID NO: 84177 - protein, 8 aa, Homo sapiens
  misc_feature: Table A; Target 84177; HLA-A*01:01; TDRD1; ENSG00000095627; TAA
LTAELLEY

SEQ ID NO: 84178 - protein, 8 aa, Homo sapiens
  misc_feature: Table A; Target 84178; HLA-B*18:01; TDRD1; ENSG00000095627; TAA
LTAELLEY

SEQ ID NO: 84179 - protein, 8 aa, Homo sapiens
  misc_feature: Table A; Target 84179; HLA-B*46:01; TDRD1; ENSG00000095627; TAA
LTAELLEY

SEQ ID NO: 84180 - protein, 8 aa, Homo sapiens
  misc_feature: Table A; Target 84180; HLA-A*01:01; TDRD1; ENSG00000095627; TAA
LTDLSTCY

SEQ ID NO: 84181 - protein, 8 aa, Homo sapiens
  misc_feature: Table A; Target 84181; HLA-C*05:01; TDRD1; ENSG00000095627; TAA
LTDLSTCY

SEQ ID NO: 84182 - protein, 9 aa, Homo sapiens
  misc_feature: Table A; Target 84182; HLA-A*23:01; TDRD1; ENSG00000095627; TAA
LTLNVGDEF

SEQ ID NO: 84183 - protein, 9 aa, Homo sapiens
  misc_feature: Table A; Target 84183; HLA-B*57:01; TDRD1; ENSG00000095627; TAA
LTLNVGDEF

SEQ ID NO: 84184 - protein, 9 aa, Homo sapiens
  misc_feature: Table A; Target 84184; HLA-B*58:01; TDRD1; ENSG00000095627; TAA
LTLNVGDEF

SEQ ID NO: 84185 - protein, 9 aa, Homo sapiens
  misc_feature: Table A; Target 84185; HLA-C*03:03; TDRD1; ENSG00000095627; TAA
LTLNVGDEF

SEQ ID NO: 84186 - protein, 9 aa, Homo sapiens
  misc_feature: Table A; Target 84186; HLA-C*03:04; TDRD1; ENSG00000095627; TAA
LTLNVGDEF

SEQ ID NO: 84187 - protein, 9 aa, Homo sapiens
  misc_feature: Table A; Target 84187; HLA-B*13:02; TDRD1; ENSG00000095627; TAA
LVNKHELQV

SEQ ID NO: 84188 - protein, 9 aa, Homo sapiens
  misc_feature: Table A; Target 84188; HLA-A*02:01; TDRD1; ENSG00000095627; TAA
LVQNKIITV

SEQ ID NO: 84189 - protein, 9 aa, Homo sapiens
  misc_feature: Table A; Target 84189; HLA-A*02:03; TDRD1; ENSG00000095627; TAA
LVQNKIITV

SEQ ID NO: 84190 - protein, 9 aa, Homo sapiens
  misc_feature: Table A; Target 84190; HLA-A*02:04; TDRD1; ENSG00000095627; TAA
LVQNKIITV

SEQ ID NO: 84191 - protein, 9 aa, Homo sapiens
  misc_feature: Table A; Target 84191; HLA-A*02:07; TDRD1; ENSG00000095627; TAA
LVQNKIITV

SEQ ID NO: 84192 - protein, 9 aa, Homo sapiens
  misc_feature: Table A; Target 84192; HLA-A*68:02; TDRD1; ENSG00000095627; TAA
LVQNKIITV

SEQ ID NO: 84193 - protein, 9 aa, Homo sapiens
  misc_feature: Table A; Target 84193; HLA-B*08:01; TDRD1; ENSG00000095627; TAA
LVQNKIITV

SEQ ID NO: 84194 - protein, 9 aa, Homo sapiens
  misc_feature: Table A; Target 84194; HLA-B*13:02; TDRD1; ENSG00000095627; TAA
LVQNKIITV

SEQ ID NO: 84195 - protein, 9 aa, Homo sapiens
  misc_feature: Table A; Target 84195; HLA-C*02:02; TDRD1; ENSG00000095627; TAA
LVQNKIITV

SEQ ID NO: 84196 - protein, 9 aa, Homo sapiens
  misc_feature: Table A; Target 84196; HLA-C*12:03; TDRD1; ENSG00000095627; TAA
LVQNKIITV

SEQ ID NO: 84197 - protein, 10 aa, Homo sapiens
  misc_feature: Table A; Target 84197; HLA-A*03:01; TDRD1; ENSG00000095627; TAA
LVQNKIITVK

SEQ ID NO: 84198 - protein, 10 aa, Homo sapiens
  misc_feature: Table A; Target 84198; HLA-A*03:02; TDRD1; ENSG00000095627; TAA
LVQNKIITVK

SEQ ID NO: 84199 - protein, 10 aa, Homo sapiens
  misc_feature: Table A; Target 84199; HLA-A*11:01; TDRD1; ENSG00000095627; TAA
LVQNKIITVK

SEQ ID NO: 84200 - protein, 11 aa, Homo sapiens
  misc_feature: Table A; Target 84200; HLA-A*23:01; TDRD1; ENSG00000095627; TAA
LYADYGNIETL

SEQ ID NO: 84201 - protein, 11 aa, Homo sapiens
  misc_feature: Table A; Target 84201; HLA-A*24:02; TDRD1; ENSG00000095627; TAA
LYADYGNIETL

SEQ ID NO: 84202 - protein, 10 aa, Homo sapiens
  misc_feature: Table A; Target 84202; HLA-A*23:01; TDRD1; ENSG00000095627; TAA
LYIDYGNEEI

SEQ ID NO: 84203 - protein, 10 aa, Homo sapiens
  misc_feature: Table A; Target 84203; HLA-A*24:02; TDRD1; ENSG00000095627; TAA
LYIDYGNEEI

SEQ ID NO: 84204 - protein, 10 aa, Homo sapiens
  misc_feature: Table A; Target 84204; HLA-C*14:02; TDRD1; ENSG00000095627; TAA
LYIDYGNEEI

SEQ ID NO: 84205 - protein, 9 aa, Homo sapiens
  misc_feature: Table A; Target 84205; HLA-A*01:01; TDRD1; ENSG00000095627; TAA
LYSSEVLEY

SEQ ID NO: 84206 - protein, 9 aa, Homo sapiens
  misc_feature: Table A; Target 84206; HLA-A*23:01; TDRD1; ENSG00000095627; TAA
LYSSEVLEY

SEQ ID NO: 84207 - protein, 9 aa, Homo sapiens
  misc_feature: Table A; Target 84207; HLA-A*24:02; TDRD1; ENSG00000095627; TAA
LYSSEVLEY

SEQ ID NO: 84208 - protein, 9 aa, Homo sapiens
  misc_feature: Table A; Target 84208; HLA-A*29:02; TDRD1; ENSG00000095627; TAA
LYSSEVLEY

SEQ ID NO: 84209 - protein, 9 aa, Homo sapiens
  misc_feature: Table A; Target 84209; HLA-A*30:02; TDRD1; ENSG00000095627; TAA
LYSSEVLEY

SEQ ID NO: 84210 - protein, 9 aa, Homo sapiens
  misc_feature: Table A; Target 84210; HLA-B*15:03; TDRD1; ENSG00000095627; TAA
LYSSEVLEY

SEQ ID NO: 84211 - protein, 9 aa, Homo sapiens
  misc_feature: Table A; Target 84211; HLA-B*35:01; TDRD1; ENSG00000095627; TAA
LYSSEVLEY

SEQ ID NO: 84212 - protein, 9 aa, Homo sapiens
  misc_feature: Table A; Target 84212; HLA-C*01:02; TDRD1; ENSG00000095627; TAA
LYSSEVLEY

SEQ ID NO: 84213 - protein, 9 aa, Homo sapiens
  misc_feature: Table A; Target 84213; HLA-C*02:02; TDRD1; ENSG00000095627; TAA
LYSSEVLEY

SEQ ID NO: 84214 - protein, 9 aa, Homo sapiens
  misc_feature: Table A; Target 84214; HLA-C*07:04; TDRD1; ENSG00000095627; TAA
LYSSEVLEY

SEQ ID NO: 84215 - protein, 9 aa, Homo sapiens
  misc_feature: Table A; Target 84215; HLA-C*14:02; TDRD1; ENSG00000095627; TAA
LYSSEVLEY

SEQ ID NO: 84216 - protein, 9 aa, Homo sapiens
  misc_feature: Table A; Target 84216; HLA-C*16:01; TDRD1; ENSG00000095627; TAA
LYSSEVLEY

SEQ ID NO: 84217 - protein, 8 aa, Homo sapiens
  misc_feature: Table A; Target 84217; HLA-B*18:01; TDRD1; ENSG00000095627; TAA
MEIKGTVT

SEQ ID NO: 84218 - protein, 8 aa, Homo sapiens
  misc_feature: Table A; Target 84218; HLA-B*40:02; TDRD1; ENSG00000095627; TAA
MEIKGTVT

SEQ ID NO: 84219 - protein, 8 aa, Homo sapiens
  misc_feature: Table A; Target 84219; HLA-B*49:01; TDRD1; ENSG00000095627; TAA
MEIKGTVT

SEQ ID NO: 84220 - protein, 9 aa, Homo sapiens
  misc_feature: Table A; Target 84220; HLA-B*49:01; TDRD1; ENSG00000095627; TAA
MEIKGTVTE

SEQ ID NO: 84221 - protein, 10 aa, Homo sapiens
  misc_feature: Table A; Target 84221; HLA-A*23:01; TDRD1; ENSG00000095627; TAA
MEIKGTVTEF

SEQ ID NO: 84222 - protein, 10 aa, Homo sapiens
  misc_feature: Table A; Target 84222; HLA-A*25:01; TDRD1; ENSG00000095627; TAA
MEIKGTVTEF

SEQ ID NO: 84223 - protein, 10 aa, Homo sapiens
  misc_feature: Table A; Target 84223; HLA-A*26:01; TDRD1; ENSG00000095627; TAA
MEIKGTVTEF

SEQ ID NO: 84224 - protein, 10 aa, Homo sapiens
  misc_feature: Table A; Target 84224; HLA-A*30:01; TDRD1; ENSG00000095627; TAA
MEIKGTVTEF

SEQ ID NO: 84225 - protein, 10 aa, Homo sapiens
  misc_feature: Table A; Target 84225; HLA-B*15:03; TDRD1; ENSG00000095627; TAA
MEIKGTVTEF

SEQ ID NO: 84226 - protein, 10 aa, Homo sapiens
  misc_feature: Table A; Target 84226; HLA-B*18:01; TDRD1; ENSG00000095627; TAA
MEIKGTVTEF

SEQ ID NO: 84227 - protein, 10 aa, Homo sapiens
  misc_feature: Table A; Target 84227; HLA-B*27:02; TDRD1; ENSG00000095627; TAA
MEIKGTVTEF

SEQ ID NO: 84228 - protein, 10 aa, Homo sapiens
  misc_feature: Table A; Target 84228; HLA-B*35:01; TDRD1; ENSG00000095627; TAA
MEIKGTVTEF

SEQ ID NO: 84229 - protein, 10 aa, Homo sapiens
  misc_feature: Table A; Target 84229; HLA-B*37:01; TDRD1; ENSG00000095627; TAA
MEIKGTVTEF

SEQ ID NO: 84230 - protein, 10 aa, Homo sapiens
  misc_feature: Table A; Target 84230; HLA-B*40:01; TDRD1; ENSG00000095627; TAA
MEIKGTVTEF

SEQ ID NO: 84231 - protein, 10 aa, Homo sapiens
  misc_feature: Table A; Target 84231; HLA-B*40:02; TDRD1; ENSG00000095627; TAA
MEIKGTVTEF

SEQ ID NO: 84232 - protein, 10 aa, Homo sapiens
  misc_feature: Table A; Target 84232; HLA-B*44:02; TDRD1; ENSG00000095627; TAA
MEIKGTVTEF

SEQ ID NO: 84233 - protein, 10 aa, Homo sapiens
  misc_feature: Table A; Target 84233; HLA-B*44:03; TDRD1; ENSG00000095627; TAA
MEIKGTVTEF

SEQ ID NO: 84234 - protein, 10 aa, Homo sapiens
  misc_feature: Table A; Target 84234; HLA-B*49:01; TDRD1; ENSG00000095627; TAA
MEIKGTVTEF

SEQ ID NO: 84235 - protein, 10 aa, Homo sapiens
  misc_feature: Table A; Target 84235; HLA-C*16:04; TDRD1; ENSG00000095627; TAA
MEIKGTVTEF

SEQ ID NO: 84236 - protein, 10 aa, Homo sapiens
  misc_feature: Table A; Target 84236; HLA-A*30:01; TDRD1; ENSG00000095627; TAA
MELNGSSSQL

SEQ ID NO: 84237 - protein, 10 aa, Homo sapiens
  misc_feature: Table A; Target 84237; HLA-B*40:01; TDRD1; ENSG00000095627; TAA
MELNGSSSQL

SEQ ID NO: 84238 - protein, 10 aa, Homo sapiens
  misc_feature: Table A; Target 84238; HLA-B*49:01; TDRD1; ENSG00000095627; TAA
MELNGSSSQL

SEQ ID NO: 84239 - protein, 11 aa, Homo sapiens
  misc_feature: Table A; Target 84239; HLA-B*49:01; TDRD1; ENSG00000095627; TAA
MELNGSSSQLI

SEQ ID NO: 84240 - protein, 9 aa, Homo sapiens
  misc_feature: Table A; Target 84240; HLA-B*49:01; TDRD1; ENSG00000095627; TAA
MEQYCSIKI

SEQ ID NO: 84241 - protein, 9 aa, Homo sapiens
  misc_feature: Table A; Target 84241; HLA-A*02:07; TDRD1; ENSG00000095627; TAA
MISSTFLNL

SEQ ID NO: 84242 - protein, 9 aa, Homo sapiens
  misc_feature: Table A; Target 84242; HLA-A*03:01; TDRD1; ENSG00000095627; TAA
MISSTFLNL

SEQ ID NO: 84243 - protein, 9 aa, Homo sapiens
  misc_feature: Table A; Target 84243; HLA-A*68:02; TDRD1; ENSG00000095627; TAA
MISSTFLNL

SEQ ID NO: 84244 - protein, 8 aa, Homo sapiens
  misc_feature: Table A; Target 84244; HLA-B*08:01; TDRD1; ENSG00000095627; TAA
MLNQNVML

SEQ ID NO: 84245 - protein, 10 aa, Homo sapiens
  misc_feature: Table A; Target 84245; HLA-A*02:03; TDRD1; ENSG00000095627; TAA
MLNQNVMLSV

SEQ ID NO: 84246 - protein, 11 aa, Homo sapiens
  misc_feature: Table A; Target 84246; HLA-A*03:01; TDRD1; ENSG00000095627; TAA
MLNQNVMLSVK

SEQ ID NO: 84247 - protein, 9 aa, Homo sapiens
  misc_feature: Table A; Target 84247; HLA-A*03:01; TDRD1; ENSG00000095627; TAA
MLSVKGITK

SEQ ID NO: 84248 - protein, 9 aa, Homo sapiens
  misc_feature: Table A; Target 84248; HLA-A*03:02; TDRD1; ENSG00000095627; TAA
MLSVKGITK

SEQ ID NO: 84249 - protein, 9 aa, Homo sapiens
  misc_feature: Table A; Target 84249; HLA-C*07:06; TDRD1; ENSG00000095627; TAA
MLSVKGITK

SEQ ID NO: 84250 - protein, 9 aa, Homo sapiens
  misc_feature: Table A; Target 84250; HLA-A*01:01; TDRD1; ENSG00000095627; TAA
MLTAELLEY

SEQ ID NO: 84251 - protein, 9 aa, Homo sapiens
  misc_feature: Table A; Target 84251; HLA-A*29:02; TDRD1; ENSG00000095627; TAA
MLTAELLEY

SEQ ID NO: 84252 - protein, 9 aa, Homo sapiens
  misc_feature: Table A; Target 84252; HLA-A*30:02; TDRD1; ENSG00000095627; TAA
MLTAELLEY

SEQ ID NO: 84253 - protein, 9 aa, Homo sapiens
  misc_feature: Table A; Target 84253; HLA-B*15:01; TDRD1; ENSG00000095627; TAA
MLTAELLEY

SEQ ID NO: 84254 - protein, 9 aa, Homo sapiens
  misc_feature: Table A; Target 84254; HLA-B*15:03; TDRD1; ENSG00000095627; TAA
MLTAELLEY

SEQ ID NO: 84255 - protein, 9 aa, Homo sapiens
  misc_feature: Table A; Target 84255; HLA-B*35:01; TDRD1; ENSG00000095627; TAA
MLTAELLEY

SEQ ID NO: 84256 - protein, 9 aa, Homo sapiens
  misc_feature: Table A; Target 84256; HLA-B*46:01; TDRD1; ENSG00000095627; TAA
MLTAELLEY

SEQ ID NO: 84257 - protein, 9 aa, Homo sapiens
  misc_feature: Table A; Target 84257; HLA-B*55:01; TDRD1; ENSG00000095627; TAA
MLTAELLEY

SEQ ID NO: 84258 - protein, 9 aa, Homo sapiens
  misc_feature: Table A; Target 84258; HLA-C*07:04; TDRD1; ENSG00000095627; TAA
MLTAELLEY

SEQ ID NO: 84259 - protein, 9 aa, Homo sapiens
  misc_feature: Table A; Target 84259; HLA-C*16:01; TDRD1; ENSG00000095627; TAA
MLTAELLEY

SEQ ID NO: 84260 - protein, 8 aa, Homo sapiens
  misc_feature: Table A; Target 84260; HLA-C*14:02; TDRD1; ENSG00000095627; TAA
MNQLSASL

SEQ ID NO: 84261 - protein, 8 aa, Homo sapiens
  misc_feature: Table A; Target 84261; HLA-B*35:03; TDRD1; ENSG00000095627; TAA
MPENQEKL

SEQ ID NO: 84262 - protein, 10 aa, Homo sapiens
  misc_feature: Table A; Target 84262; HLA-B*35:01; TDRD1; ENSG00000095627; TAA
MPENQEKLCM

SEQ ID NO: 84263 - protein, 10 aa, Homo sapiens
  misc_feature: Table A; Target 84263; HLA-B*35:03; TDRD1; ENSG00000095627; TAA
MPENQEKLCM

SEQ ID NO: 84264 - protein, 10 aa, Homo sapiens
  misc_feature: Table A; Target 84264; HLA-B*55:01; TDRD1; ENSG00000095627; TAA
MPENQEKLCM

SEQ ID NO: 84265 - protein, 8 aa, Homo sapiens
  misc_feature: Table A; Target 84265; HLA-B*08:01; TDRD1; ENSG00000095627; TAA
MQAIKCVL

SEQ ID NO: 84266 - protein, 9 aa, Homo sapiens
  misc_feature: Table A; Target 84266; HLA-A*01:01; TDRD1; ENSG00000095627; TAA
MTEPFNFEK

SEQ ID NO: 84267 - protein, 9 aa, Homo sapiens
  misc_feature: Table A; Target 84267; HLA-A*11:01; TDRD1; ENSG00000095627; TAA
MTEPFNFEK

SEQ ID NO: 84268 - protein, 9 aa, Homo sapiens
  misc_feature: Table A; Target 84268; HLA-A*68:02; TDRD1; ENSG00000095627; TAA
MTTENNIVV

SEQ ID NO: 84269 - protein, 11 aa, Homo sapiens
  misc_feature: Table A; Target 84269; HLA-A*03:02; TDRD1; ENSG00000095627; TAA
MTTENNIVVDK

SEQ ID NO: 84270 - protein, 11 aa, Homo sapiens
  misc_feature: Table A; Target 84270; HLA-A*11:01; TDRD1; ENSG00000095627; TAA
MTTENNIVVDK

SEQ ID NO: 84271 - protein, 11 aa, Homo sapiens
  misc_feature: Table A; Target 84271; HLA-A*68:01; TDRD1; ENSG00000095627; TAA
MTTENNIVVDK

SEQ ID NO: 84272 - protein, 11 aa, Homo sapiens
  misc_feature: Table A; Target 84272; HLA-A*68:02; TDRD1; ENSG00000095627; TAA
MTTENNIVVDK

SEQ ID NO: 84273 - protein, 11 aa, Homo sapiens
  misc_feature: Table A; Target 84273; HLA-B*27:02; TDRD1; ENSG00000095627; TAA
MTTENNIVVDK

SEQ ID NO: 84274 - protein, 11 aa, Homo sapiens
  misc_feature: Table A; Target 84274; HLA-C*07:06; TDRD1; ENSG00000095627; TAA
MTTENNIVVDK

SEQ ID NO: 84275 - protein, 9 aa, Homo sapiens
  misc_feature: Table A; Target 84275; HLA-C*16:02; TDRD1; ENSG00000095627; TAA
MVTDKPSDV

SEQ ID NO: 84276 - protein, 10 aa, Homo sapiens
  misc_feature: Table A; Target 84276; HLA-A*68:01; TDRD1; ENSG00000095627; TAA
MVTDKPSDVK

SEQ ID NO: 84277 - protein, 9 aa, Homo sapiens
  misc_feature: Table A; Target 84277; HLA-C*16:01; TDRD1; ENSG00000095627; TAA
NAPKSRPPY

SEQ ID NO: 84278 - protein, 10 aa, Homo sapiens
  misc_feature: Table A; Target 84278; HLA-B*49:01; TDRD1; ENSG00000095627; TAA
NEEIIPLNRI

SEQ ID NO: 84279 - protein, 11 aa, Homo sapiens
  misc_feature: Table A; Target 84279; HLA-B*18:01; TDRD1; ENSG00000095627; TAA
NEEIIPLNRIY

SEQ ID NO: 84280 - protein, 11 aa, Homo sapiens
  misc_feature: Table A; Target 84280; HLA-B*44:02; TDRD1; ENSG00000095627; TAA
NEEIIPLNRIY

SEQ ID NO: 84281 - protein, 11 aa, Homo sapiens
  misc_feature: Table A; Target 84281; HLA-B*44:03; TDRD1; ENSG00000095627; TAA
NEEIIPLNRIY

SEQ ID NO: 84282 - protein, 8 aa, Homo sapiens
  misc_feature: Table A; Target 84282; HLA-B*18:01; TDRD1; ENSG00000095627; TAA
NENKLPPH

SEQ ID NO: 84283 - protein, 9 aa, Homo sapiens
  misc_feature: Table A; Target 84283; HLA-C*14:02; TDRD1; ENSG00000095627; TAA
NFMLNQNVM

SEQ ID NO: 84284 - protein, 9 aa, Homo sapiens
  misc_feature: Table A; Target 84284; HLA-A*33:03; TDRD1; ENSG00000095627; TAA
NIKPGNNVR

SEQ ID NO: 84285 - protein, 9 aa, Homo sapiens
  misc_feature: Table A; Target 84285; HLA-B*15:03; TDRD1; ENSG00000095627; TAA
NKLPPHESL

SEQ ID NO: 84286 - protein, 8 aa, Homo sapiens
  misc_feature: Table A; Target 84286; HLA-B*07:02; TDRD1; ENSG00000095627; TAA
NPGLFTSL

SEQ ID NO: 84287 - protein, 8 aa, Homo sapiens
  misc_feature: Table A; Target 84287; HLA-B*08:01; TDRD1; ENSG00000095627; TAA
NPGLFTSL

SEQ ID NO: 84288 - protein, 8 aa, Homo sapiens
  misc_feature: Table A; Target 84288; HLA-B*35:03; TDRD1; ENSG00000095627; TAA
NPGLFTSL

SEQ ID NO: 84289 - protein, 8 aa, Homo sapiens
  misc_feature: Table A; Target 84289; HLA-C*07:02; TDRD1; ENSG00000095627; TAA
NPGLFTSL

SEQ ID NO: 84290 - protein, 9 aa, Homo sapiens
  misc_feature: Table A; Target 84290; HLA-B*07:02; TDRD1; ENSG00000095627; TAA
NPNGINGEV

SEQ ID NO: 84291 - protein, 9 aa, Homo sapiens
  misc_feature: Table A; Target 84291; HLA-B*56:01; TDRD1; ENSG00000095627; TAA
NPNGINGEV

SEQ ID NO: 84292 - protein, 10 aa, Homo sapiens
  misc_feature: Table A; Target 84292; HLA-B*07:02; TDRD1; ENSG00000095627; TAA
NPNGINGEVV

SEQ ID NO: 84293 - protein, 10 aa, Homo sapiens
  misc_feature: Table A; Target 84293; HLA-B*35:01; TDRD1; ENSG00000095627; TAA
NPNGINGEVV

SEQ ID NO: 84294 - protein, 10 aa, Homo sapiens
  misc_feature: Table A; Target 84294; HLA-B*35:03; TDRD1; ENSG00000095627; TAA
NPNGINGEVV

SEQ ID NO: 84295 - protein, 10 aa, Homo sapiens
  misc_feature: Table A; Target 84295; HLA-B*56:01; TDRD1; ENSG00000095627; TAA
NPNGINGEVV

SEQ ID NO: 84296 - protein, 11 aa, Homo sapiens
  misc_feature: Table A; Target 84296; HLA-B*35:01; TDRD1; ENSG00000095627; TAA
NPNGINGEVVG

SEQ ID NO: 84297 - protein, 11 aa, Homo sapiens
  misc_feature: Table A; Target 84297; HLA-B*35:03; TDRD1; ENSG00000095627; TAA
NPNGINGEVVG

SEQ ID NO: 84298 - protein, 11 aa, Homo sapiens
  misc_feature: Table A; Target 84298; HLA-B*56:01; TDRD1; ENSG00000095627; TAA
NPNGINGEVVG

SEQ ID NO: 84299 - protein, 11 aa, Homo sapiens
  misc_feature: Table A; Target 84299; HLA-A*30:02; TDRD1; ENSG00000095627; TAA
NQLSASLKETY

SEQ ID NO: 84300 - protein, 11 aa, Homo sapiens
  misc_feature: Table A; Target 84300; HLA-A*32:01; TDRD1; ENSG00000095627; TAA
NQLSASLKETY

SEQ ID NO: 84301 - protein, 11 aa, Homo sapiens
  misc_feature: Table A; Target 84301; HLA-B*15:01; TDRD1; ENSG00000095627; TAA
NQLSASLKETY

SEQ ID NO: 84302 - protein, 11 aa, Homo sapiens
  misc_feature: Table A; Target 84302; HLA-B*15:03; TDRD1; ENSG00000095627; TAA
NQLSASLKETY

SEQ ID NO: 84303 - protein, 11 aa, Homo sapiens
  misc_feature: Table A; Target 84303; HLA-B*39:01; TDRD1; ENSG00000095627; TAA
NQLSASLKETY

SEQ ID NO: 84304 - protein, 11 aa, Homo sapiens
  misc_feature: Table A; Target 84304; HLA-C*16:04; TDRD1; ENSG00000095627; TAA
NQLSASLKETY

SEQ ID NO: 84305 - protein, 8 aa, Homo sapiens
  misc_feature: Table A; Target 84305; HLA-B*18:01; TDRD1; ENSG00000095627; TAA
NQNKFIEM

SEQ ID NO: 84306 - protein, 8 aa, Homo sapiens
  misc_feature: Table A; Target 84306; HLA-B*37:01; TDRD1; ENSG00000095627; TAA
NQNKFIEM

SEQ ID NO: 84307 - protein, 8 aa, Homo sapiens
  misc_feature: Table A; Target 84307; HLA-B*13:02; TDRD1; ENSG00000095627; TAA
NQNVMLSV

SEQ ID NO: 84308 - protein, 9 aa, Homo sapiens
  misc_feature: Table A; Target 84308; HLA-A*02:07; TDRD1; ENSG00000095627; TAA
NSPPKEVNI

SEQ ID NO: 84309 - protein, 9 aa, Homo sapiens
  misc_feature: Table A; Target 84309; HLA-C*01:02; TDRD1; ENSG00000095627; TAA
NSPPKEVNI

SEQ ID NO: 84310 - protein, 10 aa, Homo sapiens
  misc_feature: Table A; Target 84310; HLA-B*27:02; TDRD1; ENSG00000095627; TAA
NSSLVELIDK

SEQ ID NO: 84311 - protein, 8 aa, Homo sapiens
  misc_feature: Table A; Target 84311; HLA-C*05:01; TDRD1; ENSG00000095627; TAA
NVDVQQKK

SEQ ID NO: 84312 - protein, 9 aa, Homo sapiens
  misc_feature: Table A; Target 84312; HLA-A*03:01; TDRD1; ENSG00000095627; TAA
NVHTVSVEK

SEQ ID NO: 84313 - protein, 9 aa, Homo sapiens
  misc_feature: Table A; Target 84313; HLA-A*03:02; TDRD1; ENSG00000095627; TAA
NVHTVSVEK

SEQ ID NO: 84314 - protein, 9 aa, Homo sapiens
  misc_feature: Table A; Target 84314; HLA-A*11:01; TDRD1; ENSG00000095627; TAA
NVHTVSVEK

SEQ ID NO: 84315 - protein, 9 aa, Homo sapiens
  misc_feature: Table A; Target 84315; HLA-A*33:01; TDRD1; ENSG00000095627; TAA
NVHTVSVEK

SEQ ID NO: 84316 - protein, 9 aa, Homo sapiens
  misc_feature: Table A; Target 84316; HLA-A*33:03; TDRD1; ENSG00000095627; TAA
NVHTVSVEK

SEQ ID NO: 84317 - protein, 9 aa, Homo sapiens
  misc_feature: Table A; Target 84317; HLA-A*68:01; TDRD1; ENSG00000095627; TAA
NVHTVSVEK

SEQ ID NO: 84318 - protein, 9 aa, Homo sapiens
  misc_feature: Table A; Target 84318; HLA-C*07:06; TDRD1; ENSG00000095627; TAA
NVHTVSVEK

SEQ ID NO: 84319 - protein, 9 aa, Homo sapiens
  misc_feature: Table A; Target 84319; HLA-A*25:01; TDRD1; ENSG00000095627; TAA
NVIPAEGNW

SEQ ID NO: 84320 - protein, 9 aa, Homo sapiens
  misc_feature: Table A; Target 84320; HLA-A*26:01; TDRD1; ENSG00000095627; TAA
NVIPAEGNW

SEQ ID NO: 84321 - protein, 9 aa, Homo sapiens
  misc_feature: Table A; Target 84321; HLA-A*32:01; TDRD1; ENSG00000095627; TAA
NVIPAEGNW

SEQ ID NO: 84322 - protein, 9 aa, Homo sapiens
  misc_feature: Table A; Target 84322; HLA-B*57:01; TDRD1; ENSG00000095627; TAA
NVIPAEGNW

SEQ ID NO: 84323 - protein, 9 aa, Homo sapiens
  misc_feature: Table A; Target 84323; HLA-B*58:01; TDRD1; ENSG00000095627; TAA
NVIPAEGNW

SEQ ID NO: 84324 - protein, 11 aa, Homo sapiens
  misc_feature: Table A; Target 84324; HLA-A*03:02; TDRD1; ENSG00000095627; TAA
NVMLSVKGITK

SEQ ID NO: 84325 - protein, 11 aa, Homo sapiens
  misc_feature: Table A; Target 84325; HLA-A*11:01; TDRD1; ENSG00000095627; TAA
NVMLSVKGITK

SEQ ID NO: 84326 - protein, 11 aa, Homo sapiens
  misc_feature: Table A; Target 84326; HLA-C*07:06; TDRD1; ENSG00000095627; TAA
NVMLSVKGITK

SEQ ID NO: 84327 - protein, 8 aa, Homo sapiens
  misc_feature: Table A; Target 84327; HLA-B*08:01; TDRD1; ENSG00000095627; TAA
NVMSRNNL

SEQ ID NO: 84328 - protein, 9 aa, Homo sapiens
  misc_feature: Table A; Target 84328; HLA-A*01:01; TDRD1; ENSG00000095627; TAA
PGDFYVQLY

SEQ ID NO: 84329 - protein, 9 aa, Homo sapiens
  misc_feature: Table A; Target 84329; HLA-C*05:01; TDRD1; ENSG00000095627; TAA
PSDVKETSV

SEQ ID NO: 84330 - protein, 9 aa, Homo sapiens
  misc_feature: Table A; Target 84330; HLA-A*25:01; TDRD1; ENSG00000095627; TAA
QATSSAEQW

SEQ ID NO: 84331 - protein, 9 aa, Homo sapiens
  misc_feature: Table A; Target 84331; HLA-B*57:01; TDRD1; ENSG00000095627; TAA
QATSSAEQW

SEQ ID NO: 84332 - protein, 9 aa, Homo sapiens
  misc_feature: Table A; Target 84332; HLA-B*58:01; TDRD1; ENSG00000095627; TAA
QATSSAEQW

SEQ ID NO: 84333 - protein, 9 aa, Homo sapiens
  misc_feature: Table A; Target 84333; HLA-C*07:06; TDRD1; ENSG00000095627; TAA
QATSSAEQW

SEQ ID NO: 84334 - protein, 10 aa, Homo sapiens
  misc_feature: Table A; Target 84334; HLA-A*03:01; TDRD1; ENSG00000095627; TAA
QLADIQSRNK

SEQ ID NO: 84335 - protein, 10 aa, Homo sapiens
  misc_feature: Table A; Target 84335; HLA-A*03:02; TDRD1; ENSG00000095627; TAA
QLADIQSRNK

SEQ ID NO: 84336 - protein, 10 aa, Homo sapiens
  misc_feature: Table A; Target 84336; HLA-A*11:01; TDRD1; ENSG00000095627; TAA
QLADIQSRNK

SEQ ID NO: 84337 - protein, 8 aa, Homo sapiens
  misc_feature: Table A; Target 84337; HLA-B*08:01; TDRD1; ENSG00000095627; TAA
QLKKTMEI

SEQ ID NO: 84338 - protein, 9 aa, Homo sapiens
  misc_feature: Table A; Target 84338; HLA-A*29:02; TDRD1; ENSG00000095627; TAA
QLPPRSDFY

SEQ ID NO: 84339 - protein, 10 aa, Homo sapiens
  misc_feature: Table A; Target 84339; HLA-A*01:01; TDRD1; ENSG00000095627; TAA
QLSASLKETY

SEQ ID NO: 84340 - protein, 10 aa, Homo sapiens
  misc_feature: Table A; Target 84340; HLA-A*29:02; TDRD1; ENSG00000095627; TAA
QLSASLKETY

SEQ ID NO: 84341 - protein, 10 aa, Homo sapiens
  misc_feature: Table A; Target 84341; HLA-A*30:02; TDRD1; ENSG00000095627; TAA
QLSASLKETY

SEQ ID NO: 84342 - protein, 10 aa, Homo sapiens
  misc_feature: Table A; Target 84342; HLA-A*32:01; TDRD1; ENSG00000095627; TAA
QLSASLKETY

SEQ ID NO: 84343 - protein, 10 aa, Homo sapiens
  misc_feature: Table A; Target 84343; HLA-B*15:01; TDRD1; ENSG00000095627; TAA
QLSASLKETY

SEQ ID NO: 84344 - protein, 10 aa, Homo sapiens
  misc_feature: Table A; Target 84344; HLA-B*15:03; TDRD1; ENSG00000095627; TAA
QLSASLKETY

SEQ ID NO: 84345 - protein, 10 aa, Homo sapiens
  misc_feature: Table A; Target 84345; HLA-B*27:02; TDRD1; ENSG00000095627; TAA
QLSASLKETY

SEQ ID NO: 84346 - protein, 10 aa, Homo sapiens
  misc_feature: Table A; Target 84346; HLA-B*35:01; TDRD1; ENSG00000095627; TAA
QLSASLKETY

SEQ ID NO: 84347 - protein, 10 aa, Homo sapiens
  misc_feature: Table A; Target 84347; HLA-B*44:03; TDRD1; ENSG00000095627; TAA
QLSASLKETY

SEQ ID NO: 84348 - protein, 10 aa, Homo sapiens
  misc_feature: Table A; Target 84348; HLA-B*58:01; TDRD1; ENSG00000095627; TAA
QLSASLKETY

SEQ ID NO: 84349 - protein, 10 aa, Homo sapiens
  misc_feature: Table A; Target 84349; HLA-C*07:04; TDRD1; ENSG00000095627; TAA
QLSASLKETY

SEQ ID NO: 84350 - protein, 10 aa, Homo sapiens
  misc_feature: Table A; Target 84350; HLA-A*01:01; TDRD1; ENSG00000095627; TAA
QLYSSEVLEY

SEQ ID NO: 84351 - protein, 10 aa, Homo sapiens
  misc_feature: Table A; Target 84351; HLA-A*03:01; TDRD1; ENSG00000095627; TAA
QLYSSEVLEY

SEQ ID NO: 84352 - protein, 10 aa, Homo sapiens
  misc_feature: Table A; Target 84352; HLA-A*25:01; TDRD1; ENSG00000095627; TAA
QLYSSEVLEY

SEQ ID NO: 84353 - protein, 10 aa, Homo sapiens
  misc_feature: Table A; Target 84353; HLA-A*26:01; TDRD1; ENSG00000095627; TAA
QLYSSEVLEY

SEQ ID NO: 84354 - protein, 10 aa, Homo sapiens
  misc_feature: Table A; Target 84354; HLA-A*29:02; TDRD1; ENSG00000095627; TAA
QLYSSEVLEY

SEQ ID NO: 84355 - protein, 10 aa, Homo sapiens
  misc_feature: Table A; Target 84355; HLA-A*30:02; TDRD1; ENSG00000095627; TAA
QLYSSEVLEY

SEQ ID NO: 84356 - protein, 10 aa, Homo sapiens
  misc_feature: Table A; Target 84356; HLA-B*15:01; TDRD1; ENSG00000095627; TAA
QLYSSEVLEY

SEQ ID NO: 84357 - protein, 10 aa, Homo sapiens
  misc_feature: Table A; Target 84357; HLA-B*15:03; TDRD1; ENSG00000095627; TAA
QLYSSEVLEY

SEQ ID NO: 84358 - protein, 8 aa, Homo sapiens
  misc_feature: Table A; Target 84358; HLA-B*27:02; TDRD1; ENSG00000095627; TAA
QNVDVQQK

SEQ ID NO: 84359 - protein, 8 aa, Homo sapiens
  misc_feature: Table A; Target 84359; HLA-B*07:02; TDRD1; ENSG00000095627; TAA
QPITSSHL

SEQ ID NO: 84360 - protein, 8 aa, Homo sapiens
  misc_feature: Table A; Target 84360; HLA-B*08:01; TDRD1; ENSG00000095627; TAA
QPITSSHL

SEQ ID NO: 84361 - protein, 8 aa, Homo sapiens
  misc_feature: Table A; Target 84361; HLA-B*35:03; TDRD1; ENSG00000095627; TAA
QPITSSHL

SEQ ID NO: 84362 - protein, 8 aa, Homo sapiens
  misc_feature: Table A; Target 84362; HLA-C*07:02; TDRD1; ENSG00000095627; TAA
QPITSSHL

SEQ ID NO: 84363 - protein, 9 aa, Homo sapiens
  misc_feature: Table A; Target 84363; HLA-B*56:01; TDRD1; ENSG00000095627; TAA
QPITSSHLA

SEQ ID NO: 84364 - protein, 10 aa, Homo sapiens
  misc_feature: Table A; Target 84364; HLA-B*07:02; TDRD1; ENSG00000095627; TAA
QPITSSHLAL

SEQ ID NO: 84365 - protein, 10 aa, Homo sapiens
  misc_feature: Table A; Target 84365; HLA-B*35:03; TDRD1; ENSG00000095627; TAA
QPITSSHLAL

SEQ ID NO: 84366 - protein, 8 aa, Homo sapiens
  misc_feature: Table A; Target 84366; HLA-B*08:01; TDRD1; ENSG00000095627; TAA
QQKKAHVL

SEQ ID NO: 84367 - protein, 9 aa, Homo sapiens
  misc_feature: Table A; Target 84367; HLA-A*01:01; TDRD1; ENSG00000095627; TAA
QSALNTEKM

SEQ ID NO: 84368 - protein, 9 aa, Homo sapiens
  misc_feature: Table A; Target 84368; HLA-B*58:01; TDRD1; ENSG00000095627; TAA
QSALNTEKM

SEQ ID NO: 84369 - protein, 10 aa, Homo sapiens
  misc_feature: Table A; Target 84369; HLA-A*01:01; TDRD1; ENSG00000095627; TAA
QSALNTEKMY

SEQ ID NO: 84370 - protein, 10 aa, Homo sapiens
  misc_feature: Table A; Target 84370; HLA-A*01:01; TDRD1; ENSG00000095627; TAA
QSDPEDVGKM

SEQ ID NO: 84371 - protein, 9 aa, Homo sapiens
  misc_feature: Table A; Target 84371; HLA-A*02:01; TDRD1; ENSG00000095627; TAA
QTVDVVVCV

SEQ ID NO: 84372 - protein, 9 aa, Homo sapiens
  misc_feature: Table A; Target 84372; HLA-A*26:01; TDRD1; ENSG00000095627; TAA
QTVDVVVCV

SEQ ID NO: 84373 - protein, 9 aa, Homo sapiens
  misc_feature: Table A; Target 84373; HLA-A*68:01; TDRD1; ENSG00000095627; TAA
QTVDVVVCV

SEQ ID NO: 84374 - protein, 9 aa, Homo sapiens
  misc_feature: Table A; Target 84374; HLA-B*13:02; TDRD1; ENSG00000095627; TAA
QTVDVVVCV

SEQ ID NO: 84375 - protein, 9 aa, Homo sapiens
  misc_feature: Table A; Target 84375; HLA-C*02:02; TDRD1; ENSG00000095627; TAA
QTVDVVVCV

SEQ ID NO: 84376 - protein, 10 aa, Homo sapiens
  misc_feature: Table A; Target 84376; HLA-A*68:02; TDRD1; ENSG00000095627; TAA
QTVDVVVCVI

SEQ ID NO: 84377 - protein, 11 aa, Homo sapiens
  misc_feature: Table A; Target 84377; HLA-A*68:02; TDRD1; ENSG00000095627; TAA
QTWNRAIIQNV

SEQ ID NO: 84378 - protein, 9 aa, Homo sapiens
  misc_feature: Table A; Target 84378; HLA-B*54:01; TDRD1; ENSG00000095627; TAA
QVHVQGLQA

SEQ ID NO: 84379 - protein, 9 aa, Homo sapiens
  misc_feature: Table A; Target 84379; HLA-B*56:01; TDRD1; ENSG00000095627; TAA
QVHVQGLQA

SEQ ID NO: 84380 - protein, 8 aa, Homo sapiens
  misc_feature: Table A; Target 84380; HLA-B*08:01; TDRD1; ENSG00000095627; TAA
RALVKEIL

SEQ ID NO: 84381 - protein, 9 aa, Homo sapiens
  misc_feature: Table A; Target 84381; HLA-A*31:01; TDRD1; ENSG00000095627; TAA
RCGLFGSLR

SEQ ID NO: 84382 - protein, 8 aa, Homo sapiens
  misc_feature: Table A; Target 84382; HLA-B*37:01; TDRD1; ENSG00000095627; TAA
RDWSAHSI

SEQ ID NO: 84383 - protein, 9 aa, Homo sapiens
  misc_feature: Table A; Target 84383; HLA-A*02:01; TDRD1; ENSG00000095627; TAA
RLCPIIPKL

SEQ ID NO: 84384 - protein, 9 aa, Homo sapiens
  misc_feature: Table A; Target 84384; HLA-A*02:03; TDRD1; ENSG00000095627; TAA
RLCPIIPKL

SEQ ID NO: 84385 - protein, 9 aa, Homo sapiens
  misc_feature: Table A; Target 84385; HLA-A*02:04; TDRD1; ENSG00000095627; TAA
RLCPIIPKL

SEQ ID NO: 84386 - protein, 9 aa, Homo sapiens
  misc_feature: Table A; Target 84386; HLA-A*02:07; TDRD1; ENSG00000095627; TAA
RLCPIIPKL

SEQ ID NO: 84387 - protein, 9 aa, Homo sapiens
  misc_feature: Table A; Target 84387; HLA-A*03:01; TDRD1; ENSG00000095627; TAA
RLCPIIPKL

SEQ ID NO: 84388 - protein, 9 aa, Homo sapiens
  misc_feature: Table A; Target 84388; HLA-A*24:02; TDRD1; ENSG00000095627; TAA
RLCPIIPKL

SEQ ID NO: 84389 - protein, 10 aa, Homo sapiens
  misc_feature: Table A; Target 84389; HLA-A*03:01; TDRD1; ENSG00000095627; TAA
RLKSSENGNK

SEQ ID NO: 84390 - protein, 11 aa, Homo sapiens
  misc_feature: Table A; Target 84390; HLA-A*03:01; TDRD1; ENSG00000095627; TAA
RLKSSENGNKK

SEQ ID NO: 84391 - protein, 8 aa, Homo sapiens
  misc_feature: Table A; Target 84391; HLA-B*08:01; TDRD1; ENSG00000095627; TAA
RLVNKHEL

SEQ ID NO: 84392 - protein, 10 aa, Homo sapiens
  misc_feature: Table A; Target 84392; HLA-B*07:02; TDRD1; ENSG00000095627; TAA
RPVQPNFHKL

SEQ ID NO: 84393 - protein, 10 aa, Homo sapiens
  misc_feature: Table A; Target 84393; HLA-C*07:02; TDRD1; ENSG00000095627; TAA
RPVQPNFHKL

SEQ ID NO: 84394 - protein, 11 aa, Homo sapiens
  misc_feature: Table A; Target 84394; HLA-A*30:02; TDRD1; ENSG00000095627; TAA
RQSALNTEKMY

SEQ ID NO: 84395 - protein, 9 aa, Homo sapiens
  misc_feature: Table A; Target 84395; HLA-A*03:02; TDRD1; ENSG00000095627; TAA
RVQPITSSH

SEQ ID NO: 84396 - protein, 9 aa, Homo sapiens
  misc_feature: Table A; Target 84396; HLA-A*30:02; TDRD1; ENSG00000095627; TAA
RVQPITSSH

SEQ ID NO: 84397 - protein, 9 aa, Homo sapiens
  misc_feature: Table A; Target 84397; HLA-A*31:01; TDRD1; ENSG00000095627; TAA
RVQPITSSH

SEQ ID NO: 84398 - protein, 9 aa, Homo sapiens
  misc_feature: Table A; Target 84398; HLA-A*32:01; TDRD1; ENSG00000095627; TAA
RVQPITSSH

SEQ ID NO: 84399 - protein, 9 aa, Homo sapiens
  misc_feature: Table A; Target 84399; HLA-B*15:01; TDRD1; ENSG00000095627; TAA
RVQPITSSH

SEQ ID NO: 84400 - protein, 10 aa, Homo sapiens
  misc_feature: Table A; Target 84400; HLA-A*32:01; TDRD1; ENSG00000095627; TAA
RVVEVTENGI

SEQ ID NO: 84401 - protein, 10 aa, Homo sapiens
  misc_feature: Table A; Target 84401; HLA-B*58:01; TDRD1; ENSG00000095627; TAA
RVVEVTENGI

SEQ ID NO: 84402 - protein, 9 aa, Homo sapiens
  misc_feature: Table A; Target 84402; HLA-A*03:02; TDRD1; ENSG00000095627; TAA
SAESNSPPK

SEQ ID NO: 84403 - protein, 9 aa, Homo sapiens
  misc_feature: Table A; Target 84403; HLA-A*11:01; TDRD1; ENSG00000095627; TAA
SAESNSPPK

SEQ ID NO: 84404 - protein, 8 aa, Homo sapiens
  misc_feature: Table A; Target 84404; HLA-A*33:01; TDRD1; ENSG00000095627; TAA
SAHSIVCR

SEQ ID NO: 84405 - protein, 8 aa, Homo sapiens
  misc_feature: Table A; Target 84405; HLA-A*33:03; TDRD1; ENSG00000095627; TAA
SAHSIVCR

SEQ ID NO: 84406 - protein, 8 aa, Homo sapiens
  misc_feature: Table A; Target 84406; HLA-C*05:01; TDRD1; ENSG00000095627; TAA
SALNTEKM

SEQ ID NO: 84407 - protein, 9 aa, Homo sapiens
  misc_feature: Table A; Target 84407; HLA-A*30:02; TDRD1; ENSG00000095627; TAA
SALNTEKMY

SEQ ID NO: 84408 - protein, 9 aa, Homo sapiens
  misc_feature: Table A; Target 84408; HLA-B*15:03; TDRD1; ENSG00000095627; TAA
SALNTEKMY

SEQ ID NO: 84409 - protein, 9 aa, Homo sapiens
  misc_feature: Table A; Target 84409; HLA-C*02:02; TDRD1; ENSG00000095627; TAA
SALNTEKMY

SEQ ID NO: 84410 - protein, 9 aa, Homo sapiens
  misc_feature: Table A; Target 84410; HLA-C*03:03; TDRD1; ENSG00000095627; TAA
SALNTEKMY

SEQ ID NO: 84411 - protein, 9 aa, Homo sapiens
  misc_feature: Table A; Target 84411; HLA-C*12:03; TDRD1; ENSG00000095627; TAA
SALNTEKMY

SEQ ID NO: 84412 - protein, 9 aa, Homo sapiens
  misc_feature: Table A; Target 84412; HLA-C*16:01; TDRD1; ENSG00000095627; TAA
SALNTEKMY

SEQ ID NO: 84413 - protein, 9 aa, Homo sapiens
  misc_feature: Table A; Target 84413; HLA-C*16:02; TDRD1; ENSG00000095627; TAA
SALNTEKMY

SEQ ID NO: 84414 - protein, 8 aa, Homo sapiens
  misc_feature: Table A; Target 84414; HLA-B*08:01; TDRD1; ENSG00000095627; TAA
SASLKETY

SEQ ID NO: 84415 - protein, 8 aa, Homo sapiens
  misc_feature: Table A; Target 84415; HLA-B*15:01; TDRD1; ENSG00000095627; TAA
SASLKETY

SEQ ID NO: 84416 - protein, 8 aa, Homo sapiens
  misc_feature: Table A; Target 84416; HLA-C*16:01; TDRD1; ENSG00000095627; TAA
SASLKETY

SEQ ID NO: 84417 - protein, 8 aa, Homo sapiens
  misc_feature: Table A; Target 84417; HLA-C*16:02; TDRD1; ENSG00000095627; TAA
SASLKETY

SEQ ID NO: 84418 - protein, 8 aa, Homo sapiens
  misc_feature: Table A; Target 84418; HLA-C*16:01; TDRD1; ENSG00000095627; TAA
SASPHKDL

SEQ ID NO: 84419 - protein, 8 aa, Homo sapiens
  misc_feature: Table A; Target 84419; HLA-C*16:02; TDRD1; ENSG00000095627; TAA
SASPHKDL

SEQ ID NO: 84420 - protein, 9 aa, Homo sapiens
  misc_feature: Table A; Target 84420; HLA-A*03:02; TDRD1; ENSG00000095627; TAA
SDCPLGVTK

SEQ ID NO: 84421 - protein, 9 aa, Homo sapiens
  misc_feature: Table A; Target 84421; HLA-A*11:01; TDRD1; ENSG00000095627; TAA
SDCPLGVTK

SEQ ID NO: 84422 - protein, 8 aa, Homo sapiens
  misc_feature: Table A; Target 84422; HLA-B*37:01; TDRD1; ENSG00000095627; TAA
SDLIPKVL

SEQ ID NO: 84423 - protein, 8 aa, Homo sapiens
  misc_feature: Table A; Target 84423; HLA-B*40:02; TDRD1; ENSG00000095627; TAA
SDLIPKVL

SEQ ID NO: 84424 - protein, 10 aa, Homo sapiens
  misc_feature: Table A; Target 84424; HLA-B*37:01; TDRD1; ENSG00000095627; TAA
SDLIPKVLTL

SEQ ID NO: 84425 - protein, 8 aa, Homo sapiens
  misc_feature: Table A; Target 84425; HLA-B*37:01; TDRD1; ENSG00000095627; TAA
SDLRSLQL

SEQ ID NO: 84426 - protein, 8 aa, Homo sapiens
  misc_feature: Table A; Target 84426; HLA-B*37:01; TDRD1; ENSG00000095627; TAA
SDTDVEVL

SEQ ID NO: 84427 - protein, 9 aa, Homo sapiens
  misc_feature: Table A; Target 84427; HLA-A*29:02; TDRD1; ENSG00000095627; TAA
SDTDVEVLY

SEQ ID NO: 84428 - protein, 9 aa, Homo sapiens
  misc_feature: Table A; Target 84428; HLA-A*30:02; TDRD1; ENSG00000095627; TAA
SDTDVEVLY

SEQ ID NO: 84429 - protein, 9 aa, Homo sapiens
  misc_feature: Table A; Target 84429; HLA-B*15:03; TDRD1; ENSG00000095627; TAA
SDTDVEVLY

SEQ ID NO: 84430 - protein, 9 aa, Homo sapiens
  misc_feature: Table A; Target 84430; HLA-B*18:01; TDRD1; ENSG00000095627; TAA
SDTDVEVLY

SEQ ID NO: 84431 - protein, 9 aa, Homo sapiens
  misc_feature: Table A; Target 84431; HLA-B*35:01; TDRD1; ENSG00000095627; TAA
SDTDVEVLY

SEQ ID NO: 84432 - protein, 9 aa, Homo sapiens
  misc_feature: Table A; Target 84432; HLA-B*39:01; TDRD1; ENSG00000095627; TAA
SDTDVEVLY

SEQ ID NO: 84433 - protein, 9 aa, Homo sapiens
  misc_feature: Table A; Target 84433; HLA-B*44:02; TDRD1; ENSG00000095627; TAA
SDTDVEVLY

SEQ ID NO: 84434 - protein, 9 aa, Homo sapiens
  misc_feature: Table A; Target 84434; HLA-B*44:03; TDRD1; ENSG00000095627; TAA
SDTDVEVLY

SEQ ID NO: 84435 - protein, 9 aa, Homo sapiens
  misc_feature: Table A; Target 84435; HLA-C*04:01; TDRD1; ENSG00000095627; TAA
SDTDVEVLY

SEQ ID NO: 84436 - protein, 9 aa, Homo sapiens
  misc_feature: Table A; Target 84436; HLA-C*07:01; TDRD1; ENSG00000095627; TAA
SDTDVEVLY

SEQ ID NO: 84437 - protein, 9 aa, Homo sapiens
  misc_feature: Table A; Target 84437; HLA-C*07:04; TDRD1; ENSG00000095627; TAA
SDTDVEVLY

SEQ ID NO: 84438 - protein, 9 aa, Homo sapiens
  misc_feature: Table A; Target 84438; HLA-C*07:06; TDRD1; ENSG00000095627; TAA
SDTDVEVLY

SEQ ID NO: 84439 - protein, 9 aa, Homo sapiens
  misc_feature: Table A; Target 84439; HLA-C*12:03; TDRD1; ENSG00000095627; TAA
SDTDVEVLY

SEQ ID NO: 84440 - protein, 9 aa, Homo sapiens
  misc_feature: Table A; Target 84440; HLA-C*16:01; TDRD1; ENSG00000095627; TAA
SDTDVEVLY

SEQ ID NO: 84441 - protein, 9 aa, Homo sapiens
  misc_feature: Table A; Target 84441; HLA-C*16:02; TDRD1; ENSG00000095627; TAA
SDTDVEVLY

SEQ ID NO: 84442 - protein, 9 aa, Homo sapiens
  misc_feature: Table A; Target 84442; HLA-C*16:04; TDRD1; ENSG00000095627; TAA
SDTDVEVLY

SEQ ID NO: 84443 - protein, 8 aa, Homo sapiens
  misc_feature: Table A; Target 84443; HLA-B*37:01; TDRD1; ENSG00000095627; TAA
SDVKETSV

SEQ ID NO: 84444 - protein, 9 aa, Homo sapiens
  misc_feature: Table A; Target 84444; HLA-A*30:01; TDRD1; ENSG00000095627; TAA
SDVLIDEHL

SEQ ID NO: 84445 - protein, 9 aa, Homo sapiens
  misc_feature: Table A; Target 84445; HLA-B*40:01; TDRD1; ENSG00000095627; TAA
SDVLIDEHL

SEQ ID NO: 84446 - protein, 8 aa, Homo sapiens
  misc_feature: Table A; Target 84446; HLA-B*18:01; TDRD1; ENSG00000095627; TAA
SEEAITRF

SEQ ID NO: 84447 - protein, 8 aa, Homo sapiens
  misc_feature: Table A; Target 84447; HLA-B*37:01; TDRD1; ENSG00000095627; TAA
SEEAITRF

SEQ ID NO: 84448 - protein, 8 aa, Homo sapiens
  misc_feature: Table A; Target 84448; HLA-B*44:02; TDRD1; ENSG00000095627; TAA
SEEAITRF

SEQ ID NO: 84449 - protein, 8 aa, Homo sapiens
  misc_feature: Table A; Target 84449; HLA-B*44:03; TDRD1; ENSG00000095627; TAA
SEEAITRF

SEQ ID NO: 84450 - protein, 10 aa, Homo sapiens
  misc_feature: Table A; Target 84450; HLA-A*30:01; TDRD1; ENSG00000095627; TAA
SEEAITRFQM

SEQ ID NO: 84451 - protein, 10 aa, Homo sapiens
  misc_feature: Table A; Target 84451; HLA-B*18:01; TDRD1; ENSG00000095627; TAA
SEEAITRFQM

SEQ ID NO: 84452 - protein, 10 aa, Homo sapiens
  misc_feature: Table A; Target 84452; HLA-B*40:01; TDRD1; ENSG00000095627; TAA
SEEAITRFQM

SEQ ID NO: 84453 - protein, 10 aa, Homo sapiens
  misc_feature: Table A; Target 84453; HLA-B*44:02; TDRD1; ENSG00000095627; TAA
SEEAITRFQM

SEQ ID NO: 84454 - protein, 10 aa, Homo sapiens
  misc_feature: Table A; Target 84454; HLA-B*44:03; TDRD1; ENSG00000095627; TAA
SEEAITRFQM

SEQ ID NO: 84455 - protein, 9 aa, Homo sapiens
  misc_feature: Table A; Target 84455; HLA-A*30:02; TDRD1; ENSG00000095627; TAA
SEESVLVGY

SEQ ID NO: 84456 - protein, 9 aa, Homo sapiens
  misc_feature: Table A; Target 84456; HLA-B*15:03; TDRD1; ENSG00000095627; TAA
SEESVLVGY

SEQ ID NO: 84457 - protein, 9 aa, Homo sapiens
  misc_feature: Table A; Target 84457; HLA-B*18:01; TDRD1; ENSG00000095627; TAA
SEESVLVGY

SEQ ID NO: 84458 - protein, 9 aa, Homo sapiens
  misc_feature: Table A; Target 84458; HLA-B*27:02; TDRD1; ENSG00000095627; TAA
SEESVLVGY

SEQ ID NO: 84459 - protein, 9 aa, Homo sapiens
  misc_feature: Table A; Target 84459; HLA-B*35:01; TDRD1; ENSG00000095627; TAA
SEESVLVGY

SEQ ID NO: 84460 - protein, 9 aa, Homo sapiens
  misc_feature: Table A; Target 84460; HLA-B*37:01; TDRD1; ENSG00000095627; TAA
SEESVLVGY

SEQ ID NO: 84461 - protein, 9 aa, Homo sapiens
  misc_feature: Table A; Target 84461; HLA-B*40:01; TDRD1; ENSG00000095627; TAA
SEESVLVGY

SEQ ID NO: 84462 - protein, 9 aa, Homo sapiens
  misc_feature: Table A; Target 84462; HLA-B*44:02; TDRD1; ENSG00000095627; TAA
SEESVLVGY

SEQ ID NO: 84463 - protein, 9 aa, Homo sapiens
  misc_feature: Table A; Target 84463; HLA-C*16:04; TDRD1; ENSG00000095627; TAA
SEESVLVGY

SEQ ID NO: 84464 - protein, 10 aa, Homo sapiens
  misc_feature: Table A; Target 84464; HLA-B*49:01; TDRD1; ENSG00000095627; TAA
SEESVLVGYV

SEQ ID NO: 84465 - protein, 10 aa, Homo sapiens
  misc_feature: Table A; Target 84465; HLA-B*37:01; TDRD1; ENSG00000095627; TAA
SENGNKKNNF

SEQ ID NO: 84466 - protein, 10 aa, Homo sapiens
  misc_feature: Table A; Target 84466; HLA-B*44:02; TDRD1; ENSG00000095627; TAA
SENGNKKNNF

SEQ ID NO: 84467 - protein, 10 aa, Homo sapiens
  misc_feature: Table A; Target 84467; HLA-B*44:03; TDRD1; ENSG00000095627; TAA
SENGNKKNNF

SEQ ID NO: 84468 - protein, 10 aa, Homo sapiens
  misc_feature: Table A; Target 84468; HLA-C*16:04; TDRD1; ENSG00000095627; TAA
SENGNKKNNF

SEQ ID NO: 84469 - protein, 8 aa, Homo sapiens
  misc_feature: Table A; Target 84469; HLA-B*49:01; TDRD1; ENSG00000095627; TAA
SENGTVDV

SEQ ID NO: 84470 - protein, 9 aa, Homo sapiens
  misc_feature: Table A; Target 84470; HLA-A*30:01; TDRD1; ENSG00000095627; TAA
SENGTVDVA

SEQ ID NO: 84471 - protein, 8 aa, Homo sapiens
  misc_feature: Table A; Target 84471; HLA-A*30:01; TDRD1; ENSG00000095627; TAA
SETPHVSV

SEQ ID NO: 84472 - protein, 8 aa, Homo sapiens
  misc_feature: Table A; Target 84472; HLA-B*18:01; TDRD1; ENSG00000095627; TAA
SETPHVSV

SEQ ID NO: 84473 - protein, 8 aa, Homo sapiens
  misc_feature: Table A; Target 84473; HLA-B*37:01; TDRD1; ENSG00000095627; TAA
SETPHVSV

SEQ ID NO: 84474 - protein, 8 aa, Homo sapiens
  misc_feature: Table A; Target 84474; HLA-B*40:01; TDRD1; ENSG00000095627; TAA
SETPHVSV

SEQ ID NO: 84475 - protein, 8 aa, Homo sapiens
  misc_feature: Table A; Target 84475; HLA-B*40:02; TDRD1; ENSG00000095627; TAA
SETPHVSV

SEQ ID NO: 84476 - protein, 8 aa, Homo sapiens
  misc_feature: Table A; Target 84476; HLA-B*49:01; TDRD1; ENSG00000095627; TAA
SETPHVSV

SEQ ID NO: 84477 - protein, 8 aa, Homo sapiens
  misc_feature: Table A; Target 84477; HLA-C*16:02; TDRD1; ENSG00000095627; TAA
SETPHVSV

SEQ ID NO: 84478 - protein, 9 aa, Homo sapiens
  misc_feature: Table A; Target 84478; HLA-B*37:01; TDRD1; ENSG00000095627; TAA
SETPHVSVS

SEQ ID NO: 84479 - protein, 10 aa, Homo sapiens
  misc_feature: Table A; Target 84479; HLA-A*30:01; TDRD1; ENSG00000095627; TAA
SEVLEYMNQL

SEQ ID NO: 84480 - protein, 10 aa, Homo sapiens
  misc_feature: Table A; Target 84480; HLA-B*40:01; TDRD1; ENSG00000095627; TAA
SEVLEYMNQL

SEQ ID NO: 84481 - protein, 10 aa, Homo sapiens
  misc_feature: Table A; Target 84481; HLA-B*40:02; TDRD1; ENSG00000095627; TAA
SEVLEYMNQL

SEQ ID NO: 84482 - protein, 10 aa, Homo sapiens
  misc_feature: Table A; Target 84482; HLA-B*44:03; TDRD1; ENSG00000095627; TAA
SEVLEYMNQL

SEQ ID NO: 84483 - protein, 10 aa, Homo sapiens
  misc_feature: Table A; Target 84483; HLA-B*49:01; TDRD1; ENSG00000095627; TAA
SEVLEYMNQL

SEQ ID NO: 84484 - protein, 9 aa, Homo sapiens
  misc_feature: Table A; Target 84484; HLA-C*05:01; TDRD1; ENSG00000095627; TAA
SIETKDVEV

SEQ ID NO: 84485 - protein, 11 aa, Homo sapiens
  misc_feature: Table A; Target 84485; HLA-A*68:02; TDRD1; ENSG00000095627; TAA
SISNPGLFTSL

SEQ ID NO: 84486 - protein, 9 aa, Homo sapiens
  misc_feature: Table A; Target 84486; HLA-B*15:03; TDRD1; ENSG00000095627; TAA
SKVLLDAGF

SEQ ID NO: 84487 - protein, 9 aa, Homo sapiens
  misc_feature: Table A; Target 84487; HLA-A*02:03; TDRD1; ENSG00000095627; TAA
SLGPPLRST

SEQ ID NO: 84488 - protein, 9 aa, Homo sapiens
  misc_feature: Table A; Target 84488; HLA-A*02:03; TDRD1; ENSG00000095627; TAA
SLKETYANV

SEQ ID NO: 84489 - protein, 9 aa, Homo sapiens
  misc_feature: Table A; Target 84489; HLA-A*02:07; TDRD1; ENSG00000095627; TAA
SLKETYANV

SEQ ID NO: 84490 - protein, 9 aa, Homo sapiens
  misc_feature: Table A; Target 84490; HLA-B*13:02; TDRD1; ENSG00000095627; TAA
SLKETYANV

SEQ ID NO: 84491 - protein, 9 aa, Homo sapiens
  misc_feature: Table A; Target 84491; HLA-B*46:01; TDRD1; ENSG00000095627; TAA
SLKETYANV

SEQ ID NO: 84492 - protein, 8 aa, Homo sapiens
  misc_feature: Table A; Target 84492; HLA-B*08:01; TDRD1; ENSG00000095627; TAA
SLQLKKTM

SEQ ID NO: 84493 - protein, 9 aa, Homo sapiens
  misc_feature: Table A; Target 84493; HLA-A*02:01; TDRD1; ENSG00000095627; TAA
SLSISNPGL

SEQ ID NO: 84494 - protein, 9 aa, Homo sapiens
  misc_feature: Table A; Target 84494; HLA-A*02:04; TDRD1; ENSG00000095627; TAA
SLSISNPGL

SEQ ID NO: 84495 - protein, 9 aa, Homo sapiens
  misc_feature: Table A; Target 84495; HLA-A*02:07; TDRD1; ENSG00000095627; TAA
SNPGLFTSL

SEQ ID NO: 84496 - protein, 9 aa, Homo sapiens
  misc_feature: Table A; Target 84496; HLA-A*24:02; TDRD1; ENSG00000095627; TAA
SNPGLFTSL

SEQ ID NO: 84497 - protein, 9 aa, Homo sapiens
  misc_feature: Table A; Target 84497; HLA-C*01:02; TDRD1; ENSG00000095627; TAA
SNPGLFTSL

SEQ ID NO: 84498 - protein, 8 aa, Homo sapiens
  misc_feature: Table A; Target 84498; HLA-B*56:01; TDRD1; ENSG00000095627; TAA
SPFNVMSR

SEQ ID NO: 84499 - protein, 11 aa, Homo sapiens
  misc_feature: Table A; Target 84499; HLA-B*07:02; TDRD1; ENSG00000095627; TAA
SPFNVMSRNNL

SEQ ID NO: 84500 - protein, 11 aa, Homo sapiens
  misc_feature: Table A; Target 84500; HLA-C*07:02; TDRD1; ENSG00000095627; TAA
SPFNVMSRNNL

SEQ ID NO: 84501 - protein, 8 aa, Homo sapiens
  misc_feature: Table A; Target 84501; HLA-B*08:01; TDRD1; ENSG00000095627; TAA
SPNLFYAL

SEQ ID NO: 84502 - protein, 8 aa, Homo sapiens
  misc_feature: Table A; Target 84502; HLA-B*51:01; TDRD1; ENSG00000095627; TAA
SPPKEVNI

SEQ ID NO: 84503 - protein, 8 aa, Homo sapiens
  misc_feature: Table A; Target 84503; HLA-B*15:01; TDRD1; ENSG00000095627; TAA
SQCKQTYY

SEQ ID NO: 84504 - protein, 8 aa, Homo sapiens
  misc_feature: Table A; Target 84504; HLA-B*15:03; TDRD1; ENSG00000095627; TAA
SQCKQTYY

SEQ ID NO: 84505 - protein, 8 aa, Homo sapiens
  misc_feature: Table A; Target 84505; HLA-C*07:01; TDRD1; ENSG00000095627; TAA
SQCKQTYY

SEQ ID NO: 84506 - protein, 9 aa, Homo sapiens
  misc_feature: Table A; Target 84506; HLA-A*11:01; TDRD1; ENSG00000095627; TAA
SSLVELIDK

SEQ ID NO: 84507 - protein, 9 aa, Homo sapiens
  misc_feature: Table A; Target 84507; HLA-A*29:02; TDRD1; ENSG00000095627; TAA
SSTFLNLPF

SEQ ID NO: 84508 - protein, 10 aa, Homo sapiens
  misc_feature: Table A; Target 84508; HLA-A*31:01; TDRD1; ENSG00000095627; TAA
STNQNKFIEM

SEQ ID NO: 84509 - protein, 11 aa, Homo sapiens
  misc_feature: Table A; Target 84509; HLA-A*11:01; TDRD1; ENSG00000095627; TAA
STNQNKFIEMK

SEQ ID NO: 84510 - protein, 9 aa, Homo sapiens
  misc_feature: Table A; Target 84510; HLA-A*02:03; TDRD1; ENSG00000095627; TAA
SVKGITKNV

SEQ ID NO: 84511 - protein, 9 aa, Homo sapiens
  misc_feature: Table A; Target 84511; HLA-A*68:02; TDRD1; ENSG00000095627; TAA
SVKGITKNV

SEQ ID NO: 84512 - protein, 9 aa, Homo sapiens
  misc_feature: Table A; Target 84512; HLA-C*02:02; TDRD1; ENSG00000095627; TAA
SVKGITKNV

SEQ ID NO: 84513 - protein, 9 aa, Homo sapiens
  misc_feature: Table A; Target 84513; HLA-A*25:01; TDRD1; ENSG00000095627; TAA
SVKSPFNVM

SEQ ID NO: 84514 - protein, 9 aa, Homo sapiens
  misc_feature: Table A; Target 84514; HLA-A*26:01; TDRD1; ENSG00000095627; TAA
SVKSPFNVM

SEQ ID NO: 84515 - protein, 9 aa, Homo sapiens
  misc_feature: Table A; Target 84515; HLA-A*32:01; TDRD1; ENSG00000095627; TAA
SVKSPFNVM

SEQ ID NO: 84516 - protein, 9 aa, Homo sapiens
  misc_feature: Table A; Target 84516; HLA-A*33:03; TDRD1; ENSG00000095627; TAA
SVKSPFNVM

SEQ ID NO: 84517 - protein, 9 aa, Homo sapiens
  misc_feature: Table A; Target 84517; HLA-B*07:02; TDRD1; ENSG00000095627; TAA
SVKSPFNVM

SEQ ID NO: 84518 - protein, 9 aa, Homo sapiens
  misc_feature: Table A; Target 84518; HLA-B*08:01; TDRD1; ENSG00000095627; TAA
SVKSPFNVM

SEQ ID NO: 84519 - protein, 9 aa, Homo sapiens
  misc_feature: Table A; Target 84519; HLA-B*15:01; TDRD1; ENSG00000095627; TAA
SVKSPFNVM

SEQ ID NO: 84520 - protein, 9 aa, Homo sapiens
  misc_feature: Table A; Target 84520; HLA-B*35:01; TDRD1; ENSG00000095627; TAA
SVKSPFNVM

SEQ ID NO: 84521 - protein, 9 aa, Homo sapiens
  misc_feature: Table A; Target 84521; HLA-B*46:01; TDRD1; ENSG00000095627; TAA
SVKSPFNVM

SEQ ID NO: 84522 - protein, 9 aa, Homo sapiens
  misc_feature: Table A; Target 84522; HLA-B*54:01; TDRD1; ENSG00000095627; TAA
SVKSPFNVM

SEQ ID NO: 84523 - protein, 9 aa, Homo sapiens
  misc_feature: Table A; Target 84523; HLA-C*01:02; TDRD1; ENSG00000095627; TAA
SVKSPFNVM

SEQ ID NO: 84524 - protein, 9 aa, Homo sapiens
  misc_feature: Table A; Target 84524; HLA-C*02:02; TDRD1; ENSG00000095627; TAA
SVKSPFNVM

SEQ ID NO: 84525 - protein, 9 aa, Homo sapiens
  misc_feature: Table A; Target 84525; HLA-C*03:03; TDRD1; ENSG00000095627; TAA
SVKSPFNVM

SEQ ID NO: 84526 - protein, 9 aa, Homo sapiens
  misc_feature: Table A; Target 84526; HLA-C*03:04; TDRD1; ENSG00000095627; TAA
SVKSPFNVM

SEQ ID NO: 84527 - protein, 9 aa, Homo sapiens
  misc_feature: Table A; Target 84527; HLA-C*07:04; TDRD1; ENSG00000095627; TAA
SVKSPFNVM

SEQ ID NO: 84528 - protein, 9 aa, Homo sapiens
  misc_feature: Table A; Target 84528; HLA-C*12:03; TDRD1; ENSG00000095627; TAA
SVKSPFNVM

SEQ ID NO: 84529 - protein, 10 aa, Homo sapiens
  misc_feature: Table A; Target 84529; HLA-C*07:02; TDRD1; ENSG00000095627; TAA
SVKSPFNVMS

SEQ ID NO: 84530 - protein, 11 aa, Homo sapiens
  misc_feature: Table A; Target 84530; HLA-A*31:01; TDRD1; ENSG00000095627; TAA
SVKSPFNVMSR

SEQ ID NO: 84531 - protein, 11 aa, Homo sapiens
  misc_feature: Table A; Target 84531; HLA-A*33:01; TDRD1; ENSG00000095627; TAA
SVKSPFNVMSR

SEQ ID NO: 84532 - protein, 11 aa, Homo sapiens
  misc_feature: Table A; Target 84532; HLA-A*33:03; TDRD1; ENSG00000095627; TAA
SVKSPFNVMSR

SEQ ID NO: 84533 - protein, 11 aa, Homo sapiens
  misc_feature: Table A; Target 84533; HLA-A*68:01; TDRD1; ENSG00000095627; TAA
SVKSPFNVMSR

SEQ ID NO: 84534 - protein, 11 aa, Homo sapiens
  misc_feature: Table A; Target 84534; HLA-C*07:06; TDRD1; ENSG00000095627; TAA
SVKSPFNVMSR

SEQ ID NO: 84535 - protein, 9 aa, Homo sapiens
  misc_feature: Table A; Target 84535; HLA-A*29:02; TDRD1; ENSG00000095627; TAA
SVLVGYVDY

SEQ ID NO: 84536 - protein, 9 aa, Homo sapiens
  misc_feature: Table A; Target 84536; HLA-A*30:02; TDRD1; ENSG00000095627; TAA
SVLVGYVDY

SEQ ID NO: 84537 - protein, 9 aa, Homo sapiens
  misc_feature: Table A; Target 84537; HLA-B*15:01; TDRD1; ENSG00000095627; TAA
SVLVGYVDY

SEQ ID NO: 84538 - protein, 9 aa, Homo sapiens
  misc_feature: Table A; Target 84538; HLA-B*35:01; TDRD1; ENSG00000095627; TAA
SVLVGYVDY

SEQ ID NO: 84539 - protein, 9 aa, Homo sapiens
  misc_feature: Table A; Target 84539; HLA-B*56:01; TDRD1; ENSG00000095627; TAA
SVSKVLLDA

SEQ ID NO: 84540 - protein, 9 aa, Homo sapiens
  misc_feature: Table A; Target 84540; HLA-A*02:03; TDRD1; ENSG00000095627; TAA
SVSSNPNGI

SEQ ID NO: 84541 - protein, 9 aa, Homo sapiens
  misc_feature: Table A; Target 84541; HLA-B*13:02; TDRD1; ENSG00000095627; TAA
SVSSNPNGI

SEQ ID NO: 84542 - protein, 8 aa, Homo sapiens
  misc_feature: Table A; Target 84542; HLA-B*51:01; TDRD1; ENSG00000095627; TAA
TADELRMI

SEQ ID NO: 84543 - protein, 8 aa, Homo sapiens
  misc_feature: Table A; Target 84543; HLA-C*05:01; TDRD1; ENSG00000095627; TAA
TADELRMI

SEQ ID NO: 84544 - protein, 10 aa, Homo sapiens
  misc_feature: Table A; Target 84544; HLA-B*44:02; TDRD1; ENSG00000095627; TAA
TEFKHPGDFY

SEQ ID NO: 84545 - protein, 10 aa, Homo sapiens
  misc_feature: Table A; Target 84545; HLA-B*44:03; TDRD1; ENSG00000095627; TAA
TEFKHPGDFY

SEQ ID NO: 84546 - protein, 9 aa, Homo sapiens
  misc_feature: Table A; Target 84546; HLA-A*11:01; TDRD1; ENSG00000095627; TAA
TELQKQVEK

SEQ ID NO: 84547 - protein, 9 aa, Homo sapiens
  misc_feature: Table A; Target 84547; HLA-B*15:03; TDRD1; ENSG00000095627; TAA
TENGIGVEL

SEQ ID NO: 84548 - protein, 9 aa, Homo sapiens
  misc_feature: Table A; Target 84548; HLA-B*18:01; TDRD1; ENSG00000095627; TAA
TENGIGVEL

SEQ ID NO: 84549 - protein, 9 aa, Homo sapiens
  misc_feature: Table A; Target 84549; HLA-B*27:02; TDRD1; ENSG00000095627; TAA
TENGIGVEL

SEQ ID NO: 84550 - protein, 9 aa, Homo sapiens
  misc_feature: Table A; Target 84550; HLA-B*27:05; TDRD1; ENSG00000095627; TAA
TENGIGVEL

SEQ ID NO: 84551 - protein, 9 aa, Homo sapiens
  misc_feature: Table A; Target 84551; HLA-B*35:03; TDRD1; ENSG00000095627; TAA
TENGIGVEL

SEQ ID NO: 84552 - protein, 9 aa, Homo sapiens
  misc_feature: Table A; Target 84552; HLA-B*37:01; TDRD1; ENSG00000095627; TAA
TENGIGVEL

SEQ ID NO: 84553 - protein, 9 aa, Homo sapiens
  misc_feature: Table A; Target 84553; HLA-B*38:01; TDRD1; ENSG00000095627; TAA
TENGIGVEL

SEQ ID NO: 84554 - protein, 9 aa, Homo sapiens
  misc_feature: Table A; Target 84554; HLA-B*39:01; TDRD1; ENSG00000095627; TAA
TENGIGVEL

SEQ ID NO: 84555 - protein, 9 aa, Homo sapiens
  misc_feature: Table A; Target 84555; HLA-B*40:02; TDRD1; ENSG00000095627; TAA
TENGIGVEL

SEQ ID NO: 84556 - protein, 9 aa, Homo sapiens
  misc_feature: Table A; Target 84556; HLA-B*44:02; TDRD1; ENSG00000095627; TAA
TENGIGVEL

SEQ ID NO: 84557 - protein, 9 aa, Homo sapiens
  misc_feature: Table A; Target 84557; HLA-B*44:03; TDRD1; ENSG00000095627; TAA
TENGIGVEL

SEQ ID NO: 84558 - protein, 9 aa, Homo sapiens
  misc_feature: Table A; Target 84558; HLA-B*49:01; TDRD1; ENSG00000095627; TAA
TENGIGVEL

SEQ ID NO: 84559 - protein, 9 aa, Homo sapiens
  misc_feature: Table A; Target 84559; HLA-C*02:02; TDRD1; ENSG00000095627; TAA
TENGIGVEL

SEQ ID NO: 84560 - protein, 9 aa, Homo sapiens
  misc_feature: Table A; Target 84560; HLA-C*07:04; TDRD1; ENSG00000095627; TAA
TENGIGVEL

SEQ ID NO: 84561 - protein, 9 aa, Homo sapiens
  misc_feature: Table A; Target 84561; HLA-C*16:04; TDRD1; ENSG00000095627; TAA
TENGIGVEL

SEQ ID NO: 84562 - protein, 9 aa, Homo sapiens
  misc_feature: Table A; Target 84562; HLA-A*03:02; TDRD1; ENSG00000095627; TAA
TENNIVVDK

SEQ ID NO: 84563 - protein, 9 aa, Homo sapiens
  misc_feature: Table A; Target 84563; HLA-A*11:01; TDRD1; ENSG00000095627; TAA
TENNIVVDK

SEQ ID NO: 84564 - protein, 9 aa, Homo sapiens
  misc_feature: Table A; Target 84564; HLA-A*68:01; TDRD1; ENSG00000095627; TAA
TENNIVVDK

SEQ ID NO: 84565 - protein, 9 aa, Homo sapiens
  misc_feature: Table A; Target 84565; HLA-B*27:02; TDRD1; ENSG00000095627; TAA
TENNIVVDK

SEQ ID NO: 84566 - protein, 9 aa, Homo sapiens
  misc_feature: Table A; Target 84566; HLA-B*27:05; TDRD1; ENSG00000095627; TAA
TENNIVVDK

SEQ ID NO: 84567 - protein, 8 aa, Homo sapiens
  misc_feature: Table A; Target 84567; HLA-C*14:02; TDRD1; ENSG00000095627; TAA
TFAVEVEL

SEQ ID NO: 84568 - protein, 9 aa, Homo sapiens
  misc_feature: Table A; Target 84568; HLA-B*13:02; TDRD1; ENSG00000095627; TAA
TIQANVLEI

SEQ ID NO: 84569 - protein, 9 aa, Homo sapiens
  misc_feature: Table A; Target 84569; HLA-B*15:03; TDRD1; ENSG00000095627; TAA
TKNVHTVSV

SEQ ID NO: 84570 - protein, 9 aa, Homo sapiens
  misc_feature: Table A; Target 84570; HLA-B*15:03; TDRD1; ENSG00000095627; TAA
TKPLLMEQY

SEQ ID NO: 84571 - protein, 8 aa, Homo sapiens
  misc_feature: Table A; Target 84571; HLA-B*46:01; TDRD1; ENSG00000095627; TAA
TLNVGDEF

SEQ ID NO: 84572 - protein, 8 aa, Homo sapiens
  misc_feature: Table A; Target 84572; HLA-C*01:02; TDRD1; ENSG00000095627; TAA
TLNVGDEF

SEQ ID NO: 84573 - protein, 8 aa, Homo sapiens
  misc_feature: Table A; Target 84573; HLA-C*05:01; TDRD1; ENSG00000095627; TAA
TLNVGDEF

SEQ ID NO: 84574 - protein, 8 aa, Homo sapiens
  misc_feature: Table A; Target 84574; HLA-C*14:02; TDRD1; ENSG00000095627; TAA
TLNVGDEF

SEQ ID NO: 84575 - protein, 10 aa, Homo sapiens
  misc_feature: Table A; Target 84575; HLA-A*02:07; TDRD1; ENSG00000095627; TAA
TLPNHPNFRL

SEQ ID NO: 84576 - protein, 9 aa, Homo sapiens
  misc_feature: Table A; Target 84576; HLA-A*33:01; TDRD1; ENSG00000095627; TAA
TNQNKFIEM

SEQ ID NO: 84577 - protein, 9 aa, Homo sapiens
  misc_feature: Table A; Target 84577; HLA-A*33:03; TDRD1; ENSG00000095627; TAA
TNQNKFIEM

SEQ ID NO: 84578 - protein, 9 aa, Homo sapiens
  misc_feature: Table A; Target 84578; HLA-B*08:01; TDRD1; ENSG00000095627; TAA
TNQNKFIEM

SEQ ID NO: 84579 - protein, 9 aa, Homo sapiens
  misc_feature: Table A; Target 84579; HLA-C*16:01; TDRD1; ENSG00000095627; TAA
TNQNKFIEM

SEQ ID NO: 84580 - protein, 9 aa, Homo sapiens
  misc_feature: Table A; Target 84580; HLA-B*07:02; TDRD1; ENSG00000095627; TAA
TPHVSVSKV

SEQ ID NO: 84581 - protein, 9 aa, Homo sapiens
  misc_feature: Table A; Target 84581; HLA-B*51:01; TDRD1; ENSG00000095627; TAA
TPHVSVSKV

SEQ ID NO: 84582 - protein, 9 aa, Homo sapiens
  misc_feature: Table A; Target 84582; HLA-B*56:01; TDRD1; ENSG00000095627; TAA
TPHVSVSKV

SEQ ID NO: 84583 - protein, 8 aa, Homo sapiens
  misc_feature: Table A; Target 84583; HLA-B*07:02; TDRD1; ENSG00000095627; TAA
TPQRQSAL

SEQ ID NO: 84584 - protein, 8 aa, Homo sapiens
  misc_feature: Table A; Target 84584; HLA-B*08:01; TDRD1; ENSG00000095627; TAA
TPQRQSAL

SEQ ID NO: 84585 - protein, 8 aa, Homo sapiens
  misc_feature: Table A; Target 84585; HLA-C*07:02; TDRD1; ENSG00000095627; TAA
TPQRQSAL

SEQ ID NO: 84586 - protein, 8 aa, Homo sapiens
  misc_feature: Table A; Target 84586; HLA-C*05:01; TDRD1; ENSG00000095627; TAA
TSDTDVEV

SEQ ID NO: 84587 - protein, 9 aa, Homo sapiens
  misc_feature: Table A; Target 84587; HLA-B*35:03; TDRD1; ENSG00000095627; TAA
TSDTDVEVL

SEQ ID NO: 84588 - protein, 9 aa, Homo sapiens
  misc_feature: Table A; Target 84588; HLA-B*38:01; TDRD1; ENSG00000095627; TAA
TSDTDVEVL

SEQ ID NO: 84589 - protein, 9 aa, Homo sapiens
  misc_feature: Table A; Target 84589; HLA-C*05:01; TDRD1; ENSG00000095627; TAA
TSDTDVEVL

SEQ ID NO: 84590 - protein, 10 aa, Homo sapiens
  misc_feature: Table A; Target 84590; HLA-C*05:01; TDRD1; ENSG00000095627; TAA
TSDTDVEVLY

SEQ ID NO: 84591 - protein, 8 aa, Homo sapiens
  misc_feature: Table A; Target 84591; HLA-A*33:03; TDRD1; ENSG00000095627; TAA
TSLGPPLR

SEQ ID NO: 84592 - protein, 10 aa, Homo sapiens
  misc_feature: Table A; Target 84592; HLA-A*68:01; TDRD1; ENSG00000095627; TAA
TSVPLGVEGK

SEQ ID NO: 84593 - protein, 10 aa, Homo sapiens
  misc_feature: Table A; Target 84593; HLA-A*01:01; TDRD1; ENSG00000095627; TAA
TTENNIVVDK

SEQ ID NO: 84594 - protein, 10 aa, Homo sapiens
  misc_feature: Table A; Target 84594; HLA-A*03:02; TDRD1; ENSG00000095627; TAA
TTENNIVVDK

SEQ ID NO: 84595 - protein, 10 aa, Homo sapiens
  misc_feature: Table A; Target 84595; HLA-A*11:01; TDRD1; ENSG00000095627; TAA
TTENNIVVDK

SEQ ID NO: 84596 - protein, 10 aa, Homo sapiens
  misc_feature: Table A; Target 84596; HLA-A*68:01; TDRD1; ENSG00000095627; TAA
TTENNIVVDK

SEQ ID NO: 84597 - protein, 10 aa, Homo sapiens
  misc_feature: Table A; Target 84597; HLA-B*27:02; TDRD1; ENSG00000095627; TAA
TTENNIVVDK

SEQ ID NO: 84598 - protein, 10 aa, Homo sapiens
  misc_feature: Table A; Target 84598; HLA-C*07:06; TDRD1; ENSG00000095627; TAA
TTENNIVVDK

SEQ ID NO: 84599 - protein, 8 aa, Homo sapiens
  misc_feature: Table A; Target 84599; HLA-C*04:01; TDRD1; ENSG00000095627; TAA
TVDVADKL

SEQ ID NO: 84600 - protein, 8 aa, Homo sapiens
  misc_feature: Table A; Target 84600; HLA-C*05:01; TDRD1; ENSG00000095627; TAA
TVDVADKL

SEQ ID NO: 84601 - protein, 9 aa, Homo sapiens
  misc_feature: Table A; Target 84601; HLA-C*05:01; TDRD1; ENSG00000095627; TAA
TVDVADKLV

SEQ ID NO: 84602 - protein, 11 aa, Homo sapiens
  misc_feature: Table A; Target 84602; HLA-A*02:07; TDRD1; ENSG00000095627; TAA
TVDVADKLVTF

SEQ ID NO: 84603 - protein, 11 aa, Homo sapiens
  misc_feature: Table A; Target 84603; HLA-B*38:01; TDRD1; ENSG00000095627; TAA
TVDVADKLVTF

SEQ ID NO: 84604 - protein, 11 aa, Homo sapiens
  misc_feature: Table A; Target 84604; HLA-C*04:01; TDRD1; ENSG00000095627; TAA
TVDVADKLVTF

SEQ ID NO: 84605 - protein, 11 aa, Homo sapiens
  misc_feature: Table A; Target 84605; HLA-C*05:01; TDRD1; ENSG00000095627; TAA
TVDVADKLVTF

SEQ ID NO: 84606 - protein, 8 aa, Homo sapiens
  misc_feature: Table A; Target 84606; HLA-C*05:01; TDRD1; ENSG00000095627; TAA
TVDVVVCV

SEQ ID NO: 84607 - protein, 9 aa, Homo sapiens
  misc_feature: Table A; Target 84607; HLA-A*02:07; TDRD1; ENSG00000095627; TAA
TVDVVVCVI

SEQ ID NO: 84608 - protein, 9 aa, Homo sapiens
  misc_feature: Table A; Target 84608; HLA-B*38:01; TDRD1; ENSG00000095627; TAA
TVDVVVCVI

SEQ ID NO: 84609 - protein, 9 aa, Homo sapiens
  misc_feature: Table A; Target 84609; HLA-C*05:01; TDRD1; ENSG00000095627; TAA
TVDVVVCVI

SEQ ID NO: 84610 - protein, 10 aa, Homo sapiens
  misc_feature: Table A; Target 84610; HLA-A*01:01; TDRD1; ENSG00000095627; TAA
TVDVVVCVIY

SEQ ID NO: 84611 - protein, 8 aa, Homo sapiens
  misc_feature: Table A; Target 84611; HLA-B*08:01; TDRD1; ENSG00000095627; TAA
TVKVVDKL

SEQ ID NO: 84612 - protein, 8 aa, Homo sapiens
  misc_feature: Table A; Target 84612; HLA-C*04:01; TDRD1; ENSG00000095627; TAA
VADKLVTF

SEQ ID NO: 84613 - protein, 8 aa, Homo sapiens
  misc_feature: Table A; Target 84613; HLA-C*05:01; TDRD1; ENSG00000095627; TAA
VADKLVTF

SEQ ID NO: 84614 - protein, 9 aa, Homo sapiens
  misc_feature: Table A; Target 84614; HLA-A*31:01; TDRD1; ENSG00000095627; TAA
VAGIKLQAR

SEQ ID NO: 84615 - protein, 9 aa, Homo sapiens
  misc_feature: Table A; Target 84615; HLA-A*23:01; TDRD1; ENSG00000095627; TAA
VCRPVQPNF

SEQ ID NO: 84616 - protein, 9 aa, Homo sapiens
  misc_feature: Table A; Target 84616; HLA-A*24:02; TDRD1; ENSG00000095627; TAA
VCRPVQPNF

SEQ ID NO: 84617 - protein, 9 aa, Homo sapiens
  misc_feature: Table A; Target 84617; HLA-A*32:01; TDRD1; ENSG00000095627; TAA
VCRPVQPNF

SEQ ID NO: 84618 - protein, 9 aa, Homo sapiens
  misc_feature: Table A; Target 84618; HLA-B*15:03; TDRD1; ENSG00000095627; TAA
VCRPVQPNF

SEQ ID NO: 84619 - protein, 9 aa, Homo sapiens
  misc_feature: Table A; Target 84619; HLA-B*46:01; TDRD1; ENSG00000095627; TAA
VCRPVQPNF

SEQ ID NO: 84620 - protein, 9 aa, Homo sapiens
  misc_feature: Table A; Target 84620; HLA-B*57:01; TDRD1; ENSG00000095627; TAA
VCRPVQPNF

SEQ ID NO: 84621 - protein, 9 aa, Homo sapiens
  misc_feature: Table A; Target 84621; HLA-B*58:01; TDRD1; ENSG00000095627; TAA
VCRPVQPNF

SEQ ID NO: 84622 - protein, 9 aa, Homo sapiens
  misc_feature: Table A; Target 84622; HLA-C*16:01; TDRD1; ENSG00000095627; TAA
VCRPVQPNF

SEQ ID NO: 84623 - protein, 9 aa, Homo sapiens
  misc_feature: Table A; Target 84623; HLA-A*30:01; TDRD1; ENSG00000095627; TAA
VDKLENSSL

SEQ ID NO: 84624 - protein, 9 aa, Homo sapiens
  misc_feature: Table A; Target 84624; HLA-B*37:01; TDRD1; ENSG00000095627; TAA
VDKLENSSL

SEQ ID NO: 84625 - protein, 9 aa, Homo sapiens
  misc_feature: Table A; Target 84625; HLA-B*40:02; TDRD1; ENSG00000095627; TAA
VDKLENSSL

SEQ ID NO: 84626 - protein, 8 aa, Homo sapiens
  misc_feature: Table A; Target 84626; HLA-B*37:01; TDRD1; ENSG00000095627; TAA
VDVVVCVI

SEQ ID NO: 84627 - protein, 8 aa, Homo sapiens
  misc_feature: Table A; Target 84627; HLA-B*40:02; TDRD1; ENSG00000095627; TAA
VDVVVCVI

SEQ ID NO: 84628 - protein, 8 aa, Homo sapiens
  misc_feature: Table A; Target 84628; HLA-B*49:01; TDRD1; ENSG00000095627; TAA
VDVVVCVI

SEQ ID NO: 84629 - protein, 9 aa, Homo sapiens
  misc_feature: Table A; Target 84629; HLA-B*18:01; TDRD1; ENSG00000095627; TAA
VDVVVCVIY

SEQ ID NO: 84630 - protein, 9 aa, Homo sapiens
  misc_feature: Table A; Target 84630; HLA-C*07:01; TDRD1; ENSG00000095627; TAA
VDVVVCVIY

SEQ ID NO: 84631 - protein, 9 aa, Homo sapiens
  misc_feature: Table A; Target 84631; HLA-C*12:03; TDRD1; ENSG00000095627; TAA
VDVVVCVIY

SEQ ID NO: 84632 - protein, 8 aa, Homo sapiens
  misc_feature: Table A; Target 84632; HLA-B*37:01; TDRD1; ENSG00000095627; TAA
VDYGNFEI

SEQ ID NO: 84633 - protein, 9 aa, Homo sapiens
  misc_feature: Table A; Target 84633; HLA-A*30:01; TDRD1; ENSG00000095627; TAA
VDYGNFEIL

SEQ ID NO: 84634 - protein, 9 aa, Homo sapiens
  misc_feature: Table A; Target 84634; HLA-B*37:01; TDRD1; ENSG00000095627; TAA
VDYGNFEIL

SEQ ID NO: 84635 - protein, 9 aa, Homo sapiens
  misc_feature: Table A; Target 84635; HLA-B*40:01; TDRD1; ENSG00000095627; TAA
VDYGNFEIL

SEQ ID NO: 84636 - protein, 9 aa, Homo sapiens
  misc_feature: Table A; Target 84636; HLA-B*40:02; TDRD1; ENSG00000095627; TAA
VDYGNFEIL

SEQ ID NO: 84637 - protein, 9 aa, Homo sapiens
  misc_feature: Table A; Target 84637; HLA-C*12:03; TDRD1; ENSG00000095627; TAA
VDYGNFEIL

SEQ ID NO: 84638 - protein, 9 aa, Homo sapiens
  misc_feature: Table A; Target 84638; HLA-A*30:01; TDRD1; ENSG00000095627; TAA
VDYGNIEEV

SEQ ID NO: 84639 - protein, 9 aa, Homo sapiens
  misc_feature: Table A; Target 84639; HLA-B*13:02; TDRD1; ENSG00000095627; TAA
VDYGNIEEV

SEQ ID NO: 84640 - protein, 9 aa, Homo sapiens
  misc_feature: Table A; Target 84640; HLA-B*40:02; TDRD1; ENSG00000095627; TAA
VDYGNIEEV

SEQ ID NO: 84641 - protein, 9 aa, Homo sapiens
  misc_feature: Table A; Target 84641; HLA-B*49:01; TDRD1; ENSG00000095627; TAA
VDYGNIEEV

SEQ ID NO: 84642 - protein, 9 aa, Homo sapiens
  misc_feature: Table A; Target 84642; HLA-C*12:03; TDRD1; ENSG00000095627; TAA
VDYGNIEEV

SEQ ID NO: 84643 - protein, 8 aa, Homo sapiens
  misc_feature: Table A; Target 84643; HLA-B*18:01; TDRD1; ENSG00000095627; TAA
VEGKVNPL

SEQ ID NO: 84644 - protein, 8 aa, Homo sapiens
  misc_feature: Table A; Target 84644; HLA-B*37:01; TDRD1; ENSG00000095627; TAA
VEGKVNPL

SEQ ID NO: 84645 - protein, 8 aa, Homo sapiens
  misc_feature: Table A; Target 84645; HLA-B*40:01; TDRD1; ENSG00000095627; TAA
VEGKVNPL

SEQ ID NO: 84646 - protein, 10 aa, Homo sapiens
  misc_feature: Table A; Target 84646; HLA-B*27:02; TDRD1; ENSG00000095627; TAA
VEGKVNPLEW

SEQ ID NO: 84647 - protein, 10 aa, Homo sapiens
  misc_feature: Table A; Target 84647; HLA-B*44:02; TDRD1; ENSG00000095627; TAA
VEGKVNPLEW

SEQ ID NO: 84648 - protein, 10 aa, Homo sapiens
  misc_feature: Table A; Target 84648; HLA-B*44:03; TDRD1; ENSG00000095627; TAA
VEGKVNPLEW

SEQ ID NO: 84649 - protein, 9 aa, Homo sapiens
  misc_feature: Table A; Target 84649; HLA-A*30:01; TDRD1; ENSG00000095627; TAA
VELGVDQTV

SEQ ID NO: 84650 - protein, 9 aa, Homo sapiens
  misc_feature: Table A; Target 84650; HLA-B*13:02; TDRD1; ENSG00000095627; TAA
VELGVDQTV

SEQ ID NO: 84651 - protein, 9 aa, Homo sapiens
  misc_feature: Table A; Target 84651; HLA-B*18:01; TDRD1; ENSG00000095627; TAA
VELGVDQTV

SEQ ID NO: 84652 - protein, 9 aa, Homo sapiens
  misc_feature: Table A; Target 84652; HLA-B*40:01; TDRD1; ENSG00000095627; TAA
VELGVDQTV

SEQ ID NO: 84653 - protein, 9 aa, Homo sapiens
  misc_feature: Table A; Target 84653; HLA-B*40:02; TDRD1; ENSG00000095627; TAA
VELGVDQTV

SEQ ID NO: 84654 - protein, 9 aa, Homo sapiens
  misc_feature: Table A; Target 84654; HLA-B*44:02; TDRD1; ENSG00000095627; TAA
VELGVDQTV

SEQ ID NO: 84655 - protein, 9 aa, Homo sapiens
  misc_feature: Table A; Target 84655; HLA-B*44:03; TDRD1; ENSG00000095627; TAA
VELGVDQTV

SEQ ID NO: 84656 - protein, 9 aa, Homo sapiens
  misc_feature: Table A; Target 84656; HLA-B*49:01; TDRD1; ENSG00000095627; TAA
VELGVDQTV

SEQ ID NO: 84657 - protein, 9 aa, Homo sapiens
  misc_feature: Table A; Target 84657; HLA-C*16:04; TDRD1; ENSG00000095627; TAA
VELGVDQTV

SEQ ID NO: 84658 - protein, 11 aa, Homo sapiens
  misc_feature: Table A; Target 84658; HLA-B*40:01; TDRD1; ENSG00000095627; TAA
VELGVDQTVDV

SEQ ID NO: 84659 - protein, 11 aa, Homo sapiens
  misc_feature: Table A; Target 84659; HLA-B*49:01; TDRD1; ENSG00000095627; TAA
VELGVDQTVDV

SEQ ID NO: 84660 - protein, 9 aa, Homo sapiens
  misc_feature: Table A; Target 84660; HLA-A*23:01; TDRD1; ENSG00000095627; TAA
VELPNSGKL

SEQ ID NO: 84661 - protein, 9 aa, Homo sapiens
  misc_feature: Table A; Target 84661; HLA-A*30:01; TDRD1; ENSG00000095627; TAA
VELPNSGKL

SEQ ID NO: 84662 - protein, 9 aa, Homo sapiens
  misc_feature: Table A; Target 84662; HLA-B*18:01; TDRD1; ENSG00000095627; TAA
VELPNSGKL

SEQ ID NO: 84663 - protein, 9 aa, Homo sapiens
  misc_feature: Table A; Target 84663; HLA-B*37:01; TDRD1; ENSG00000095627; TAA
VELPNSGKL

SEQ ID NO: 84664 - protein, 9 aa, Homo sapiens
  misc_feature: Table A; Target 84664; HLA-B*40:01; TDRD1; ENSG00000095627; TAA
VELPNSGKL

SEQ ID NO: 84665 - protein, 9 aa, Homo sapiens
  misc_feature: Table A; Target 84665; HLA-B*40:02; TDRD1; ENSG00000095627; TAA
VELPNSGKL

SEQ ID NO: 84666 - protein, 9 aa, Homo sapiens
  misc_feature: Table A; Target 84666; HLA-B*44:02; TDRD1; ENSG00000095627; TAA
VELPNSGKL

SEQ ID NO: 84667 - protein, 9 aa, Homo sapiens
  misc_feature: Table A; Target 84667; HLA-B*44:03; TDRD1; ENSG00000095627; TAA
VELPNSGKL

SEQ ID NO: 84668 - protein, 9 aa, Homo sapiens
  misc_feature: Table A; Target 84668; HLA-B*49:01; TDRD1; ENSG00000095627; TAA
VELPNSGKL

SEQ ID NO: 84669 - protein, 10 aa, Homo sapiens
  misc_feature: Table A; Target 84669; HLA-B*40:01; TDRD1; ENSG00000095627; TAA
VELPNSGKLL

SEQ ID NO: 84670 - protein, 10 aa, Homo sapiens
  misc_feature: Table A; Target 84670; HLA-B*44:02; TDRD1; ENSG00000095627; TAA
VELPNSGKLL

SEQ ID NO: 84671 - protein, 10 aa, Homo sapiens
  misc_feature: Table A; Target 84671; HLA-B*44:03; TDRD1; ENSG00000095627; TAA
VELPNSGKLL

SEQ ID NO: 84672 - protein, 9 aa, Homo sapiens
  misc_feature: Table A; Target 84672; HLA-B*49:01; TDRD1; ENSG00000095627; TAA
VELTDLSTC

SEQ ID NO: 84673 - protein, 10 aa, Homo sapiens
  misc_feature: Table A; Target 84673; HLA-A*30:02; TDRD1; ENSG00000095627; TAA
VELTDLSTCY

SEQ ID NO: 84674 - protein, 10 aa, Homo sapiens
  misc_feature: Table A; Target 84674; HLA-B*15:03; TDRD1; ENSG00000095627; TAA
VELTDLSTCY

SEQ ID NO: 84675 - protein, 10 aa, Homo sapiens
  misc_feature: Table A; Target 84675; HLA-B*18:01; TDRD1; ENSG00000095627; TAA
VELTDLSTCY

SEQ ID NO: 84676 - protein, 10 aa, Homo sapiens
  misc_feature: Table A; Target 84676; HLA-B*44:02; TDRD1; ENSG00000095627; TAA
VELTDLSTCY

SEQ ID NO: 84677 - protein, 10 aa, Homo sapiens
  misc_feature: Table A; Target 84677; HLA-B*44:03; TDRD1; ENSG00000095627; TAA
VELTDLSTCY

SEQ ID NO: 84678 - protein, 10 aa, Homo sapiens
  misc_feature: Table A; Target 84678; HLA-C*16:04; TDRD1; ENSG00000095627; TAA
VELTDLSTCY

SEQ ID NO: 84679 - protein, 9 aa, Homo sapiens
  misc_feature: Table A; Target 84679; HLA-B*18:01; TDRD1; ENSG00000095627; TAA
VENSLSISN

SEQ ID NO: 84680 - protein, 9 aa, Homo sapiens
  misc_feature: Table A; Target 84680; HLA-A*30:01; TDRD1; ENSG00000095627; TAA
VEVELPNSG

SEQ ID NO: 84681 - protein, 9 aa, Homo sapiens
  misc_feature: Table A; Target 84681; HLA-B*18:01; TDRD1; ENSG00000095627; TAA
VEVELPNSG

SEQ ID NO: 84682 - protein, 9 aa, Homo sapiens
  misc_feature: Table A; Target 84682; HLA-B*40:02; TDRD1; ENSG00000095627; TAA
VEVELPNSG

SEQ ID NO: 84683 - protein, 9 aa, Homo sapiens
  misc_feature: Table A; Target 84683; HLA-B*49:01; TDRD1; ENSG00000095627; TAA
VEVELPNSG

SEQ ID NO: 84684 - protein, 10 aa, Homo sapiens
  misc_feature: Table A; Target 84684; HLA-B*27:02; TDRD1; ENSG00000095627; TAA
VEVELPNSGK

SEQ ID NO: 84685 - protein, 10 aa, Homo sapiens
  misc_feature: Table A; Target 84685; HLA-B*27:05; TDRD1; ENSG00000095627; TAA
VEVELPNSGK

SEQ ID NO: 84686 - protein, 10 aa, Homo sapiens
  misc_feature: Table A; Target 84686; HLA-B*49:01; TDRD1; ENSG00000095627; TAA
VEVELPNSGK

SEQ ID NO: 84687 - protein, 11 aa, Homo sapiens
  misc_feature: Table A; Target 84687; HLA-B*40:02; TDRD1; ENSG00000095627; TAA
VEVELPNSGKL

SEQ ID NO: 84688 - protein, 11 aa, Homo sapiens
  misc_feature: Table A; Target 84688; HLA-B*44:03; TDRD1; ENSG00000095627; TAA
VEVELPNSGKL

SEQ ID NO: 84689 - protein, 11 aa, Homo sapiens
  misc_feature: Table A; Target 84689; HLA-B*49:01; TDRD1; ENSG00000095627; TAA
VEVELPNSGKL

SEQ ID NO: 84690 - protein, 8 aa, Homo sapiens
  misc_feature: Table A; Target 84690; HLA-B*18:01; TDRD1; ENSG00000095627; TAA
VEVLYADY

SEQ ID NO: 84691 - protein, 8 aa, Homo sapiens
  misc_feature: Table A; Target 84691; HLA-B*49:01; TDRD1; ENSG00000095627; TAA
VEVTENGI

SEQ ID NO: 84692 - protein, 10 aa, Homo sapiens
  misc_feature: Table A; Target 84692; HLA-A*30:01; TDRD1; ENSG00000095627; TAA
VEVTENGIGV

SEQ ID NO: 84693 - protein, 10 aa, Homo sapiens
  misc_feature: Table A; Target 84693; HLA-B*40:01; TDRD1; ENSG00000095627; TAA
VEVTENGIGV

SEQ ID NO: 84694 - protein, 10 aa, Homo sapiens
  misc_feature: Table A; Target 84694; HLA-B*49:01; TDRD1; ENSG00000095627; TAA
VEVTENGIGV

SEQ ID NO: 84695 - protein, 8 aa, Homo sapiens
  misc_feature: Table A; Target 84695; HLA-C*05:01; TDRD1; ENSG00000095627; TAA
VGDEFCGV

SEQ ID NO: 84696 - protein, 9 aa, Homo sapiens
  misc_feature: Table A; Target 84696; HLA-B*39:01; TDRD1; ENSG00000095627; TAA
VHVQGLQAT

SEQ ID NO: 84697 - protein, 8 aa, Homo sapiens
  misc_feature: Table A; Target 84697; HLA-B*39:01; TDRD1; ENSG00000095627; TAA
VIYSPGEF

SEQ ID NO: 84698 - protein, 8 aa, Homo sapiens
  misc_feature: Table A; Target 84698; HLA-B*46:01; TDRD1; ENSG00000095627; TAA
VIYSPGEF

SEQ ID NO: 84699 - protein, 8 aa, Homo sapiens
  misc_feature: Table A; Target 84699; HLA-C*02:02; TDRD1; ENSG00000095627; TAA
VIYSPGEF

SEQ ID NO: 84700 - protein, 8 aa, Homo sapiens
  misc_feature: Table A; Target 84700; HLA-C*05:01; TDRD1; ENSG00000095627; TAA
VIYSPGEF

SEQ ID NO: 84701 - protein, 9 aa, Homo sapiens
  misc_feature: Table A; Target 84701; HLA-A*01:01; TDRD1; ENSG00000095627; TAA
VIYSPGEFY

SEQ ID NO: 84702 - protein, 9 aa, Homo sapiens
  misc_feature: Table A; Target 84702; HLA-A*03:01; TDRD1; ENSG00000095627; TAA
VIYSPGEFY

SEQ ID NO: 84703 - protein, 9 aa, Homo sapiens
  misc_feature: Table A; Target 84703; HLA-A*29:02; TDRD1; ENSG00000095627; TAA
VIYSPGEFY

SEQ ID NO: 84704 - protein, 9 aa, Homo sapiens
  misc_feature: Table A; Target 84704; HLA-A*30:02; TDRD1; ENSG00000095627; TAA
VIYSPGEFY

SEQ ID NO: 84705 - protein, 9 aa, Homo sapiens
  misc_feature: Table A; Target 84705; HLA-B*15:01; TDRD1; ENSG00000095627; TAA
VIYSPGEFY

SEQ ID NO: 84706 - protein, 9 aa, Homo sapiens
  misc_feature: Table A; Target 84706; HLA-B*15:03; TDRD1; ENSG00000095627; TAA
VIYSPGEFY

SEQ ID NO: 84707 - protein, 9 aa, Homo sapiens
  misc_feature: Table A; Target 84707; HLA-B*46:01; TDRD1; ENSG00000095627; TAA
VIYSPGEFY

SEQ ID NO: 84708 - protein, 9 aa, Homo sapiens
  misc_feature: Table A; Target 84708; HLA-C*02:02; TDRD1; ENSG00000095627; TAA
VIYSPGEFY

SEQ ID NO: 84709 - protein, 9 aa, Homo sapiens
  misc_feature: Table A; Target 84709; HLA-C*07:04; TDRD1; ENSG00000095627; TAA
VIYSPGEFY

SEQ ID NO: 84710 - protein, 8 aa, Homo sapiens
  misc_feature: Table A; Target 84710; HLA-B*15:03; TDRD1; ENSG00000095627; TAA
VKSPFNVM

SEQ ID NO: 84711 - protein, 9 aa, Homo sapiens
  misc_feature: Table A; Target 84711; HLA-A*02:01; TDRD1; ENSG00000095627; TAA
VLAGVKPSL

SEQ ID NO: 84712 - protein, 9 aa, Homo sapiens
  misc_feature: Table A; Target 84712; HLA-A*02:03; TDRD1; ENSG00000095627; TAA
VLAGVKPSL

SEQ ID NO: 84713 - protein, 9 aa, Homo sapiens
  misc_feature: Table A; Target 84713; HLA-A*02:04; TDRD1; ENSG00000095627; TAA
VLAGVKPSL

SEQ ID NO: 84714 - protein, 9 aa, Homo sapiens
  misc_feature: Table A; Target 84714; HLA-A*02:07; TDRD1; ENSG00000095627; TAA
VLAGVKPSL

SEQ ID NO: 84715 - protein, 9 aa, Homo sapiens
  misc_feature: Table A; Target 84715; HLA-A*23:01; TDRD1; ENSG00000095627; TAA
VLAGVKPSL

SEQ ID NO: 84716 - protein, 9 aa, Homo sapiens
  misc_feature: Table A; Target 84716; HLA-A*24:02; TDRD1; ENSG00000095627; TAA
VLAGVKPSL

SEQ ID NO: 84717 - protein, 9 aa, Homo sapiens
  misc_feature: Table A; Target 84717; HLA-A*30:01; TDRD1; ENSG00000095627; TAA
VLAGVKPSL

SEQ ID NO: 84718 - protein, 9 aa, Homo sapiens
  misc_feature: Table A; Target 84718; HLA-A*32:01; TDRD1; ENSG00000095627; TAA
VLAGVKPSL

SEQ ID NO: 84719 - protein, 9 aa, Homo sapiens
  misc_feature: Table A; Target 84719; HLA-B*07:02; TDRD1; ENSG00000095627; TAA
VLAGVKPSL

SEQ ID NO: 84720 - protein, 9 aa, Homo sapiens
  misc_feature: Table A; Target 84720; HLA-B*08:01; TDRD1; ENSG00000095627; TAA
VLAGVKPSL

SEQ ID NO: 84721 - protein, 9 aa, Homo sapiens
  misc_feature: Table A; Target 84721; HLA-B*13:02; TDRD1; ENSG00000095627; TAA
VLAGVKPSL

SEQ ID NO: 84722 - protein, 9 aa, Homo sapiens
  misc_feature: Table A; Target 84722; HLA-B*15:01; TDRD1; ENSG00000095627; TAA
VLAGVKPSL

SEQ ID NO: 84723 - protein, 9 aa, Homo sapiens
  misc_feature: Table A; Target 84723; HLA-B*15:03; TDRD1; ENSG00000095627; TAA
VLAGVKPSL

SEQ ID NO: 84724 - protein, 9 aa, Homo sapiens
  misc_feature: Table A; Target 84724; HLA-B*35:03; TDRD1; ENSG00000095627; TAA
VLAGVKPSL

SEQ ID NO: 84725 - protein, 9 aa, Homo sapiens
  misc_feature: Table A; Target 84725; HLA-B*38:01; TDRD1; ENSG00000095627; TAA
VLAGVKPSL

SEQ ID NO: 84726 - protein, 9 aa, Homo sapiens
  misc_feature: Table A; Target 84726; HLA-B*39:01; TDRD1; ENSG00000095627; TAA
VLAGVKPSL

SEQ ID NO: 84727 - protein, 9 aa, Homo sapiens
  misc_feature: Table A; Target 84727; HLA-B*40:01; TDRD1; ENSG00000095627; TAA
VLAGVKPSL

SEQ ID NO: 84728 - protein, 9 aa, Homo sapiens
  misc_feature: Table A; Target 84728; HLA-B*44:03; TDRD1; ENSG00000095627; TAA
VLAGVKPSL

SEQ ID NO: 84729 - protein, 9 aa, Homo sapiens
  misc_feature: Table A; Target 84729; HLA-B*46:01; TDRD1; ENSG00000095627; TAA
VLAGVKPSL

SEQ ID NO: 84730 - protein, 9 aa, Homo sapiens
  misc_feature: Table A; Target 84730; HLA-B*55:01; TDRD1; ENSG00000095627; TAA
VLAGVKPSL

SEQ ID NO: 84731 - protein, 9 aa, Homo sapiens
  misc_feature: Table A; Target 84731; HLA-B*58:01; TDRD1; ENSG00000095627; TAA
VLAGVKPSL

SEQ ID NO: 84732 - protein, 9 aa, Homo sapiens
  misc_feature: Table A; Target 84732; HLA-C*01:02; TDRD1; ENSG00000095627; TAA
VLAGVKPSL

SEQ ID NO: 84733 - protein, 9 aa, Homo sapiens
  misc_feature: Table A; Target 84733; HLA-C*02:02; TDRD1; ENSG00000095627; TAA
VLAGVKPSL

SEQ ID NO: 84734 - protein, 9 aa, Homo sapiens
  misc_feature: Table A; Target 84734; HLA-C*03:03; TDRD1; ENSG00000095627; TAA
VLAGVKPSL

SEQ ID NO: 84735 - protein, 9 aa, Homo sapiens
  misc_feature: Table A; Target 84735; HLA-C*03:04; TDRD1; ENSG00000095627; TAA
VLAGVKPSL

SEQ ID NO: 84736 - protein, 9 aa, Homo sapiens
  misc_feature: Table A; Target 84736; HLA-C*07:02; TDRD1; ENSG00000095627; TAA
VLAGVKPSL

SEQ ID NO: 84737 - protein, 9 aa, Homo sapiens
  misc_feature: Table A; Target 84737; HLA-C*07:04; TDRD1; ENSG00000095627; TAA
VLAGVKPSL

SEQ ID NO: 84738 - protein, 9 aa, Homo sapiens
  misc_feature: Table A; Target 84738; HLA-C*14:02; TDRD1; ENSG00000095627; TAA
VLAGVKPSL

SEQ ID NO: 84739 - protein, 9 aa, Homo sapiens
  misc_feature: Table A; Target 84739; HLA-C*16:01; TDRD1; ENSG00000095627; TAA
VLAGVKPSL

SEQ ID NO: 84740 - protein, 9 aa, Homo sapiens
  misc_feature: Table A; Target 84740; HLA-C*16:02; TDRD1; ENSG00000095627; TAA
VLAGVKPSL

SEQ ID NO: 84741 - protein, 9 aa, Homo sapiens
  misc_feature: Table A; Target 84741; HLA-A*02:01; TDRD1; ENSG00000095627; TAA
VLEIISPNL

SEQ ID NO: 84742 - protein, 9 aa, Homo sapiens
  misc_feature: Table A; Target 84742; HLA-A*02:04; TDRD1; ENSG00000095627; TAA
VLEIISPNL

SEQ ID NO: 84743 - protein, 9 aa, Homo sapiens
  misc_feature: Table A; Target 84743; HLA-A*02:07; TDRD1; ENSG00000095627; TAA
VLEIISPNL

SEQ ID NO: 84744 - protein, 10 aa, Homo sapiens
  misc_feature: Table A; Target 84744; HLA-A*01:01; TDRD1; ENSG00000095627; TAA
VLEIISPNLF

SEQ ID NO: 84745 - protein, 11 aa, Homo sapiens
  misc_feature: Table A; Target 84745; HLA-A*01:01; TDRD1; ENSG00000095627; TAA
VLEIISPNLFY

SEQ ID NO: 84746 - protein, 11 aa, Homo sapiens
  misc_feature: Table A; Target 84746; HLA-A*29:02; TDRD1; ENSG00000095627; TAA
VLEIISPNLFY

SEQ ID NO: 84747 - protein, 9 aa, Homo sapiens
  misc_feature: Table A; Target 84747; HLA-A*02:01; TDRD1; ENSG00000095627; TAA
VLIDEHLVL

SEQ ID NO: 84748 - protein, 9 aa, Homo sapiens
  misc_feature: Table A; Target 84748; HLA-A*02:03; TDRD1; ENSG00000095627; TAA
VLIDEHLVL

SEQ ID NO: 84749 - protein, 9 aa, Homo sapiens
  misc_feature: Table A; Target 84749; HLA-A*02:04; TDRD1; ENSG00000095627; TAA
VLIDEHLVL

SEQ ID NO: 84750 - protein, 9 aa, Homo sapiens
  misc_feature: Table A; Target 84750; HLA-A*02:07; TDRD1; ENSG00000095627; TAA
VLIDEHLVL

SEQ ID NO: 84751 - protein, 9 aa, Homo sapiens
  misc_feature: Table A; Target 84751; HLA-A*23:01; TDRD1; ENSG00000095627; TAA
VLIDEHLVL

SEQ ID NO: 84752 - protein, 9 aa, Homo sapiens
  misc_feature: Table A; Target 84752; HLA-A*24:02; TDRD1; ENSG00000095627; TAA
VLIDEHLVL

SEQ ID NO: 84753 - protein, 9 aa, Homo sapiens
  misc_feature: Table A; Target 84753; HLA-A*29:02; TDRD1; ENSG00000095627; TAA
VLIDEHLVL

SEQ ID NO: 84754 - protein, 9 aa, Homo sapiens
  misc_feature: Table A; Target 84754; HLA-B*15:01; TDRD1; ENSG00000095627; TAA
VLIDEHLVL

SEQ ID NO: 84755 - protein, 9 aa, Homo sapiens
  misc_feature: Table A; Target 84755; HLA-B*38:01; TDRD1; ENSG00000095627; TAA
VLIDEHLVL

SEQ ID NO: 84756 - protein, 9 aa, Homo sapiens
  misc_feature: Table A; Target 84756; HLA-C*02:02; TDRD1; ENSG00000095627; TAA
VLIDEHLVL

SEQ ID NO: 84757 - protein, 9 aa, Homo sapiens
  misc_feature: Table A; Target 84757; HLA-C*03:04; TDRD1; ENSG00000095627; TAA
VLIDEHLVL

SEQ ID NO: 84758 - protein, 10 aa, Homo sapiens
  misc_feature: Table A; Target 84758; HLA-A*03:01; TDRD1; ENSG00000095627; TAA
VLIDEHLVLK

SEQ ID NO: 84759 - protein, 10 aa, Homo sapiens
  misc_feature: Table A; Target 84759; HLA-A*03:02; TDRD1; ENSG00000095627; TAA
VLIDEHLVLK

SEQ ID NO: 84760 - protein, 10 aa, Homo sapiens
  misc_feature: Table A; Target 84760; HLA-A*11:01; TDRD1; ENSG00000095627; TAA
VLIDEHLVLK

SEQ ID NO: 84761 - protein, 9 aa, Homo sapiens
  misc_feature: Table A; Target 84761; HLA-A*02:01; TDRD1; ENSG00000095627; TAA
VLIEMGYGL

SEQ ID NO: 84762 - protein, 9 aa, Homo sapiens
  misc_feature: Table A; Target 84762; HLA-A*02:03; TDRD1; ENSG00000095627; TAA
VLIEMGYGL

SEQ ID NO: 84763 - protein, 9 aa, Homo sapiens
  misc_feature: Table A; Target 84763; HLA-A*02:04; TDRD1; ENSG00000095627; TAA
VLIEMGYGL

SEQ ID NO: 84764 - protein, 9 aa, Homo sapiens
  misc_feature: Table A; Target 84764; HLA-A*02:07; TDRD1; ENSG00000095627; TAA
VLIEMGYGL

SEQ ID NO: 84765 - protein, 9 aa, Homo sapiens
  misc_feature: Table A; Target 84765; HLA-A*23:01; TDRD1; ENSG00000095627; TAA
VLIEMGYGL

SEQ ID NO: 84766 - protein, 9 aa, Homo sapiens
  misc_feature: Table A; Target 84766; HLA-B*55:01; TDRD1; ENSG00000095627; TAA
VLIEMGYGL

SEQ ID NO: 84767 - protein, 9 aa, Homo sapiens
  misc_feature: Table A; Target 84767; HLA-A*03:01; TDRD1; ENSG00000095627; TAA
VLKEDALKK

SEQ ID NO: 84768 - protein, 10 aa, Homo sapiens
  misc_feature: Table A; Target 84768; HLA-A*02:03; TDRD1; ENSG00000095627; TAA
VLKEDALKKL

SEQ ID NO: 84769 - protein, 9 aa, Homo sapiens
  misc_feature: Table A; Target 84769; HLA-A*03:01; TDRD1; ENSG00000095627; TAA
VLKSASPHK

SEQ ID NO: 84770 - protein, 9 aa, Homo sapiens
  misc_feature: Table A; Target 84770; HLA-A*02:01; TDRD1; ENSG00000095627; TAA
VLLDAGFAV

SEQ ID NO: 84771 - protein, 9 aa, Homo sapiens
  misc_feature: Table A; Target 84771; HLA-A*02:04; TDRD1; ENSG00000095627; TAA
VLLDAGFAV

SEQ ID NO: 84772 - protein, 9 aa, Homo sapiens
  misc_feature: Table A; Target 84772; HLA-A*02:07; TDRD1; ENSG00000095627; TAA
VLLDAGFAV

SEQ ID NO: 84773 - protein, 9 aa, Homo sapiens
  misc_feature: Table A; Target 84773; HLA-B*13:02; TDRD1; ENSG00000095627; TAA
VLLDAGFAV

SEQ ID NO: 84774 - protein, 9 aa, Homo sapiens
  misc_feature: Table A; Target 84774; HLA-B*55:01; TDRD1; ENSG00000095627; TAA
VLLDAGFAV

SEQ ID NO: 84775 - protein, 10 aa, Homo sapiens
  misc_feature: Table A; Target 84775; HLA-A*03:01; TDRD1; ENSG00000095627; TAA
VMLSVKGITK

SEQ ID NO: 84776 - protein, 10 aa, Homo sapiens
  misc_feature: Table A; Target 84776; HLA-A*03:02; TDRD1; ENSG00000095627; TAA
VMLSVKGITK

SEQ ID NO: 84777 - protein, 10 aa, Homo sapiens
  misc_feature: Table A; Target 84777; HLA-A*11:01; TDRD1; ENSG00000095627; TAA
VMLSVKGITK

SEQ ID NO: 84778 - protein, 9 aa, Homo sapiens
  misc_feature: Table A; Target 84778; HLA-B*51:01; TDRD1; ENSG00000095627; TAA
VPLGVEGKV

SEQ ID NO: 84779 - protein, 11 aa, Homo sapiens
  misc_feature: Table A; Target 84779; HLA-A*29:02; TDRD1; ENSG00000095627; TAA
VQLYSSEVLEY

SEQ ID NO: 84780 - protein, 11 aa, Homo sapiens
  misc_feature: Table A; Target 84780; HLA-A*30:02; TDRD1; ENSG00000095627; TAA
VQLYSSEVLEY

SEQ ID NO: 84781 - protein, 8 aa, Homo sapiens
  misc_feature: Table A; Target 84781; HLA-A*02:03; TDRD1; ENSG00000095627; TAA
VQNKIITV

SEQ ID NO: 84782 - protein, 8 aa, Homo sapiens
  misc_feature: Table A; Target 84782; HLA-A*32:01; TDRD1; ENSG00000095627; TAA
VQNKIITV

SEQ ID NO: 84783 - protein, 8 aa, Homo sapiens
  misc_feature: Table A; Target 84783; HLA-B*13:02; TDRD1; ENSG00000095627; TAA
VQNKIITV

SEQ ID NO: 84784 - protein, 8 aa, Homo sapiens
  misc_feature: Table A; Target 84784; HLA-B*15:01; TDRD1; ENSG00000095627; TAA
VQNKIITV

SEQ ID NO: 84785 - protein, 9 aa, Homo sapiens
  misc_feature: Table A; Target 84785; HLA-A*03:01; TDRD1; ENSG00000095627; TAA
VQNKIITVK

SEQ ID NO: 84786 - protein, 9 aa, Homo sapiens
  misc_feature: Table A; Target 84786; HLA-A*03:02; TDRD1; ENSG00000095627; TAA
VQNKIITVK

SEQ ID NO: 84787 - protein, 9 aa, Homo sapiens
  misc_feature: Table A; Target 84787; HLA-A*11:01; TDRD1; ENSG00000095627; TAA
VQNKIITVK

SEQ ID NO: 84788 - protein, 9 aa, Homo sapiens
  misc_feature: Table A; Target 84788; HLA-A*31:01; TDRD1; ENSG00000095627; TAA
VQNKIITVK

SEQ ID NO: 84789 - protein, 9 aa, Homo sapiens
  misc_feature: Table A; Target 84789; HLA-B*27:05; TDRD1; ENSG00000095627; TAA
VQNKIITVK

SEQ ID NO: 84790 - protein, 9 aa, Homo sapiens
  misc_feature: Table A; Target 84790; HLA-A*24:02; TDRD1; ENSG00000095627; TAA
VQPITSSHL

SEQ ID NO: 84791 - protein, 9 aa, Homo sapiens
  misc_feature: Table A; Target 84791; HLA-B*15:01; TDRD1; ENSG00000095627; TAA
VQPITSSHL

SEQ ID NO: 84792 - protein, 9 aa, Homo sapiens
  misc_feature: Table A; Target 84792; HLA-B*15:03; TDRD1; ENSG00000095627; TAA
VQPITSSHL

SEQ ID NO: 84793 - protein, 9 aa, Homo sapiens
  misc_feature: Table A; Target 84793; HLA-C*01:02; TDRD1; ENSG00000095627; TAA
VQPITSSHL

SEQ ID NO: 84794 - protein, 8 aa, Homo sapiens
  misc_feature: Table A; Target 84794; HLA-A*24:02; TDRD1; ENSG00000095627; TAA
VQPNFHKL

SEQ ID NO: 84795 - protein, 9 aa, Homo sapiens
  misc_feature: Table A; Target 84795; HLA-B*08:01; TDRD1; ENSG00000095627; TAA
VQQKKAHVL

SEQ ID NO: 84796 - protein, 8 aa, Homo sapiens
  misc_feature: Table A; Target 84796; HLA-C*05:01; TDRD1; ENSG00000095627; TAA
VTDKPSDV

SEQ ID NO: 84797 - protein, 9 aa, Homo sapiens
  misc_feature: Table A; Target 84797; HLA-A*01:01; TDRD1; ENSG00000095627; TAA
VTDKPSDVK

SEQ ID NO: 84798 - protein, 9 aa, Homo sapiens
  misc_feature: Table A; Target 84798; HLA-A*03:01; TDRD1; ENSG00000095627; TAA
VTDKPSDVK

SEQ ID NO: 84799 - protein, 9 aa, Homo sapiens
  misc_feature: Table A; Target 84799; HLA-A*03:02; TDRD1; ENSG00000095627; TAA
VTDKPSDVK

SEQ ID NO: 84800 - protein, 9 aa, Homo sapiens
  misc_feature: Table A; Target 84800; HLA-A*11:01; TDRD1; ENSG00000095627; TAA
VTDKPSDVK

SEQ ID NO: 84801 - protein, 9 aa, Homo sapiens
  misc_feature: Table A; Target 84801; HLA-C*05:01; TDRD1; ENSG00000095627; TAA
VTDKPSDVK

SEQ ID NO: 84802 - protein, 11 aa, Homo sapiens
  misc_feature: Table A; Target 84802; HLA-A*01:01; TDRD1; ENSG00000095627; TAA
VTEFKHPGDFY

SEQ ID NO: 84803 - protein, 10 aa, Homo sapiens
  misc_feature: Table A; Target 84803; HLA-A*01:01; TDRD1; ENSG00000095627; TAA
VTENGIGVEL

SEQ ID NO: 84804 - protein, 10 aa, Homo sapiens
  misc_feature: Table A; Target 84804; HLA-C*05:01; TDRD1; ENSG00000095627; TAA
VTENGIGVEL

SEQ ID NO: 84805 - protein, 9 aa, Homo sapiens
  misc_feature: Table A; Target 84805; HLA-A*02:01; TDRD1; ENSG00000095627; TAA
VTFAVEVEL

SEQ ID NO: 84806 - protein, 9 aa, Homo sapiens
  misc_feature: Table A; Target 84806; HLA-A*23:01; TDRD1; ENSG00000095627; TAA
VTFAVEVEL

SEQ ID NO: 84807 - protein, 9 aa, Homo sapiens
  misc_feature: Table A; Target 84807; HLA-A*68:02; TDRD1; ENSG00000095627; TAA
VTFAVEVEL

SEQ ID NO: 84808 - protein, 9 aa, Homo sapiens
  misc_feature: Table A; Target 84808; HLA-B*35:03; TDRD1; ENSG00000095627; TAA
VTFAVEVEL

SEQ ID NO: 84809 - protein, 9 aa, Homo sapiens
  misc_feature: Table A; Target 84809; HLA-B*40:01; TDRD1; ENSG00000095627; TAA
VTFAVEVEL

SEQ ID NO: 84810 - protein, 9 aa, Homo sapiens
  misc_feature: Table A; Target 84810; HLA-B*58:01; TDRD1; ENSG00000095627; TAA
VTFAVEVEL

SEQ ID NO: 84811 - protein, 9 aa, Homo sapiens
  misc_feature: Table A; Target 84811; HLA-C*02:02; TDRD1; ENSG00000095627; TAA
VTFAVEVEL

SEQ ID NO: 84812 - protein, 9 aa, Homo sapiens
  misc_feature: Table A; Target 84812; HLA-C*03:03; TDRD1; ENSG00000095627; TAA
VTFAVEVEL

SEQ ID NO: 84813 - protein, 9 aa, Homo sapiens
  misc_feature: Table A; Target 84813; HLA-C*03:04; TDRD1; ENSG00000095627; TAA
VTFAVEVEL

SEQ ID NO: 84814 - protein, 9 aa, Homo sapiens
  misc_feature: Table A; Target 84814; HLA-C*07:06; TDRD1; ENSG00000095627; TAA
VTFAVEVEL

SEQ ID NO: 84815 - protein, 9 aa, Homo sapiens
  misc_feature: Table A; Target 84815; HLA-C*16:04; TDRD1; ENSG00000095627; TAA
VTFAVEVEL

SEQ ID NO: 84816 - protein, 9 aa, Homo sapiens
  misc_feature: Table A; Target 84816; HLA-C*06:02; TDRD1; ENSG00000095627; TAA
VTFGLAKNI

SEQ ID NO: 84817 - protein, 9 aa, Homo sapiens
  misc_feature: Table A; Target 84817; HLA-C*16:02; TDRD1; ENSG00000095627; TAA
VTFGLAKNI

SEQ ID NO: 84818 - protein, 8 aa, Homo sapiens
  misc_feature: Table A; Target 84818; HLA-B*57:01; TDRD1; ENSG00000095627; TAA
VTKEIAIW

SEQ ID NO: 84819 - protein, 10 aa, Homo sapiens
  misc_feature: Table A; Target 84819; HLA-A*02:07; TDRD1; ENSG00000095627; TAA
VVDKLENSSL

SEQ ID NO: 84820 - protein, 10 aa, Homo sapiens
  misc_feature: Table A; Target 84820; HLA-C*05:01; TDRD1; ENSG00000095627; TAA
VVDKLENSSL

SEQ ID NO: 84821 - protein, 8 aa, Homo sapiens
  misc_feature: Table A; Target 84821; HLA-C*05:01; TDRD1; ENSG00000095627; TAA
VVDKSDLI

SEQ ID NO: 84822 - protein, 10 aa, Homo sapiens
  misc_feature: Table A; Target 84822; HLA-A*03:01; TDRD1; ENSG00000095627; TAA
VVDKSDLIPK

SEQ ID NO: 84823 - protein, 10 aa, Homo sapiens
  misc_feature: Table A; Target 84823; HLA-A*03:02; TDRD1; ENSG00000095627; TAA
VVDKSDLIPK

SEQ ID NO: 84824 - protein, 10 aa, Homo sapiens
  misc_feature: Table A; Target 84824; HLA-A*11:01; TDRD1; ENSG00000095627; TAA
VVDKSDLIPK

SEQ ID NO: 84825 - protein, 10 aa, Homo sapiens
  misc_feature: Table A; Target 84825; HLA-B*27:02; TDRD1; ENSG00000095627; TAA
VVDKSDLIPK

SEQ ID NO: 84826 - protein, 11 aa, Homo sapiens
  misc_feature: Table A; Target 84826; HLA-A*02:07; TDRD1; ENSG00000095627; TAA
VVDKSDLIPKV

SEQ ID NO: 84827 - protein, 9 aa, Homo sapiens
  misc_feature: Table A; Target 84827; HLA-C*05:01; TDRD1; ENSG00000095627; TAA
VVEVTENGI

SEQ ID NO: 84828 - protein, 9 aa, Homo sapiens
  misc_feature: Table A; Target 84828; HLA-C*05:01; TDRD1; ENSG00000095627; TAA
WSEEAITRF

SEQ ID NO: 84829 - protein, 9 aa, Homo sapiens
  misc_feature: Table A; Target 84829; HLA-A*29:02; TDRD1; ENSG00000095627; TAA
WYRASVLAY

SEQ ID NO: 84830 - protein, 10 aa, Homo sapiens
  misc_feature: Table A; Target 84830; HLA-B*35:03; TDRD1; ENSG00000095627; TAA
YADYGNIETL

SEQ ID NO: 84831 - protein, 10 aa, Homo sapiens
  misc_feature: Table A; Target 84831; HLA-B*38:01; TDRD1; ENSG00000095627; TAA
YADYGNIETL

SEQ ID NO: 84832 - protein, 10 aa, Homo sapiens
  misc_feature: Table A; Target 84832; HLA-B*39:01; TDRD1; ENSG00000095627; TAA
YADYGNIETL

SEQ ID NO: 84833 - protein, 10 aa, Homo sapiens
  misc_feature: Table A; Target 84833; HLA-B*40:01; TDRD1; ENSG00000095627; TAA
YADYGNIETL

SEQ ID NO: 84834 - protein, 10 aa, Homo sapiens
  misc_feature: Table A; Target 84834; HLA-C*02:02; TDRD1; ENSG00000095627; TAA
YADYGNIETL

SEQ ID NO: 84835 - protein, 10 aa, Homo sapiens
  misc_feature: Table A; Target 84835; HLA-C*03:03; TDRD1; ENSG00000095627; TAA
YADYGNIETL

SEQ ID NO: 84836 - protein, 10 aa, Homo sapiens
  misc_feature: Table A; Target 84836; HLA-C*03:04; TDRD1; ENSG00000095627; TAA
YADYGNIETL

SEQ ID NO: 84837 - protein, 10 aa, Homo sapiens
  misc_feature: Table A; Target 84837; HLA-C*05:01; TDRD1; ENSG00000095627; TAA
YADYGNIETL

SEQ ID NO: 84838 - protein, 9 aa, Homo sapiens
  misc_feature: Table A; Target 84838; HLA-C*16:01; TDRD1; ENSG00000095627; TAA
YANVHEKDY

SEQ ID NO: 84839 - protein, 9 aa, Homo sapiens
  misc_feature: Table A; Target 84839; HLA-C*16:02; TDRD1; ENSG00000095627; TAA
YANVHEKDY

SEQ ID NO: 84840 - protein, 8 aa, Homo sapiens
  misc_feature: Table A; Target 84840; HLA-B*35:03; TDRD1; ENSG00000095627; TAA
YASEESVL

SEQ ID NO: 84841 - protein, 8 aa, Homo sapiens
  misc_feature: Table A; Target 84841; HLA-B*39:01; TDRD1; ENSG00000095627; TAA
YASEESVL

SEQ ID NO: 84842 - protein, 8 aa, Homo sapiens
  misc_feature: Table A; Target 84842; HLA-C*03:03; TDRD1; ENSG00000095627; TAA
YASEESVL

SEQ ID NO: 84843 - protein, 8 aa, Homo sapiens
  misc_feature: Table A; Target 84843; HLA-C*03:04; TDRD1; ENSG00000095627; TAA
YASEESVL

SEQ ID NO: 84844 - protein, 8 aa, Homo sapiens
  misc_feature: Table A; Target 84844; HLA-C*05:01; TDRD1; ENSG00000095627; TAA
YASEESVL

SEQ ID NO: 84845 - protein, 9 aa, Homo sapiens
  misc_feature: Table A; Target 84845; HLA-B*13:02; TDRD1; ENSG00000095627; TAA
YASEESVLV

SEQ ID NO: 84846 - protein, 9 aa, Homo sapiens
  misc_feature: Table A; Target 84846; HLA-B*39:01; TDRD1; ENSG00000095627; TAA
YASEESVLV

SEQ ID NO: 84847 - protein, 9 aa, Homo sapiens
  misc_feature: Table A; Target 84847; HLA-B*51:01; TDRD1; ENSG00000095627; TAA
YASEESVLV

SEQ ID NO: 84848 - protein, 9 aa, Homo sapiens
  misc_feature: Table A; Target 84848; HLA-C*02:02; TDRD1; ENSG00000095627; TAA
YASEESVLV

SEQ ID NO: 84849 - protein, 9 aa, Homo sapiens
  misc_feature: Table A; Target 84849; HLA-C*03:04; TDRD1; ENSG00000095627; TAA
YASEESVLV

SEQ ID NO: 84850 - protein, 9 aa, Homo sapiens
  misc_feature: Table A; Target 84850; HLA-C*05:01; TDRD1; ENSG00000095627; TAA
YASEESVLV

SEQ ID NO: 84851 - protein, 9 aa, Homo sapiens
  misc_feature: Table A; Target 84851; HLA-C*12:03; TDRD1; ENSG00000095627; TAA
YASEESVLV

SEQ ID NO: 84852 - protein, 11 aa, Homo sapiens
  misc_feature: Table A; Target 84852; HLA-A*01:01; TDRD1; ENSG00000095627; TAA
YASEESVLVGY

SEQ ID NO: 84853 - protein, 11 aa, Homo sapiens
  misc_feature: Table A; Target 84853; HLA-A*25:01; TDRD1; ENSG00000095627; TAA
YASEESVLVGY

SEQ ID NO: 84854 - protein, 11 aa, Homo sapiens
  misc_feature: Table A; Target 84854; HLA-A*26:01; TDRD1; ENSG00000095627; TAA
YASEESVLVGY

SEQ ID NO: 84855 - protein, 11 aa, Homo sapiens
  misc_feature: Table A; Target 84855; HLA-A*29:02; TDRD1; ENSG00000095627; TAA
YASEESVLVGY

SEQ ID NO: 84856 - protein, 11 aa, Homo sapiens
  misc_feature: Table A; Target 84856; HLA-A*30:02; TDRD1; ENSG00000095627; TAA
YASEESVLVGY

SEQ ID NO: 84857 - protein, 11 aa, Homo sapiens
  misc_feature: Table A; Target 84857; HLA-A*68:01; TDRD1; ENSG00000095627; TAA
YASEESVLVGY

SEQ ID NO: 84858 - protein, 11 aa, Homo sapiens
  misc_feature: Table A; Target 84858; HLA-B*35:01; TDRD1; ENSG00000095627; TAA
YASEESVLVGY

SEQ ID NO: 84859 - protein, 11 aa, Homo sapiens
  misc_feature: Table A; Target 84859; HLA-B*55:01; TDRD1; ENSG00000095627; TAA
YASEESVLVGY

SEQ ID NO: 84860 - protein, 11 aa, Homo sapiens
  misc_feature: Table A; Target 84860; HLA-C*02:02; TDRD1; ENSG00000095627; TAA
YASEESVLVGY

SEQ ID NO: 84861 - protein, 11 aa, Homo sapiens
  misc_feature: Table A; Target 84861; HLA-C*03:03; TDRD1; ENSG00000095627; TAA
YASEESVLVGY

SEQ ID NO: 84862 - protein, 11 aa, Homo sapiens
  misc_feature: Table A; Target 84862; HLA-C*07:06; TDRD1; ENSG00000095627; TAA
YASEESVLVGY

SEQ ID NO: 84863 - protein, 11 aa, Homo sapiens
  misc_feature: Table A; Target 84863; HLA-C*16:02; TDRD1; ENSG00000095627; TAA
YASEESVLVGY

SEQ ID NO: 84864 - protein, 11 aa, Homo sapiens
  misc_feature: Table A; Target 84864; HLA-C*16:04; TDRD1; ENSG00000095627; TAA
YASEESVLVGY

SEQ ID NO: 84865 - protein, 9 aa, Homo sapiens
  misc_feature: Table A; Target 84865; HLA-A*02:04; TDRD1; ENSG00000095627; TAA
YGNFEILSL

SEQ ID NO: 84866 - protein, 9 aa, Homo sapiens
  misc_feature: Table A; Target 84866; HLA-B*35:03; TDRD1; ENSG00000095627; TAA
YGNFEILSL

SEQ ID NO: 84867 - protein, 9 aa, Homo sapiens
  misc_feature: Table A; Target 84867; HLA-C*03:04; TDRD1; ENSG00000095627; TAA
YGNFEILSL

SEQ ID NO: 84868 - protein, 9 aa, Homo sapiens
  misc_feature: Table A; Target 84868; HLA-A*01:01; TDRD1; ENSG00000095627; TAA
YIDYGNEEI

SEQ ID NO: 84869 - protein, 9 aa, Homo sapiens
  misc_feature: Table A; Target 84869; HLA-A*02:07; TDRD1; ENSG00000095627; TAA
YIDYGNEEI

SEQ ID NO: 84870 - protein, 9 aa, Homo sapiens
  misc_feature: Table A; Target 84870; HLA-B*38:01; TDRD1; ENSG00000095627; TAA
YIDYGNEEI

SEQ ID NO: 84871 - protein, 9 aa, Homo sapiens
  misc_feature: Table A; Target 84871; HLA-C*05:01; TDRD1; ENSG00000095627; TAA
YIDYGNEEI

SEQ ID NO: 84872 - protein, 10 aa, Homo sapiens
  misc_feature: Table A; Target 84872; HLA-A*02:01; TDRD1; ENSG00000095627; TAA
YLASQEDNSV

SEQ ID NO: 84873 - protein, 10 aa, Homo sapiens
  misc_feature: Table A; Target 84873; HLA-A*02:03; TDRD1; ENSG00000095627; TAA
YLASQEDNSV

SEQ ID NO: 84874 - protein, 10 aa, Homo sapiens
  misc_feature: Table A; Target 84874; HLA-B*13:02; TDRD1; ENSG00000095627; TAA
YLASQEDNSV

SEQ ID NO: 84875 - protein, 10 aa, Homo sapiens
  misc_feature: Table A; Target 84875; HLA-B*39:01; TDRD1; ENSG00000095627; TAA
YLASQEDNSV

SEQ ID NO: 84876 - protein, 10 aa, Homo sapiens
  misc_feature: Table A; Target 84876; HLA-B*55:01; TDRD1; ENSG00000095627; TAA
YLASQEDNSV

SEQ ID NO: 84877 - protein, 9 aa, Homo sapiens
  misc_feature: Table A; Target 84877; HLA-A*02:01; TDRD1; ENSG00000095627; TAA
YMNQLSASL

SEQ ID NO: 84878 - protein, 9 aa, Homo sapiens
  misc_feature: Table A; Target 84878; HLA-A*02:03; TDRD1; ENSG00000095627; TAA
YMNQLSASL

SEQ ID NO: 84879 - protein, 9 aa, Homo sapiens
  misc_feature: Table A; Target 84879; HLA-A*02:04; TDRD1; ENSG00000095627; TAA
YMNQLSASL

SEQ ID NO: 84880 - protein, 9 aa, Homo sapiens
  misc_feature: Table A; Target 84880; HLA-A*02:07; TDRD1; ENSG00000095627; TAA
YMNQLSASL

SEQ ID NO: 84881 - protein, 9 aa, Homo sapiens
  misc_feature: Table A; Target 84881; HLA-A*23:01; TDRD1; ENSG00000095627; TAA
YMNQLSASL

SEQ ID NO: 84882 - protein, 9 aa, Homo sapiens
  misc_feature: Table A; Target 84882; HLA-A*24:02; TDRD1; ENSG00000095627; TAA
YMNQLSASL

SEQ ID NO: 84883 - protein, 9 aa, Homo sapiens
  misc_feature: Table A; Target 84883; HLA-A*32:01; TDRD1; ENSG00000095627; TAA
YMNQLSASL

SEQ ID NO: 84884 - protein, 9 aa, Homo sapiens
  misc_feature: Table A; Target 84884; HLA-B*08:01; TDRD1; ENSG00000095627; TAA
YMNQLSASL

SEQ ID NO: 84885 - protein, 9 aa, Homo sapiens
  misc_feature: Table A; Target 84885; HLA-B*15:01; TDRD1; ENSG00000095627; TAA
YMNQLSASL

SEQ ID NO: 84886 - protein, 9 aa, Homo sapiens
  misc_feature: Table A; Target 84886; HLA-B*15:03; TDRD1; ENSG00000095627; TAA
YMNQLSASL

SEQ ID NO: 84887 - protein, 9 aa, Homo sapiens
  misc_feature: Table A; Target 84887; HLA-B*37:01; TDRD1; ENSG00000095627; TAA
YMNQLSASL

SEQ ID NO: 84888 - protein, 9 aa, Homo sapiens
  misc_feature: Table A; Target 84888; HLA-B*39:01; TDRD1; ENSG00000095627; TAA
YMNQLSASL

SEQ ID NO: 84889 - protein, 9 aa, Homo sapiens
  misc_feature: Table A; Target 84889; HLA-B*46:01; TDRD1; ENSG00000095627; TAA
YMNQLSASL

SEQ ID NO: 84890 - protein, 9 aa, Homo sapiens
  misc_feature: Table A; Target 84890; HLA-C*01:02; TDRD1; ENSG00000095627; TAA
YMNQLSASL

SEQ ID NO: 84891 - protein, 9 aa, Homo sapiens
  misc_feature: Table A; Target 84891; HLA-C*03:03; TDRD1; ENSG00000095627; TAA
YMNQLSASL

SEQ ID NO: 84892 - protein, 9 aa, Homo sapiens
  misc_feature: Table A; Target 84892; HLA-C*07:02; TDRD1; ENSG00000095627; TAA
YMNQLSASL

SEQ ID NO: 84893 - protein, 9 aa, Homo sapiens
  misc_feature: Table A; Target 84893; HLA-C*07:04; TDRD1; ENSG00000095627; TAA
YMNQLSASL

SEQ ID NO: 84894 - protein, 9 aa, Homo sapiens
  misc_feature: Table A; Target 84894; HLA-C*14:02; TDRD1; ENSG00000095627; TAA
YMNQLSASL

SEQ ID NO: 84895 - protein, 10 aa, Homo sapiens
  misc_feature: Table A; Target 84895; HLA-A*01:01; TDRD1; ENSG00000095627; TAA
YMNQLSASLK

SEQ ID NO: 84896 - protein, 9 aa, Homo sapiens
  misc_feature: Table A; Target 84896; HLA-B*35:03; TDRD1; ENSG00000095627; TAA
YPAIGDICC

SEQ ID NO: 84897 - protein, 9 aa, Homo sapiens
  misc_feature: Table A; Target 84897; HLA-B*54:01; TDRD1; ENSG00000095627; TAA
YPAIGDICC

SEQ ID NO: 84898 - protein, 10 aa, Homo sapiens
  misc_feature: Table A; Target 84898; HLA-B*54:01; TDRD1; ENSG00000095627; TAA
YPAIGDICCA

SEQ ID NO: 84899 - protein, 10 aa, Homo sapiens
  misc_feature: Table A; Target 84899; HLA-B*56:01; TDRD1; ENSG00000095627; TAA
YPAIGDICCA

SEQ ID NO: 84900 - protein, 8 aa, Homo sapiens
  misc_feature: Table A; Target 84900; HLA-B*51:01; TDRD1; ENSG00000095627; TAA
YPRIISDV

SEQ ID NO: 84901 - protein, 8 aa, Homo sapiens
  misc_feature: Table A; Target 84901; HLA-B*54:01; TDRD1; ENSG00000095627; TAA
YPRIISDV

SEQ ID NO: 84902 - protein, 9 aa, Homo sapiens
  misc_feature: Table A; Target 84902; HLA-B*07:02; TDRD1; ENSG00000095627; TAA
YPRIISDVL

SEQ ID NO: 84903 - protein, 9 aa, Homo sapiens
  misc_feature: Table A; Target 84903; HLA-B*35:01; TDRD1; ENSG00000095627; TAA
YPRIISDVL

SEQ ID NO: 84904 - protein, 9 aa, Homo sapiens
  misc_feature: Table A; Target 84904; HLA-B*35:03; TDRD1; ENSG00000095627; TAA
YPRIISDVL

SEQ ID NO: 84905 - protein, 9 aa, Homo sapiens
  misc_feature: Table A; Target 84905; HLA-B*51:01; TDRD1; ENSG00000095627; TAA
YPRIISDVL

SEQ ID NO: 84906 - protein, 9 aa, Homo sapiens
  misc_feature: Table A; Target 84906; HLA-C*07:02; TDRD1; ENSG00000095627; TAA
YPRIISDVL

SEQ ID NO: 84907 - protein, 8 aa, Homo sapiens
  misc_feature: Table A; Target 84907; HLA-A*01:01; TDRD1; ENSG00000095627; TAA
YSSEVLEY

SEQ ID NO: 84908 - protein, 8 aa, Homo sapiens
  misc_feature: Table A; Target 84908; HLA-A*26:01; TDRD1; ENSG00000095627; TAA
YSSEVLEY

SEQ ID NO: 84909 - protein, 8 aa, Homo sapiens
  misc_feature: Table A; Target 84909; HLA-A*29:02; TDRD1; ENSG00000095627; TAA
YSSEVLEY

SEQ ID NO: 84910 - protein, 8 aa, Homo sapiens
  misc_feature: Table A; Target 84910; HLA-A*30:02; TDRD1; ENSG00000095627; TAA
YSSEVLEY

SEQ ID NO: 84911 - protein, 8 aa, Homo sapiens
  misc_feature: Table A; Target 84911; HLA-B*15:01; TDRD1; ENSG00000095627; TAA
YSSEVLEY

SEQ ID NO: 84912 - protein, 8 aa, Homo sapiens
  misc_feature: Table A; Target 84912; HLA-B*15:03; TDRD1; ENSG00000095627; TAA
YSSEVLEY

SEQ ID NO: 84913 - protein, 8 aa, Homo sapiens
  misc_feature: Table A; Target 84913; HLA-B*18:01; TDRD1; ENSG00000095627; TAA
YSSEVLEY

SEQ ID NO: 84914 - protein, 8 aa, Homo sapiens
  misc_feature: Table A; Target 84914; HLA-B*35:01; TDRD1; ENSG00000095627; TAA
YSSEVLEY

SEQ ID NO: 84915 - protein, 8 aa, Homo sapiens
  misc_feature: Table A; Target 84915; HLA-B*39:01; TDRD1; ENSG00000095627; TAA
YSSEVLEY

SEQ ID NO: 84916 - protein, 8 aa, Homo sapiens
  misc_feature: Table A; Target 84916; HLA-B*46:01; TDRD1; ENSG00000095627; TAA
YSSEVLEY

SEQ ID NO: 84917 - protein, 8 aa, Homo sapiens
  misc_feature: Table A; Target 84917; HLA-B*58:01; TDRD1; ENSG00000095627; TAA
YSSEVLEY

SEQ ID NO: 84918 - protein, 8 aa, Homo sapiens
  misc_feature: Table A; Target 84918; HLA-C*02:02; TDRD1; ENSG00000095627; TAA
YSSEVLEY

SEQ ID NO: 84919 - protein, 8 aa, Homo sapiens
  misc_feature: Table A; Target 84919; HLA-C*03:03; TDRD1; ENSG00000095627; TAA
YSSEVLEY

SEQ ID NO: 84920 - protein, 8 aa, Homo sapiens
  misc_feature: Table A; Target 84920; HLA-C*03:04; TDRD1; ENSG00000095627; TAA
YSSEVLEY

SEQ ID NO: 84921 - protein, 8 aa, Homo sapiens
  misc_feature: Table A; Target 84921; HLA-C*05:01; TDRD1; ENSG00000095627; TAA
YSSEVLEY

SEQ ID NO: 84922 - protein, 8 aa, Homo sapiens
  misc_feature: Table A; Target 84922; HLA-C*07:04; TDRD1; ENSG00000095627; TAA
YSSEVLEY

SEQ ID NO: 84923 - protein, 8 aa, Homo sapiens
  misc_feature: Table A; Target 84923; HLA-C*07:06; TDRD1; ENSG00000095627; TAA
YSSEVLEY

SEQ ID NO: 84924 - protein, 8 aa, Homo sapiens
  misc_feature: Table A; Target 84924; HLA-C*12:03; TDRD1; ENSG00000095627; TAA
YSSEVLEY

SEQ ID NO: 84925 - protein, 8 aa, Homo sapiens
  misc_feature: Table A; Target 84925; HLA-C*14:02; TDRD1; ENSG00000095627; TAA
YSSEVLEY

SEQ ID NO: 84926 - protein, 8 aa, Homo sapiens
  misc_feature: Table A; Target 84926; HLA-C*16:01; TDRD1; ENSG00000095627; TAA
YSSEVLEY

SEQ ID NO: 84927 - protein, 8 aa, Homo sapiens
  misc_feature: Table A; Target 84927; HLA-C*16:02; TDRD1; ENSG00000095627; TAA
YSSEVLEY

SEQ ID NO: 84928 - protein, 8 aa, Homo sapiens
  misc_feature: Table A; Target 84928; HLA-C*16:04; TDRD1; ENSG00000095627; TAA
YSSEVLEY

SEQ ID NO: 84929 - protein, 9 aa, Homo sapiens
  misc_feature: Table A; Target 84929; HLA-A*01:01; TDRD1; ENSG00000095627; TAA
YSSEVLEYM

SEQ ID NO: 84930 - protein, 9 aa, Homo sapiens
  misc_feature: Table A; Target 84930; HLA-A*02:01; TDRD1; ENSG00000095627; TAA
YSSEVLEYM

SEQ ID NO: 84931 - protein, 9 aa, Homo sapiens
  misc_feature: Table A; Target 84931; HLA-A*02:07; TDRD1; ENSG00000095627; TAA
YSSEVLEYM

SEQ ID NO: 84932 - protein, 9 aa, Homo sapiens
  misc_feature: Table A; Target 84932; HLA-A*26:01; TDRD1; ENSG00000095627; TAA
YSSEVLEYM

SEQ ID NO: 84933 - protein, 9 aa, Homo sapiens
  misc_feature: Table A; Target 84933; HLA-A*68:02; TDRD1; ENSG00000095627; TAA
YSSEVLEYM

SEQ ID NO: 84934 - protein, 9 aa, Homo sapiens
  misc_feature: Table A; Target 84934; HLA-B*35:01; TDRD1; ENSG00000095627; TAA
YSSEVLEYM

SEQ ID NO: 84935 - protein, 9 aa, Homo sapiens
  misc_feature: Table A; Target 84935; HLA-B*46:01; TDRD1; ENSG00000095627; TAA
YSSEVLEYM

SEQ ID NO: 84936 - protein, 9 aa, Homo sapiens
  misc_feature: Table A; Target 84936; HLA-C*02:02; TDRD1; ENSG00000095627; TAA
YSSEVLEYM

SEQ ID NO: 84937 - protein, 9 aa, Homo sapiens
  misc_feature: Table A; Target 84937; HLA-C*03:04; TDRD1; ENSG00000095627; TAA
YSSEVLEYM

SEQ ID NO: 84938 - protein, 9 aa, Homo sapiens
  misc_feature: Table A; Target 84938; HLA-C*05:01; TDRD1; ENSG00000095627; TAA
YSSEVLEYM

SEQ ID NO: 84939 - protein, 9 aa, Homo sapiens
  misc_feature: Table A; Target 84939; HLA-A*68:01; TDRD1; ENSG00000095627; TAA
YTSDDFWYR

SEQ ID NO: 84940 - protein, 9 aa, Homo sapiens
  misc_feature: Table A; Target 84940; HLA-A*68:02; TDRD1; ENSG00000095627; TAA
YTSDDFWYR

SEQ ID NO: 84941 - protein, 9 aa, Homo sapiens
  misc_feature: Table A; Target 84941; HLA-A*11:01; TDRD1; ENSG00000095627; TAA
YTVDQTWNR

SEQ ID NO: 84942 - protein, 9 aa, Homo sapiens
  misc_feature: Table A; Target 84942; HLA-A*31:01; TDRD1; ENSG00000095627; TAA
YTVDQTWNR

SEQ ID NO: 84943 - protein, 9 aa, Homo sapiens
  misc_feature: Table A; Target 84943; HLA-A*33:01; TDRD1; ENSG00000095627; TAA
YTVDQTWNR

SEQ ID NO: 84944 - protein, 9 aa, Homo sapiens
  misc_feature: Table A; Target 84944; HLA-A*33:03; TDRD1; ENSG00000095627; TAA
YTVDQTWNR

SEQ ID NO: 84945 - protein, 9 aa, Homo sapiens
  misc_feature: Table A; Target 84945; HLA-A*68:01; TDRD1; ENSG00000095627; TAA
YTVDQTWNR

SEQ ID NO: 84946 - protein, 9 aa, Homo sapiens
  misc_feature: Table A; Target 84946; HLA-A*68:02; TDRD1; ENSG00000095627; TAA
YTVDQTWNR

SEQ ID NO: 84947 - protein, 9 aa, Homo sapiens
  misc_feature: Table A; Target 84947; HLA-B*27:02; TDRD1; ENSG00000095627; TAA
YTVDQTWNR

SEQ ID NO: 84948 - protein, 9 aa, Homo sapiens
  misc_feature: Table A; Target 84948; HLA-C*07:06; TDRD1; ENSG00000095627; TAA
YTVDQTWNR

SEQ ID NO: 84949 - protein, 9 aa, Homo sapiens
  misc_feature: Table A; Target 84949; HLA-A*01:01; TDRD1; ENSG00000095627; TAA
YVDYGNFEI

SEQ ID NO: 84950 - protein, 9 aa, Homo sapiens
  misc_feature: Table A; Target 84950; HLA-A*02:01; TDRD1; ENSG00000095627; TAA
YVDYGNFEI

SEQ ID NO: 84951 - protein, 9 aa, Homo sapiens
  misc_feature: Table A; Target 84951; HLA-A*02:07; TDRD1; ENSG00000095627; TAA
YVDYGNFEI

SEQ ID NO: 84952 - protein, 9 aa, Homo sapiens
  misc_feature: Table A; Target 84952; HLA-C*05:01; TDRD1; ENSG00000095627; TAA
YVDYGNFEI

SEQ ID NO: 84953 - protein, 10 aa, Homo sapiens
  misc_feature: Table A; Target 84953; HLA-A*02:07; TDRD1; ENSG00000095627; TAA
YVDYGNFEIL

SEQ ID NO: 84954 - protein, 9 aa, Homo sapiens
  misc_feature: Table A; Target 84954; HLA-A*33:03; TDRD1; ENSG00000095627; TAA
YYCSTACQR

SEQ ID NO: 84955 - protein, 9 aa, Homo sapiens
  misc_feature: Table A; Target 84955; HLA-B*46:01; TDRD12; ENSG00000173809; TAA
AAIQYFQNL

SEQ ID NO: 84956 - protein, 9 aa, Homo sapiens
  misc_feature: Table A; Target 84956; HLA-B*58:01; TDRD12; ENSG00000173809; TAA
AAIQYFQNL

SEQ ID NO: 84957 - protein, 9 aa, Homo sapiens
  misc_feature: Table A; Target 84957; HLA-C*01:02; TDRD12; ENSG00000173809; TAA
AAIQYFQNL

SEQ ID NO: 84958 - protein, 9 aa, Homo sapiens
  misc_feature: Table A; Target 84958; HLA-C*02:02; TDRD12; ENSG00000173809; TAA
AAIQYFQNL

SEQ ID NO: 84959 - protein, 9 aa, Homo sapiens
  misc_feature: Table A; Target 84959; HLA-C*03:03; TDRD12; ENSG00000173809; TAA
AAIQYFQNL

SEQ ID NO: 84960 - protein, 9 aa, Homo sapiens
  misc_feature: Table A; Target 84960; HLA-C*03:04; TDRD12; ENSG00000173809; TAA
AAIQYFQNL

SEQ ID NO: 84961 - protein, 9 aa, Homo sapiens
  misc_feature: Table A; Target 84961; HLA-C*16:02; TDRD12; ENSG00000173809; TAA
AAIQYFQNL

SEQ ID NO: 84962 - protein, 9 aa, Homo sapiens
  misc_feature: Table A; Target 84962; HLA-C*16:04; TDRD12; ENSG00000173809; TAA
AAIQYFQNL

SEQ ID NO: 84963 - protein, 9 aa, Homo sapiens
  misc_feature: Table A; Target 84963; HLA-A*31:01; TDRD12; ENSG00000173809; TAA
ACQSLLFLR

SEQ ID NO: 84964 - protein, 9 aa, Homo sapiens
  misc_feature: Table A; Target 84964; HLA-A*31:01; TDRD12; ENSG00000173809; TAA
ACYKSLPSR

SEQ ID NO: 84965 - protein, 10 aa, Homo sapiens
  misc_feature: Table A; Target 84965; HLA-A*03:01; TDRD12; ENSG00000173809; TAA
ACYMSPTKNK

SEQ ID NO: 84966 - protein, 10 aa, Homo sapiens
  misc_feature: Table A; Target 84966; HLA-A*03:02; TDRD12; ENSG00000173809; TAA
ACYMSPTKNK

SEQ ID NO: 84967 - protein, 10 aa, Homo sapiens
  misc_feature: Table A; Target 84967; HLA-A*11:01; TDRD12; ENSG00000173809; TAA
ACYMSPTKNK

SEQ ID NO: 84968 - protein, 9 aa, Homo sapiens
  misc_feature: Table A; Target 84968; HLA-A*30:01; TDRD12; ENSG00000173809; TAA
ADAKVPAEL

SEQ ID NO: 84969 - protein, 9 aa, Homo sapiens
  misc_feature: Table A; Target 84969; HLA-B*37:01; TDRD12; ENSG00000173809; TAA
ADAKVPAEL

SEQ ID NO: 84970 - protein, 9 aa, Homo sapiens
  misc_feature: Table A; Target 84970; HLA-B*38:01; TDRD12; ENSG00000173809; TAA
ADAKVPAEL

SEQ ID NO: 84971 - protein, 9 aa, Homo sapiens
  misc_feature: Table A; Target 84971; HLA-B*39:01; TDRD12; ENSG00000173809; TAA
ADAKVPAEL

SEQ ID NO: 84972 - protein, 9 aa, Homo sapiens
  misc_feature: Table A; Target 84972; HLA-B*40:01; TDRD12; ENSG00000173809; TAA
ADAKVPAEL

SEQ ID NO: 84973 - protein, 9 aa, Homo sapiens
  misc_feature: Table A; Target 84973; HLA-B*40:02; TDRD12; ENSG00000173809; TAA
ADAKVPAEL

SEQ ID NO: 84974 - protein, 9 aa, Homo sapiens
  misc_feature: Table A; Target 84974; HLA-B*44:02; TDRD12; ENSG00000173809; TAA
ADAKVPAEL

SEQ ID NO: 84975 - protein, 9 aa, Homo sapiens
  misc_feature: Table A; Target 84975; HLA-B*44:03; TDRD12; ENSG00000173809; TAA
ADAKVPAEL

SEQ ID NO: 84976 - protein, 9 aa, Homo sapiens
  misc_feature: Table A; Target 84976; HLA-C*02:02; TDRD12; ENSG00000173809; TAA
ADAKVPAEL

SEQ ID NO: 84977 - protein, 9 aa, Homo sapiens
  misc_feature: Table A; Target 84977; HLA-C*16:02; TDRD12; ENSG00000173809; TAA
ADAKVPAEL

SEQ ID NO: 84978 - protein, 9 aa, Homo sapiens
  misc_feature: Table A; Target 84978; HLA-C*16:04; TDRD12; ENSG00000173809; TAA
ADAKVPAEL

SEQ ID NO: 84979 - protein, 10 aa, Homo sapiens
  misc_feature: Table A; Target 84979; HLA-A*30:02; TDRD12; ENSG00000173809; TAA
ADAKVPAELY

SEQ ID NO: 84980 - protein, 10 aa, Homo sapiens
  misc_feature: Table A; Target 84980; HLA-B*44:02; TDRD12; ENSG00000173809; TAA
ADAKVPAELY

SEQ ID NO: 84981 - protein, 10 aa, Homo sapiens
  misc_feature: Table A; Target 84981; HLA-B*44:03; TDRD12; ENSG00000173809; TAA
ADAKVPAELY

SEQ ID NO: 84982 - protein, 11 aa, Homo sapiens
  misc_feature: Table A; Target 84982; HLA-A*30:01; TDRD12; ENSG00000173809; TAA
ADPDVPEASAL

SEQ ID NO: 84983 - protein, 11 aa, Homo sapiens
  misc_feature: Table A; Target 84983; HLA-B*40:01; TDRD12; ENSG00000173809; TAA
ADPDVPEASAL

SEQ ID NO: 84984 - protein, 9 aa, Homo sapiens
  misc_feature: Table A; Target 84984; HLA-B*37:01; TDRD12; ENSG00000173809; TAA
ADQYLAECF

SEQ ID NO: 84985 - protein, 9 aa, Homo sapiens
  misc_feature: Table A; Target 84985; HLA-B*44:02; TDRD12; ENSG00000173809; TAA
ADQYLAECF

SEQ ID NO: 84986 - protein, 8 aa, Homo sapiens
  misc_feature: Table A; Target 84986; HLA-A*30:01; TDRD12; ENSG00000173809; TAA
AEILSMGM

SEQ ID NO: 84987 - protein, 8 aa, Homo sapiens
  misc_feature: Table A; Target 84987; HLA-B*18:01; TDRD12; ENSG00000173809; TAA
AEILSMGM

SEQ ID NO: 84988 - protein, 8 aa, Homo sapiens
  misc_feature: Table A; Target 84988; HLA-B*37:01; TDRD12; ENSG00000173809; TAA
AEILSMGM

SEQ ID NO: 84989 - protein, 8 aa, Homo sapiens
  misc_feature: Table A; Target 84989; HLA-B*40:01; TDRD12; ENSG00000173809; TAA
AEILSMGM

SEQ ID NO: 84990 - protein, 8 aa, Homo sapiens
  misc_feature: Table A; Target 84990; HLA-B*40:02; TDRD12; ENSG00000173809; TAA
AEILSMGM

SEQ ID NO: 84991 - protein, 8 aa, Homo sapiens
  misc_feature: Table A; Target 84991; HLA-B*44:02; TDRD12; ENSG00000173809; TAA
AEILSMGM

SEQ ID NO: 84992 - protein, 8 aa, Homo sapiens
  misc_feature: Table A; Target 84992; HLA-B*44:03; TDRD12; ENSG00000173809; TAA
AEILSMGM

SEQ ID NO: 84993 - protein, 8 aa, Homo sapiens
  misc_feature: Table A; Target 84993; HLA-B*49:01; TDRD12; ENSG00000173809; TAA
AEILSMGM

SEQ ID NO: 84994 - protein, 10 aa, Homo sapiens
  misc_feature: Table A; Target 84994; HLA-A*30:01; TDRD12; ENSG00000173809; TAA
AEILSMGMGI

SEQ ID NO: 84995 - protein, 10 aa, Homo sapiens
  misc_feature: Table A; Target 84995; HLA-B*27:02; TDRD12; ENSG00000173809; TAA
AEILSMGMGI

SEQ ID NO: 84996 - protein, 10 aa, Homo sapiens
  misc_feature: Table A; Target 84996; HLA-B*40:01; TDRD12; ENSG00000173809; TAA
AEILSMGMGI

SEQ ID NO: 84997 - protein, 10 aa, Homo sapiens
  misc_feature: Table A; Target 84997; HLA-B*40:02; TDRD12; ENSG00000173809; TAA
AEILSMGMGI

SEQ ID NO: 84998 - protein, 10 aa, Homo sapiens
  misc_feature: Table A; Target 84998; HLA-B*44:02; TDRD12; ENSG00000173809; TAA
AEILSMGMGI

SEQ ID NO: 84999 - protein, 10 aa, Homo sapiens
  misc_feature: Table A; Target 84999; HLA-B*44:03; TDRD12; ENSG00000173809; TAA
AEILSMGMGI

SEQ ID NO: 85000 - protein, 10 aa, Homo sapiens
  misc_feature: Table A; Target 85000; HLA-B*49:01; TDRD12; ENSG00000173809; TAA
AEILSMGMGI

SEQ ID NO: 85001 - protein, 10 aa, Homo sapiens
  misc_feature: Table A; Target 85001; HLA-C*16:04; TDRD12; ENSG00000173809; TAA
AEILSMGMGI

SEQ ID NO: 85002 - protein, 9 aa, Homo sapiens
  misc_feature: Table A; Target 85002; HLA-B*44:02; TDRD12; ENSG00000173809; TAA
AEKTLFHRV

SEQ ID NO: 85003 - protein, 9 aa, Homo sapiens
  misc_feature: Table A; Target 85003; HLA-B*49:01; TDRD12; ENSG00000173809; TAA
AEKTLFHRV

SEQ ID NO: 85004 - protein, 10 aa, Homo sapiens
  misc_feature: Table A; Target 85004; HLA-B*49:01; TDRD12; ENSG00000173809; TAA
AELYEFTAGV

SEQ ID NO: 85005 - protein, 11 aa, Homo sapiens
  misc_feature: Table A; Target 85005; HLA-B*40:01; TDRD12; ENSG00000173809; TAA
AELYEFTAGVL

SEQ ID NO: 85006 - protein, 8 aa, Homo sapiens
  misc_feature: Table A; Target 85006; HLA-B*37:01; TDRD12; ENSG00000173809; TAA
AETEIVCK

SEQ ID NO: 85007 - protein, 9 aa, Homo sapiens
  misc_feature: Table A; Target 85007; HLA-A*30:01; TDRD12; ENSG00000173809; TAA
AETEIVCKV

SEQ ID NO: 85008 - protein, 9 aa, Homo sapiens
  misc_feature: Table A; Target 85008; HLA-B*13:02; TDRD12; ENSG00000173809; TAA
AETEIVCKV

SEQ ID NO: 85009 - protein, 9 aa, Homo sapiens
  misc_feature: Table A; Target 85009; HLA-B*18:01; TDRD12; ENSG00000173809; TAA
AETEIVCKV

SEQ ID NO: 85010 - protein, 9 aa, Homo sapiens
  misc_feature: Table A; Target 85010; HLA-B*37:01; TDRD12; ENSG00000173809; TAA
AETEIVCKV

SEQ ID NO: 85011 - protein, 9 aa, Homo sapiens
  misc_feature: Table A; Target 85011; HLA-B*40:01; TDRD12; ENSG00000173809; TAA
AETEIVCKV

SEQ ID NO: 85012 - protein, 9 aa, Homo sapiens
  misc_feature: Table A; Target 85012; HLA-B*40:02; TDRD12; ENSG00000173809; TAA
AETEIVCKV

SEQ ID NO: 85013 - protein, 9 aa, Homo sapiens
  misc_feature: Table A; Target 85013; HLA-B*44:02; TDRD12; ENSG00000173809; TAA
AETEIVCKV

SEQ ID NO: 85014 - protein, 9 aa, Homo sapiens
  misc_feature: Table A; Target 85014; HLA-B*44:03; TDRD12; ENSG00000173809; TAA
AETEIVCKV

SEQ ID NO: 85015 - protein, 9 aa, Homo sapiens
  misc_feature: Table A; Target 85015; HLA-B*49:01; TDRD12; ENSG00000173809; TAA
AETEIVCKV

SEQ ID NO: 85016 - protein, 9 aa, Homo sapiens
  misc_feature: Table A; Target 85016; HLA-C*02:02; TDRD12; ENSG00000173809; TAA
AETEIVCKV

SEQ ID NO: 85017 - protein, 9 aa, Homo sapiens
  misc_feature: Table A; Target 85017; HLA-C*16:02; TDRD12; ENSG00000173809; TAA
AETEIVCKV

SEQ ID NO: 85018 - protein, 9 aa, Homo sapiens
  misc_feature: Table A; Target 85018; HLA-C*16:04; TDRD12; ENSG00000173809; TAA
AETEIVCKV

SEQ ID NO: 85019 - protein, 10 aa, Homo sapiens
  misc_feature: Table A; Target 85019; HLA-B*44:02; TDRD12; ENSG00000173809; TAA
AETEIVCKVV

SEQ ID NO: 85020 - protein, 10 aa, Homo sapiens
  misc_feature: Table A; Target 85020; HLA-B*44:03; TDRD12; ENSG00000173809; TAA
AETEIVCKVV

SEQ ID NO: 85021 - protein, 10 aa, Homo sapiens
  misc_feature: Table A; Target 85021; HLA-B*49:01; TDRD12; ENSG00000173809; TAA
AETEIVCKVV

SEQ ID NO: 85022 - protein, 8 aa, Homo sapiens
  misc_feature: Table A; Target 85022; HLA-A*11:01; TDRD12; ENSG00000173809; TAA
AILDNFKK

SEQ ID NO: 85023 - protein, 10 aa, Homo sapiens
  misc_feature: Table A; Target 85023; HLA-A*03:01; TDRD12; ENSG00000173809; TAA
AIQYFQNLLK

SEQ ID NO: 85024 - protein, 10 aa, Homo sapiens
  misc_feature: Table A; Target 85024; HLA-A*03:02; TDRD12; ENSG00000173809; TAA
AIQYFQNLLK

SEQ ID NO: 85025 - protein, 10 aa, Homo sapiens
  misc_feature: Table A; Target 85025; HLA-A*11:01; TDRD12; ENSG00000173809; TAA
AIQYFQNLLK

SEQ ID NO: 85026 - protein, 9 aa, Homo sapiens
  misc_feature: Table A; Target 85026; HLA-A*32:01; TDRD12; ENSG00000173809; TAA
AITDATCVI

SEQ ID NO: 85027 - protein, 9 aa, Homo sapiens
  misc_feature: Table A; Target 85027; HLA-B*13:02; TDRD12; ENSG00000173809; TAA
AITDATCVI

SEQ ID NO: 85028 - protein, 9 aa, Homo sapiens
  misc_feature: Table A; Target 85028; HLA-C*06:02; TDRD12; ENSG00000173809; TAA
AITDATCVI

SEQ ID NO: 85029 - protein, 10 aa, Homo sapiens
  misc_feature: Table A; Target 85029; HLA-B*56:01; TDRD12; ENSG00000173809; TAA
AIVKSITSSA

SEQ ID NO: 85030 - protein, 8 aa, Homo sapiens
  misc_feature: Table A; Target 85030; HLA-B*15:03; TDRD12; ENSG00000173809; TAA
AKRGITIY

SEQ ID NO: 85031 - protein, 8 aa, Homo sapiens
  misc_feature: Table A; Target 85031; HLA-B*15:03; TDRD12; ENSG00000173809; TAA
AKVPAELY

SEQ ID NO: 85032 - protein, 10 aa, Homo sapiens
  misc_feature: Table A; Target 85032; HLA-B*15:03; TDRD12; ENSG00000173809; TAA
AKVPAELYEF

SEQ ID NO: 85033 - protein, 9 aa, Homo sapiens
  misc_feature: Table A; Target 85033; HLA-A*01:01; TDRD12; ENSG00000173809; TAA
ALDDILVEF

SEQ ID NO: 85034 - protein, 9 aa, Homo sapiens
  misc_feature: Table A; Target 85034; HLA-A*02:01; TDRD12; ENSG00000173809; TAA
ALDDILVEF

SEQ ID NO: 85035 - protein, 9 aa, Homo sapiens
  misc_feature: Table A; Target 85035; HLA-A*02:04; TDRD12; ENSG00000173809; TAA
ALDDILVEF

SEQ ID NO: 85036 - protein, 9 aa, Homo sapiens
  misc_feature: Table A; Target 85036; HLA-A*02:07; TDRD12; ENSG00000173809; TAA
ALDDILVEF

SEQ ID NO: 85037 - protein, 9 aa, Homo sapiens
  misc_feature: Table A; Target 85037; HLA-A*23:01; TDRD12; ENSG00000173809; TAA
ALDDILVEF

SEQ ID NO: 85038 - protein, 9 aa, Homo sapiens
  misc_feature: Table A; Target 85038; HLA-A*24:02; TDRD12; ENSG00000173809; TAA
ALDDILVEF

SEQ ID NO: 85039 - protein, 9 aa, Homo sapiens
  misc_feature: Table A; Target 85039; HLA-A*29:02; TDRD12; ENSG00000173809; TAA
ALDDILVEF

SEQ ID NO: 85040 - protein, 9 aa, Homo sapiens
  misc_feature: Table A; Target 85040; HLA-A*32:01; TDRD12; ENSG00000173809; TAA
ALDDILVEF

SEQ ID NO: 85041 - protein, 9 aa, Homo sapiens
  misc_feature: Table A; Target 85041; HLA-B*15:01; TDRD12; ENSG00000173809; TAA
ALDDILVEF

SEQ ID NO: 85042 - protein, 9 aa, Homo sapiens
  misc_feature: Table A; Target 85042; HLA-B*35:01; TDRD12; ENSG00000173809; TAA
ALDDILVEF

SEQ ID NO: 85043 - protein, 9 aa, Homo sapiens
  misc_feature: Table A; Target 85043; HLA-B*35:03; TDRD12; ENSG00000173809; TAA
ALDDILVEF

SEQ ID NO: 85044 - protein, 9 aa, Homo sapiens
  misc_feature: Table A; Target 85044; HLA-B*37:01; TDRD12; ENSG00000173809; TAA
ALDDILVEF

SEQ ID NO: 85045 - protein, 9 aa, Homo sapiens
  misc_feature: Table A; Target 85045; HLA-B*38:01; TDRD12; ENSG00000173809; TAA
ALDDILVEF

SEQ ID NO: 85046 - protein, 9 aa, Homo sapiens
  misc_feature: Table A; Target 85046; HLA-B*46:01; TDRD12; ENSG00000173809; TAA
ALDDILVEF

SEQ ID NO: 85047 - protein, 9 aa, Homo sapiens
  misc_feature: Table A; Target 85047; HLA-B*55:01; TDRD12; ENSG00000173809; TAA
ALDDILVEF

SEQ ID NO: 85048 - protein, 9 aa, Homo sapiens
  misc_feature: Table A; Target 85048; HLA-B*58:01; TDRD12; ENSG00000173809; TAA
ALDDILVEF

SEQ ID NO: 85049 - protein, 9 aa, Homo sapiens
  misc_feature: Table A; Target 85049; HLA-C*02:02; TDRD12; ENSG00000173809; TAA
ALDDILVEF

SEQ ID NO: 85050 - protein, 9 aa, Homo sapiens
  misc_feature: Table A; Target 85050; HLA-C*04:01; TDRD12; ENSG00000173809; TAA
ALDDILVEF

SEQ ID NO: 85051 - protein, 9 aa, Homo sapiens
  misc_feature: Table A; Target 85051; HLA-C*05:01; TDRD12; ENSG00000173809; TAA
ALDDILVEF

SEQ ID NO: 85052 - protein, 9 aa, Homo sapiens
  misc_feature: Table A; Target 85052; HLA-C*07:04; TDRD12; ENSG00000173809; TAA
ALDDILVEF

SEQ ID NO: 85053 - protein, 10 aa, Homo sapiens
  misc_feature: Table A; Target 85053; HLA-A*02:01; TDRD12; ENSG00000173809; TAA
ALDDILVEFI

SEQ ID NO: 85054 - protein, 10 aa, Homo sapiens
  misc_feature: Table A; Target 85054; HLA-A*02:07; TDRD12; ENSG00000173809; TAA
ALDDILVEFI

SEQ ID NO: 85055 - protein, 9 aa, Homo sapiens
  misc_feature: Table A; Target 85055; HLA-A*01:01; TDRD12; ENSG00000173809; TAA
ALDFIPSQA

SEQ ID NO: 85056 - protein, 9 aa, Homo sapiens
  misc_feature: Table A; Target 85056; HLA-A*02:01; TDRD12; ENSG00000173809; TAA
ALDFIPSQA

SEQ ID NO: 85057 - protein, 9 aa, Homo sapiens
  misc_feature: Table A; Target 85057; HLA-A*02:03; TDRD12; ENSG00000173809; TAA
ALDFIPSQA

SEQ ID NO: 85058 - protein, 9 aa, Homo sapiens
  misc_feature: Table A; Target 85058; HLA-A*02:07; TDRD12; ENSG00000173809; TAA
ALDFIPSQA

SEQ ID NO: 85059 - protein, 9 aa, Homo sapiens
  misc_feature: Table A; Target 85059; HLA-B*55:01; TDRD12; ENSG00000173809; TAA
ALDFIPSQA

SEQ ID NO: 85060 - protein, 9 aa, Homo sapiens
  misc_feature: Table A; Target 85060; HLA-C*05:01; TDRD12; ENSG00000173809; TAA
ALDFIPSQA

SEQ ID NO: 85061 - protein, 11 aa, Homo sapiens
  misc_feature: Table A; Target 85061; HLA-A*03:01; TDRD12; ENSG00000173809; TAA
ALDFIPSQAQK

SEQ ID NO: 85062 - protein, 11 aa, Homo sapiens
  misc_feature: Table A; Target 85062; HLA-A*03:02; TDRD12; ENSG00000173809; TAA
ALDFIPSQAQK

SEQ ID NO: 85063 - protein, 8 aa, Homo sapiens
  misc_feature: Table A; Target 85063; HLA-A*02:07; TDRD12; ENSG00000173809; TAA
ALPSFGYI

SEQ ID NO: 85064 - protein, 10 aa, Homo sapiens
  misc_feature: Table A; Target 85064; HLA-A*02:07; TDRD12; ENSG00000173809; TAA
ALPSFGYIKI

SEQ ID NO: 85065 - protein, 9 aa, Homo sapiens
  misc_feature: Table A; Target 85065; HLA-A*03:02; TDRD12; ENSG00000173809; TAA
ALSQKSNEK

SEQ ID NO: 85066 - protein, 9 aa, Homo sapiens
  misc_feature: Table A; Target 85066; HLA-A*02:01; TDRD12; ENSG00000173809; TAA
ALTDDCVPL

SEQ ID NO: 85067 - protein, 10 aa, Homo sapiens
  misc_feature: Table A; Target 85067; HLA-A*02:01; TDRD12; ENSG00000173809; TAA
ALTDDCVPLL

SEQ ID NO: 85068 - protein, 10 aa, Homo sapiens
  misc_feature: Table A; Target 85068; HLA-A*02:04; TDRD12; ENSG00000173809; TAA
ALTDDCVPLL

SEQ ID NO: 85069 - protein, 9 aa, Homo sapiens
  misc_feature: Table A; Target 85069; HLA-A*02:04; TDRD12; ENSG00000173809; TAA
ALTLWPMFL

SEQ ID NO: 85070 - protein, 9 aa, Homo sapiens
  misc_feature: Table A; Target 85070; HLA-A*02:01; TDRD12; ENSG00000173809; TAA
ALYGNVQQV

SEQ ID NO: 85071 - protein, 9 aa, Homo sapiens
  misc_feature: Table A; Target 85071; HLA-A*02:03; TDRD12; ENSG00000173809; TAA
ALYGNVQQV

SEQ ID NO: 85072 - protein, 9 aa, Homo sapiens
  misc_feature: Table A; Target 85072; HLA-A*02:04; TDRD12; ENSG00000173809; TAA
ALYGNVQQV

SEQ ID NO: 85073 - protein, 9 aa, Homo sapiens
  misc_feature: Table A; Target 85073; HLA-A*02:07; TDRD12; ENSG00000173809; TAA
ALYGNVQQV

SEQ ID NO: 85074 - protein, 9 aa, Homo sapiens
  misc_feature: Table A; Target 85074; HLA-A*03:01; TDRD12; ENSG00000173809; TAA
ALYGNVQQV

SEQ ID NO: 85075 - protein, 9 aa, Homo sapiens
  misc_feature: Table A; Target 85075; HLA-A*30:01; TDRD12; ENSG00000173809; TAA
ALYGNVQQV

SEQ ID NO: 85076 - protein, 9 aa, Homo sapiens
  misc_feature: Table A; Target 85076; HLA-A*32:01; TDRD12; ENSG00000173809; TAA
ALYGNVQQV

SEQ ID NO: 85077 - protein, 9 aa, Homo sapiens
  misc_feature: Table A; Target 85077; HLA-B*13:02; TDRD12; ENSG00000173809; TAA
ALYGNVQQV

SEQ ID NO: 85078 - protein, 9 aa, Homo sapiens
  misc_feature: Table A; Target 85078; HLA-B*46:01; TDRD12; ENSG00000173809; TAA
ALYGNVQQV

SEQ ID NO: 85079 - protein, 9 aa, Homo sapiens
  misc_feature: Table A; Target 85079; HLA-B*49:01; TDRD12; ENSG00000173809; TAA
ALYGNVQQV

SEQ ID NO: 85080 - protein, 9 aa, Homo sapiens
  misc_feature: Table A; Target 85080; HLA-B*55:01; TDRD12; ENSG00000173809; TAA
ALYGNVQQV

SEQ ID NO: 85081 - protein, 9 aa, Homo sapiens
  misc_feature: Table A; Target 85081; HLA-B*56:01; TDRD12; ENSG00000173809; TAA
ALYGNVQQV

SEQ ID NO: 85082 - protein, 9 aa, Homo sapiens
  misc_feature: Table A; Target 85082; HLA-C*02:02; TDRD12; ENSG00000173809; TAA
ALYGNVQQV

SEQ ID NO: 85083 - protein, 9 aa, Homo sapiens
  misc_feature: Table A; Target 85083; HLA-C*06:02; TDRD12; ENSG00000173809; TAA
ALYGNVQQV

SEQ ID NO: 85084 - protein, 9 aa, Homo sapiens
  misc_feature: Table A; Target 85084; HLA-C*12:03; TDRD12; ENSG00000173809; TAA
ALYGNVQQV

SEQ ID NO: 85085 - protein, 9 aa, Homo sapiens
  misc_feature: Table A; Target 85085; HLA-C*16:02; TDRD12; ENSG00000173809; TAA
ALYGNVQQV

SEQ ID NO: 85086 - protein, 10 aa, Homo sapiens
  misc_feature: Table A; Target 85086; HLA-A*02:01; TDRD12; ENSG00000173809; TAA
ALYGNVQQVV

SEQ ID NO: 85087 - protein, 10 aa, Homo sapiens
  misc_feature: Table A; Target 85087; HLA-A*02:03; TDRD12; ENSG00000173809; TAA
ALYGNVQQVV

SEQ ID NO: 85088 - protein, 10 aa, Homo sapiens
  misc_feature: Table A; Target 85088; HLA-A*02:04; TDRD12; ENSG00000173809; TAA
ALYGNVQQVV

SEQ ID NO: 85089 - protein, 10 aa, Homo sapiens
  misc_feature: Table A; Target 85089; HLA-A*02:07; TDRD12; ENSG00000173809; TAA
ALYGNVQQVV

SEQ ID NO: 85090 - protein, 10 aa, Homo sapiens
  misc_feature: Table A; Target 85090; HLA-A*30:01; TDRD12; ENSG00000173809; TAA
ALYGNVQQVV

SEQ ID NO: 85091 - protein, 10 aa, Homo sapiens
  misc_feature: Table A; Target 85091; HLA-B*13:02; TDRD12; ENSG00000173809; TAA
ALYGNVQQVV

SEQ ID NO: 85092 - protein, 10 aa, Homo sapiens
  misc_feature: Table A; Target 85092; HLA-B*55:01; TDRD12; ENSG00000173809; TAA
ALYGNVQQVV

SEQ ID NO: 85093 - protein, 10 aa, Homo sapiens
  misc_feature: Table A; Target 85093; HLA-C*02:02; TDRD12; ENSG00000173809; TAA
ALYGNVQQVV

SEQ ID NO: 85094 - protein, 8 aa, Homo sapiens
  misc_feature: Table A; Target 85094; HLA-A*01:01; TDRD12; ENSG00000173809; TAA
AMEEAALY

SEQ ID NO: 85095 - protein, 8 aa, Homo sapiens
  misc_feature: Table A; Target 85095; HLA-B*07:02; TDRD12; ENSG00000173809; TAA
APHQIVAV

SEQ ID NO: 85096 - protein, 8 aa, Homo sapiens
  misc_feature: Table A; Target 85096; HLA-B*08:01; TDRD12; ENSG00000173809; TAA
APHQIVAV

SEQ ID NO: 85097 - protein, 8 aa, Homo sapiens
  misc_feature: Table A; Target 85097; HLA-B*51:01; TDRD12; ENSG00000173809; TAA
APHQIVAV

SEQ ID NO: 85098 - protein, 8 aa, Homo sapiens
  misc_feature: Table A; Target 85098; HLA-B*54:01; TDRD12; ENSG00000173809; TAA
APHQIVAV

SEQ ID NO: 85099 - protein, 8 aa, Homo sapiens
  misc_feature: Table A; Target 85099; HLA-B*55:01; TDRD12; ENSG00000173809; TAA
APHQIVAV

SEQ ID NO: 85100 - protein, 8 aa, Homo sapiens
  misc_feature: Table A; Target 85100; HLA-B*56:01; TDRD12; ENSG00000173809; TAA
APHQIVAV

SEQ ID NO: 85101 - protein, 8 aa, Homo sapiens
  misc_feature: Table A; Target 85101; HLA-C*07:02; TDRD12; ENSG00000173809; TAA
APHQIVAV

SEQ ID NO: 85102 - protein, 9 aa, Homo sapiens
  misc_feature: Table A; Target 85102; HLA-B*54:01; TDRD12; ENSG00000173809; TAA
APHQIVAVG

SEQ ID NO: 85103 - protein, 9 aa, Homo sapiens
  misc_feature: Table A; Target 85103; HLA-B*56:01; TDRD12; ENSG00000173809; TAA
APHQIVAVG

SEQ ID NO: 85104 - protein, 10 aa, Homo sapiens
  misc_feature: Table A; Target 85104; HLA-B*07:02; TDRD12; ENSG00000173809; TAA
APHQIVAVGV

SEQ ID NO: 85105 - protein, 10 aa, Homo sapiens
  misc_feature: Table A; Target 85105; HLA-B*56:01; TDRD12; ENSG00000173809; TAA
APHQIVAVGV

SEQ ID NO: 85106 - protein, 10 aa, Homo sapiens
  misc_feature: Table A; Target 85106; HLA-B*07:02; TDRD12; ENSG00000173809; TAA
APSFNKLNPA

SEQ ID NO: 85107 - protein, 10 aa, Homo sapiens
  misc_feature: Table A; Target 85107; HLA-B*56:01; TDRD12; ENSG00000173809; TAA
APSFNKLNPA

SEQ ID NO: 85108 - protein, 11 aa, Homo sapiens
  misc_feature: Table A; Target 85108; HLA-B*07:02; TDRD12; ENSG00000173809; TAA
APSFNKLNPAL

SEQ ID NO: 85109 - protein, 11 aa, Homo sapiens
  misc_feature: Table A; Target 85109; HLA-B*56:01; TDRD12; ENSG00000173809; TAA
APSFNKLNPAL

SEQ ID NO: 85110 - protein, 11 aa, Homo sapiens
  misc_feature: Table A; Target 85110; HLA-C*07:02; TDRD12; ENSG00000173809; TAA
APSFNKLNPAL

SEQ ID NO: 85111 - protein, 11 aa, Homo sapiens
  misc_feature: Table A; Target 85111; HLA-A*30:02; TDRD12; ENSG00000173809; TAA
AQFIFELLGEY

SEQ ID NO: 85112 - protein, 11 aa, Homo sapiens
  misc_feature: Table A; Target 85112; HLA-B*15:01; TDRD12; ENSG00000173809; TAA
AQFIFELLGEY

SEQ ID NO: 85113 - protein, 9 aa, Homo sapiens
  misc_feature: Table A; Target 85113; HLA-B*13:02; TDRD12; ENSG00000173809; TAA
AQKTLIFTC

SEQ ID NO: 85114 - protein, 8 aa, Homo sapiens
  misc_feature: Table A; Target 85114; HLA-A*32:01; TDRD12; ENSG00000173809; TAA
AQSLQHTW

SEQ ID NO: 85115 - protein, 8 aa, Homo sapiens
  misc_feature: Table A; Target 85115; HLA-B*15:01; TDRD12; ENSG00000173809; TAA
AQSLQHTW

SEQ ID NO: 85116 - protein, 8 aa, Homo sapiens
  misc_feature: Table A; Target 85116; HLA-B*27:02; TDRD12; ENSG00000173809; TAA
AQSLQHTW

SEQ ID NO: 85117 - protein, 8 aa, Homo sapiens
  misc_feature: Table A; Target 85117; HLA-B*37:01; TDRD12; ENSG00000173809; TAA
AQSLQHTW

SEQ ID NO: 85118 - protein, 8 aa, Homo sapiens
  misc_feature: Table A; Target 85118; HLA-B*44:02; TDRD12; ENSG00000173809; TAA
AQSLQHTW

SEQ ID NO: 85119 - protein, 8 aa, Homo sapiens
  misc_feature: Table A; Target 85119; HLA-B*58:01; TDRD12; ENSG00000173809; TAA
AQSLQHTW

SEQ ID NO: 85120 - protein, 8 aa, Homo sapiens
  misc_feature: Table A; Target 85120; HLA-C*16:04; TDRD12; ENSG00000173809; TAA
AQSLQHTW

SEQ ID NO: 85121 - protein, 8 aa, Homo sapiens
  misc_feature: Table A; Target 85121; HLA-B*40:02; TDRD12; ENSG00000173809; TAA
ASHAVGVL

SEQ ID NO: 85122 - protein, 8 aa, Homo sapiens
  misc_feature: Table A; Target 85122; HLA-C*03:04; TDRD12; ENSG00000173809; TAA
ASHAVGVL

SEQ ID NO: 85123 - protein, 8 aa, Homo sapiens
  misc_feature: Table A; Target 85123; HLA-C*07:04; TDRD12; ENSG00000173809; TAA
ASHAVGVL

SEQ ID NO: 85124 - protein, 8 aa, Homo sapiens
  misc_feature: Table A; Target 85124; HLA-C*12:03; TDRD12; ENSG00000173809; TAA
ASHAVGVL

SEQ ID NO: 85125 - protein, 9 aa, Homo sapiens
  misc_feature: Table A; Target 85125; HLA-A*03:01; TDRD12; ENSG00000173809; TAA
ASHAVGVLR

SEQ ID NO: 85126 - protein, 9 aa, Homo sapiens
  misc_feature: Table A; Target 85126; HLA-A*03:02; TDRD12; ENSG00000173809; TAA
ASHAVGVLR

SEQ ID NO: 85127 - protein, 9 aa, Homo sapiens
  misc_feature: Table A; Target 85127; HLA-A*11:01; TDRD12; ENSG00000173809; TAA
ASHAVGVLR

SEQ ID NO: 85128 - protein, 9 aa, Homo sapiens
  misc_feature: Table A; Target 85128; HLA-A*31:01; TDRD12; ENSG00000173809; TAA
ASHAVGVLR

SEQ ID NO: 85129 - protein, 9 aa, Homo sapiens
  misc_feature: Table A; Target 85129; HLA-A*33:01; TDRD12; ENSG00000173809; TAA
ASHAVGVLR

SEQ ID NO: 85130 - protein, 9 aa, Homo sapiens
  misc_feature: Table A; Target 85130; HLA-A*33:03; TDRD12; ENSG00000173809; TAA
ASHAVGVLR

SEQ ID NO: 85131 - protein, 9 aa, Homo sapiens
  misc_feature: Table A; Target 85131; HLA-A*68:01; TDRD12; ENSG00000173809; TAA
ASHAVGVLR

SEQ ID NO: 85132 - protein, 9 aa, Homo sapiens
  misc_feature: Table A; Target 85132; HLA-B*27:05; TDRD12; ENSG00000173809; TAA
ASHAVGVLR

SEQ ID NO: 85133 - protein, 9 aa, Homo sapiens
  misc_feature: Table A; Target 85133; HLA-B*57:01; TDRD12; ENSG00000173809; TAA
ASHAVGVLR

SEQ ID NO: 85134 - protein, 9 aa, Homo sapiens
  misc_feature: Table A; Target 85134; HLA-B*58:01; TDRD12; ENSG00000173809; TAA
ASHAVGVLR

SEQ ID NO: 85135 - protein, 9 aa, Homo sapiens
  misc_feature: Table A; Target 85135; HLA-C*07:06; TDRD12; ENSG00000173809; TAA
ASHAVGVLR

SEQ ID NO: 85136 - protein, 10 aa, Homo sapiens
  misc_feature: Table A; Target 85136; HLA-A*01:01; TDRD12; ENSG00000173809; TAA
ASHAVGVLRY

SEQ ID NO: 85137 - protein, 10 aa, Homo sapiens
  misc_feature: Table A; Target 85137; HLA-A*29:02; TDRD12; ENSG00000173809; TAA
ASHAVGVLRY

SEQ ID NO: 85138 - protein, 10 aa, Homo sapiens
  misc_feature: Table A; Target 85138; HLA-A*30:02; TDRD12; ENSG00000173809; TAA
ASHAVGVLRY

SEQ ID NO: 85139 - protein, 10 aa, Homo sapiens
  misc_feature: Table A; Target 85139; HLA-B*44:03; TDRD12; ENSG00000173809; TAA
ASHAVGVLRY

SEQ ID NO: 85140 - protein, 10 aa, Homo sapiens
  misc_feature: Table A; Target 85140; HLA-B*57:01; TDRD12; ENSG00000173809; TAA
ASHAVGVLRY

SEQ ID NO: 85141 - protein, 9 aa, Homo sapiens
  misc_feature: Table A; Target 85141; HLA-A*03:01; TDRD12; ENSG00000173809; TAA
ATAQDKAVK

SEQ ID NO: 85142 - protein, 9 aa, Homo sapiens
  misc_feature: Table A; Target 85142; HLA-A*03:02; TDRD12; ENSG00000173809; TAA
ATAQDKAVK

SEQ ID NO: 85143 - protein, 9 aa, Homo sapiens
  misc_feature: Table A; Target 85143; HLA-A*11:01; TDRD12; ENSG00000173809; TAA
ATAQDKAVK

SEQ ID NO: 85144 - protein, 9 aa, Homo sapiens
  misc_feature: Table A; Target 85144; HLA-A*29:02; TDRD12; ENSG00000173809; TAA
ATCVIHFSF

SEQ ID NO: 85145 - protein, 9 aa, Homo sapiens
  misc_feature: Table A; Target 85145; HLA-A*32:01; TDRD12; ENSG00000173809; TAA
ATCVIHFSF

SEQ ID NO: 85146 - protein, 9 aa, Homo sapiens
  misc_feature: Table A; Target 85146; HLA-B*57:01; TDRD12; ENSG00000173809; TAA
ATCVIHFSF

SEQ ID NO: 85147 - protein, 10 aa, Homo sapiens
  misc_feature: Table A; Target 85147; HLA-A*01:01; TDRD12; ENSG00000173809; TAA
ATLNAEMNEY

SEQ ID NO: 85148 - protein, 10 aa, Homo sapiens
  misc_feature: Table A; Target 85148; HLA-A*03:02; TDRD12; ENSG00000173809; TAA
ATLNAEMNEY

SEQ ID NO: 85149 - protein, 10 aa, Homo sapiens
  misc_feature: Table A; Target 85149; HLA-A*11:01; TDRD12; ENSG00000173809; TAA
ATLNAEMNEY

SEQ ID NO: 85150 - protein, 10 aa, Homo sapiens
  misc_feature: Table A; Target 85150; HLA-A*25:01; TDRD12; ENSG00000173809; TAA
ATLNAEMNEY

SEQ ID NO: 85151 - protein, 10 aa, Homo sapiens
  misc_feature: Table A; Target 85151; HLA-A*26:01; TDRD12; ENSG00000173809; TAA
ATLNAEMNEY

SEQ ID NO: 85152 - protein, 10 aa, Homo sapiens
  misc_feature: Table A; Target 85152; HLA-A*29:02; TDRD12; ENSG00000173809; TAA
ATLNAEMNEY

SEQ ID NO: 85153 - protein, 10 aa, Homo sapiens
  misc_feature: Table A; Target 85153; HLA-A*30:02; TDRD12; ENSG00000173809; TAA
ATLNAEMNEY

SEQ ID NO: 85154 - protein, 10 aa, Homo sapiens
  misc_feature: Table A; Target 85154; HLA-A*32:01; TDRD12; ENSG00000173809; TAA
ATLNAEMNEY

SEQ ID NO: 85155 - protein, 10 aa, Homo sapiens
  misc_feature: Table A; Target 85155; HLA-B*15:01; TDRD12; ENSG00000173809; TAA
ATLNAEMNEY

SEQ ID NO: 85156 - protein, 10 aa, Homo sapiens
  misc_feature: Table A; Target 85156; HLA-B*15:03; TDRD12; ENSG00000173809; TAA
ATLNAEMNEY

SEQ ID NO: 85157 - protein, 10 aa, Homo sapiens
  misc_feature: Table A; Target 85157; HLA-B*27:02; TDRD12; ENSG00000173809; TAA
ATLNAEMNEY

SEQ ID NO: 85158 - protein, 10 aa, Homo sapiens
  misc_feature: Table A; Target 85158; HLA-B*39:01; TDRD12; ENSG00000173809; TAA
ATLNAEMNEY

SEQ ID NO: 85159 - protein, 10 aa, Homo sapiens
  misc_feature: Table A; Target 85159; HLA-B*46:01; TDRD12; ENSG00000173809; TAA
ATLNAEMNEY

SEQ ID NO: 85160 - protein, 10 aa, Homo sapiens
  misc_feature: Table A; Target 85160; HLA-B*57:01; TDRD12; ENSG00000173809; TAA
ATLNAEMNEY

SEQ ID NO: 85161 - protein, 10 aa, Homo sapiens
  misc_feature: Table A; Target 85161; HLA-B*58:01; TDRD12; ENSG00000173809; TAA
ATLNAEMNEY

SEQ ID NO: 85162 - protein, 10 aa, Homo sapiens
  misc_feature: Table A; Target 85162; HLA-C*01:02; TDRD12; ENSG00000173809; TAA
ATLNAEMNEY

SEQ ID NO: 85163 - protein, 10 aa, Homo sapiens
  misc_feature: Table A; Target 85163; HLA-C*03:04; TDRD12; ENSG00000173809; TAA
ATLNAEMNEY

SEQ ID NO: 85164 - protein, 10 aa, Homo sapiens
  misc_feature: Table A; Target 85164; HLA-C*16:04; TDRD12; ENSG00000173809; TAA
ATLNAEMNEY

SEQ ID NO: 85165 - protein, 11 aa, Homo sapiens
  misc_feature: Table A; Target 85165; HLA-B*57:01; TDRD12; ENSG00000173809; TAA
ATLNAEMNEYF

SEQ ID NO: 85166 - protein, 11 aa, Homo sapiens
  misc_feature: Table A; Target 85166; HLA-B*58:01; TDRD12; ENSG00000173809; TAA
ATLNAEMNEYF

SEQ ID NO: 85167 - protein, 9 aa, Homo sapiens
  misc_feature: Table A; Target 85167; HLA-A*11:01; TDRD12; ENSG00000173809; TAA
ATTQVEARL

SEQ ID NO: 85168 - protein, 9 aa, Homo sapiens
  misc_feature: Table A; Target 85168; HLA-A*32:01; TDRD12; ENSG00000173809; TAA
ATTQVEARL

SEQ ID NO: 85169 - protein, 9 aa, Homo sapiens
  misc_feature: Table A; Target 85169; HLA-A*68:02; TDRD12; ENSG00000173809; TAA
ATTQVEARL

SEQ ID NO: 85170 - protein, 9 aa, Homo sapiens
  misc_feature: Table A; Target 85170; HLA-B*27:05; TDRD12; ENSG00000173809; TAA
ATTQVEARL

SEQ ID NO: 85171 - protein, 9 aa, Homo sapiens
  misc_feature: Table A; Target 85171; HLA-B*38:01; TDRD12; ENSG00000173809; TAA
ATTQVEARL

SEQ ID NO: 85172 - protein, 9 aa, Homo sapiens
  misc_feature: Table A; Target 85172; HLA-B*40:01; TDRD12; ENSG00000173809; TAA
ATTQVEARL

SEQ ID NO: 85173 - protein, 9 aa, Homo sapiens
  misc_feature: Table A; Target 85173; HLA-B*44:03; TDRD12; ENSG00000173809; TAA
ATTQVEARL

SEQ ID NO: 85174 - protein, 9 aa, Homo sapiens
  misc_feature: Table A; Target 85174; HLA-B*57:01; TDRD12; ENSG00000173809; TAA
ATTQVEARL

SEQ ID NO: 85175 - protein, 9 aa, Homo sapiens
  misc_feature: Table A; Target 85175; HLA-B*58:01; TDRD12; ENSG00000173809; TAA
ATTQVEARL

SEQ ID NO: 85176 - protein, 9 aa, Homo sapiens
  misc_feature: Table A; Target 85176; HLA-C*07:06; TDRD12; ENSG00000173809; TAA
ATTQVEARL

SEQ ID NO: 85177 - protein, 9 aa, Homo sapiens
  misc_feature: Table A; Target 85177; HLA-C*16:01; TDRD12; ENSG00000173809; TAA
ATTQVEARL

SEQ ID NO: 85178 - protein, 9 aa, Homo sapiens
  misc_feature: Table A; Target 85178; HLA-C*16:02; TDRD12; ENSG00000173809; TAA
ATTQVEARL

SEQ ID NO: 85179 - protein, 9 aa, Homo sapiens
  misc_feature: Table A; Target 85179; HLA-A*02:01; TDRD12; ENSG00000173809; TAA
AVEEDTFEV

SEQ ID NO: 85180 - protein, 9 aa, Homo sapiens
  misc_feature: Table A; Target 85180; HLA-A*02:07; TDRD12; ENSG00000173809; TAA
AVEEDTFEV

SEQ ID NO: 85181 - protein, 9 aa, Homo sapiens
  misc_feature: Table A; Target 85181; HLA-B*13:02; TDRD12; ENSG00000173809; TAA
AVEEDTFEV

SEQ ID NO: 85182 - protein, 9 aa, Homo sapiens
  misc_feature: Table A; Target 85182; HLA-C*05:01; TDRD12; ENSG00000173809; TAA
AVEEDTFEV

SEQ ID NO: 85183 - protein, 10 aa, Homo sapiens
  misc_feature: Table A; Target 85183; HLA-A*01:01; TDRD12; ENSG00000173809; TAA
AVEEDTFEVY

SEQ ID NO: 85184 - protein, 10 aa, Homo sapiens
  misc_feature: Table A; Target 85184; HLA-A*25:01; TDRD12; ENSG00000173809; TAA
AVEEDTFEVY

SEQ ID NO: 85185 - protein, 10 aa, Homo sapiens
  misc_feature: Table A; Target 85185; HLA-A*30:02; TDRD12; ENSG00000173809; TAA
AVEEDTFEVY

SEQ ID NO: 85186 - protein, 10 aa, Homo sapiens
  misc_feature: Table A; Target 85186; HLA-B*15:01; TDRD12; ENSG00000173809; TAA
AVEEDTFEVY

SEQ ID NO: 85187 - protein, 10 aa, Homo sapiens
  misc_feature: Table A; Target 85187; HLA-B*35:01; TDRD12; ENSG00000173809; TAA
AVEEDTFEVY

SEQ ID NO: 85188 - protein, 10 aa, Homo sapiens
  misc_feature: Table A; Target 85188; HLA-C*05:01; TDRD12; ENSG00000173809; TAA
AVEEDTFEVY

SEQ ID NO: 85189 - protein, 11 aa, Homo sapiens
  misc_feature: Table A; Target 85189; HLA-A*02:01; TDRD12; ENSG00000173809; TAA
AVEEDTFEVYL

SEQ ID NO: 85190 - protein, 11 aa, Homo sapiens
  misc_feature: Table A; Target 85190; HLA-A*02:07; TDRD12; ENSG00000173809; TAA
AVEEDTFEVYL

SEQ ID NO: 85191 - protein, 8 aa, Homo sapiens
  misc_feature: Table A; Target 85191; HLA-A*11:01; TDRD12; ENSG00000173809; TAA
AVGVHWNK

SEQ ID NO: 85192 - protein, 9 aa, Homo sapiens
  misc_feature: Table A; Target 85192; HLA-C*01:02; TDRD12; ENSG00000173809; TAA
AVKCNMDSL

SEQ ID NO: 85193 - protein, 11 aa, Homo sapiens
  misc_feature: Table A; Target 85193; HLA-B*15:01; TDRD12; ENSG00000173809; TAA
CAVEEDTFEVY

SEQ ID NO: 85194 - protein, 11 aa, Homo sapiens
  misc_feature: Table A; Target 85194; HLA-B*35:01; TDRD12; ENSG00000173809; TAA
CAVEEDTFEVY

SEQ ID NO: 85195 - protein, 9 aa, Homo sapiens
  misc_feature: Table A; Target 85195; HLA-B*18:01; TDRD12; ENSG00000173809; TAA
CDVIVTTPY

SEQ ID NO: 85196 - protein, 9 aa, Homo sapiens
  misc_feature: Table A; Target 85196; HLA-C*04:01; TDRD12; ENSG00000173809; TAA
CDVIVTTPY

SEQ ID NO: 85197 - protein, 9 aa, Homo sapiens
  misc_feature: Table A; Target 85197; HLA-C*07:01; TDRD12; ENSG00000173809; TAA
CDVIVTTPY

SEQ ID NO: 85198 - protein, 8 aa, Homo sapiens
  misc_feature: Table A; Target 85198; HLA-B*18:01; TDRD12; ENSG00000173809; TAA
CDVVVISH

SEQ ID NO: 85199 - protein, 8 aa, Homo sapiens
  misc_feature: Table A; Target 85199; HLA-B*18:01; TDRD12; ENSG00000173809; TAA
CESNPLLY

SEQ ID NO: 85200 - protein, 8 aa, Homo sapiens
  misc_feature: Table A; Target 85200; HLA-B*37:01; TDRD12; ENSG00000173809; TAA
CESNPLLY

SEQ ID NO: 85201 - protein, 8 aa, Homo sapiens
  misc_feature: Table A; Target 85201; HLA-B*44:03; TDRD12; ENSG00000173809; TAA
CESNPLLY

SEQ ID NO: 85202 - protein, 9 aa, Homo sapiens
  misc_feature: Table A; Target 85202; HLA-B*44:02; TDRD12; ENSG00000173809; TAA
CESNPLLYL

SEQ ID NO: 85203 - protein, 9 aa, Homo sapiens
  misc_feature: Table A; Target 85203; HLA-B*44:03; TDRD12; ENSG00000173809; TAA
CESNPLLYL

SEQ ID NO: 85204 - protein, 9 aa, Homo sapiens
  misc_feature: Table A; Target 85204; HLA-B*49:01; TDRD12; ENSG00000173809; TAA
CESNPLLYL

SEQ ID NO: 85205 - protein, 9 aa, Homo sapiens
  misc_feature: Table A; Target 85205; HLA-B*08:01; TDRD12; ENSG00000173809; TAA
CPYLKAFGF

SEQ ID NO: 85206 - protein, 11 aa, Homo sapiens
  misc_feature: Table A; Target 85206; HLA-B*57:01; TDRD12; ENSG00000173809; TAA
CTKPVTLHIDF

SEQ ID NO: 85207 - protein, 9 aa, Homo sapiens
  misc_feature: Table A; Target 85207; HLA-A*03:01; TDRD12; ENSG00000173809; TAA
CVNDDLVAK

SEQ ID NO: 85208 - protein, 9 aa, Homo sapiens
  misc_feature: Table A; Target 85208; HLA-A*03:02; TDRD12; ENSG00000173809; TAA
CVNDDLVAK

SEQ ID NO: 85209 - protein, 9 aa, Homo sapiens
  misc_feature: Table A; Target 85209; HLA-A*11:01; TDRD12; ENSG00000173809; TAA
CVNDDLVAK

SEQ ID NO: 85210 - protein, 9 aa, Homo sapiens
  misc_feature: Table A; Target 85210; HLA-A*31:01; TDRD12; ENSG00000173809; TAA
CVNDDLVAK

SEQ ID NO: 85211 - protein, 9 aa, Homo sapiens
  misc_feature: Table A; Target 85211; HLA-A*68:01; TDRD12; ENSG00000173809; TAA
CVNDDLVAK

SEQ ID NO: 85212 - protein, 9 aa, Homo sapiens
  misc_feature: Table A; Target 85212; HLA-C*07:06; TDRD12; ENSG00000173809; TAA
CVNDDLVAK

SEQ ID NO: 85213 - protein, 11 aa, Homo sapiens
  misc_feature: Table A; Target 85213; HLA-A*29:02; TDRD12; ENSG00000173809; TAA
CVNDDLVAKNY

SEQ ID NO: 85214 - protein, 11 aa, Homo sapiens
  misc_feature: Table A; Target 85214; HLA-A*30:02; TDRD12; ENSG00000173809; TAA
CVNDDLVAKNY

SEQ ID NO: 85215 - protein, 9 aa, Homo sapiens
  misc_feature: Table A; Target 85215; HLA-A*33:01; TDRD12; ENSG00000173809; TAA
DAKIPACEE

SEQ ID NO: 85216 - protein, 8 aa, Homo sapiens
  misc_feature: Table A; Target 85216; HLA-A*25:01; TDRD12; ENSG00000173809; TAA
DAKVILAL

SEQ ID NO: 85217 - protein, 8 aa, Homo sapiens
  misc_feature: Table A; Target 85217; HLA-B*08:01; TDRD12; ENSG00000173809; TAA
DAKVILAL

SEQ ID NO: 85218 - protein, 8 aa, Homo sapiens
  misc_feature: Table A; Target 85218; HLA-B*18:01; TDRD12; ENSG00000173809; TAA
DAKVILAL

SEQ ID NO: 85219 - protein, 8 aa, Homo sapiens
  misc_feature: Table A; Target 85219; HLA-B*51:01; TDRD12; ENSG00000173809; TAA
DAKVILAL

SEQ ID NO: 85220 - protein, 9 aa, Homo sapiens
  misc_feature: Table A; Target 85220; HLA-A*33:01; TDRD12; ENSG00000173809; TAA
DAKVILALG

SEQ ID NO: 85221 - protein, 8 aa, Homo sapiens
  misc_feature: Table A; Target 85221; HLA-A*33:01; TDRD12; ENSG00000173809; TAA
DAKVPAEL

SEQ ID NO: 85222 - protein, 8 aa, Homo sapiens
  misc_feature: Table A; Target 85222; HLA-B*08:01; TDRD12; ENSG00000173809; TAA
DAKVPAEL

SEQ ID NO: 85223 - protein, 8 aa, Homo sapiens
  misc_feature: Table A; Target 85223; HLA-B*51:01; TDRD12; ENSG00000173809; TAA
DAKVPAEL

SEQ ID NO: 85224 - protein, 8 aa, Homo sapiens
  misc_feature: Table A; Target 85224; HLA-C*03:04; TDRD12; ENSG00000173809; TAA
DAKVPAEL

SEQ ID NO: 85225 - protein, 9 aa, Homo sapiens
  misc_feature: Table A; Target 85225; HLA-A*01:01; TDRD12; ENSG00000173809; TAA
DAKVPAELY

SEQ ID NO: 85226 - protein, 9 aa, Homo sapiens
  misc_feature: Table A; Target 85226; HLA-A*25:01; TDRD12; ENSG00000173809; TAA
DAKVPAELY

SEQ ID NO: 85227 - protein, 9 aa, Homo sapiens
  misc_feature: Table A; Target 85227; HLA-A*26:01; TDRD12; ENSG00000173809; TAA
DAKVPAELY

SEQ ID NO: 85228 - protein, 9 aa, Homo sapiens
  misc_feature: Table A; Target 85228; HLA-A*29:02; TDRD12; ENSG00000173809; TAA
DAKVPAELY

SEQ ID NO: 85229 - protein, 9 aa, Homo sapiens
  misc_feature: Table A; Target 85229; HLA-A*30:02; TDRD12; ENSG00000173809; TAA
DAKVPAELY

SEQ ID NO: 85230 - protein, 9 aa, Homo sapiens
  misc_feature: Table A; Target 85230; HLA-A*33:01; TDRD12; ENSG00000173809; TAA
DAKVPAELY

SEQ ID NO: 85231 - protein, 9 aa, Homo sapiens
  misc_feature: Table A; Target 85231; HLA-A*33:03; TDRD12; ENSG00000173809; TAA
DAKVPAELY

SEQ ID NO: 85232 - protein, 9 aa, Homo sapiens
  misc_feature: Table A; Target 85232; HLA-A*68:01; TDRD12; ENSG00000173809; TAA
DAKVPAELY

SEQ ID NO: 85233 - protein, 9 aa, Homo sapiens
  misc_feature: Table A; Target 85233; HLA-B*15:01; TDRD12; ENSG00000173809; TAA
DAKVPAELY

SEQ ID NO: 85234 - protein, 9 aa, Homo sapiens
  misc_feature: Table A; Target 85234; HLA-B*15:03; TDRD12; ENSG00000173809; TAA
DAKVPAELY

SEQ ID NO: 85235 - protein, 9 aa, Homo sapiens
  misc_feature: Table A; Target 85235; HLA-B*18:01; TDRD12; ENSG00000173809; TAA
DAKVPAELY

SEQ ID NO: 85236 - protein, 9 aa, Homo sapiens
  misc_feature: Table A; Target 85236; HLA-B*35:01; TDRD12; ENSG00000173809; TAA
DAKVPAELY

SEQ ID NO: 85237 - protein, 9 aa, Homo sapiens
  misc_feature: Table A; Target 85237; HLA-B*46:01; TDRD12; ENSG00000173809; TAA
DAKVPAELY

SEQ ID NO: 85238 - protein, 9 aa, Homo sapiens
  misc_feature: Table A; Target 85238; HLA-B*51:01; TDRD12; ENSG00000173809; TAA
DAKVPAELY

SEQ ID NO: 85239 - protein, 9 aa, Homo sapiens
  misc_feature: Table A; Target 85239; HLA-C*02:02; TDRD12; ENSG00000173809; TAA
DAKVPAELY

SEQ ID NO: 85240 - protein, 9 aa, Homo sapiens
  misc_feature: Table A; Target 85240; HLA-C*03:03; TDRD12; ENSG00000173809; TAA
DAKVPAELY

SEQ ID NO: 85241 - protein, 9 aa, Homo sapiens
  misc_feature: Table A; Target 85241; HLA-C*07:01; TDRD12; ENSG00000173809; TAA
DAKVPAELY

SEQ ID NO: 85242 - protein, 9 aa, Homo sapiens
  misc_feature: Table A; Target 85242; HLA-C*07:04; TDRD12; ENSG00000173809; TAA
DAKVPAELY

SEQ ID NO: 85243 - protein, 9 aa, Homo sapiens
  misc_feature: Table A; Target 85243; HLA-C*07:06; TDRD12; ENSG00000173809; TAA
DAKVPAELY

SEQ ID NO: 85244 - protein, 9 aa, Homo sapiens
  misc_feature: Table A; Target 85244; HLA-C*12:03; TDRD12; ENSG00000173809; TAA
DAKVPAELY

SEQ ID NO: 85245 - protein, 9 aa, Homo sapiens
  misc_feature: Table A; Target 85245; HLA-C*16:04; TDRD12; ENSG00000173809; TAA
DAKVPAELY

SEQ ID NO: 85246 - protein, 11 aa, Homo sapiens
  misc_feature: Table A; Target 85246; HLA-A*33:01; TDRD12; ENSG00000173809; TAA
DAKVPAELYEF

SEQ ID NO: 85247 - protein, 8 aa, Homo sapiens
  misc_feature: Table A; Target 85247; HLA-B*51:01; TDRD12; ENSG00000173809; TAA
DASHAVGV

SEQ ID NO: 85248 - protein, 9 aa, Homo sapiens
  misc_feature: Table A; Target 85248; HLA-A*25:01; TDRD12; ENSG00000173809; TAA
DASHAVGVL

SEQ ID NO: 85249 - protein, 9 aa, Homo sapiens
  misc_feature: Table A; Target 85249; HLA-A*26:01; TDRD12; ENSG00000173809; TAA
DASHAVGVL

SEQ ID NO: 85250 - protein, 9 aa, Homo sapiens
  misc_feature: Table A; Target 85250; HLA-A*33:01; TDRD12; ENSG00000173809; TAA
DASHAVGVL

SEQ ID NO: 85251 - protein, 9 aa, Homo sapiens
  misc_feature: Table A; Target 85251; HLA-A*68:01; TDRD12; ENSG00000173809; TAA
DASHAVGVL

SEQ ID NO: 85252 - protein, 9 aa, Homo sapiens
  misc_feature: Table A; Target 85252; HLA-B*35:01; TDRD12; ENSG00000173809; TAA
DASHAVGVL

SEQ ID NO: 85253 - protein, 9 aa, Homo sapiens
  misc_feature: Table A; Target 85253; HLA-B*35:03; TDRD12; ENSG00000173809; TAA
DASHAVGVL

SEQ ID NO: 85254 - protein, 9 aa, Homo sapiens
  misc_feature: Table A; Target 85254; HLA-B*39:01; TDRD12; ENSG00000173809; TAA
DASHAVGVL

SEQ ID NO: 85255 - protein, 9 aa, Homo sapiens
  misc_feature: Table A; Target 85255; HLA-B*51:01; TDRD12; ENSG00000173809; TAA
DASHAVGVL

SEQ ID NO: 85256 - protein, 9 aa, Homo sapiens
  misc_feature: Table A; Target 85256; HLA-C*03:04; TDRD12; ENSG00000173809; TAA
DASHAVGVL

SEQ ID NO: 85257 - protein, 9 aa, Homo sapiens
  misc_feature: Table A; Target 85257; HLA-C*05:01; TDRD12; ENSG00000173809; TAA
DASHAVGVL

SEQ ID NO: 85258 - protein, 9 aa, Homo sapiens
  misc_feature: Table A; Target 85258; HLA-C*07:02; TDRD12; ENSG00000173809; TAA
DASHAVGVL

SEQ ID NO: 85259 - protein, 9 aa, Homo sapiens
  misc_feature: Table A; Target 85259; HLA-C*07:06; TDRD12; ENSG00000173809; TAA
DASHAVGVL

SEQ ID NO: 85260 - protein, 9 aa, Homo sapiens
  misc_feature: Table A; Target 85260; HLA-C*12:03; TDRD12; ENSG00000173809; TAA
DASHAVGVL

SEQ ID NO: 85261 - protein, 10 aa, Homo sapiens
  misc_feature: Table A; Target 85261; HLA-A*33:01; TDRD12; ENSG00000173809; TAA
DASHAVGVLR

SEQ ID NO: 85262 - protein, 10 aa, Homo sapiens
  misc_feature: Table A; Target 85262; HLA-A*33:03; TDRD12; ENSG00000173809; TAA
DASHAVGVLR

SEQ ID NO: 85263 - protein, 10 aa, Homo sapiens
  misc_feature: Table A; Target 85263; HLA-A*68:01; TDRD12; ENSG00000173809; TAA
DASHAVGVLR

SEQ ID NO: 85264 - protein, 10 aa, Homo sapiens
  misc_feature: Table A; Target 85264; HLA-A*68:02; TDRD12; ENSG00000173809; TAA
DASHAVGVLR

SEQ ID NO: 85265 - protein, 10 aa, Homo sapiens
  misc_feature: Table A; Target 85265; HLA-B*27:02; TDRD12; ENSG00000173809; TAA
DASHAVGVLR

SEQ ID NO: 85266 - protein, 10 aa, Homo sapiens
  misc_feature: Table A; Target 85266; HLA-C*07:06; TDRD12; ENSG00000173809; TAA
DASHAVGVLR

SEQ ID NO: 85267 - protein, 11 aa, Homo sapiens
  misc_feature: Table A; Target 85267; HLA-A*01:01; TDRD12; ENSG00000173809; TAA
DASHAVGVLRY

SEQ ID NO: 85268 - protein, 11 aa, Homo sapiens
  misc_feature: Table A; Target 85268; HLA-A*25:01; TDRD12; ENSG00000173809; TAA
DASHAVGVLRY

SEQ ID NO: 85269 - protein, 11 aa, Homo sapiens
  misc_feature: Table A; Target 85269; HLA-A*26:01; TDRD12; ENSG00000173809; TAA
DASHAVGVLRY

SEQ ID NO: 85270 - protein, 11 aa, Homo sapiens
  misc_feature: Table A; Target 85270; HLA-A*68:01; TDRD12; ENSG00000173809; TAA
DASHAVGVLRY

SEQ ID NO: 85271 - protein, 8 aa, Homo sapiens
  misc_feature: Table A; Target 85271; HLA-B*51:01; TDRD12; ENSG00000173809; TAA
DATCVIHF

SEQ ID NO: 85272 - protein, 8 aa, Homo sapiens
  misc_feature: Table A; Target 85272; HLA-B*51:01; TDRD12; ENSG00000173809; TAA
DAWALDDI

SEQ ID NO: 85273 - protein, 9 aa, Homo sapiens
  misc_feature: Table A; Target 85273; HLA-B*35:03; TDRD12; ENSG00000173809; TAA
DAWALDDIL

SEQ ID NO: 85274 - protein, 8 aa, Homo sapiens
  misc_feature: Table A; Target 85274; HLA-B*51:01; TDRD12; ENSG00000173809; TAA
DCVPLLAI

SEQ ID NO: 85275 - protein, 8 aa, Homo sapiens
  misc_feature: Table A; Target 85275; HLA-B*18:01; TDRD12; ENSG00000173809; TAA
DDILVEFI

SEQ ID NO: 85276 - protein, 8 aa, Homo sapiens
  misc_feature: Table A; Target 85276; HLA-B*18:01; TDRD12; ENSG00000173809; TAA
DDLVAKNY

SEQ ID NO: 85277 - protein, 8 aa, Homo sapiens
  misc_feature: Table A; Target 85277; HLA-B*37:01; TDRD12; ENSG00000173809; TAA
DDLVAKNY

SEQ ID NO: 85278 - protein, 8 aa, Homo sapiens
  misc_feature: Table A; Target 85278; HLA-B*44:02; TDRD12; ENSG00000173809; TAA
DDLVAKNY

SEQ ID NO: 85279 - protein, 8 aa, Homo sapiens
  misc_feature: Table A; Target 85279; HLA-B*44:03; TDRD12; ENSG00000173809; TAA
DDLVAKNY

SEQ ID NO: 85280 - protein, 8 aa, Homo sapiens
  misc_feature: Table A; Target 85280; HLA-C*07:01; TDRD12; ENSG00000173809; TAA
DDLVAKNY

SEQ ID NO: 85281 - protein, 8 aa, Homo sapiens
  misc_feature: Table A; Target 85281; HLA-C*12:03; TDRD12; ENSG00000173809; TAA
DDLVAKNY

SEQ ID NO: 85282 - protein, 9 aa, Homo sapiens
  misc_feature: Table A; Target 85282; HLA-B*18:01; TDRD12; ENSG00000173809; TAA
DEKNSCVKL

SEQ ID NO: 85283 - protein, 8 aa, Homo sapiens
  misc_feature: Table A; Target 85283; HLA-B*18:01; TDRD12; ENSG00000173809; TAA
DEVEVLFL

SEQ ID NO: 85284 - protein, 8 aa, Homo sapiens
  misc_feature: Table A; Target 85284; HLA-B*49:01; TDRD12; ENSG00000173809; TAA
DEVEVLFL

SEQ ID NO: 85285 - protein, 10 aa, Homo sapiens
  misc_feature: Table A; Target 85285; HLA-B*18:01; TDRD12; ENSG00000173809; TAA
DEVEVLFLEA

SEQ ID NO: 85286 - protein, 9 aa, Homo sapiens
  misc_feature: Table A; Target 85286; HLA-A*33:01; TDRD12; ENSG00000173809; TAA
DFAKNIPVK

SEQ ID NO: 85287 - protein, 9 aa, Homo sapiens
  misc_feature: Table A; Target 85287; HLA-A*33:03; TDRD12; ENSG00000173809; TAA
DFAKNIPVK

SEQ ID NO: 85288 - protein, 9 aa, Homo sapiens
  misc_feature: Table A; Target 85288; HLA-A*33:01; TDRD12; ENSG00000173809; TAA
DFIPSQAQK

SEQ ID NO: 85289 - protein, 9 aa, Homo sapiens
  misc_feature: Table A; Target 85289; HLA-A*33:03; TDRD12; ENSG00000173809; TAA
DFIPSQAQK

SEQ ID NO: 85290 - protein, 9 aa, Homo sapiens
  misc_feature: Table A; Target 85290; HLA-A*68:01; TDRD12; ENSG00000173809; TAA
DFIPSQAQK

SEQ ID NO: 85291 - protein, 11 aa, Homo sapiens
  misc_feature: Table A; Target 85291; HLA-A*23:01; TDRD12; ENSG00000173809; TAA
DFIPSQAQKTL

SEQ ID NO: 85292 - protein, 9 aa, Homo sapiens
  misc_feature: Table A; Target 85292; HLA-A*25:01; TDRD12; ENSG00000173809; TAA
DGISDLQQL

SEQ ID NO: 85293 - protein, 9 aa, Homo sapiens
  misc_feature: Table A; Target 85293; HLA-B*35:03; TDRD12; ENSG00000173809; TAA
DGISDLQQL

SEQ ID NO: 85294 - protein, 9 aa, Homo sapiens
  misc_feature: Table A; Target 85294; HLA-B*38:01; TDRD12; ENSG00000173809; TAA
DGISDLQQL

SEQ ID NO: 85295 - protein, 9 aa, Homo sapiens
  misc_feature: Table A; Target 85295; HLA-B*27:05; TDRD12; ENSG00000173809; TAA
DHDVDYQKL

SEQ ID NO: 85296 - protein, 9 aa, Homo sapiens
  misc_feature: Table A; Target 85296; HLA-B*38:01; TDRD12; ENSG00000173809; TAA
DHDVDYQKL

SEQ ID NO: 85297 - protein, 9 aa, Homo sapiens
  misc_feature: Table A; Target 85297; HLA-B*39:01; TDRD12; ENSG00000173809; TAA
DHDVDYQKL

SEQ ID NO: 85298 - protein, 9 aa, Homo sapiens
  misc_feature: Table A; Target 85298; HLA-B*08:01; TDRD12; ENSG00000173809; TAA
DIEIKPLTL

SEQ ID NO: 85299 - protein, 8 aa, Homo sapiens
  misc_feature: Table A; Target 85299; HLA-B*08:01; TDRD12; ENSG00000173809; TAA
DKKAKSVL

SEQ ID NO: 85300 - protein, 8 aa, Homo sapiens
  misc_feature: Table A; Target 85300; HLA-A*33:01; TDRD12; ENSG00000173809; TAA
DLKKALQR

SEQ ID NO: 85301 - protein, 8 aa, Homo sapiens
  misc_feature: Table A; Target 85301; HLA-A*33:03; TDRD12; ENSG00000173809; TAA
DLKKALQR

SEQ ID NO: 85302 - protein, 8 aa, Homo sapiens
  misc_feature: Table A; Target 85302; HLA-B*08:01; TDRD12; ENSG00000173809; TAA
DLQQLQKL

SEQ ID NO: 85303 - protein, 9 aa, Homo sapiens
  misc_feature: Table A; Target 85303; HLA-A*33:01; TDRD12; ENSG00000173809; TAA
DLQQLQKLK

SEQ ID NO: 85304 - protein, 11 aa, Homo sapiens
  misc_feature: Table A; Target 85304; HLA-A*33:01; TDRD12; ENSG00000173809; TAA
DLRPTATAQDK

SEQ ID NO: 85305 - protein, 9 aa, Homo sapiens
  misc_feature: Table A; Target 85305; HLA-B*08:01; TDRD12; ENSG00000173809; TAA
DLVAKNYAC

SEQ ID NO: 85306 - protein, 10 aa, Homo sapiens
  misc_feature: Table A; Target 85306; HLA-A*25:01; TDRD12; ENSG00000173809; TAA
DLVAKNYACY

SEQ ID NO: 85307 - protein, 10 aa, Homo sapiens
  misc_feature: Table A; Target 85307; HLA-A*26:01; TDRD12; ENSG00000173809; TAA
DLVAKNYACY

SEQ ID NO: 85308 - protein, 10 aa, Homo sapiens
  misc_feature: Table A; Target 85308; HLA-A*26:01; TDRD12; ENSG00000173809; TAA
DLYATLNAEM

SEQ ID NO: 85309 - protein, 10 aa, Homo sapiens
  misc_feature: Table A; Target 85309; HLA-B*35:03; TDRD12; ENSG00000173809; TAA
DPDVPEASAL

SEQ ID NO: 85310 - protein, 10 aa, Homo sapiens
  misc_feature: Table A; Target 85310; HLA-C*05:01; TDRD12; ENSG00000173809; TAA
DPDVPEASAL

SEQ ID NO: 85311 - protein, 8 aa, Homo sapiens
  misc_feature: Table A; Target 85311; HLA-B*51:01; TDRD12; ENSG00000173809; TAA
DPLRADGI

SEQ ID NO: 85312 - protein, 8 aa, Homo sapiens
  misc_feature: Table A; Target 85312; HLA-B*08:01; TDRD12; ENSG00000173809; TAA
DPMVHITN

SEQ ID NO: 85313 - protein, 9 aa, Homo sapiens
  misc_feature: Table A; Target 85313; HLA-A*25:01; TDRD12; ENSG00000173809; TAA
DPMVHITNL

SEQ ID NO: 85314 - protein, 9 aa, Homo sapiens
  misc_feature: Table A; Target 85314; HLA-A*33:03; TDRD12; ENSG00000173809; TAA
DPMVHITNL

SEQ ID NO: 85315 - protein, 9 aa, Homo sapiens
  misc_feature: Table A; Target 85315; HLA-B*07:02; TDRD12; ENSG00000173809; TAA
DPMVHITNL

SEQ ID NO: 85316 - protein, 9 aa, Homo sapiens
  misc_feature: Table A; Target 85316; HLA-B*08:01; TDRD12; ENSG00000173809; TAA
DPMVHITNL

SEQ ID NO: 85317 - protein, 9 aa, Homo sapiens
  misc_feature: Table A; Target 85317; HLA-B*35:01; TDRD12; ENSG00000173809; TAA
DPMVHITNL

SEQ ID NO: 85318 - protein, 9 aa, Homo sapiens
  misc_feature: Table A; Target 85318; HLA-B*35:03; TDRD12; ENSG00000173809; TAA
DPMVHITNL

SEQ ID NO: 85319 - protein, 9 aa, Homo sapiens
  misc_feature: Table A; Target 85319; HLA-B*51:01; TDRD12; ENSG00000173809; TAA
DPMVHITNL

SEQ ID NO: 85320 - protein, 9 aa, Homo sapiens
  misc_feature: Table A; Target 85320; HLA-C*07:02; TDRD12; ENSG00000173809; TAA
DPMVHITNL

SEQ ID NO: 85321 - protein, 8 aa, Homo sapiens
  misc_feature: Table A; Target 85321; HLA-B*08:01; TDRD12; ENSG00000173809; TAA
DPYIVITA

SEQ ID NO: 85322 - protein, 8 aa, Homo sapiens
  misc_feature: Table A; Target 85322; HLA-B*18:01; TDRD12; ENSG00000173809; TAA
DPYIVITA

SEQ ID NO: 85323 - protein, 8 aa, Homo sapiens
  misc_feature: Table A; Target 85323; HLA-B*35:01; TDRD12; ENSG00000173809; TAA
DPYIVITA

SEQ ID NO: 85324 - protein, 8 aa, Homo sapiens
  misc_feature: Table A; Target 85324; HLA-B*51:01; TDRD12; ENSG00000173809; TAA
DPYIVITA

SEQ ID NO: 85325 - protein, 8 aa, Homo sapiens
  misc_feature: Table A; Target 85325; HLA-B*54:01; TDRD12; ENSG00000173809; TAA
DPYIVITA

SEQ ID NO: 85326 - protein, 8 aa, Homo sapiens
  misc_feature: Table A; Target 85326; HLA-B*55:01; TDRD12; ENSG00000173809; TAA
DPYIVITA

SEQ ID NO: 85327 - protein, 8 aa, Homo sapiens
  misc_feature: Table A; Target 85327; HLA-B*56:01; TDRD12; ENSG00000173809; TAA
DPYIVITA

SEQ ID NO: 85328 - protein, 9 aa, Homo sapiens
  misc_feature: Table A; Target 85328; HLA-A*25:01; TDRD12; ENSG00000173809; TAA
DPYIVITAM

SEQ ID NO: 85329 - protein, 9 aa, Homo sapiens
  misc_feature: Table A; Target 85329; HLA-A*26:01; TDRD12; ENSG00000173809; TAA
DPYIVITAM

SEQ ID NO: 85330 - protein, 9 aa, Homo sapiens
  misc_feature: Table A; Target 85330; HLA-A*33:01; TDRD12; ENSG00000173809; TAA
DPYIVITAM

SEQ ID NO: 85331 - protein, 9 aa, Homo sapiens
  misc_feature: Table A; Target 85331; HLA-B*07:02; TDRD12; ENSG00000173809; TAA
DPYIVITAM

SEQ ID NO: 85332 - protein, 9 aa, Homo sapiens
  misc_feature: Table A; Target 85332; HLA-B*08:01; TDRD12; ENSG00000173809; TAA
DPYIVITAM

SEQ ID NO: 85333 - protein, 9 aa, Homo sapiens
  misc_feature: Table A; Target 85333; HLA-B*18:01; TDRD12; ENSG00000173809; TAA
DPYIVITAM

SEQ ID NO: 85334 - protein, 9 aa, Homo sapiens
  misc_feature: Table A; Target 85334; HLA-B*35:01; TDRD12; ENSG00000173809; TAA
DPYIVITAM

SEQ ID NO: 85335 - protein, 9 aa, Homo sapiens
  misc_feature: Table A; Target 85335; HLA-B*35:03; TDRD12; ENSG00000173809; TAA
DPYIVITAM

SEQ ID NO: 85336 - protein, 9 aa, Homo sapiens
  misc_feature: Table A; Target 85336; HLA-B*51:01; TDRD12; ENSG00000173809; TAA
DPYIVITAM

SEQ ID NO: 85337 - protein, 9 aa, Homo sapiens
  misc_feature: Table A; Target 85337; HLA-B*54:01; TDRD12; ENSG00000173809; TAA
DPYIVITAM

SEQ ID NO: 85338 - protein, 9 aa, Homo sapiens
  misc_feature: Table A; Target 85338; HLA-B*55:01; TDRD12; ENSG00000173809; TAA
DPYIVITAM

SEQ ID NO: 85339 - protein, 9 aa, Homo sapiens
  misc_feature: Table A; Target 85339; HLA-C*07:02; TDRD12; ENSG00000173809; TAA
DPYIVITAM

SEQ ID NO: 85340 - protein, 8 aa, Homo sapiens
  misc_feature: Table A; Target 85340; HLA-B*18:01; TDRD12; ENSG00000173809; TAA
DQYLAECF

SEQ ID NO: 85341 - protein, 9 aa, Homo sapiens
  misc_feature: Table A; Target 85341; HLA-B*39:01; TDRD12; ENSG00000173809; TAA
DQYLAECFL

SEQ ID NO: 85342 - protein, 9 aa, Homo sapiens
  misc_feature: Table A; Target 85342; HLA-A*33:01; TDRD12; ENSG00000173809; TAA
DSHGVNFPA

SEQ ID NO: 85343 - protein, 9 aa, Homo sapiens
  misc_feature: Table A; Target 85343; HLA-A*03:02; TDRD12; ENSG00000173809; TAA
DSNKTTVEK

SEQ ID NO: 85344 - protein, 9 aa, Homo sapiens
  misc_feature: Table A; Target 85344; HLA-A*11:01; TDRD12; ENSG00000173809; TAA
DSNKTTVEK

SEQ ID NO: 85345 - protein, 9 aa, Homo sapiens
  misc_feature: Table A; Target 85345; HLA-A*33:01; TDRD12; ENSG00000173809; TAA
DSNKTTVEK

SEQ ID NO: 85346 - protein, 9 aa, Homo sapiens
  misc_feature: Table A; Target 85346; HLA-A*33:03; TDRD12; ENSG00000173809; TAA
DSNKTTVEK

SEQ ID NO: 85347 - protein, 9 aa, Homo sapiens
  misc_feature: Table A; Target 85347; HLA-A*68:01; TDRD12; ENSG00000173809; TAA
DSNKTTVEK

SEQ ID NO: 85348 - protein, 9 aa, Homo sapiens
  misc_feature: Table A; Target 85348; HLA-C*07:06; TDRD12; ENSG00000173809; TAA
DSNKTTVEK

SEQ ID NO: 85349 - protein, 9 aa, Homo sapiens
  misc_feature: Table A; Target 85349; HLA-B*39:01; TDRD12; ENSG00000173809; TAA
DSSPLSADL

SEQ ID NO: 85350 - protein, 10 aa, Homo sapiens
  misc_feature: Table A; Target 85350; HLA-A*01:01; TDRD12; ENSG00000173809; TAA
DSSPLSADLK

SEQ ID NO: 85351 - protein, 10 aa, Homo sapiens
  misc_feature: Table A; Target 85351; HLA-A*68:01; TDRD12; ENSG00000173809; TAA
DSSPLSADLK

SEQ ID NO: 85352 - protein, 10 aa, Homo sapiens
  misc_feature: Table A; Target 85352; HLA-B*27:02; TDRD12; ENSG00000173809; TAA
DSSPLSADLK

SEQ ID NO: 85353 - protein, 10 aa, Homo sapiens
  misc_feature: Table A; Target 85353; HLA-C*07:06; TDRD12; ENSG00000173809; TAA
DSSPLSADLK

SEQ ID NO: 85354 - protein, 11 aa, Homo sapiens
  misc_feature: Table A; Target 85354; HLA-A*01:01; TDRD12; ENSG00000173809; TAA
DSSPLSADLKK

SEQ ID NO: 85355 - protein, 11 aa, Homo sapiens
  misc_feature: Table A; Target 85355; HLA-A*11:01; TDRD12; ENSG00000173809; TAA
DSSPLSADLKK

SEQ ID NO: 85356 - protein, 11 aa, Homo sapiens
  misc_feature: Table A; Target 85356; HLA-A*33:01; TDRD12; ENSG00000173809; TAA
DSSPLSADLKK

SEQ ID NO: 85357 - protein, 11 aa, Homo sapiens
  misc_feature: Table A; Target 85357; HLA-A*68:01; TDRD12; ENSG00000173809; TAA
DSSPLSADLKK

SEQ ID NO: 85358 - protein, 9 aa, Homo sapiens
  misc_feature: Table A; Target 85358; HLA-A*01:01; TDRD12; ENSG00000173809; TAA
DSTDIVPAK

SEQ ID NO: 85359 - protein, 9 aa, Homo sapiens
  misc_feature: Table A; Target 85359; HLA-A*03:02; TDRD12; ENSG00000173809; TAA
DSTDIVPAK

SEQ ID NO: 85360 - protein, 9 aa, Homo sapiens
  misc_feature: Table A; Target 85360; HLA-A*11:01; TDRD12; ENSG00000173809; TAA
DSTDIVPAK

SEQ ID NO: 85361 - protein, 9 aa, Homo sapiens
  misc_feature: Table A; Target 85361; HLA-A*25:01; TDRD12; ENSG00000173809; TAA
DSTDIVPAK

SEQ ID NO: 85362 - protein, 9 aa, Homo sapiens
  misc_feature: Table A; Target 85362; HLA-A*26:01; TDRD12; ENSG00000173809; TAA
DSTDIVPAK

SEQ ID NO: 85363 - protein, 9 aa, Homo sapiens
  misc_feature: Table A; Target 85363; HLA-A*33:01; TDRD12; ENSG00000173809; TAA
DSTDIVPAK

SEQ ID NO: 85364 - protein, 9 aa, Homo sapiens
  misc_feature: Table A; Target 85364; HLA-A*33:03; TDRD12; ENSG00000173809; TAA
DSTDIVPAK

SEQ ID NO: 85365 - protein, 9 aa, Homo sapiens
  misc_feature: Table A; Target 85365; HLA-A*68:01; TDRD12; ENSG00000173809; TAA
DSTDIVPAK

SEQ ID NO: 85366 - protein, 9 aa, Homo sapiens
  misc_feature: Table A; Target 85366; HLA-A*68:02; TDRD12; ENSG00000173809; TAA
DSTDIVPAK

SEQ ID NO: 85367 - protein, 9 aa, Homo sapiens
  misc_feature: Table A; Target 85367; HLA-B*27:02; TDRD12; ENSG00000173809; TAA
DSTDIVPAK

SEQ ID NO: 85368 - protein, 9 aa, Homo sapiens
  misc_feature: Table A; Target 85368; HLA-B*27:05; TDRD12; ENSG00000173809; TAA
DSTDIVPAK

SEQ ID NO: 85369 - protein, 9 aa, Homo sapiens
  misc_feature: Table A; Target 85369; HLA-C*07:06; TDRD12; ENSG00000173809; TAA
DSTDIVPAK

SEQ ID NO: 85370 - protein, 10 aa, Homo sapiens
  misc_feature: Table A; Target 85370; HLA-A*33:01; TDRD12; ENSG00000173809; TAA
DSTDIVPAKK

SEQ ID NO: 85371 - protein, 10 aa, Homo sapiens
  misc_feature: Table A; Target 85371; HLA-A*68:01; TDRD12; ENSG00000173809; TAA
DSTDIVPAKK

SEQ ID NO: 85372 - protein, 10 aa, Homo sapiens
  misc_feature: Table A; Target 85372; HLA-A*68:02; TDRD12; ENSG00000173809; TAA
DSTDIVPAKK

SEQ ID NO: 85373 - protein, 10 aa, Homo sapiens
  misc_feature: Table A; Target 85373; HLA-C*07:06; TDRD12; ENSG00000173809; TAA
DSTDIVPAKK

SEQ ID NO: 85374 - protein, 11 aa, Homo sapiens
  misc_feature: Table A; Target 85374; HLA-A*25:01; TDRD12; ENSG00000173809; TAA
DSTDIVPAKKW

SEQ ID NO: 85375 - protein, 8 aa, Homo sapiens
  misc_feature: Table A; Target 85375; HLA-A*01:01; TDRD12; ENSG00000173809; TAA
DTFEVYLY

SEQ ID NO: 85376 - protein, 8 aa, Homo sapiens
  misc_feature: Table A; Target 85376; HLA-A*26:01; TDRD12; ENSG00000173809; TAA
DTFEVYLY

SEQ ID NO: 85377 - protein, 8 aa, Homo sapiens
  misc_feature: Table A; Target 85377; HLA-B*18:01; TDRD12; ENSG00000173809; TAA
DTFEVYLY

SEQ ID NO: 85378 - protein, 8 aa, Homo sapiens
  misc_feature: Table A; Target 85378; HLA-B*35:01; TDRD12; ENSG00000173809; TAA
DTFEVYLY

SEQ ID NO: 85379 - protein, 9 aa, Homo sapiens
  misc_feature: Table A; Target 85379; HLA-A*26:01; TDRD12; ENSG00000173809; TAA
DTFEVYLYV

SEQ ID NO: 85380 - protein, 9 aa, Homo sapiens
  misc_feature: Table A; Target 85380; HLA-A*68:02; TDRD12; ENSG00000173809; TAA
DTFEVYLYV

SEQ ID NO: 85381 - protein, 9 aa, Homo sapiens
  misc_feature: Table A; Target 85381; HLA-B*51:01; TDRD12; ENSG00000173809; TAA
DTFEVYLYV

SEQ ID NO: 85382 - protein, 11 aa, Homo sapiens
  misc_feature: Table A; Target 85382; HLA-A*68:02; TDRD12; ENSG00000173809; TAA
DTFEVYLYVTI

SEQ ID NO: 85383 - protein, 11 aa, Homo sapiens
  misc_feature: Table A; Target 85383; HLA-A*25:01; TDRD12; ENSG00000173809; TAA
DTNKRVESSVY

SEQ ID NO: 85384 - protein, 11 aa, Homo sapiens
  misc_feature: Table A; Target 85384; HLA-A*26:01; TDRD12; ENSG00000173809; TAA
DTNKRVESSVY

SEQ ID NO: 85385 - protein, 8 aa, Homo sapiens
  misc_feature: Table A; Target 85385; HLA-A*25:01; TDRD12; ENSG00000173809; TAA
DVIVTTPY

SEQ ID NO: 85386 - protein, 8 aa, Homo sapiens
  misc_feature: Table A; Target 85386; HLA-A*26:01; TDRD12; ENSG00000173809; TAA
DVIVTTPY

SEQ ID NO: 85387 - protein, 8 aa, Homo sapiens
  misc_feature: Table A; Target 85387; HLA-B*18:01; TDRD12; ENSG00000173809; TAA
DVIVTTPY

SEQ ID NO: 85388 - protein, 8 aa, Homo sapiens
  misc_feature: Table A; Target 85388; HLA-B*35:01; TDRD12; ENSG00000173809; TAA
DVIVTTPY

SEQ ID NO: 85389 - protein, 8 aa, Homo sapiens
  misc_feature: Table A; Target 85389; HLA-B*46:01; TDRD12; ENSG00000173809; TAA
DVIVTTPY

SEQ ID NO: 85390 - protein, 9 aa, Homo sapiens
  misc_feature: Table A; Target 85390; HLA-A*26:01; TDRD12; ENSG00000173809; TAA
DVIVTTPYS

SEQ ID NO: 85391 - protein, 10 aa, Homo sapiens
  misc_feature: Table A; Target 85391; HLA-A*25:01; TDRD12; ENSG00000173809; TAA
DVIVTTPYSL

SEQ ID NO: 85392 - protein, 10 aa, Homo sapiens
  misc_feature: Table A; Target 85392; HLA-A*68:01; TDRD12; ENSG00000173809; TAA
DVIVTTPYSL

SEQ ID NO: 85393 - protein, 11 aa, Homo sapiens
  misc_feature: Table A; Target 85393; HLA-A*25:01; TDRD12; ENSG00000173809; TAA
DVIVTTPYSLL

SEQ ID NO: 85394 - protein, 11 aa, Homo sapiens
  misc_feature: Table A; Target 85394; HLA-A*26:01; TDRD12; ENSG00000173809; TAA
DVIVTTPYSLL

SEQ ID NO: 85395 - protein, 8 aa, Homo sapiens
  misc_feature: Table A; Target 85395; HLA-B*08:01; TDRD12; ENSG00000173809; TAA
DVPEASAL

SEQ ID NO: 85396 - protein, 8 aa, Homo sapiens
  misc_feature: Table A; Target 85396; HLA-B*51:01; TDRD12; ENSG00000173809; TAA
DVPEASAL

SEQ ID NO: 85397 - protein, 8 aa, Homo sapiens
  misc_feature: Table A; Target 85397; HLA-C*01:02; TDRD12; ENSG00000173809; TAA
DVPEASAL

SEQ ID NO: 85398 - protein, 10 aa, Homo sapiens
  misc_feature: Table A; Target 85398; HLA-A*26:01; TDRD12; ENSG00000173809; TAA
DVPEASALSQ

SEQ ID NO: 85399 - protein, 11 aa, Homo sapiens
  misc_feature: Table A; Target 85399; HLA-A*03:02; TDRD12; ENSG00000173809; TAA
DVPEASALSQK

SEQ ID NO: 85400 - protein, 11 aa, Homo sapiens
  misc_feature: Table A; Target 85400; HLA-A*11:01; TDRD12; ENSG00000173809; TAA
DVPEASALSQK

SEQ ID NO: 85401 - protein, 11 aa, Homo sapiens
  misc_feature: Table A; Target 85401; HLA-A*25:01; TDRD12; ENSG00000173809; TAA
DVPEASALSQK

SEQ ID NO: 85402 - protein, 11 aa, Homo sapiens
  misc_feature: Table A; Target 85402; HLA-A*26:01; TDRD12; ENSG00000173809; TAA
DVPEASALSQK

SEQ ID NO: 85403 - protein, 11 aa, Homo sapiens
  misc_feature: Table A; Target 85403; HLA-A*33:01; TDRD12; ENSG00000173809; TAA
DVPEASALSQK

SEQ ID NO: 85404 - protein, 11 aa, Homo sapiens
  misc_feature: Table A; Target 85404; HLA-A*33:03; TDRD12; ENSG00000173809; TAA
DVPEASALSQK

SEQ ID NO: 85405 - protein, 11 aa, Homo sapiens
  misc_feature: Table A; Target 85405; HLA-A*68:01; TDRD12; ENSG00000173809; TAA
DVPEASALSQK

SEQ ID NO: 85406 - protein, 11 aa, Homo sapiens
  misc_feature: Table A; Target 85406; HLA-C*07:06; TDRD12; ENSG00000173809; TAA
DVPEASALSQK

SEQ ID NO: 85407 - protein, 8 aa, Homo sapiens
  misc_feature: Table A; Target 85407; HLA-B*08:01; TDRD12; ENSG00000173809; TAA
DYLEKPRL

SEQ ID NO: 85408 - protein, 11 aa, Homo sapiens
  misc_feature: Table A; Target 85408; HLA-A*33:01; TDRD12; ENSG00000173809; TAA
DYLEKPRLNIK

SEQ ID NO: 85409 - protein, 9 aa, Homo sapiens
  misc_feature: Table A; Target 85409; HLA-A*24:02; TDRD12; ENSG00000173809; TAA
DYNVRAEIL

SEQ ID NO: 85410 - protein, 9 aa, Homo sapiens
  misc_feature: Table A; Target 85410; HLA-B*08:01; TDRD12; ENSG00000173809; TAA
DYNVRAEIL

SEQ ID NO: 85411 - protein, 9 aa, Homo sapiens
  misc_feature: Table A; Target 85411; HLA-C*14:02; TDRD12; ENSG00000173809; TAA
DYNVRAEIL

SEQ ID NO: 85412 - protein, 9 aa, Homo sapiens
  misc_feature: Table A; Target 85412; HLA-A*24:02; TDRD12; ENSG00000173809; TAA
DYQKLNSAM

SEQ ID NO: 85413 - protein, 9 aa, Homo sapiens
  misc_feature: Table A; Target 85413; HLA-A*33:01; TDRD12; ENSG00000173809; TAA
DYQKLNSAM

SEQ ID NO: 85414 - protein, 9 aa, Homo sapiens
  misc_feature: Table A; Target 85414; HLA-A*33:03; TDRD12; ENSG00000173809; TAA
DYQKLNSAM

SEQ ID NO: 85415 - protein, 9 aa, Homo sapiens
  misc_feature: Table A; Target 85415; HLA-C*14:02; TDRD12; ENSG00000173809; TAA
DYQKLNSAM

SEQ ID NO: 85416 - protein, 11 aa, Homo sapiens
  misc_feature: Table A; Target 85416; HLA-A*68:01; TDRD12; ENSG00000173809; TAA
EAALYGNVQQV

SEQ ID NO: 85417 - protein, 11 aa, Homo sapiens
  misc_feature: Table A; Target 85417; HLA-A*68:02; TDRD12; ENSG00000173809; TAA
EAALYGNVQQV

SEQ ID NO: 85418 - protein, 10 aa, Homo sapiens
  misc_feature: Table A; Target 85418; HLA-A*33:03; TDRD12; ENSG00000173809; TAA
EAKEDKKAGR

SEQ ID NO: 85419 - protein, 9 aa, Homo sapiens
  misc_feature: Table A; Target 85419; HLA-A*33:01; TDRD12; ENSG00000173809; TAA
EAKNTKLPR

SEQ ID NO: 85420 - protein, 9 aa, Homo sapiens
  misc_feature: Table A; Target 85420; HLA-A*33:03; TDRD12; ENSG00000173809; TAA
EAKNTKLPR

SEQ ID NO: 85421 - protein, 9 aa, Homo sapiens
  misc_feature: Table A; Target 85421; HLA-A*68:01; TDRD12; ENSG00000173809; TAA
EAKNTKLPR

SEQ ID NO: 85422 - protein, 9 aa, Homo sapiens
  misc_feature: Table A; Target 85422; HLA-A*25:01; TDRD12; ENSG00000173809; TAA
EANEQMFAI

SEQ ID NO: 85423 - protein, 9 aa, Homo sapiens
  misc_feature: Table A; Target 85423; HLA-A*33:01; TDRD12; ENSG00000173809; TAA
EANEQMFAI

SEQ ID NO: 85424 - protein, 9 aa, Homo sapiens
  misc_feature: Table A; Target 85424; HLA-A*33:03; TDRD12; ENSG00000173809; TAA
EANEQMFAI

SEQ ID NO: 85425 - protein, 9 aa, Homo sapiens
  misc_feature: Table A; Target 85425; HLA-B*51:01; TDRD12; ENSG00000173809; TAA
EANEQMFAI

SEQ ID NO: 85426 - protein, 8 aa, Homo sapiens
  misc_feature: Table A; Target 85426; HLA-B*37:01; TDRD12; ENSG00000173809; TAA
EDSHGVNF

SEQ ID NO: 85427 - protein, 9 aa, Homo sapiens
  misc_feature: Table A; Target 85427; HLA-A*26:01; TDRD12; ENSG00000173809; TAA
EEAALYGNV

SEQ ID NO: 85428 - protein, 9 aa, Homo sapiens
  misc_feature: Table A; Target 85428; HLA-B*44:02; TDRD12; ENSG00000173809; TAA
EEAALYGNV

SEQ ID NO: 85429 - protein, 9 aa, Homo sapiens
  misc_feature: Table A; Target 85429; HLA-B*44:03; TDRD12; ENSG00000173809; TAA
EEAALYGNV

SEQ ID NO: 85430 - protein, 9 aa, Homo sapiens
  misc_feature: Table A; Target 85430; HLA-B*49:01; TDRD12; ENSG00000173809; TAA
EEAALYGNV

SEQ ID NO: 85431 - protein, 8 aa, Homo sapiens
  misc_feature: Table A; Target 85431; HLA-B*18:01; TDRD12; ENSG00000173809; TAA
EEDTFEVY

SEQ ID NO: 85432 - protein, 8 aa, Homo sapiens
  misc_feature: Table A; Target 85432; HLA-B*44:02; TDRD12; ENSG00000173809; TAA
EEDTFEVY

SEQ ID NO: 85433 - protein, 8 aa, Homo sapiens
  misc_feature: Table A; Target 85433; HLA-B*44:03; TDRD12; ENSG00000173809; TAA
EEDTFEVY

SEQ ID NO: 85434 - protein, 9 aa, Homo sapiens
  misc_feature: Table A; Target 85434; HLA-B*40:01; TDRD12; ENSG00000173809; TAA
EEDTFEVYL

SEQ ID NO: 85435 - protein, 9 aa, Homo sapiens
  misc_feature: Table A; Target 85435; HLA-B*44:02; TDRD12; ENSG00000173809; TAA
EEDTFEVYL

SEQ ID NO: 85436 - protein, 9 aa, Homo sapiens
  misc_feature: Table A; Target 85436; HLA-B*49:01; TDRD12; ENSG00000173809; TAA
EEDTFEVYL

SEQ ID NO: 85437 - protein, 10 aa, Homo sapiens
  misc_feature: Table A; Target 85437; HLA-B*44:02; TDRD12; ENSG00000173809; TAA
EEDTFEVYLY

SEQ ID NO: 85438 - protein, 10 aa, Homo sapiens
  misc_feature: Table A; Target 85438; HLA-B*44:03; TDRD12; ENSG00000173809; TAA
EEDTFEVYLY

SEQ ID NO: 85439 - protein, 8 aa, Homo sapiens
  misc_feature: Table A; Target 85439; HLA-B*18:01; TDRD12; ENSG00000173809; TAA
EEGQVCVV

SEQ ID NO: 85440 - protein, 8 aa, Homo sapiens
  misc_feature: Table A; Target 85440; HLA-B*49:01; TDRD12; ENSG00000173809; TAA
EEGQVCVV

SEQ ID NO: 85441 - protein, 9 aa, Homo sapiens
  misc_feature: Table A; Target 85441; HLA-A*25:01; TDRD12; ENSG00000173809; TAA
EEGQVCVVY

SEQ ID NO: 85442 - protein, 9 aa, Homo sapiens
  misc_feature: Table A; Target 85442; HLA-A*26:01; TDRD12; ENSG00000173809; TAA
EEGQVCVVY

SEQ ID NO: 85443 - protein, 9 aa, Homo sapiens
  misc_feature: Table A; Target 85443; HLA-A*30:01; TDRD12; ENSG00000173809; TAA
EEGQVCVVY

SEQ ID NO: 85444 - protein, 9 aa, Homo sapiens
  misc_feature: Table A; Target 85444; HLA-B*18:01; TDRD12; ENSG00000173809; TAA
EEGQVCVVY

SEQ ID NO: 85445 - protein, 9 aa, Homo sapiens
  misc_feature: Table A; Target 85445; HLA-B*27:02; TDRD12; ENSG00000173809; TAA
EEGQVCVVY

SEQ ID NO: 85446 - protein, 9 aa, Homo sapiens
  misc_feature: Table A; Target 85446; HLA-B*35:01; TDRD12; ENSG00000173809; TAA
EEGQVCVVY

SEQ ID NO: 85447 - protein, 9 aa, Homo sapiens
  misc_feature: Table A; Target 85447; HLA-B*40:01; TDRD12; ENSG00000173809; TAA
EEGQVCVVY

SEQ ID NO: 85448 - protein, 9 aa, Homo sapiens
  misc_feature: Table A; Target 85448; HLA-B*44:02; TDRD12; ENSG00000173809; TAA
EEGQVCVVY

SEQ ID NO: 85449 - protein, 9 aa, Homo sapiens
  misc_feature: Table A; Target 85449; HLA-B*44:03; TDRD12; ENSG00000173809; TAA
EEGQVCVVY

SEQ ID NO: 85450 - protein, 9 aa, Homo sapiens
  misc_feature: Table A; Target 85450; HLA-C*07:01; TDRD12; ENSG00000173809; TAA
EEGQVCVVY

SEQ ID NO: 85451 - protein, 9 aa, Homo sapiens
  misc_feature: Table A; Target 85451; HLA-C*07:06; TDRD12; ENSG00000173809; TAA
EEGQVCVVY

SEQ ID NO: 85452 - protein, 9 aa, Homo sapiens
  misc_feature: Table A; Target 85452; HLA-C*16:04; TDRD12; ENSG00000173809; TAA
EEGQVCVVY

SEQ ID NO: 85453 - protein, 10 aa, Homo sapiens
  misc_feature: Table A; Target 85453; HLA-B*27:02; TDRD12; ENSG00000173809; TAA
EESLSQTPPR

SEQ ID NO: 85454 - protein, 10 aa, Homo sapiens
  misc_feature: Table A; Target 85454; HLA-A*25:01; TDRD12; ENSG00000173809; TAA
EFIDEGRTGL

SEQ ID NO: 85455 - protein, 10 aa, Homo sapiens
  misc_feature: Table A; Target 85455; HLA-A*26:01; TDRD12; ENSG00000173809; TAA
EFIDEGRTGL

SEQ ID NO: 85456 - protein, 9 aa, Homo sapiens
  misc_feature: Table A; Target 85456; HLA-A*33:03; TDRD12; ENSG00000173809; TAA
EFTAGVLEA

SEQ ID NO: 85457 - protein, 9 aa, Homo sapiens
  misc_feature: Table A; Target 85457; HLA-C*14:02; TDRD12; ENSG00000173809; TAA
EFTAGVLEA

SEQ ID NO: 85458 - protein, 10 aa, Homo sapiens
  misc_feature: Table A; Target 85458; HLA-A*33:03; TDRD12; ENSG00000173809; TAA
EFTAGVLEAK

SEQ ID NO: 85459 - protein, 9 aa, Homo sapiens
  misc_feature: Table A; Target 85459; HLA-A*31:01; TDRD12; ENSG00000173809; TAA
EGRTGLVTR

SEQ ID NO: 85460 - protein, 9 aa, Homo sapiens
  misc_feature: Table A; Target 85460; HLA-A*33:01; TDRD12; ENSG00000173809; TAA
EGRTGLVTR

SEQ ID NO: 85461 - protein, 9 aa, Homo sapiens
  misc_feature: Table A; Target 85461; HLA-A*33:03; TDRD12; ENSG00000173809; TAA
EGRTGLVTR

SEQ ID NO: 85462 - protein, 9 aa, Homo sapiens
  misc_feature: Table A; Target 85462; HLA-A*68:01; TDRD12; ENSG00000173809; TAA
EGRTGLVTR

SEQ ID NO: 85463 - protein, 9 aa, Homo sapiens
  misc_feature: Table A; Target 85463; HLA-C*07:06; TDRD12; ENSG00000173809; TAA
EGRTGLVTR

SEQ ID NO: 85464 - protein, 9 aa, Homo sapiens
  misc_feature: Table A; Target 85464; HLA-B*38:01; TDRD12; ENSG00000173809; TAA
EHIEQLKKL

SEQ ID NO: 85465 - protein, 10 aa, Homo sapiens
  misc_feature: Table A; Target 85465; HLA-A*33:03; TDRD12; ENSG00000173809; TAA
EIEWNPKVTR

SEQ ID NO: 85466 - protein, 10 aa, Homo sapiens
  misc_feature: Table A; Target 85466; HLA-A*68:01; TDRD12; ENSG00000173809; TAA
EIEWNPKVTR

SEQ ID NO: 85467 - protein, 9 aa, Homo sapiens
  misc_feature: Table A; Target 85467; HLA-A*26:01; TDRD12; ENSG00000173809; TAA
EILSMGMGI

SEQ ID NO: 85468 - protein, 11 aa, Homo sapiens
  misc_feature: Table A; Target 85468; HLA-A*33:01; TDRD12; ENSG00000173809; TAA
ELLGEYSMSSR

SEQ ID NO: 85469 - protein, 11 aa, Homo sapiens
  misc_feature: Table A; Target 85469; HLA-A*33:03; TDRD12; ENSG00000173809; TAA
ELLGEYSMSSR

SEQ ID NO: 85470 - protein, 11 aa, Homo sapiens
  misc_feature: Table A; Target 85470; HLA-A*68:01; TDRD12; ENSG00000173809; TAA
ELLGEYSMSSR

SEQ ID NO: 85471 - protein, 9 aa, Homo sapiens
  misc_feature: Table A; Target 85471; HLA-A*02:01; TDRD12; ENSG00000173809; TAA
ELYEFTAGV

SEQ ID NO: 85472 - protein, 9 aa, Homo sapiens
  misc_feature: Table A; Target 85472; HLA-A*02:03; TDRD12; ENSG00000173809; TAA
ELYEFTAGV

SEQ ID NO: 85473 - protein, 9 aa, Homo sapiens
  misc_feature: Table A; Target 85473; HLA-A*02:07; TDRD12; ENSG00000173809; TAA
ELYEFTAGV

SEQ ID NO: 85474 - protein, 9 aa, Homo sapiens
  misc_feature: Table A; Target 85474; HLA-A*26:01; TDRD12; ENSG00000173809; TAA
ELYEFTAGV

SEQ ID NO: 85475 - protein, 9 aa, Homo sapiens
  misc_feature: Table A; Target 85475; HLA-A*68:02; TDRD12; ENSG00000173809; TAA
ELYEFTAGV

SEQ ID NO: 85476 - protein, 10 aa, Homo sapiens
  misc_feature: Table A; Target 85476; HLA-A*25:01; TDRD12; ENSG00000173809; TAA
ELYEFTAGVL

SEQ ID NO: 85477 - protein, 10 aa, Homo sapiens
  misc_feature: Table A; Target 85477; HLA-A*26:01; TDRD12; ENSG00000173809; TAA
ELYEFTAGVL

SEQ ID NO: 85478 - protein, 9 aa, Homo sapiens
  misc_feature: Table A; Target 85478; HLA-A*02:03; TDRD12; ENSG00000173809; TAA
EMIFNLQNV

SEQ ID NO: 85479 - protein, 9 aa, Homo sapiens
  misc_feature: Table A; Target 85479; HLA-A*26:01; TDRD12; ENSG00000173809; TAA
EMIFNLQNV

SEQ ID NO: 85480 - protein, 9 aa, Homo sapiens
  misc_feature: Table A; Target 85480; HLA-A*68:02; TDRD12; ENSG00000173809; TAA
EMIFNLQNV

SEQ ID NO: 85481 - protein, 11 aa, Homo sapiens
  misc_feature: Table A; Target 85481; HLA-A*33:03; TDRD12; ENSG00000173809; TAA
ENQKPGGYLVF

SEQ ID NO: 85482 - protein, 10 aa, Homo sapiens
  misc_feature: Table A; Target 85482; HLA-A*24:02; TDRD12; ENSG00000173809; TAA
EQMFAILDNF

SEQ ID NO: 85483 - protein, 10 aa, Homo sapiens
  misc_feature: Table A; Target 85483; HLA-A*25:01; TDRD12; ENSG00000173809; TAA
EQMFAILDNF

SEQ ID NO: 85484 - protein, 10 aa, Homo sapiens
  misc_feature: Table A; Target 85484; HLA-B*38:01; TDRD12; ENSG00000173809; TAA
EQMFAILDNF

SEQ ID NO: 85485 - protein, 10 aa, Homo sapiens
  misc_feature: Table A; Target 85485; HLA-B*44:02; TDRD12; ENSG00000173809; TAA
EQMFAILDNF

SEQ ID NO: 85486 - protein, 9 aa, Homo sapiens
  misc_feature: Table A; Target 85486; HLA-B*38:01; TDRD12; ENSG00000173809; TAA
ERESAPHQI

SEQ ID NO: 85487 - protein, 8 aa, Homo sapiens
  misc_feature: Table A; Target 85487; HLA-C*12:03; TDRD12; ENSG00000173809; TAA
ESAPHQIV

SEQ ID NO: 85488 - protein, 9 aa, Homo sapiens
  misc_feature: Table A; Target 85488; HLA-B*54:01; TDRD12; ENSG00000173809; TAA
ESAPHQIVA

SEQ ID NO: 85489 - protein, 10 aa, Homo sapiens
  misc_feature: Table A; Target 85489; HLA-A*25:01; TDRD12; ENSG00000173809; TAA
ESAPHQIVAV

SEQ ID NO: 85490 - protein, 10 aa, Homo sapiens
  misc_feature: Table A; Target 85490; HLA-A*26:01; TDRD12; ENSG00000173809; TAA
ESAPHQIVAV

SEQ ID NO: 85491 - protein, 10 aa, Homo sapiens
  misc_feature: Table A; Target 85491; HLA-A*33:03; TDRD12; ENSG00000173809; TAA
ESAPHQIVAV

SEQ ID NO: 85492 - protein, 10 aa, Homo sapiens
  misc_feature: Table A; Target 85492; HLA-A*68:01; TDRD12; ENSG00000173809; TAA
ESAPHQIVAV

SEQ ID NO: 85493 - protein, 10 aa, Homo sapiens
  misc_feature: Table A; Target 85493; HLA-A*68:02; TDRD12; ENSG00000173809; TAA
ESAPHQIVAV

SEQ ID NO: 85494 - protein, 9 aa, Homo sapiens
  misc_feature: Table A; Target 85494; HLA-A*33:01; TDRD12; ENSG00000173809; TAA
ESFMQLPYR

SEQ ID NO: 85495 - protein, 9 aa, Homo sapiens
  misc_feature: Table A; Target 85495; HLA-A*33:03; TDRD12; ENSG00000173809; TAA
ESFMQLPYR

SEQ ID NO: 85496 - protein, 9 aa, Homo sapiens
  misc_feature: Table A; Target 85496; HLA-A*68:01; TDRD12; ENSG00000173809; TAA
ESFMQLPYR

SEQ ID NO: 85497 - protein, 10 aa, Homo sapiens
  misc_feature: Table A; Target 85497; HLA-A*33:03; TDRD12; ENSG00000173809; TAA
ESKTSSENQK

SEQ ID NO: 85498 - protein, 9 aa, Homo sapiens
  misc_feature: Table A; Target 85498; HLA-A*11:01; TDRD12; ENSG00000173809; TAA
ESLSQTPPR

SEQ ID NO: 85499 - protein, 9 aa, Homo sapiens
  misc_feature: Table A; Target 85499; HLA-A*33:01; TDRD12; ENSG00000173809; TAA
ESLSQTPPR

SEQ ID NO: 85500 - protein, 9 aa, Homo sapiens
  misc_feature: Table A; Target 85500; HLA-A*33:03; TDRD12; ENSG00000173809; TAA
ESLSQTPPR

SEQ ID NO: 85501 - protein, 9 aa, Homo sapiens
  misc_feature: Table A; Target 85501; HLA-A*68:01; TDRD12; ENSG00000173809; TAA
ESLSQTPPR

SEQ ID NO: 85502 - protein, 9 aa, Homo sapiens
  misc_feature: Table A; Target 85502; HLA-C*07:06; TDRD12; ENSG00000173809; TAA
ESLSQTPPR

SEQ ID NO: 85503 - protein, 9 aa, Homo sapiens
  misc_feature: Table A; Target 85503; HLA-A*31:01; TDRD12; ENSG00000173809; TAA
ESNPLLYLL

SEQ ID NO: 85504 - protein, 9 aa, Homo sapiens
  misc_feature: Table A; Target 85504; HLA-A*33:01; TDRD12; ENSG00000173809; TAA
ESNPLLYLL

SEQ ID NO: 85505 - protein, 9 aa, Homo sapiens
  misc_feature: Table A; Target 85505; HLA-A*33:03; TDRD12; ENSG00000173809; TAA
ESNPLLYLL

SEQ ID NO: 85506 - protein, 9 aa, Homo sapiens
  misc_feature: Table A; Target 85506; HLA-A*68:02; TDRD12; ENSG00000173809; TAA
ESNPLLYLL

SEQ ID NO: 85507 - protein, 9 aa, Homo sapiens
  misc_feature: Table A; Target 85507; HLA-B*57:01; TDRD12; ENSG00000173809; TAA
ESNPLLYLL

SEQ ID NO: 85508 - protein, 9 aa, Homo sapiens
  misc_feature: Table A; Target 85508; HLA-A*01:01; TDRD12; ENSG00000173809; TAA
ESSSIFCLK

SEQ ID NO: 85509 - protein, 9 aa, Homo sapiens
  misc_feature: Table A; Target 85509; HLA-A*03:02; TDRD12; ENSG00000173809; TAA
ESSSIFCLK

SEQ ID NO: 85510 - protein, 9 aa, Homo sapiens
  misc_feature: Table A; Target 85510; HLA-A*11:01; TDRD12; ENSG00000173809; TAA
ESSSIFCLK

SEQ ID NO: 85511 - protein, 9 aa, Homo sapiens
  misc_feature: Table A; Target 85511; HLA-A*33:01; TDRD12; ENSG00000173809; TAA
ESSSIFCLK

SEQ ID NO: 85512 - protein, 9 aa, Homo sapiens
  misc_feature: Table A; Target 85512; HLA-A*33:03; TDRD12; ENSG00000173809; TAA
ESSSIFCLK

SEQ ID NO: 85513 - protein, 9 aa, Homo sapiens
  misc_feature: Table A; Target 85513; HLA-A*68:01; TDRD12; ENSG00000173809; TAA
ESSSIFCLK

SEQ ID NO: 85514 - protein, 9 aa, Homo sapiens
  misc_feature: Table A; Target 85514; HLA-A*68:02; TDRD12; ENSG00000173809; TAA
ESSSIFCLK

SEQ ID NO: 85515 - protein, 9 aa, Homo sapiens
  misc_feature: Table A; Target 85515; HLA-B*27:02; TDRD12; ENSG00000173809; TAA
ESSSIFCLK

SEQ ID NO: 85516 - protein, 9 aa, Homo sapiens
  misc_feature: Table A; Target 85516; HLA-C*07:06; TDRD12; ENSG00000173809; TAA
ESSSIFCLK

SEQ ID NO: 85517 - protein, 9 aa, Homo sapiens
  misc_feature: Table A; Target 85517; HLA-A*68:01; TDRD12; ENSG00000173809; TAA
ESSVYWPAK

SEQ ID NO: 85518 - protein, 10 aa, Homo sapiens
  misc_feature: Table A; Target 85518; HLA-A*68:01; TDRD12; ENSG00000173809; TAA
ESSVYWPAKR

SEQ ID NO: 85519 - protein, 9 aa, Homo sapiens
  misc_feature: Table A; Target 85519; HLA-B*54:01; TDRD12; ENSG00000173809; TAA
ESYSWPPIA

SEQ ID NO: 85520 - protein, 10 aa, Homo sapiens
  misc_feature: Table A; Target 85520; HLA-A*31:01; TDRD12; ENSG00000173809; TAA
ESYSWPPIAR

SEQ ID NO: 85521 - protein, 10 aa, Homo sapiens
  misc_feature: Table A; Target 85521; HLA-A*33:01; TDRD12; ENSG00000173809; TAA
ESYSWPPIAR

SEQ ID NO: 85522 - protein, 10 aa, Homo sapiens
  misc_feature: Table A; Target 85522; HLA-A*33:03; TDRD12; ENSG00000173809; TAA
ESYSWPPIAR

SEQ ID NO: 85523 - protein, 10 aa, Homo sapiens
  misc_feature: Table A; Target 85523; HLA-A*68:01; TDRD12; ENSG00000173809; TAA
ESYSWPPIAR

SEQ ID NO: 85524 - protein, 10 aa, Homo sapiens
  misc_feature: Table A; Target 85524; HLA-A*68:02; TDRD12; ENSG00000173809; TAA
ESYSWPPIAR

SEQ ID NO: 85525 - protein, 10 aa, Homo sapiens
  misc_feature: Table A; Target 85525; HLA-C*07:06; TDRD12; ENSG00000173809; TAA
ESYSWPPIAR

SEQ ID NO: 85526 - protein, 8 aa, Homo sapiens
  misc_feature: Table A; Target 85526; HLA-C*05:01; TDRD12; ENSG00000173809; TAA
ETDLPRKL

SEQ ID NO: 85527 - protein, 9 aa, Homo sapiens
  misc_feature: Table A; Target 85527; HLA-A*25:01; TDRD12; ENSG00000173809; TAA
EVNQKEDAW

SEQ ID NO: 85528 - protein, 9 aa, Homo sapiens
  misc_feature: Table A; Target 85528; HLA-A*33:03; TDRD12; ENSG00000173809; TAA
EVNQKEDAW

SEQ ID NO: 85529 - protein, 8 aa, Homo sapiens
  misc_feature: Table A; Target 85529; HLA-B*51:01; TDRD12; ENSG00000173809; TAA
EVYLYVTI

SEQ ID NO: 85530 - protein, 9 aa, Homo sapiens
  misc_feature: Table A; Target 85530; HLA-A*03:01; TDRD12; ENSG00000173809; TAA
EVYLYVTIK

SEQ ID NO: 85531 - protein, 9 aa, Homo sapiens
  misc_feature: Table A; Target 85531; HLA-A*33:01; TDRD12; ENSG00000173809; TAA
EVYLYVTIK

SEQ ID NO: 85532 - protein, 9 aa, Homo sapiens
  misc_feature: Table A; Target 85532; HLA-A*33:03; TDRD12; ENSG00000173809; TAA
EVYLYVTIK

SEQ ID NO: 85533 - protein, 9 aa, Homo sapiens
  misc_feature: Table A; Target 85533; HLA-A*68:01; TDRD12; ENSG00000173809; TAA
EVYLYVTIK

SEQ ID NO: 85534 - protein, 9 aa, Homo sapiens
  misc_feature: Table A; Target 85534; HLA-C*04:01; TDRD12; ENSG00000173809; TAA
EYDEKNSCV

SEQ ID NO: 85535 - protein, 8 aa, Homo sapiens
  misc_feature: Table A; Target 85535; HLA-B*54:01; TDRD12; ENSG00000173809; TAA
FAKNIPVK

SEQ ID NO: 85536 - protein, 8 aa, Homo sapiens
  misc_feature: Table A; Target 85536; HLA-C*12:03; TDRD12; ENSG00000173809; TAA
FAKNIPVK

SEQ ID NO: 85537 - protein, 8 aa, Homo sapiens
  misc_feature: Table A; Target 85537; HLA-C*16:01; TDRD12; ENSG00000173809; TAA
FAKNIPVK

SEQ ID NO: 85538 - protein, 9 aa, Homo sapiens
  misc_feature: Table A; Target 85538; HLA-A*30:01; TDRD12; ENSG00000173809; TAA
FELLGEYSM

SEQ ID NO: 85539 - protein, 9 aa, Homo sapiens
  misc_feature: Table A; Target 85539; HLA-B*18:01; TDRD12; ENSG00000173809; TAA
FELLGEYSM

SEQ ID NO: 85540 - protein, 9 aa, Homo sapiens
  misc_feature: Table A; Target 85540; HLA-B*35:03; TDRD12; ENSG00000173809; TAA
FELLGEYSM

SEQ ID NO: 85541 - protein, 9 aa, Homo sapiens
  misc_feature: Table A; Target 85541; HLA-B*37:01; TDRD12; ENSG00000173809; TAA
FELLGEYSM

SEQ ID NO: 85542 - protein, 9 aa, Homo sapiens
  misc_feature: Table A; Target 85542; HLA-B*40:01; TDRD12; ENSG00000173809; TAA
FELLGEYSM

SEQ ID NO: 85543 - protein, 9 aa, Homo sapiens
  misc_feature: Table A; Target 85543; HLA-B*40:02; TDRD12; ENSG00000173809; TAA
FELLGEYSM

SEQ ID NO: 85544 - protein, 9 aa, Homo sapiens
  misc_feature: Table A; Target 85544; HLA-B*49:01; TDRD12; ENSG00000173809; TAA
FELLGEYSM

SEQ ID NO: 85545 - protein, 9 aa, Homo sapiens
  misc_feature: Table A; Target 85545; HLA-B*49:01; TDRD12; ENSG00000173809; TAA
FEVYLYVTI

SEQ ID NO: 85546 - protein, 9 aa, Homo sapiens
  misc_feature: Table A; Target 85546; HLA-B*39:01; TDRD12; ENSG00000173809; TAA
FHAEQGSPA

SEQ ID NO: 85547 - protein, 11 aa, Homo sapiens
  misc_feature: Table A; Target 85547; HLA-B*38:01; TDRD12; ENSG00000173809; TAA
FHTLPPQAVEF

SEQ ID NO: 85548 - protein, 9 aa, Homo sapiens
  misc_feature: Table A; Target 85548; HLA-A*01:01; TDRD12; ENSG00000173809; TAA
FIDEGRTGL

SEQ ID NO: 85549 - protein, 9 aa, Homo sapiens
  misc_feature: Table A; Target 85549; HLA-A*02:01; TDRD12; ENSG00000173809; TAA
FIDEGRTGL

SEQ ID NO: 85550 - protein, 9 aa, Homo sapiens
  misc_feature: Table A; Target 85550; HLA-A*02:07; TDRD12; ENSG00000173809; TAA
FIDEGRTGL

SEQ ID NO: 85551 - protein, 9 aa, Homo sapiens
  misc_feature: Table A; Target 85551; HLA-B*07:02; TDRD12; ENSG00000173809; TAA
FIDEGRTGL

SEQ ID NO: 85552 - protein, 9 aa, Homo sapiens
  misc_feature: Table A; Target 85552; HLA-B*35:03; TDRD12; ENSG00000173809; TAA
FIDEGRTGL

SEQ ID NO: 85553 - protein, 9 aa, Homo sapiens
  misc_feature: Table A; Target 85553; HLA-B*38:01; TDRD12; ENSG00000173809; TAA
FIDEGRTGL

SEQ ID NO: 85554 - protein, 9 aa, Homo sapiens
  misc_feature: Table A; Target 85554; HLA-B*39:01; TDRD12; ENSG00000173809; TAA
FIDEGRTGL

SEQ ID NO: 85555 - protein, 9 aa, Homo sapiens
  misc_feature: Table A; Target 85555; HLA-B*40:01; TDRD12; ENSG00000173809; TAA
FIDEGRTGL

SEQ ID NO: 85556 - protein, 9 aa, Homo sapiens
  misc_feature: Table A; Target 85556; HLA-B*55:01; TDRD12; ENSG00000173809; TAA
FIDEGRTGL

SEQ ID NO: 85557 - protein, 9 aa, Homo sapiens
  misc_feature: Table A; Target 85557; HLA-C*01:02; TDRD12; ENSG00000173809; TAA
FIDEGRTGL

SEQ ID NO: 85558 - protein, 9 aa, Homo sapiens
  misc_feature: Table A; Target 85558; HLA-C*02:02; TDRD12; ENSG00000173809; TAA
FIDEGRTGL

SEQ ID NO: 85559 - protein, 9 aa, Homo sapiens
  misc_feature: Table A; Target 85559; HLA-C*03:03; TDRD12; ENSG00000173809; TAA
FIDEGRTGL

SEQ ID NO: 85560 - protein, 9 aa, Homo sapiens
  misc_feature: Table A; Target 85560; HLA-C*03:04; TDRD12; ENSG00000173809; TAA
FIDEGRTGL

SEQ ID NO: 85561 - protein, 9 aa, Homo sapiens
  misc_feature: Table A; Target 85561; HLA-C*04:01; TDRD12; ENSG00000173809; TAA
FIDEGRTGL

SEQ ID NO: 85562 - protein, 9 aa, Homo sapiens
  misc_feature: Table A; Target 85562; HLA-C*05:01; TDRD12; ENSG00000173809; TAA
FIDEGRTGL

SEQ ID NO: 85563 - protein, 9 aa, Homo sapiens
  misc_feature: Table A; Target 85563; HLA-C*07:04; TDRD12; ENSG00000173809; TAA
FIDEGRTGL

SEQ ID NO: 85564 - protein, 9 aa, Homo sapiens
  misc_feature: Table A; Target 85564; HLA-C*16:01; TDRD12; ENSG00000173809; TAA
FIDEGRTGL

SEQ ID NO: 85565 - protein, 10 aa, Homo sapiens
  misc_feature: Table A; Target 85565; HLA-A*01:01; TDRD12; ENSG00000173809; TAA
FIDEGRTGLV

SEQ ID NO: 85566 - protein, 10 aa, Homo sapiens
  misc_feature: Table A; Target 85566; HLA-A*02:01; TDRD12; ENSG00000173809; TAA
FIDEGRTGLV

SEQ ID NO: 85567 - protein, 10 aa, Homo sapiens
  misc_feature: Table A; Target 85567; HLA-A*02:07; TDRD12; ENSG00000173809; TAA
FIDEGRTGLV

SEQ ID NO: 85568 - protein, 10 aa, Homo sapiens
  misc_feature: Table A; Target 85568; HLA-C*05:01; TDRD12; ENSG00000173809; TAA
FIDEGRTGLV

SEQ ID NO: 85569 - protein, 9 aa, Homo sapiens
  misc_feature: Table A; Target 85569; HLA-A*01:01; TDRD12; ENSG00000173809; TAA
FIFELLGEY

SEQ ID NO: 85570 - protein, 9 aa, Homo sapiens
  misc_feature: Table A; Target 85570; HLA-A*26:01; TDRD12; ENSG00000173809; TAA
FIFELLGEY

SEQ ID NO: 85571 - protein, 9 aa, Homo sapiens
  misc_feature: Table A; Target 85571; HLA-A*29:02; TDRD12; ENSG00000173809; TAA
FIFELLGEY

SEQ ID NO: 85572 - protein, 9 aa, Homo sapiens
  misc_feature: Table A; Target 85572; HLA-A*30:02; TDRD12; ENSG00000173809; TAA
FIFELLGEY

SEQ ID NO: 85573 - protein, 9 aa, Homo sapiens
  misc_feature: Table A; Target 85573; HLA-B*35:01; TDRD12; ENSG00000173809; TAA
FIFELLGEY

SEQ ID NO: 85574 - protein, 9 aa, Homo sapiens
  misc_feature: Table A; Target 85574; HLA-B*46:01; TDRD12; ENSG00000173809; TAA
FIFELLGEY

SEQ ID NO: 85575 - protein, 9 aa, Homo sapiens
  misc_feature: Table A; Target 85575; HLA-C*02:02; TDRD12; ENSG00000173809; TAA
FIFELLGEY

SEQ ID NO: 85576 - protein, 10 aa, Homo sapiens
  misc_feature: Table A; Target 85576; HLA-C*01:02; TDRD12; ENSG00000173809; TAA
FIPSQAQKTL

SEQ ID NO: 85577 - protein, 11 aa, Homo sapiens
  misc_feature: Table A; Target 85577; HLA-A*02:07; TDRD12; ENSG00000173809; TAA
FLDHDVDYQKL

SEQ ID NO: 85578 - protein, 9 aa, Homo sapiens
  misc_feature: Table A; Target 85578; HLA-A*01:01; TDRD12; ENSG00000173809; TAA
FLEANEQMF

SEQ ID NO: 85579 - protein, 9 aa, Homo sapiens
  misc_feature: Table A; Target 85579; HLA-B*38:01; TDRD12; ENSG00000173809; TAA
FLEANEQMF

SEQ ID NO: 85580 - protein, 9 aa, Homo sapiens
  misc_feature: Table A; Target 85580; HLA-C*05:01; TDRD12; ENSG00000173809; TAA
FLEANEQMF

SEQ ID NO: 85581 - protein, 9 aa, Homo sapiens
  misc_feature: Table A; Target 85581; HLA-C*07:04; TDRD12; ENSG00000173809; TAA
FLEANEQMF

SEQ ID NO: 85582 - protein, 9 aa, Homo sapiens
  misc_feature: Table A; Target 85582; HLA-A*02:01; TDRD12; ENSG00000173809; TAA
FLNPDPLRA

SEQ ID NO: 85583 - protein, 9 aa, Homo sapiens
  misc_feature: Table A; Target 85583; HLA-A*02:03; TDRD12; ENSG00000173809; TAA
FLNPDPLRA

SEQ ID NO: 85584 - protein, 9 aa, Homo sapiens
  misc_feature: Table A; Target 85584; HLA-A*02:04; TDRD12; ENSG00000173809; TAA
FLNPDPLRA

SEQ ID NO: 85585 - protein, 9 aa, Homo sapiens
  misc_feature: Table A; Target 85585; HLA-A*02:07; TDRD12; ENSG00000173809; TAA
FLNPDPLRA

SEQ ID NO: 85586 - protein, 9 aa, Homo sapiens
  misc_feature: Table A; Target 85586; HLA-A*29:02; TDRD12; ENSG00000173809; TAA
FLNPDPLRA

SEQ ID NO: 85587 - protein, 9 aa, Homo sapiens
  misc_feature: Table A; Target 85587; HLA-A*30:01; TDRD12; ENSG00000173809; TAA
FLNPDPLRA

SEQ ID NO: 85588 - protein, 9 aa, Homo sapiens
  misc_feature: Table A; Target 85588; HLA-B*13:02; TDRD12; ENSG00000173809; TAA
FLNPDPLRA

SEQ ID NO: 85589 - protein, 9 aa, Homo sapiens
  misc_feature: Table A; Target 85589; HLA-B*54:01; TDRD12; ENSG00000173809; TAA
FLNPDPLRA

SEQ ID NO: 85590 - protein, 9 aa, Homo sapiens
  misc_feature: Table A; Target 85590; HLA-B*55:01; TDRD12; ENSG00000173809; TAA
FLNPDPLRA

SEQ ID NO: 85591 - protein, 9 aa, Homo sapiens
  misc_feature: Table A; Target 85591; HLA-C*02:02; TDRD12; ENSG00000173809; TAA
FLNPDPLRA

SEQ ID NO: 85592 - protein, 9 aa, Homo sapiens
  misc_feature: Table A; Target 85592; HLA-C*14:02; TDRD12; ENSG00000173809; TAA
FLNPDPLRA

SEQ ID NO: 85593 - protein, 10 aa, Homo sapiens
  misc_feature: Table A; Target 85593; HLA-A*02:03; TDRD12; ENSG00000173809; TAA
FLQGKDVQGM

SEQ ID NO: 85594 - protein, 9 aa, Homo sapiens
  misc_feature: Table A; Target 85594; HLA-A*02:01; TDRD12; ENSG00000173809; TAA
FLVDFAKNI

SEQ ID NO: 85595 - protein, 9 aa, Homo sapiens
  misc_feature: Table A; Target 85595; HLA-A*02:03; TDRD12; ENSG00000173809; TAA
FLVDFAKNI

SEQ ID NO: 85596 - protein, 9 aa, Homo sapiens
  misc_feature: Table A; Target 85596; HLA-A*02:04; TDRD12; ENSG00000173809; TAA
FLVDFAKNI

SEQ ID NO: 85597 - protein, 9 aa, Homo sapiens
  misc_feature: Table A; Target 85597; HLA-A*02:07; TDRD12; ENSG00000173809; TAA
FLVDFAKNI

SEQ ID NO: 85598 - protein, 9 aa, Homo sapiens
  misc_feature: Table A; Target 85598; HLA-A*68:02; TDRD12; ENSG00000173809; TAA
FLVDFAKNI

SEQ ID NO: 85599 - protein, 9 aa, Homo sapiens
  misc_feature: Table A; Target 85599; HLA-B*13:02; TDRD12; ENSG00000173809; TAA
FLVDFAKNI

SEQ ID NO: 85600 - protein, 9 aa, Homo sapiens
  misc_feature: Table A; Target 85600; HLA-C*02:02; TDRD12; ENSG00000173809; TAA
FLVDFAKNI

SEQ ID NO: 85601 - protein, 11 aa, Homo sapiens
  misc_feature: Table A; Target 85601; HLA-A*02:01; TDRD12; ENSG00000173809; TAA
FLVDFAKNIPV

SEQ ID NO: 85602 - protein, 11 aa, Homo sapiens
  misc_feature: Table A; Target 85602; HLA-A*02:03; TDRD12; ENSG00000173809; TAA
FLVDFAKNIPV

SEQ ID NO: 85603 - protein, 11 aa, Homo sapiens
  misc_feature: Table A; Target 85603; HLA-A*02:04; TDRD12; ENSG00000173809; TAA
FLVDFAKNIPV

SEQ ID NO: 85604 - protein, 11 aa, Homo sapiens
  misc_feature: Table A; Target 85604; HLA-A*68:02; TDRD12; ENSG00000173809; TAA
FLVDFAKNIPV

SEQ ID NO: 85605 - protein, 9 aa, Homo sapiens
  misc_feature: Table A; Target 85605; HLA-A*02:07; TDRD12; ENSG00000173809; TAA
FMNDPYIVI

SEQ ID NO: 85606 - protein, 9 aa, Homo sapiens
  misc_feature: Table A; Target 85606; HLA-A*23:01; TDRD12; ENSG00000173809; TAA
FMNDPYIVI

SEQ ID NO: 85607 - protein, 9 aa, Homo sapiens
  misc_feature: Table A; Target 85607; HLA-A*24:02; TDRD12; ENSG00000173809; TAA
FMNDPYIVI

SEQ ID NO: 85608 - protein, 9 aa, Homo sapiens
  misc_feature: Table A; Target 85608; HLA-C*02:02; TDRD12; ENSG00000173809; TAA
FMNDPYIVI

SEQ ID NO: 85609 - protein, 11 aa, Homo sapiens
  misc_feature: Table A; Target 85609; HLA-A*02:04; TDRD12; ENSG00000173809; TAA
FMNDPYIVITA

SEQ ID NO: 85610 - protein, 11 aa, Homo sapiens
  misc_feature: Table A; Target 85610; HLA-A*02:07; TDRD12; ENSG00000173809; TAA
FMNDPYIVITA

SEQ ID NO: 85611 - protein, 8 aa, Homo sapiens
  misc_feature: Table A; Target 85611; HLA-B*08:01; TDRD12; ENSG00000173809; TAA
FNKLNPAL

SEQ ID NO: 85612 - protein, 8 aa, Homo sapiens
  misc_feature: Table A; Target 85612; HLA-B*40:02; TDRD12; ENSG00000173809; TAA
FNKLNPAL

SEQ ID NO: 85613 - protein, 10 aa, Homo sapiens
  misc_feature: Table A; Target 85613; HLA-A*25:01; TDRD12; ENSG00000173809; TAA
FPAQSLQHTW

SEQ ID NO: 85614 - protein, 10 aa, Homo sapiens
  misc_feature: Table A; Target 85614; HLA-A*33:03; TDRD12; ENSG00000173809; TAA
FPAQSLQHTW

SEQ ID NO: 85615 - protein, 10 aa, Homo sapiens
  misc_feature: Table A; Target 85615; HLA-A*68:01; TDRD12; ENSG00000173809; TAA
FPAQSLQHTW

SEQ ID NO: 85616 - protein, 10 aa, Homo sapiens
  misc_feature: Table A; Target 85616; HLA-B*27:02; TDRD12; ENSG00000173809; TAA
FPAQSLQHTW

SEQ ID NO: 85617 - protein, 10 aa, Homo sapiens
  misc_feature: Table A; Target 85617; HLA-B*35:01; TDRD12; ENSG00000173809; TAA
FPAQSLQHTW

SEQ ID NO: 85618 - protein, 10 aa, Homo sapiens
  misc_feature: Table A; Target 85618; HLA-B*44:02; TDRD12; ENSG00000173809; TAA
FPAQSLQHTW

SEQ ID NO: 85619 - protein, 10 aa, Homo sapiens
  misc_feature: Table A; Target 85619; HLA-B*54:01; TDRD12; ENSG00000173809; TAA
FPAQSLQHTW

SEQ ID NO: 85620 - protein, 10 aa, Homo sapiens
  misc_feature: Table A; Target 85620; HLA-B*55:01; TDRD12; ENSG00000173809; TAA
FPAQSLQHTW

SEQ ID NO: 85621 - protein, 10 aa, Homo sapiens
  misc_feature: Table A; Target 85621; HLA-B*56:01; TDRD12; ENSG00000173809; TAA
FPAQSLQHTW

SEQ ID NO: 85622 - protein, 10 aa, Homo sapiens
  misc_feature: Table A; Target 85622; HLA-B*57:01; TDRD12; ENSG00000173809; TAA
FPAQSLQHTW

SEQ ID NO: 85623 - protein, 10 aa, Homo sapiens
  misc_feature: Table A; Target 85623; HLA-B*58:01; TDRD12; ENSG00000173809; TAA
FPAQSLQHTW

SEQ ID NO: 85624 - protein, 10 aa, Homo sapiens
  misc_feature: Table A; Target 85624; HLA-C*02:02; TDRD12; ENSG00000173809; TAA
FPAQSLQHTW

SEQ ID NO: 85625 - protein, 8 aa, Homo sapiens
  misc_feature: Table A; Target 85625; HLA-B*07:02; TDRD12; ENSG00000173809; TAA
FPASPKVF

SEQ ID NO: 85626 - protein, 8 aa, Homo sapiens
  misc_feature: Table A; Target 85626; HLA-B*08:01; TDRD12; ENSG00000173809; TAA
FPASPKVF

SEQ ID NO: 85627 - protein, 8 aa, Homo sapiens
  misc_feature: Table A; Target 85627; HLA-B*35:01; TDRD12; ENSG00000173809; TAA
FPASPKVF

SEQ ID NO: 85628 - protein, 8 aa, Homo sapiens
  misc_feature: Table A; Target 85628; HLA-B*35:03; TDRD12; ENSG00000173809; TAA
FPASPKVF

SEQ ID NO: 85629 - protein, 8 aa, Homo sapiens
  misc_feature: Table A; Target 85629; HLA-B*51:01; TDRD12; ENSG00000173809; TAA
FPASPKVF

SEQ ID NO: 85630 - protein, 8 aa, Homo sapiens
  misc_feature: Table A; Target 85630; HLA-C*16:01; TDRD12; ENSG00000173809; TAA
FPASPKVF

SEQ ID NO: 85631 - protein, 9 aa, Homo sapiens
  misc_feature: Table A; Target 85631; HLA-B*54:01; TDRD12; ENSG00000173809; TAA
FPASPKVFG

SEQ ID NO: 85632 - protein, 10 aa, Homo sapiens
  misc_feature: Table A; Target 85632; HLA-B*54:01; TDRD12; ENSG00000173809; TAA
FPASPKVFGG

SEQ ID NO: 85633 - protein, 9 aa, Homo sapiens
  misc_feature: Table A; Target 85633; HLA-B*55:01; TDRD12; ENSG00000173809; TAA
FPGPSHTES

SEQ ID NO: 85634 - protein, 10 aa, Homo sapiens
  misc_feature: Table A; Target 85634; HLA-A*01:01; TDRD12; ENSG00000173809; TAA
FPGPSHTESY

SEQ ID NO: 85635 - protein, 10 aa, Homo sapiens
  misc_feature: Table A; Target 85635; HLA-A*25:01; TDRD12; ENSG00000173809; TAA
FPGPSHTESY

SEQ ID NO: 85636 - protein, 10 aa, Homo sapiens
  misc_feature: Table A; Target 85636; HLA-A*26:01; TDRD12; ENSG00000173809; TAA
FPGPSHTESY

SEQ ID NO: 85637 - protein, 10 aa, Homo sapiens
  misc_feature: Table A; Target 85637; HLA-A*29:02; TDRD12; ENSG00000173809; TAA
FPGPSHTESY

SEQ ID NO: 85638 - protein, 10 aa, Homo sapiens
  misc_feature: Table A; Target 85638; HLA-A*30:02; TDRD12; ENSG00000173809; TAA
FPGPSHTESY

SEQ ID NO: 85639 - protein, 10 aa, Homo sapiens
  misc_feature: Table A; Target 85639; HLA-B*07:02; TDRD12; ENSG00000173809; TAA
FPGPSHTESY

SEQ ID NO: 85640 - protein, 10 aa, Homo sapiens
  misc_feature: Table A; Target 85640; HLA-B*15:01; TDRD12; ENSG00000173809; TAA
FPGPSHTESY

SEQ ID NO: 85641 - protein, 10 aa, Homo sapiens
  misc_feature: Table A; Target 85641; HLA-B*15:03; TDRD12; ENSG00000173809; TAA
FPGPSHTESY

SEQ ID NO: 85642 - protein, 10 aa, Homo sapiens
  misc_feature: Table A; Target 85642; HLA-B*35:01; TDRD12; ENSG00000173809; TAA
FPGPSHTESY

SEQ ID NO: 85643 - protein, 10 aa, Homo sapiens
  misc_feature: Table A; Target 85643; HLA-B*35:03; TDRD12; ENSG00000173809; TAA
FPGPSHTESY

SEQ ID NO: 85644 - protein, 10 aa, Homo sapiens
  misc_feature: Table A; Target 85644; HLA-B*46:01; TDRD12; ENSG00000173809; TAA
FPGPSHTESY

SEQ ID NO: 85645 - protein, 10 aa, Homo sapiens
  misc_feature: Table A; Target 85645; HLA-B*55:01; TDRD12; ENSG00000173809; TAA
FPGPSHTESY

SEQ ID NO: 85646 - protein, 10 aa, Homo sapiens
  misc_feature: Table A; Target 85646; HLA-C*03:03; TDRD12; ENSG00000173809; TAA
FPGPSHTESY

SEQ ID NO: 85647 - protein, 10 aa, Homo sapiens
  misc_feature: Table A; Target 85647; HLA-C*07:04; TDRD12; ENSG00000173809; TAA
FPGPSHTESY

SEQ ID NO: 85648 - protein, 10 aa, Homo sapiens
  misc_feature: Table A; Target 85648; HLA-C*14:02; TDRD12; ENSG00000173809; TAA
FPGPSHTESY

SEQ ID NO: 85649 - protein, 9 aa, Homo sapiens
  misc_feature: Table A; Target 85649; HLA-A*01:01; TDRD12; ENSG00000173809; TAA
FSFPASPKV

SEQ ID NO: 85650 - protein, 9 aa, Homo sapiens
  misc_feature: Table A; Target 85650; HLA-A*02:01; TDRD12; ENSG00000173809; TAA
FSFPASPKV

SEQ ID NO: 85651 - protein, 9 aa, Homo sapiens
  misc_feature: Table A; Target 85651; HLA-A*02:03; TDRD12; ENSG00000173809; TAA
FSFPASPKV

SEQ ID NO: 85652 - protein, 9 aa, Homo sapiens
  misc_feature: Table A; Target 85652; HLA-A*02:04; TDRD12; ENSG00000173809; TAA
FSFPASPKV

SEQ ID NO: 85653 - protein, 9 aa, Homo sapiens
  misc_feature: Table A; Target 85653; HLA-A*02:07; TDRD12; ENSG00000173809; TAA
FSFPASPKV

SEQ ID NO: 85654 - protein, 9 aa, Homo sapiens
  misc_feature: Table A; Target 85654; HLA-A*30:01; TDRD12; ENSG00000173809; TAA
FSFPASPKV

SEQ ID NO: 85655 - protein, 9 aa, Homo sapiens
  misc_feature: Table A; Target 85655; HLA-A*32:01; TDRD12; ENSG00000173809; TAA
FSFPASPKV

SEQ ID NO: 85656 - protein, 9 aa, Homo sapiens
  misc_feature: Table A; Target 85656; HLA-A*68:02; TDRD12; ENSG00000173809; TAA
FSFPASPKV

SEQ ID NO: 85657 - protein, 9 aa, Homo sapiens
  misc_feature: Table A; Target 85657; HLA-B*13:02; TDRD12; ENSG00000173809; TAA
FSFPASPKV

SEQ ID NO: 85658 - protein, 9 aa, Homo sapiens
  misc_feature: Table A; Target 85658; HLA-B*40:02; TDRD12; ENSG00000173809; TAA
FSFPASPKV

SEQ ID NO: 85659 - protein, 9 aa, Homo sapiens
  misc_feature: Table A; Target 85659; HLA-B*46:01; TDRD12; ENSG00000173809; TAA
FSFPASPKV

SEQ ID NO: 85660 - protein, 9 aa, Homo sapiens
  misc_feature: Table A; Target 85660; HLA-B*49:01; TDRD12; ENSG00000173809; TAA
FSFPASPKV

SEQ ID NO: 85661 - protein, 9 aa, Homo sapiens
  misc_feature: Table A; Target 85661; HLA-B*51:01; TDRD12; ENSG00000173809; TAA
FSFPASPKV

SEQ ID NO: 85662 - protein, 9 aa, Homo sapiens
  misc_feature: Table A; Target 85662; HLA-B*54:01; TDRD12; ENSG00000173809; TAA
FSFPASPKV

SEQ ID NO: 85663 - protein, 9 aa, Homo sapiens
  misc_feature: Table A; Target 85663; HLA-B*56:01; TDRD12; ENSG00000173809; TAA
FSFPASPKV

SEQ ID NO: 85664 - protein, 9 aa, Homo sapiens
  misc_feature: Table A; Target 85664; HLA-B*58:01; TDRD12; ENSG00000173809; TAA
FSFPASPKV

SEQ ID NO: 85665 - protein, 9 aa, Homo sapiens
  misc_feature: Table A; Target 85665; HLA-C*02:02; TDRD12; ENSG00000173809; TAA
FSFPASPKV

SEQ ID NO: 85666 - protein, 9 aa, Homo sapiens
  misc_feature: Table A; Target 85666; HLA-C*03:03; TDRD12; ENSG00000173809; TAA
FSFPASPKV

SEQ ID NO: 85667 - protein, 9 aa, Homo sapiens
  misc_feature: Table A; Target 85667; HLA-C*03:04; TDRD12; ENSG00000173809; TAA
FSFPASPKV

SEQ ID NO: 85668 - protein, 9 aa, Homo sapiens
  misc_feature: Table A; Target 85668; HLA-C*05:01; TDRD12; ENSG00000173809; TAA
FSFPASPKV

SEQ ID NO: 85669 - protein, 9 aa, Homo sapiens
  misc_feature: Table A; Target 85669; HLA-C*06:02; TDRD12; ENSG00000173809; TAA
FSFPASPKV

SEQ ID NO: 85670 - protein, 9 aa, Homo sapiens
  misc_feature: Table A; Target 85670; HLA-C*07:04; TDRD12; ENSG00000173809; TAA
FSFPASPKV

SEQ ID NO: 85671 - protein, 9 aa, Homo sapiens
  misc_feature: Table A; Target 85671; HLA-C*12:03; TDRD12; ENSG00000173809; TAA
FSFPASPKV

SEQ ID NO: 85672 - protein, 9 aa, Homo sapiens
  misc_feature: Table A; Target 85672; HLA-C*16:01; TDRD12; ENSG00000173809; TAA
FSFPASPKV

SEQ ID NO: 85673 - protein, 9 aa, Homo sapiens
  misc_feature: Table A; Target 85673; HLA-C*16:02; TDRD12; ENSG00000173809; TAA
FSFPASPKV

SEQ ID NO: 85674 - protein, 9 aa, Homo sapiens
  misc_feature: Table A; Target 85674; HLA-C*16:04; TDRD12; ENSG00000173809; TAA
FSFPASPKV

SEQ ID NO: 85675 - protein, 10 aa, Homo sapiens
  misc_feature: Table A; Target 85675; HLA-A*01:01; TDRD12; ENSG00000173809; TAA
FSFPASPKVF

SEQ ID NO: 85676 - protein, 10 aa, Homo sapiens
  misc_feature: Table A; Target 85676; HLA-A*25:01; TDRD12; ENSG00000173809; TAA
FSFPASPKVF

SEQ ID NO: 85677 - protein, 10 aa, Homo sapiens
  misc_feature: Table A; Target 85677; HLA-A*32:01; TDRD12; ENSG00000173809; TAA
FSFPASPKVF

SEQ ID NO: 85678 - protein, 10 aa, Homo sapiens
  misc_feature: Table A; Target 85678; HLA-B*15:03; TDRD12; ENSG00000173809; TAA
FSFPASPKVF

SEQ ID NO: 85679 - protein, 10 aa, Homo sapiens
  misc_feature: Table A; Target 85679; HLA-B*46:01; TDRD12; ENSG00000173809; TAA
FSFPASPKVF

SEQ ID NO: 85680 - protein, 10 aa, Homo sapiens
  misc_feature: Table A; Target 85680; HLA-B*57:01; TDRD12; ENSG00000173809; TAA
FSFPASPKVF

SEQ ID NO: 85681 - protein, 10 aa, Homo sapiens
  misc_feature: Table A; Target 85681; HLA-B*58:01; TDRD12; ENSG00000173809; TAA
FSFPASPKVF

SEQ ID NO: 85682 - protein, 10 aa, Homo sapiens
  misc_feature: Table A; Target 85682; HLA-C*02:02; TDRD12; ENSG00000173809; TAA
FSFPASPKVF

SEQ ID NO: 85683 - protein, 10 aa, Homo sapiens
  misc_feature: Table A; Target 85683; HLA-C*03:04; TDRD12; ENSG00000173809; TAA
FSFPASPKVF

SEQ ID NO: 85684 - protein, 10 aa, Homo sapiens
  misc_feature: Table A; Target 85684; HLA-C*12:03; TDRD12; ENSG00000173809; TAA
FSFPASPKVF

SEQ ID NO: 85685 - protein, 8 aa, Homo sapiens
  misc_feature: Table A; Target 85685; HLA-B*54:01; TDRD12; ENSG00000173809; TAA
FTAGVLEA

SEQ ID NO: 85686 - protein, 8 aa, Homo sapiens
  misc_feature: Table A; Target 85686; HLA-C*03:03; TDRD12; ENSG00000173809; TAA
FTAGVLEA

SEQ ID NO: 85687 - protein, 8 aa, Homo sapiens
  misc_feature: Table A; Target 85687; HLA-C*03:04; TDRD12; ENSG00000173809; TAA
FTAGVLEA

SEQ ID NO: 85688 - protein, 8 aa, Homo sapiens
  misc_feature: Table A; Target 85688; HLA-C*12:03; TDRD12; ENSG00000173809; TAA
FTAGVLEA

SEQ ID NO: 85689 - protein, 9 aa, Homo sapiens
  misc_feature: Table A; Target 85689; HLA-A*01:01; TDRD12; ENSG00000173809; TAA
FTAGVLEAK

SEQ ID NO: 85690 - protein, 9 aa, Homo sapiens
  misc_feature: Table A; Target 85690; HLA-A*03:01; TDRD12; ENSG00000173809; TAA
FTAGVLEAK

SEQ ID NO: 85691 - protein, 9 aa, Homo sapiens
  misc_feature: Table A; Target 85691; HLA-A*03:02; TDRD12; ENSG00000173809; TAA
FTAGVLEAK

SEQ ID NO: 85692 - protein, 9 aa, Homo sapiens
  misc_feature: Table A; Target 85692; HLA-A*11:01; TDRD12; ENSG00000173809; TAA
FTAGVLEAK

SEQ ID NO: 85693 - protein, 9 aa, Homo sapiens
  misc_feature: Table A; Target 85693; HLA-A*33:01; TDRD12; ENSG00000173809; TAA
FTAGVLEAK

SEQ ID NO: 85694 - protein, 9 aa, Homo sapiens
  misc_feature: Table A; Target 85694; HLA-A*33:03; TDRD12; ENSG00000173809; TAA
FTAGVLEAK

SEQ ID NO: 85695 - protein, 9 aa, Homo sapiens
  misc_feature: Table A; Target 85695; HLA-A*68:01; TDRD12; ENSG00000173809; TAA
FTAGVLEAK

SEQ ID NO: 85696 - protein, 9 aa, Homo sapiens
  misc_feature: Table A; Target 85696; HLA-A*68:02; TDRD12; ENSG00000173809; TAA
FTAGVLEAK

SEQ ID NO: 85697 - protein, 9 aa, Homo sapiens
  misc_feature: Table A; Target 85697; HLA-B*27:02; TDRD12; ENSG00000173809; TAA
FTAGVLEAK

SEQ ID NO: 85698 - protein, 9 aa, Homo sapiens
  misc_feature: Table A; Target 85698; HLA-B*27:05; TDRD12; ENSG00000173809; TAA
FTAGVLEAK

SEQ ID NO: 85699 - protein, 9 aa, Homo sapiens
  misc_feature: Table A; Target 85699; HLA-C*02:02; TDRD12; ENSG00000173809; TAA
FTAGVLEAK

SEQ ID NO: 85700 - protein, 9 aa, Homo sapiens
  misc_feature: Table A; Target 85700; HLA-C*03:04; TDRD12; ENSG00000173809; TAA
FTAGVLEAK

SEQ ID NO: 85701 - protein, 9 aa, Homo sapiens
  misc_feature: Table A; Target 85701; HLA-C*07:06; TDRD12; ENSG00000173809; TAA
FTAGVLEAK

SEQ ID NO: 85702 - protein, 10 aa, Homo sapiens
  misc_feature: Table A; Target 85702; HLA-A*68:02; TDRD12; ENSG00000173809; TAA
FTAGVLEAKE

SEQ ID NO: 85703 - protein, 9 aa, Homo sapiens
  misc_feature: Table A; Target 85703; HLA-A*23:01; TDRD12; ENSG00000173809; TAA
FYILNATNY

SEQ ID NO: 85704 - protein, 9 aa, Homo sapiens
  misc_feature: Table A; Target 85704; HLA-A*24:02; TDRD12; ENSG00000173809; TAA
FYILNATNY

SEQ ID NO: 85705 - protein, 9 aa, Homo sapiens
  misc_feature: Table A; Target 85705; HLA-A*29:02; TDRD12; ENSG00000173809; TAA
FYILNATNY

SEQ ID NO: 85706 - protein, 9 aa, Homo sapiens
  misc_feature: Table A; Target 85706; HLA-A*30:02; TDRD12; ENSG00000173809; TAA
FYILNATNY

SEQ ID NO: 85707 - protein, 9 aa, Homo sapiens
  misc_feature: Table A; Target 85707; HLA-B*15:03; TDRD12; ENSG00000173809; TAA
FYILNATNY

SEQ ID NO: 85708 - protein, 9 aa, Homo sapiens
  misc_feature: Table A; Target 85708; HLA-B*46:01; TDRD12; ENSG00000173809; TAA
FYILNATNY

SEQ ID NO: 85709 - protein, 9 aa, Homo sapiens
  misc_feature: Table A; Target 85709; HLA-C*01:02; TDRD12; ENSG00000173809; TAA
FYILNATNY

SEQ ID NO: 85710 - protein, 9 aa, Homo sapiens
  misc_feature: Table A; Target 85710; HLA-C*02:02; TDRD12; ENSG00000173809; TAA
FYILNATNY

SEQ ID NO: 85711 - protein, 9 aa, Homo sapiens
  misc_feature: Table A; Target 85711; HLA-C*07:04; TDRD12; ENSG00000173809; TAA
FYILNATNY

SEQ ID NO: 85712 - protein, 9 aa, Homo sapiens
  misc_feature: Table A; Target 85712; HLA-C*14:02; TDRD12; ENSG00000173809; TAA
FYILNATNY

SEQ ID NO: 85713 - protein, 10 aa, Homo sapiens
  misc_feature: Table A; Target 85713; HLA-A*23:01; TDRD12; ENSG00000173809; TAA
FYILNATNYF

SEQ ID NO: 85714 - protein, 10 aa, Homo sapiens
  misc_feature: Table A; Target 85714; HLA-A*24:02; TDRD12; ENSG00000173809; TAA
FYILNATNYF

SEQ ID NO: 85715 - protein, 9 aa, Homo sapiens
  misc_feature: Table A; Target 85715; HLA-C*14:02; TDRD12; ENSG00000173809; TAA
FYNSTCQDI

SEQ ID NO: 85716 - protein, 10 aa, Homo sapiens
  misc_feature: Table A; Target 85716; HLA-A*01:01; TDRD12; ENSG00000173809; TAA
GCDVIVTTPY

SEQ ID NO: 85717 - protein, 9 aa, Homo sapiens
  misc_feature: Table A; Target 85717; HLA-B*49:01; TDRD12; ENSG00000173809; TAA
GEYSMSSRP

SEQ ID NO: 85718 - protein, 10 aa, Homo sapiens
  misc_feature: Table A; Target 85718; HLA-A*30:01; TDRD12; ENSG00000173809; TAA
GEYSMSSRPL

SEQ ID NO: 85719 - protein, 10 aa, Homo sapiens
  misc_feature: Table A; Target 85719; HLA-B*40:01; TDRD12; ENSG00000173809; TAA
GEYSMSSRPL

SEQ ID NO: 85720 - protein, 10 aa, Homo sapiens
  misc_feature: Table A; Target 85720; HLA-B*49:01; TDRD12; ENSG00000173809; TAA
GEYSMSSRPL

SEQ ID NO: 85721 - protein, 11 aa, Homo sapiens
  misc_feature: Table A; Target 85721; HLA-A*02:07; TDRD12; ENSG00000173809; TAA
GIDNPEHIEQL

SEQ ID NO: 85722 - protein, 11 aa, Homo sapiens
  misc_feature: Table A; Target 85722; HLA-C*05:01; TDRD12; ENSG00000173809; TAA
GIDNPEHIEQL

SEQ ID NO: 85723 - protein, 10 aa, Homo sapiens
  misc_feature: Table A; Target 85723; HLA-A*03:01; TDRD12; ENSG00000173809; TAA
GISDLQQLQK

SEQ ID NO: 85724 - protein, 10 aa, Homo sapiens
  misc_feature: Table A; Target 85724; HLA-A*03:02; TDRD12; ENSG00000173809; TAA
GISDLQQLQK

SEQ ID NO: 85725 - protein, 10 aa, Homo sapiens
  misc_feature: Table A; Target 85725; HLA-A*11:01; TDRD12; ENSG00000173809; TAA
GISDLQQLQK

SEQ ID NO: 85726 - protein, 10 aa, Homo sapiens
  misc_feature: Table A; Target 85726; HLA-B*27:02; TDRD12; ENSG00000173809; TAA
GISDLQQLQK

SEQ ID NO: 85727 - protein, 11 aa, Homo sapiens
  misc_feature: Table A; Target 85727; HLA-A*02:01; TDRD12; ENSG00000173809; TAA
GISDLQQLQKL

SEQ ID NO: 85728 - protein, 11 aa, Homo sapiens
  misc_feature: Table A; Target 85728; HLA-A*02:04; TDRD12; ENSG00000173809; TAA
GISDLQQLQKL

SEQ ID NO: 85729 - protein, 8 aa, Homo sapiens
  misc_feature: Table A; Target 85729; HLA-B*08:01; TDRD12; ENSG00000173809; TAA
GLAEKTLF

SEQ ID NO: 85730 - protein, 9 aa, Homo sapiens
  misc_feature: Table A; Target 85730; HLA-A*02:03; TDRD12; ENSG00000173809; TAA
GLAEKTLFH

SEQ ID NO: 85731 - protein, 9 aa, Homo sapiens
  misc_feature: Table A; Target 85731; HLA-A*03:01; TDRD12; ENSG00000173809; TAA
GLAEKTLFH

SEQ ID NO: 85732 - protein, 9 aa, Homo sapiens
  misc_feature: Table A; Target 85732; HLA-A*03:02; TDRD12; ENSG00000173809; TAA
GLAEKTLFH

SEQ ID NO: 85733 - protein, 9 aa, Homo sapiens
  misc_feature: Table A; Target 85733; HLA-A*29:02; TDRD12; ENSG00000173809; TAA
GLAEKTLFH

SEQ ID NO: 85734 - protein, 11 aa, Homo sapiens
  misc_feature: Table A; Target 85734; HLA-A*02:01; TDRD12; ENSG00000173809; TAA
GLAEKTLFHRV

SEQ ID NO: 85735 - protein, 11 aa, Homo sapiens
  misc_feature: Table A; Target 85735; HLA-A*02:03; TDRD12; ENSG00000173809; TAA
GLAEKTLFHRV

SEQ ID NO: 85736 - protein, 11 aa, Homo sapiens
  misc_feature: Table A; Target 85736; HLA-A*02:04; TDRD12; ENSG00000173809; TAA
GLAEKTLFHRV

SEQ ID NO: 85737 - protein, 8 aa, Homo sapiens
  misc_feature: Table A; Target 85737; HLA-A*02:01; TDRD12; ENSG00000173809; TAA
GLQPPVVV

SEQ ID NO: 85738 - protein, 9 aa, Homo sapiens
  misc_feature: Table A; Target 85738; HLA-A*02:01; TDRD12; ENSG00000173809; TAA
GLQPPVVVL

SEQ ID NO: 85739 - protein, 9 aa, Homo sapiens
  misc_feature: Table A; Target 85739; HLA-A*02:03; TDRD12; ENSG00000173809; TAA
GLQPPVVVL

SEQ ID NO: 85740 - protein, 9 aa, Homo sapiens
  misc_feature: Table A; Target 85740; HLA-A*02:04; TDRD12; ENSG00000173809; TAA
GLQPPVVVL

SEQ ID NO: 85741 - protein, 9 aa, Homo sapiens
  misc_feature: Table A; Target 85741; HLA-A*02:07; TDRD12; ENSG00000173809; TAA
GLQPPVVVL

SEQ ID NO: 85742 - protein, 9 aa, Homo sapiens
  misc_feature: Table A; Target 85742; HLA-A*03:02; TDRD12; ENSG00000173809; TAA
GLQPPVVVL

SEQ ID NO: 85743 - protein, 9 aa, Homo sapiens
  misc_feature: Table A; Target 85743; HLA-A*32:01; TDRD12; ENSG00000173809; TAA
GLQPPVVVL

SEQ ID NO: 85744 - protein, 9 aa, Homo sapiens
  misc_feature: Table A; Target 85744; HLA-B*13:02; TDRD12; ENSG00000173809; TAA
GLQPPVVVL

SEQ ID NO: 85745 - protein, 9 aa, Homo sapiens
  misc_feature: Table A; Target 85745; HLA-B*15:01; TDRD12; ENSG00000173809; TAA
GLQPPVVVL

SEQ ID NO: 85746 - protein, 9 aa, Homo sapiens
  misc_feature: Table A; Target 85746; HLA-B*39:01; TDRD12; ENSG00000173809; TAA
GLQPPVVVL

SEQ ID NO: 85747 - protein, 9 aa, Homo sapiens
  misc_feature: Table A; Target 85747; HLA-B*55:01; TDRD12; ENSG00000173809; TAA
GLQPPVVVL

SEQ ID NO: 85748 - protein, 9 aa, Homo sapiens
  misc_feature: Table A; Target 85748; HLA-C*07:04; TDRD12; ENSG00000173809; TAA
GLQPPVVVL

SEQ ID NO: 85749 - protein, 10 aa, Homo sapiens
  misc_feature: Table A; Target 85749; HLA-A*03:01; TDRD12; ENSG00000173809; TAA
GLQPPVVVLR

SEQ ID NO: 85750 - protein, 10 aa, Homo sapiens
  misc_feature: Table A; Target 85750; HLA-A*03:02; TDRD12; ENSG00000173809; TAA
GLQPPVVVLR

SEQ ID NO: 85751 - protein, 10 aa, Homo sapiens
  misc_feature: Table A; Target 85751; HLA-A*31:01; TDRD12; ENSG00000173809; TAA
GLQPPVVVLR

SEQ ID NO: 85752 - protein, 10 aa, Homo sapiens
  misc_feature: Table A; Target 85752; HLA-C*07:06; TDRD12; ENSG00000173809; TAA
GLQPPVVVLR

SEQ ID NO: 85753 - protein, 11 aa, Homo sapiens
  misc_feature: Table A; Target 85753; HLA-A*02:04; TDRD12; ENSG00000173809; TAA
GLVTRDQLLHL

SEQ ID NO: 85754 - protein, 8 aa, Homo sapiens
  misc_feature: Table A; Target 85754; HLA-A*03:01; TDRD12; ENSG00000173809; TAA
GLYGLAEK

SEQ ID NO: 85755 - protein, 8 aa, Homo sapiens
  misc_feature: Table A; Target 85755; HLA-A*03:02; TDRD12; ENSG00000173809; TAA
GLYGLAEK

SEQ ID NO: 85756 - protein, 9 aa, Homo sapiens
  misc_feature: Table A; Target 85756; HLA-B*13:02; TDRD12; ENSG00000173809; TAA
GLYGLAEKT

SEQ ID NO: 85757 - protein, 10 aa, Homo sapiens
  misc_feature: Table A; Target 85757; HLA-A*02:03; TDRD12; ENSG00000173809; TAA
GLYGLAEKTL

SEQ ID NO: 85758 - protein, 11 aa, Homo sapiens
  misc_feature: Table A; Target 85758; HLA-A*02:01; TDRD12; ENSG00000173809; TAA
GLYGLAEKTLF

SEQ ID NO: 85759 - protein, 11 aa, Homo sapiens
  misc_feature: Table A; Target 85759; HLA-A*02:04; TDRD12; ENSG00000173809; TAA
GLYGLAEKTLF

SEQ ID NO: 85760 - protein, 11 aa, Homo sapiens
  misc_feature: Table A; Target 85760; HLA-A*29:02; TDRD12; ENSG00000173809; TAA
GLYGLAEKTLF

SEQ ID NO: 85761 - protein, 11 aa, Homo sapiens
  misc_feature: Table A; Target 85761; HLA-B*15:01; TDRD12; ENSG00000173809; TAA
GLYGLAEKTLF

SEQ ID NO: 85762 - protein, 10 aa, Homo sapiens
  misc_feature: Table A; Target 85762; HLA-B*15:01; TDRD12; ENSG00000173809; TAA
GMEDSHGVNF

SEQ ID NO: 85763 - protein, 10 aa, Homo sapiens
  misc_feature: Table A; Target 85763; HLA-B*15:03; TDRD12; ENSG00000173809; TAA
GMEDSHGVNF

SEQ ID NO: 85764 - protein, 10 aa, Homo sapiens
  misc_feature: Table A; Target 85764; HLA-C*07:04; TDRD12; ENSG00000173809; TAA
GMEDSHGVNF

SEQ ID NO: 85765 - protein, 9 aa, Homo sapiens
  misc_feature: Table A; Target 85765; HLA-A*23:01; TDRD12; ENSG00000173809; TAA
GNVQQVVHL

SEQ ID NO: 85766 - protein, 9 aa, Homo sapiens
  misc_feature: Table A; Target 85766; HLA-C*07:04; TDRD12; ENSG00000173809; TAA
GNVQQVVHL

SEQ ID NO: 85767 - protein, 9 aa, Homo sapiens
  misc_feature: Table A; Target 85767; HLA-B*56:01; TDRD12; ENSG00000173809; TAA
GPLAVIVCP

SEQ ID NO: 85768 - protein, 8 aa, Homo sapiens
  misc_feature: Table A; Target 85768; HLA-B*27:05; TDRD12; ENSG00000173809; TAA
GRTGLVTR

SEQ ID NO: 85769 - protein, 9 aa, Homo sapiens
  misc_feature: Table A; Target 85769; HLA-A*11:01; TDRD12; ENSG00000173809; TAA
GVLEAKEDK

SEQ ID NO: 85770 - protein, 10 aa, Homo sapiens
  misc_feature: Table A; Target 85770; HLA-A*03:02; TDRD12; ENSG00000173809; TAA
GVLEAKEDKK

SEQ ID NO: 85771 - protein, 10 aa, Homo sapiens
  misc_feature: Table A; Target 85771; HLA-A*11:01; TDRD12; ENSG00000173809; TAA
GVLEAKEDKK

SEQ ID NO: 85772 - protein, 9 aa, Homo sapiens
  misc_feature: Table A; Target 85772; HLA-A*30:01; TDRD12; ENSG00000173809; TAA
GVNFPAQSL

SEQ ID NO: 85773 - protein, 9 aa, Homo sapiens
  misc_feature: Table A; Target 85773; HLA-A*32:01; TDRD12; ENSG00000173809; TAA
GVNFPAQSL

SEQ ID NO: 85774 - protein, 9 aa, Homo sapiens
  misc_feature: Table A; Target 85774; HLA-B*07:02; TDRD12; ENSG00000173809; TAA
GVNFPAQSL

SEQ ID NO: 85775 - protein, 9 aa, Homo sapiens
  misc_feature: Table A; Target 85775; HLA-B*13:02; TDRD12; ENSG00000173809; TAA
GVNFPAQSL

SEQ ID NO: 85776 - protein, 9 aa, Homo sapiens
  misc_feature: Table A; Target 85776; HLA-B*15:01; TDRD12; ENSG00000173809; TAA
GVNFPAQSL

SEQ ID NO: 85777 - protein, 9 aa, Homo sapiens
  misc_feature: Table A; Target 85777; HLA-B*15:03; TDRD12; ENSG00000173809; TAA
GVNFPAQSL

SEQ ID NO: 85778 - protein, 9 aa, Homo sapiens
  misc_feature: Table A; Target 85778; HLA-B*27:05; TDRD12; ENSG00000173809; TAA
GVNFPAQSL

SEQ ID NO: 85779 - protein, 9 aa, Homo sapiens
  misc_feature: Table A; Target 85779; HLA-B*46:01; TDRD12; ENSG00000173809; TAA
GVNFPAQSL

SEQ ID NO: 85780 - protein, 9 aa, Homo sapiens
  misc_feature: Table A; Target 85780; HLA-B*58:01; TDRD12; ENSG00000173809; TAA
GVNFPAQSL

SEQ ID NO: 85781 - protein, 9 aa, Homo sapiens
  misc_feature: Table A; Target 85781; HLA-C*01:02; TDRD12; ENSG00000173809; TAA
GVNFPAQSL

SEQ ID NO: 85782 - protein, 9 aa, Homo sapiens
  misc_feature: Table A; Target 85782; HLA-C*03:03; TDRD12; ENSG00000173809; TAA
GVNFPAQSL

SEQ ID NO: 85783 - protein, 9 aa, Homo sapiens
  misc_feature: Table A; Target 85783; HLA-C*03:04; TDRD12; ENSG00000173809; TAA
GVNFPAQSL

SEQ ID NO: 85784 - protein, 9 aa, Homo sapiens
  misc_feature: Table A; Target 85784; HLA-C*07:02; TDRD12; ENSG00000173809; TAA
GVNFPAQSL

SEQ ID NO: 85785 - protein, 9 aa, Homo sapiens
  misc_feature: Table A; Target 85785; HLA-C*14:02; TDRD12; ENSG00000173809; TAA
GVNFPAQSL

SEQ ID NO: 85786 - protein, 9 aa, Homo sapiens
  misc_feature: Table A; Target 85786; HLA-C*16:04; TDRD12; ENSG00000173809; TAA
GVNFPAQSL

SEQ ID NO: 85787 - protein, 9 aa, Homo sapiens
  misc_feature: Table A; Target 85787; HLA-A*24:02; TDRD12; ENSG00000173809; TAA
GYIKIIPFY

SEQ ID NO: 85788 - protein, 9 aa, Homo sapiens
  misc_feature: Table A; Target 85788; HLA-A*29:02; TDRD12; ENSG00000173809; TAA
GYIKIIPFY

SEQ ID NO: 85789 - protein, 10 aa, Homo sapiens
  misc_feature: Table A; Target 85789; HLA-C*03:03; TDRD12; ENSG00000173809; TAA
HAEQGSPAEQ

SEQ ID NO: 85790 - protein, 8 aa, Homo sapiens
  misc_feature: Table A; Target 85790; HLA-A*29:02; TDRD12; ENSG00000173809; TAA
HAVGVLRY

SEQ ID NO: 85791 - protein, 8 aa, Homo sapiens
  misc_feature: Table A; Target 85791; HLA-B*35:01; TDRD12; ENSG00000173809; TAA
HAVGVLRY

SEQ ID NO: 85792 - protein, 8 aa, Homo sapiens
  misc_feature: Table A; Target 85792; HLA-C*02:02; TDRD12; ENSG00000173809; TAA
HAVGVLRY

SEQ ID NO: 85793 - protein, 9 aa, Homo sapiens
  misc_feature: Table A; Target 85793; HLA-A*68:02; TDRD12; ENSG00000173809; TAA
HAVGVLRYL

SEQ ID NO: 85794 - protein, 9 aa, Homo sapiens
  misc_feature: Table A; Target 85794; HLA-B*57:01; TDRD12; ENSG00000173809; TAA
HAVGVLRYL

SEQ ID NO: 85795 - protein, 9 aa, Homo sapiens
  misc_feature: Table A; Target 85795; HLA-C*02:02; TDRD12; ENSG00000173809; TAA
HAVGVLRYL

SEQ ID NO: 85796 - protein, 9 aa, Homo sapiens
  misc_feature: Table A; Target 85796; HLA-C*03:04; TDRD12; ENSG00000173809; TAA
HAVGVLRYL

SEQ ID NO: 85797 - protein, 9 aa, Homo sapiens
  misc_feature: Table A; Target 85797; HLA-C*06:02; TDRD12; ENSG00000173809; TAA
HAVGVLRYL

SEQ ID NO: 85798 - protein, 9 aa, Homo sapiens
  misc_feature: Table A; Target 85798; HLA-C*12:03; TDRD12; ENSG00000173809; TAA
HAVGVLRYL

SEQ ID NO: 85799 - protein, 9 aa, Homo sapiens
  misc_feature: Table A; Target 85799; HLA-C*16:02; TDRD12; ENSG00000173809; TAA
HAVGVLRYL

SEQ ID NO: 85800 - protein, 9 aa, Homo sapiens
  misc_feature: Table A; Target 85800; HLA-A*01:01; TDRD12; ENSG00000173809; TAA
HCESNPLLY

SEQ ID NO: 85801 - protein, 9 aa, Homo sapiens
  misc_feature: Table A; Target 85801; HLA-A*03:01; TDRD12; ENSG00000173809; TAA
HCESNPLLY

SEQ ID NO: 85802 - protein, 9 aa, Homo sapiens
  misc_feature: Table A; Target 85802; HLA-A*29:02; TDRD12; ENSG00000173809; TAA
HCESNPLLY

SEQ ID NO: 85803 - protein, 9 aa, Homo sapiens
  misc_feature: Table A; Target 85803; HLA-A*30:02; TDRD12; ENSG00000173809; TAA
HCESNPLLY

SEQ ID NO: 85804 - protein, 9 aa, Homo sapiens
  misc_feature: Table A; Target 85804; HLA-B*35:01; TDRD12; ENSG00000173809; TAA
HCESNPLLY

SEQ ID NO: 85805 - protein, 9 aa, Homo sapiens
  misc_feature: Table A; Target 85805; HLA-C*07:01; TDRD12; ENSG00000173809; TAA
HCESNPLLY

SEQ ID NO: 85806 - protein, 8 aa, Homo sapiens
  misc_feature: Table A; Target 85806; HLA-B*37:01; TDRD12; ENSG00000173809; TAA
HDAKVILA

SEQ ID NO: 85807 - protein, 9 aa, Homo sapiens
  misc_feature: Table A; Target 85807; HLA-A*30:01; TDRD12; ENSG00000173809; TAA
HDAKVILAL

SEQ ID NO: 85808 - protein, 9 aa, Homo sapiens
  misc_feature: Table A; Target 85808; HLA-A*68:02; TDRD12; ENSG00000173809; TAA
HDAKVILAL

SEQ ID NO: 85809 - protein, 9 aa, Homo sapiens
  misc_feature: Table A; Target 85809; HLA-B*13:02; TDRD12; ENSG00000173809; TAA
HDAKVILAL

SEQ ID NO: 85810 - protein, 9 aa, Homo sapiens
  misc_feature: Table A; Target 85810; HLA-B*35:03; TDRD12; ENSG00000173809; TAA
HDAKVILAL

SEQ ID NO: 85811 - protein, 9 aa, Homo sapiens
  misc_feature: Table A; Target 85811; HLA-B*37:01; TDRD12; ENSG00000173809; TAA
HDAKVILAL

SEQ ID NO: 85812 - protein, 9 aa, Homo sapiens
  misc_feature: Table A; Target 85812; HLA-B*38:01; TDRD12; ENSG00000173809; TAA
HDAKVILAL

SEQ ID NO: 85813 - protein, 9 aa, Homo sapiens
  misc_feature: Table A; Target 85813; HLA-B*40:01; TDRD12; ENSG00000173809; TAA
HDAKVILAL

SEQ ID NO: 85814 - protein, 9 aa, Homo sapiens
  misc_feature: Table A; Target 85814; HLA-B*40:02; TDRD12; ENSG00000173809; TAA
HDAKVILAL

SEQ ID NO: 85815 - protein, 9 aa, Homo sapiens
  misc_feature: Table A; Target 85815; HLA-B*44:02; TDRD12; ENSG00000173809; TAA
HDAKVILAL

SEQ ID NO: 85816 - protein, 9 aa, Homo sapiens
  misc_feature: Table A; Target 85816; HLA-B*44:03; TDRD12; ENSG00000173809; TAA
HDAKVILAL

SEQ ID NO: 85817 - protein, 9 aa, Homo sapiens
  misc_feature: Table A; Target 85817; HLA-C*06:02; TDRD12; ENSG00000173809; TAA
HDAKVILAL

SEQ ID NO: 85818 - protein, 8 aa, Homo sapiens
  misc_feature: Table A; Target 85818; HLA-A*30:01; TDRD12; ENSG00000173809; TAA
HDVDYQKL

SEQ ID NO: 85819 - protein, 8 aa, Homo sapiens
  misc_feature: Table A; Target 85819; HLA-B*37:01; TDRD12; ENSG00000173809; TAA
HDVDYQKL

SEQ ID NO: 85820 - protein, 8 aa, Homo sapiens
  misc_feature: Table A; Target 85820; HLA-B*40:02; TDRD12; ENSG00000173809; TAA
HDVDYQKL

SEQ ID NO: 85821 - protein, 10 aa, Homo sapiens
  misc_feature: Table A; Target 85821; HLA-C*14:02; TDRD12; ENSG00000173809; TAA
HFHAEQGSPA

SEQ ID NO: 85822 - protein, 10 aa, Homo sapiens
  misc_feature: Table A; Target 85822; HLA-C*03:03; TDRD12; ENSG00000173809; TAA
HGVNFPAQSL

SEQ ID NO: 85823 - protein, 10 aa, Homo sapiens
  misc_feature: Table A; Target 85823; HLA-C*03:04; TDRD12; ENSG00000173809; TAA
HGVNFPAQSL

SEQ ID NO: 85824 - protein, 8 aa, Homo sapiens
  misc_feature: Table A; Target 85824; HLA-C*01:02; TDRD12; ENSG00000173809; TAA
HITNLSSL

SEQ ID NO: 85825 - protein, 8 aa, Homo sapiens
  misc_feature: Table A; Target 85825; HLA-C*03:04; TDRD12; ENSG00000173809; TAA
HITNLSSL

SEQ ID NO: 85826 - protein, 9 aa, Homo sapiens
  misc_feature: Table A; Target 85826; HLA-A*03:02; TDRD12; ENSG00000173809; TAA
HITNLSSLK

SEQ ID NO: 85827 - protein, 9 aa, Homo sapiens
  misc_feature: Table A; Target 85827; HLA-A*02:01; TDRD12; ENSG00000173809; TAA
HLILDEVEV

SEQ ID NO: 85828 - protein, 9 aa, Homo sapiens
  misc_feature: Table A; Target 85828; HLA-B*35:03; TDRD12; ENSG00000173809; TAA
HLILDEVEV

SEQ ID NO: 85829 - protein, 9 aa, Homo sapiens
  misc_feature: Table A; Target 85829; HLA-B*55:01; TDRD12; ENSG00000173809; TAA
HLILDEVEV

SEQ ID NO: 85830 - protein, 9 aa, Homo sapiens
  misc_feature: Table A; Target 85830; HLA-A*02:01; TDRD12; ENSG00000173809; TAA
HLPEHFHTL

SEQ ID NO: 85831 - protein, 9 aa, Homo sapiens
  misc_feature: Table A; Target 85831; HLA-A*02:03; TDRD12; ENSG00000173809; TAA
HLPEHFHTL

SEQ ID NO: 85832 - protein, 9 aa, Homo sapiens
  misc_feature: Table A; Target 85832; HLA-A*02:04; TDRD12; ENSG00000173809; TAA
HLPEHFHTL

SEQ ID NO: 85833 - protein, 9 aa, Homo sapiens
  misc_feature: Table A; Target 85833; HLA-A*02:07; TDRD12; ENSG00000173809; TAA
HLPEHFHTL

SEQ ID NO: 85834 - protein, 9 aa, Homo sapiens
  misc_feature: Table A; Target 85834; HLA-A*03:01; TDRD12; ENSG00000173809; TAA
HLPEHFHTL

SEQ ID NO: 85835 - protein, 9 aa, Homo sapiens
  misc_feature: Table A; Target 85835; HLA-A*24:02; TDRD12; ENSG00000173809; TAA
HLPEHFHTL

SEQ ID NO: 85836 - protein, 9 aa, Homo sapiens
  misc_feature: Table A; Target 85836; HLA-A*68:02; TDRD12; ENSG00000173809; TAA
HLPEHFHTL

SEQ ID NO: 85837 - protein, 9 aa, Homo sapiens
  misc_feature: Table A; Target 85837; HLA-B*08:01; TDRD12; ENSG00000173809; TAA
HLPEHFHTL

SEQ ID NO: 85838 - protein, 8 aa, Homo sapiens
  misc_feature: Table A; Target 85838; HLA-B*35:03; TDRD12; ENSG00000173809; TAA
HMDLYATL

SEQ ID NO: 85839 - protein, 8 aa, Homo sapiens
  misc_feature: Table A; Target 85839; HLA-C*04:01; TDRD12; ENSG00000173809; TAA
HMDLYATL

SEQ ID NO: 85840 - protein, 8 aa, Homo sapiens
  misc_feature: Table A; Target 85840; HLA-C*05:01; TDRD12; ENSG00000173809; TAA
HMDLYATL

SEQ ID NO: 85841 - protein, 9 aa, Homo sapiens
  misc_feature: Table A; Target 85841; HLA-B*07:02; TDRD12; ENSG00000173809; TAA
HPVLLTIGL

SEQ ID NO: 85842 - protein, 9 aa, Homo sapiens
  misc_feature: Table A; Target 85842; HLA-B*35:01; TDRD12; ENSG00000173809; TAA
HPVLLTIGL

SEQ ID NO: 85843 - protein, 9 aa, Homo sapiens
  misc_feature: Table A; Target 85843; HLA-B*35:03; TDRD12; ENSG00000173809; TAA
HPVLLTIGL

SEQ ID NO: 85844 - protein, 9 aa, Homo sapiens
  misc_feature: Table A; Target 85844; HLA-B*54:01; TDRD12; ENSG00000173809; TAA
HPVLLTIGL

SEQ ID NO: 85845 - protein, 9 aa, Homo sapiens
  misc_feature: Table A; Target 85845; HLA-B*56:01; TDRD12; ENSG00000173809; TAA
HPVLLTIGL

SEQ ID NO: 85846 - protein, 9 aa, Homo sapiens
  misc_feature: Table A; Target 85846; HLA-C*07:02; TDRD12; ENSG00000173809; TAA
HPVLLTIGL

SEQ ID NO: 85847 - protein, 8 aa, Homo sapiens
  misc_feature: Table A; Target 85847; HLA-B*13:02; TDRD12; ENSG00000173809; TAA
HQIVAVGV

SEQ ID NO: 85848 - protein, 9 aa, Homo sapiens
  misc_feature: Table A; Target 85848; HLA-B*15:01; TDRD12; ENSG00000173809; TAA
HQIVAVGVH

SEQ ID NO: 85849 - protein, 9 aa, Homo sapiens
  misc_feature: Table A; Target 85849; HLA-B*15:03; TDRD12; ENSG00000173809; TAA
HQIVAVGVH

SEQ ID NO: 85850 - protein, 10 aa, Homo sapiens
  misc_feature: Table A; Target 85850; HLA-A*25:01; TDRD12; ENSG00000173809; TAA
HQIVAVGVHW

SEQ ID NO: 85851 - protein, 10 aa, Homo sapiens
  misc_feature: Table A; Target 85851; HLA-B*44:02; TDRD12; ENSG00000173809; TAA
HQIVAVGVHW

SEQ ID NO: 85852 - protein, 10 aa, Homo sapiens
  misc_feature: Table A; Target 85852; HLA-B*44:03; TDRD12; ENSG00000173809; TAA
HQIVAVGVHW

SEQ ID NO: 85853 - protein, 10 aa, Homo sapiens
  misc_feature: Table A; Target 85853; HLA-B*57:01; TDRD12; ENSG00000173809; TAA
HQIVAVGVHW

SEQ ID NO: 85854 - protein, 9 aa, Homo sapiens
  misc_feature: Table A; Target 85854; HLA-B*27:05; TDRD12; ENSG00000173809; TAA
HRINPETDL

SEQ ID NO: 85855 - protein, 9 aa, Homo sapiens
  misc_feature: Table A; Target 85855; HLA-B*38:01; TDRD12; ENSG00000173809; TAA
HRINPETDL

SEQ ID NO: 85856 - protein, 9 aa, Homo sapiens
  misc_feature: Table A; Target 85856; HLA-B*39:01; TDRD12; ENSG00000173809; TAA
HRINPETDL

SEQ ID NO: 85857 - protein, 11 aa, Homo sapiens
  misc_feature: Table A; Target 85857; HLA-B*27:02; TDRD12; ENSG00000173809; TAA
HRINPETDLPR

SEQ ID NO: 85858 - protein, 10 aa, Homo sapiens
  misc_feature: Table A; Target 85858; HLA-A*23:01; TDRD12; ENSG00000173809; TAA
HTLPPQAVEF

SEQ ID NO: 85859 - protein, 10 aa, Homo sapiens
  misc_feature: Table A; Target 85859; HLA-A*24:02; TDRD12; ENSG00000173809; TAA
HTLPPQAVEF

SEQ ID NO: 85860 - protein, 10 aa, Homo sapiens
  misc_feature: Table A; Target 85860; HLA-A*25:01; TDRD12; ENSG00000173809; TAA
HTLPPQAVEF

SEQ ID NO: 85861 - protein, 10 aa, Homo sapiens
  misc_feature: Table A; Target 85861; HLA-A*26:01; TDRD12; ENSG00000173809; TAA
HTLPPQAVEF

SEQ ID NO: 85862 - protein, 10 aa, Homo sapiens
  misc_feature: Table A; Target 85862; HLA-A*29:02; TDRD12; ENSG00000173809; TAA
HTLPPQAVEF

SEQ ID NO: 85863 - protein, 10 aa, Homo sapiens
  misc_feature: Table A; Target 85863; HLA-A*32:01; TDRD12; ENSG00000173809; TAA
HTLPPQAVEF

SEQ ID NO: 85864 - protein, 10 aa, Homo sapiens
  misc_feature: Table A; Target 85864; HLA-A*33:01; TDRD12; ENSG00000173809; TAA
HTLPPQAVEF

SEQ ID NO: 85865 - protein, 10 aa, Homo sapiens
  misc_feature: Table A; Target 85865; HLA-B*57:01; TDRD12; ENSG00000173809; TAA
HTLPPQAVEF

SEQ ID NO: 85866 - protein, 10 aa, Homo sapiens
  misc_feature: Table A; Target 85866; HLA-B*58:01; TDRD12; ENSG00000173809; TAA
HTLPPQAVEF

SEQ ID NO: 85867 - protein, 10 aa, Homo sapiens
  misc_feature: Table A; Target 85867; HLA-C*02:02; TDRD12; ENSG00000173809; TAA
HTLPPQAVEF

SEQ ID NO: 85868 - protein, 10 aa, Homo sapiens
  misc_feature: Table A; Target 85868; HLA-C*03:04; TDRD12; ENSG00000173809; TAA
HTLPPQAVEF

SEQ ID NO: 85869 - protein, 10 aa, Homo sapiens
  misc_feature: Table A; Target 85869; HLA-C*07:06; TDRD12; ENSG00000173809; TAA
HTLPPQAVEF

SEQ ID NO: 85870 - protein, 11 aa, Homo sapiens
  misc_feature: Table A; Target 85870; HLA-A*68:02; TDRD12; ENSG00000173809; TAA
HTLPPQAVEFI

SEQ ID NO: 85871 - protein, 9 aa, Homo sapiens
  misc_feature: Table A; Target 85871; HLA-B*37:01; TDRD12; ENSG00000173809; TAA
IDEGRTGLV

SEQ ID NO: 85872 - protein, 9 aa, Homo sapiens
  misc_feature: Table A; Target 85872; HLA-B*49:01; TDRD12; ENSG00000173809; TAA
IDEGRTGLV

SEQ ID NO: 85873 - protein, 11 aa, Homo sapiens
  misc_feature: Table A; Target 85873; HLA-A*31:01; TDRD12; ENSG00000173809; TAA
IDEGRTGLVTR

SEQ ID NO: 85874 - protein, 11 aa, Homo sapiens
  misc_feature: Table A; Target 85874; HLA-A*33:01; TDRD12; ENSG00000173809; TAA
IDEGRTGLVTR

SEQ ID NO: 85875 - protein, 11 aa, Homo sapiens
  misc_feature: Table A; Target 85875; HLA-A*33:03; TDRD12; ENSG00000173809; TAA
IDEGRTGLVTR

SEQ ID NO: 85876 - protein, 11 aa, Homo sapiens
  misc_feature: Table A; Target 85876; HLA-A*68:01; TDRD12; ENSG00000173809; TAA
IDEGRTGLVTR

SEQ ID NO: 85877 - protein, 11 aa, Homo sapiens
  misc_feature: Table A; Target 85877; HLA-C*04:01; TDRD12; ENSG00000173809; TAA
IDEGRTGLVTR

SEQ ID NO: 85878 - protein, 10 aa, Homo sapiens
  misc_feature: Table A; Target 85878; HLA-A*30:01; TDRD12; ENSG00000173809; TAA
IDNPEHIEQL

SEQ ID NO: 85879 - protein, 10 aa, Homo sapiens
  misc_feature: Table A; Target 85879; HLA-B*37:01; TDRD12; ENSG00000173809; TAA
IDNPEHIEQL

SEQ ID NO: 85880 - protein, 10 aa, Homo sapiens
  misc_feature: Table A; Target 85880; HLA-B*38:01; TDRD12; ENSG00000173809; TAA
IDNPEHIEQL

SEQ ID NO: 85881 - protein, 10 aa, Homo sapiens
  misc_feature: Table A; Target 85881; HLA-B*40:01; TDRD12; ENSG00000173809; TAA
IDNPEHIEQL

SEQ ID NO: 85882 - protein, 10 aa, Homo sapiens
  misc_feature: Table A; Target 85882; HLA-B*40:02; TDRD12; ENSG00000173809; TAA
IDNPEHIEQL

SEQ ID NO: 85883 - protein, 11 aa, Homo sapiens
  misc_feature: Table A; Target 85883; HLA-A*03:02; TDRD12; ENSG00000173809; TAA
IDSSPLSADLK

SEQ ID NO: 85884 - protein, 11 aa, Homo sapiens
  misc_feature: Table A; Target 85884; HLA-A*11:01; TDRD12; ENSG00000173809; TAA
IDSSPLSADLK

SEQ ID NO: 85885 - protein, 11 aa, Homo sapiens
  misc_feature: Table A; Target 85885; HLA-B*27:02; TDRD12; ENSG00000173809; TAA
IDSSPLSADLK

SEQ ID NO: 85886 - protein, 9 aa, Homo sapiens
  misc_feature: Table A; Target 85886; HLA-B*49:01; TDRD12; ENSG00000173809; TAA
IDYNVRAEI

SEQ ID NO: 85887 - protein, 9 aa, Homo sapiens
  misc_feature: Table A; Target 85887; HLA-B*51:01; TDRD12; ENSG00000173809; TAA
IDYNVRAEI

SEQ ID NO: 85888 - protein, 10 aa, Homo sapiens
  misc_feature: Table A; Target 85888; HLA-A*30:01; TDRD12; ENSG00000173809; TAA
IDYNVRAEIL

SEQ ID NO: 85889 - protein, 10 aa, Homo sapiens
  misc_feature: Table A; Target 85889; HLA-B*37:01; TDRD12; ENSG00000173809; TAA
IDYNVRAEIL

SEQ ID NO: 85890 - protein, 8 aa, Homo sapiens
  misc_feature: Table A; Target 85890; HLA-B*44:02; TDRD12; ENSG00000173809; TAA
IEDPGCFW

SEQ ID NO: 85891 - protein, 8 aa, Homo sapiens
  misc_feature: Table A; Target 85891; HLA-B*44:03; TDRD12; ENSG00000173809; TAA
IEDPGCFW

SEQ ID NO: 85892 - protein, 9 aa, Homo sapiens
  misc_feature: Table A; Target 85892; HLA-B*49:01; TDRD12; ENSG00000173809; TAA
IEDPGCFWV

SEQ ID NO: 85893 - protein, 10 aa, Homo sapiens
  misc_feature: Table A; Target 85893; HLA-B*49:01; TDRD12; ENSG00000173809; TAA
IEDPGCFWVI

SEQ ID NO: 85894 - protein, 8 aa, Homo sapiens
  misc_feature: Table A; Target 85894; HLA-B*18:01; TDRD12; ENSG00000173809; TAA
IEHLIKEF

SEQ ID NO: 85895 - protein, 8 aa, Homo sapiens
  misc_feature: Table A; Target 85895; HLA-B*37:01; TDRD12; ENSG00000173809; TAA
IEHLIKEF

SEQ ID NO: 85896 - protein, 8 aa, Homo sapiens
  misc_feature: Table A; Target 85896; HLA-B*44:02; TDRD12; ENSG00000173809; TAA
IEHLIKEF

SEQ ID NO: 85897 - protein, 8 aa, Homo sapiens
  misc_feature: Table A; Target 85897; HLA-B*44:03; TDRD12; ENSG00000173809; TAA
IEHLIKEF

SEQ ID NO: 85898 - protein, 9 aa, Homo sapiens
  misc_feature: Table A; Target 85898; HLA-B*44:03; TDRD12; ENSG00000173809; TAA
IEHLIKEFM

SEQ ID NO: 85899 - protein, 8 aa, Homo sapiens
  misc_feature: Table A; Target 85899; HLA-A*23:01; TDRD12; ENSG00000173809; TAA
IEIKPLTL

SEQ ID NO: 85900 - protein, 8 aa, Homo sapiens
  misc_feature: Table A; Target 85900; HLA-A*30:01; TDRD12; ENSG00000173809; TAA
IEIKPLTL

SEQ ID NO: 85901 - protein, 8 aa, Homo sapiens
  misc_feature: Table A; Target 85901; HLA-B*13:02; TDRD12; ENSG00000173809; TAA
IEIKPLTL

SEQ ID NO: 85902 - protein, 8 aa, Homo sapiens
  misc_feature: Table A; Target 85902; HLA-B*18:01; TDRD12; ENSG00000173809; TAA
IEIKPLTL

SEQ ID NO: 85903 - protein, 8 aa, Homo sapiens
  misc_feature: Table A; Target 85903; HLA-B*37:01; TDRD12; ENSG00000173809; TAA
IEIKPLTL

SEQ ID NO: 85904 - protein, 8 aa, Homo sapiens
  misc_feature: Table A; Target 85904; HLA-B*40:01; TDRD12; ENSG00000173809; TAA
IEIKPLTL

SEQ ID NO: 85905 - protein, 8 aa, Homo sapiens
  misc_feature: Table A; Target 85905; HLA-B*40:02; TDRD12; ENSG00000173809; TAA
IEIKPLTL

SEQ ID NO: 85906 - protein, 8 aa, Homo sapiens
  misc_feature: Table A; Target 85906; HLA-B*44:02; TDRD12; ENSG00000173809; TAA
IEIKPLTL

SEQ ID NO: 85907 - protein, 8 aa, Homo sapiens
  misc_feature: Table A; Target 85907; HLA-B*44:03; TDRD12; ENSG00000173809; TAA
IEIKPLTL

SEQ ID NO: 85908 - protein, 8 aa, Homo sapiens
  misc_feature: Table A; Target 85908; HLA-B*49:01; TDRD12; ENSG00000173809; TAA
IEIKPLTL

SEQ ID NO: 85909 - protein, 9 aa, Homo sapiens
  misc_feature: Table A; Target 85909; HLA-A*30:01; TDRD12; ENSG00000173809; TAA
IEVEERESA

SEQ ID NO: 85910 - protein, 9 aa, Homo sapiens
  misc_feature: Table A; Target 85910; HLA-B*40:01; TDRD12; ENSG00000173809; TAA
IEVEERESA

SEQ ID NO: 85911 - protein, 9 aa, Homo sapiens
  misc_feature: Table A; Target 85911; HLA-B*40:02; TDRD12; ENSG00000173809; TAA
IEVEERESA

SEQ ID NO: 85912 - protein, 9 aa, Homo sapiens
  misc_feature: Table A; Target 85912; HLA-B*49:01; TDRD12; ENSG00000173809; TAA
IEVEERESA

SEQ ID NO: 85913 - protein, 10 aa, Homo sapiens
  misc_feature: Table A; Target 85913; HLA-B*44:02; TDRD12; ENSG00000173809; TAA
IEWNPKVTRY

SEQ ID NO: 85914 - protein, 10 aa, Homo sapiens
  misc_feature: Table A; Target 85914; HLA-B*44:03; TDRD12; ENSG00000173809; TAA
IEWNPKVTRY

SEQ ID NO: 85915 - protein, 8 aa, Homo sapiens
  misc_feature: Table A; Target 85915; HLA-C*01:02; TDRD12; ENSG00000173809; TAA
IFELLGEY

SEQ ID NO: 85916 - protein, 8 aa, Homo sapiens
  misc_feature: Table A; Target 85916; HLA-C*04:01; TDRD12; ENSG00000173809; TAA
IFELLGEY

SEQ ID NO: 85917 - protein, 8 aa, Homo sapiens
  misc_feature: Table A; Target 85917; HLA-C*07:01; TDRD12; ENSG00000173809; TAA
IFELLGEY

SEQ ID NO: 85918 - protein, 8 aa, Homo sapiens
  misc_feature: Table A; Target 85918; HLA-C*14:02; TDRD12; ENSG00000173809; TAA
IFELLGEY

SEQ ID NO: 85919 - protein, 8 aa, Homo sapiens
  misc_feature: Table A; Target 85919; HLA-C*01:02; TDRD12; ENSG00000173809; TAA
IFNLQNVL

SEQ ID NO: 85920 - protein, 8 aa, Homo sapiens
  misc_feature: Table A; Target 85920; HLA-C*14:02; TDRD12; ENSG00000173809; TAA
IFNLQNVL

SEQ ID NO: 85921 - protein, 8 aa, Homo sapiens
  misc_feature: Table A; Target 85921; HLA-C*04:01; TDRD12; ENSG00000173809; TAA
IHHKIVGK

SEQ ID NO: 85922 - protein, 9 aa, Homo sapiens
  misc_feature: Table A; Target 85922; HLA-A*02:07; TDRD12; ENSG00000173809; TAA
IIPFYILNA

SEQ ID NO: 85923 - protein, 8 aa, Homo sapiens
  misc_feature: Table A; Target 85923; HLA-A*02:07; TDRD12; ENSG00000173809; TAA
ILDEVEVL

SEQ ID NO: 85924 - protein, 8 aa, Homo sapiens
  misc_feature: Table A; Target 85924; HLA-B*55:01; TDRD12; ENSG00000173809; TAA
ILDEVEVL

SEQ ID NO: 85925 - protein, 8 aa, Homo sapiens
  misc_feature: Table A; Target 85925; HLA-C*04:01; TDRD12; ENSG00000173809; TAA
ILDEVEVL

SEQ ID NO: 85926 - protein, 8 aa, Homo sapiens
  misc_feature: Table A; Target 85926; HLA-C*05:01; TDRD12; ENSG00000173809; TAA
ILDEVEVL

SEQ ID NO: 85927 - protein, 9 aa, Homo sapiens
  misc_feature: Table A; Target 85927; HLA-A*01:01; TDRD12; ENSG00000173809; TAA
ILDEVEVLF

SEQ ID NO: 85928 - protein, 9 aa, Homo sapiens
  misc_feature: Table A; Target 85928; HLA-A*02:01; TDRD12; ENSG00000173809; TAA
ILDEVEVLF

SEQ ID NO: 85929 - protein, 9 aa, Homo sapiens
  misc_feature: Table A; Target 85929; HLA-A*02:07; TDRD12; ENSG00000173809; TAA
ILDEVEVLF

SEQ ID NO: 85930 - protein, 9 aa, Homo sapiens
  misc_feature: Table A; Target 85930; HLA-A*23:01; TDRD12; ENSG00000173809; TAA
ILDEVEVLF

SEQ ID NO: 85931 - protein, 9 aa, Homo sapiens
  misc_feature: Table A; Target 85931; HLA-A*24:02; TDRD12; ENSG00000173809; TAA
ILDEVEVLF

SEQ ID NO: 85932 - protein, 9 aa, Homo sapiens
  misc_feature: Table A; Target 85932; HLA-B*35:01; TDRD12; ENSG00000173809; TAA
ILDEVEVLF

SEQ ID NO: 85933 - protein, 9 aa, Homo sapiens
  misc_feature: Table A; Target 85933; HLA-B*35:03; TDRD12; ENSG00000173809; TAA
ILDEVEVLF

SEQ ID NO: 85934 - protein, 9 aa, Homo sapiens
  misc_feature: Table A; Target 85934; HLA-B*38:01; TDRD12; ENSG00000173809; TAA
ILDEVEVLF

SEQ ID NO: 85935 - protein, 9 aa, Homo sapiens
  misc_feature: Table A; Target 85935; HLA-B*55:01; TDRD12; ENSG00000173809; TAA
ILDEVEVLF

SEQ ID NO: 85936 - protein, 9 aa, Homo sapiens
  misc_feature: Table A; Target 85936; HLA-C*03:03; TDRD12; ENSG00000173809; TAA
ILDEVEVLF

SEQ ID NO: 85937 - protein, 9 aa, Homo sapiens
  misc_feature: Table A; Target 85937; HLA-C*04:01; TDRD12; ENSG00000173809; TAA
ILDEVEVLF

SEQ ID NO: 85938 - protein, 9 aa, Homo sapiens
  misc_feature: Table A; Target 85938; HLA-C*05:01; TDRD12; ENSG00000173809; TAA
ILDEVEVLF

SEQ ID NO: 85939 - protein, 9 aa, Homo sapiens
  misc_feature: Table A; Target 85939; HLA-C*07:04; TDRD12; ENSG00000173809; TAA
ILDEVEVLF

SEQ ID NO: 85940 - protein, 10 aa, Homo sapiens
  misc_feature: Table A; Target 85940; HLA-A*02:01; TDRD12; ENSG00000173809; TAA
ILDEVEVLFL

SEQ ID NO: 85941 - protein, 10 aa, Homo sapiens
  misc_feature: Table A; Target 85941; HLA-A*02:07; TDRD12; ENSG00000173809; TAA
ILDEVEVLFL

SEQ ID NO: 85942 - protein, 9 aa, Homo sapiens
  misc_feature: Table A; Target 85942; HLA-A*02:07; TDRD12; ENSG00000173809; TAA
ILDNFKKNI

SEQ ID NO: 85943 - protein, 11 aa, Homo sapiens
  misc_feature: Table A; Target 85943; HLA-A*02:01; TDRD12; ENSG00000173809; TAA
ILDNFKKNIEV

SEQ ID NO: 85944 - protein, 11 aa, Homo sapiens
  misc_feature: Table A; Target 85944; HLA-A*02:07; TDRD12; ENSG00000173809; TAA
ILDNFKKNIEV

SEQ ID NO: 85945 - protein, 8 aa, Homo sapiens
  misc_feature: Table A; Target 85945; HLA-B*37:01; TDRD12; ENSG00000173809; TAA
ILNATNYF

SEQ ID NO: 85946 - protein, 10 aa, Homo sapiens
  misc_feature: Table A; Target 85946; HLA-B*27:02; TDRD12; ENSG00000173809; TAA
ILVEFIDEGR

SEQ ID NO: 85947 - protein, 8 aa, Homo sapiens
  misc_feature: Table A; Target 85947; HLA-B*35:03; TDRD12; ENSG00000173809; TAA
IPACEESL

SEQ ID NO: 85948 - protein, 8 aa, Homo sapiens
  misc_feature: Table A; Target 85948; HLA-B*51:01; TDRD12; ENSG00000173809; TAA
IPFYILNA

SEQ ID NO: 85949 - protein, 8 aa, Homo sapiens
  misc_feature: Table A; Target 85949; HLA-B*54:01; TDRD12; ENSG00000173809; TAA
IPFYILNA

SEQ ID NO: 85950 - protein, 8 aa, Homo sapiens
  misc_feature: Table A; Target 85950; HLA-B*56:01; TDRD12; ENSG00000173809; TAA
IPFYILNA

SEQ ID NO: 85951 - protein, 9 aa, Homo sapiens
  misc_feature: Table A; Target 85951; HLA-B*54:01; TDRD12; ENSG00000173809; TAA
IPFYILNAT

SEQ ID NO: 85952 - protein, 9 aa, Homo sapiens
  misc_feature: Table A; Target 85952; HLA-B*56:01; TDRD12; ENSG00000173809; TAA
IPFYILNAT

SEQ ID NO: 85953 - protein, 11 aa, Homo sapiens
  misc_feature: Table A; Target 85953; HLA-B*35:01; TDRD12; ENSG00000173809; TAA
IPFYILNATNY

SEQ ID NO: 85954 - protein, 9 aa, Homo sapiens
  misc_feature: Table A; Target 85954; HLA-B*07:02; TDRD12; ENSG00000173809; TAA
IPSQAQKTL

SEQ ID NO: 85955 - protein, 9 aa, Homo sapiens
  misc_feature: Table A; Target 85955; HLA-B*08:01; TDRD12; ENSG00000173809; TAA
IPSQAQKTL

SEQ ID NO: 85956 - protein, 9 aa, Homo sapiens
  misc_feature: Table A; Target 85956; HLA-B*35:01; TDRD12; ENSG00000173809; TAA
IPSQAQKTL

SEQ ID NO: 85957 - protein, 9 aa, Homo sapiens
  misc_feature: Table A; Target 85957; HLA-B*35:03; TDRD12; ENSG00000173809; TAA
IPSQAQKTL

SEQ ID NO: 85958 - protein, 9 aa, Homo sapiens
  misc_feature: Table A; Target 85958; HLA-B*51:01; TDRD12; ENSG00000173809; TAA
IPSQAQKTL

SEQ ID NO: 85959 - protein, 9 aa, Homo sapiens
  misc_feature: Table A; Target 85959; HLA-B*56:01; TDRD12; ENSG00000173809; TAA
IPSQAQKTL

SEQ ID NO: 85960 - protein, 9 aa, Homo sapiens
  misc_feature: Table A; Target 85960; HLA-C*07:02; TDRD12; ENSG00000173809; TAA
IPSQAQKTL

SEQ ID NO: 85961 - protein, 9 aa, Homo sapiens
  misc_feature: Table A; Target 85961; HLA-C*16:02; TDRD12; ENSG00000173809; TAA
IPSQAQKTL

SEQ ID NO: 85962 - protein, 10 aa, Homo sapiens
  misc_feature: Table A; Target 85962; HLA-B*07:02; TDRD12; ENSG00000173809; TAA
IPSQAQKTLI

SEQ ID NO: 85963 - protein, 10 aa, Homo sapiens
  misc_feature: Table A; Target 85963; HLA-B*51:01; TDRD12; ENSG00000173809; TAA
IPSQAQKTLI

SEQ ID NO: 85964 - protein, 10 aa, Homo sapiens
  misc_feature: Table A; Target 85964; HLA-B*56:01; TDRD12; ENSG00000173809; TAA
IPSQAQKTLI

SEQ ID NO: 85965 - protein, 11 aa, Homo sapiens
  misc_feature: Table A; Target 85965; HLA-B*07:02; TDRD12; ENSG00000173809; TAA
IPSQAQKTLIF

SEQ ID NO: 85966 - protein, 8 aa, Homo sapiens
  misc_feature: Table A; Target 85966; HLA-B*51:01; TDRD12; ENSG00000173809; TAA
IPVKSKNI

SEQ ID NO: 85967 - protein, 8 aa, Homo sapiens
  misc_feature: Table A; Target 85967; HLA-B*13:02; TDRD12; ENSG00000173809; TAA
IQYFQNLL

SEQ ID NO: 85968 - protein, 9 aa, Homo sapiens
  misc_feature: Table A; Target 85968; HLA-A*03:01; TDRD12; ENSG00000173809; TAA
IQYFQNLLK

SEQ ID NO: 85969 - protein, 9 aa, Homo sapiens
  misc_feature: Table A; Target 85969; HLA-A*11:01; TDRD12; ENSG00000173809; TAA
IQYFQNLLK

SEQ ID NO: 85970 - protein, 8 aa, Homo sapiens
  misc_feature: Table A; Target 85970; HLA-B*27:02; TDRD12; ENSG00000173809; TAA
IRVVVESF

SEQ ID NO: 85971 - protein, 8 aa, Homo sapiens
  misc_feature: Table A; Target 85971; HLA-C*16:04; TDRD12; ENSG00000173809; TAA
IRVVVESF

SEQ ID NO: 85972 - protein, 9 aa, Homo sapiens
  misc_feature: Table A; Target 85972; HLA-A*01:01; TDRD12; ENSG00000173809; TAA
ISDLQQLQK

SEQ ID NO: 85973 - protein, 9 aa, Homo sapiens
  misc_feature: Table A; Target 85973; HLA-A*11:01; TDRD12; ENSG00000173809; TAA
ISDLQQLQK

SEQ ID NO: 85974 - protein, 10 aa, Homo sapiens
  misc_feature: Table A; Target 85974; HLA-C*05:01; TDRD12; ENSG00000173809; TAA
ISDLQQLQKL

SEQ ID NO: 85975 - protein, 11 aa, Homo sapiens
  misc_feature: Table A; Target 85975; HLA-A*01:01; TDRD12; ENSG00000173809; TAA
ISHCESNPLLY

SEQ ID NO: 85976 - protein, 9 aa, Homo sapiens
  misc_feature: Table A; Target 85976; HLA-B*35:03; TDRD12; ENSG00000173809; TAA
ITAMEEAAL

SEQ ID NO: 85977 - protein, 9 aa, Homo sapiens
  misc_feature: Table A; Target 85977; HLA-C*03:03; TDRD12; ENSG00000173809; TAA
ITAMEEAAL

SEQ ID NO: 85978 - protein, 9 aa, Homo sapiens
  misc_feature: Table A; Target 85978; HLA-C*03:04; TDRD12; ENSG00000173809; TAA
ITAMEEAAL

SEQ ID NO: 85979 - protein, 10 aa, Homo sapiens
  misc_feature: Table A; Target 85979; HLA-A*01:01; TDRD12; ENSG00000173809; TAA
ITAMEEAALY

SEQ ID NO: 85980 - protein, 10 aa, Homo sapiens
  misc_feature: Table A; Target 85980; HLA-A*26:01; TDRD12; ENSG00000173809; TAA
ITAMEEAALY

SEQ ID NO: 85981 - protein, 10 aa, Homo sapiens
  misc_feature: Table A; Target 85981; HLA-A*29:02; TDRD12; ENSG00000173809; TAA
ITAMEEAALY

SEQ ID NO: 85982 - protein, 10 aa, Homo sapiens
  misc_feature: Table A; Target 85982; HLA-A*30:02; TDRD12; ENSG00000173809; TAA
ITAMEEAALY

SEQ ID NO: 85983 - protein, 8 aa, Homo sapiens
  misc_feature: Table A; Target 85983; HLA-C*05:01; TDRD12; ENSG00000173809; TAA
ITDATCVI

SEQ ID NO: 85984 - protein, 8 aa, Homo sapiens
  misc_feature: Table A; Target 85984; HLA-A*03:02; TDRD12; ENSG00000173809; TAA
ITNLSSLK

SEQ ID NO: 85985 - protein, 8 aa, Homo sapiens
  misc_feature: Table A; Target 85985; HLA-A*01:01; TDRD12; ENSG00000173809; TAA
ITSSADQY

SEQ ID NO: 85986 - protein, 8 aa, Homo sapiens
  misc_feature: Table A; Target 85986; HLA-A*30:02; TDRD12; ENSG00000173809; TAA
ITSSADQY

SEQ ID NO: 85987 - protein, 8 aa, Homo sapiens
  misc_feature: Table A; Target 85987; HLA-B*39:01; TDRD12; ENSG00000173809; TAA
ITSSADQY

SEQ ID NO: 85988 - protein, 8 aa, Homo sapiens
  misc_feature: Table A; Target 85988; HLA-C*16:02; TDRD12; ENSG00000173809; TAA
ITSSADQY

SEQ ID NO: 85989 - protein, 9 aa, Homo sapiens
  misc_feature: Table A; Target 85989; HLA-B*27:05; TDRD12; ENSG00000173809; TAA
ITSSADQYL

SEQ ID NO: 85990 - protein, 9 aa, Homo sapiens
  misc_feature: Table A; Target 85990; HLA-B*35:03; TDRD12; ENSG00000173809; TAA
ITSSADQYL

SEQ ID NO: 85991 - protein, 9 aa, Homo sapiens
  misc_feature: Table A; Target 85991; HLA-B*38:01; TDRD12; ENSG00000173809; TAA
ITSSADQYL

SEQ ID NO: 85992 - protein, 9 aa, Homo sapiens
  misc_feature: Table A; Target 85992; HLA-B*39:01; TDRD12; ENSG00000173809; TAA
ITSSADQYL

SEQ ID NO: 85993 - protein, 9 aa, Homo sapiens
  misc_feature: Table A; Target 85993; HLA-C*04:01; TDRD12; ENSG00000173809; TAA
ITSSADQYL

SEQ ID NO: 85994 - protein, 8 aa, Homo sapiens
  misc_feature: Table A; Target 85994; HLA-A*25:01; TDRD12; ENSG00000173809; TAA
IVAVGVHW

SEQ ID NO: 85995 - protein, 8 aa, Homo sapiens
  misc_feature: Table A; Target 85995; HLA-A*32:01; TDRD12; ENSG00000173809; TAA
IVAVGVHW

SEQ ID NO: 85996 - protein, 8 aa, Homo sapiens
  misc_feature: Table A; Target 85996; HLA-B*57:01; TDRD12; ENSG00000173809; TAA
IVAVGVHW

SEQ ID NO: 85997 - protein, 8 aa, Homo sapiens
  misc_feature: Table A; Target 85997; HLA-B*58:01; TDRD12; ENSG00000173809; TAA
IVAVGVHW

SEQ ID NO: 85998 - protein, 8 aa, Homo sapiens
  misc_feature: Table A; Target 85998; HLA-C*05:01; TDRD12; ENSG00000173809; TAA
IVDKHMDL

SEQ ID NO: 85999 - protein, 9 aa, Homo sapiens
  misc_feature: Table A; Target 85999; HLA-A*01:01; TDRD12; ENSG00000173809; TAA
IVDKHMDLY

SEQ ID NO: 86000 - protein, 9 aa, Homo sapiens
  misc_feature: Table A; Target 86000; HLA-A*02:07; TDRD12; ENSG00000173809; TAA
IVDKHMDLY

SEQ ID NO: 86001 - protein, 9 aa, Homo sapiens
  misc_feature: Table A; Target 86001; HLA-A*29:02; TDRD12; ENSG00000173809; TAA
IVDKHMDLY

SEQ ID NO: 86002 - protein, 9 aa, Homo sapiens
  misc_feature: Table A; Target 86002; HLA-A*30:02; TDRD12; ENSG00000173809; TAA
IVDKHMDLY

SEQ ID NO: 86003 - protein, 9 aa, Homo sapiens
  misc_feature: Table A; Target 86003; HLA-B*58:01; TDRD12; ENSG00000173809; TAA
IVDKHMDLY

SEQ ID NO: 86004 - protein, 9 aa, Homo sapiens
  misc_feature: Table A; Target 86004; HLA-A*32:01; TDRD12; ENSG00000173809; TAA
IVGDLRPTA

SEQ ID NO: 86005 - protein, 9 aa, Homo sapiens
  misc_feature: Table A; Target 86005; HLA-B*54:01; TDRD12; ENSG00000173809; TAA
IVGDLRPTA

SEQ ID NO: 86006 - protein, 9 aa, Homo sapiens
  misc_feature: Table A; Target 86006; HLA-B*56:01; TDRD12; ENSG00000173809; TAA
IVGDLRPTA

SEQ ID NO: 86007 - protein, 9 aa, Homo sapiens
  misc_feature: Table A; Target 86007; HLA-A*03:02; TDRD12; ENSG00000173809; TAA
IVGKLHDAK

SEQ ID NO: 86008 - protein, 9 aa, Homo sapiens
  misc_feature: Table A; Target 86008; HLA-A*26:01; TDRD12; ENSG00000173809; TAA
IVITAMEEA

SEQ ID NO: 86009 - protein, 9 aa, Homo sapiens
  misc_feature: Table A; Target 86009; HLA-B*46:01; TDRD12; ENSG00000173809; TAA
IVITAMEEA

SEQ ID NO: 86010 - protein, 9 aa, Homo sapiens
  misc_feature: Table A; Target 86010; HLA-B*56:01; TDRD12; ENSG00000173809; TAA
IVITAMEEA

SEQ ID NO: 86011 - protein, 9 aa, Homo sapiens
  misc_feature: Table A; Target 86011; HLA-A*02:03; TDRD12; ENSG00000173809; TAA
IVKSITSSA

SEQ ID NO: 86012 - protein, 9 aa, Homo sapiens
  misc_feature: Table A; Target 86012; HLA-A*32:01; TDRD12; ENSG00000173809; TAA
IVKSITSSA

SEQ ID NO: 86013 - protein, 9 aa, Homo sapiens
  misc_feature: Table A; Target 86013; HLA-B*07:02; TDRD12; ENSG00000173809; TAA
IVKSITSSA

SEQ ID NO: 86014 - protein, 9 aa, Homo sapiens
  misc_feature: Table A; Target 86014; HLA-B*08:01; TDRD12; ENSG00000173809; TAA
IVKSITSSA

SEQ ID NO: 86015 - protein, 9 aa, Homo sapiens
  misc_feature: Table A; Target 86015; HLA-B*15:01; TDRD12; ENSG00000173809; TAA
IVKSITSSA

SEQ ID NO: 86016 - protein, 9 aa, Homo sapiens
  misc_feature: Table A; Target 86016; HLA-B*40:02; TDRD12; ENSG00000173809; TAA
IVKSITSSA

SEQ ID NO: 86017 - protein, 9 aa, Homo sapiens
  misc_feature: Table A; Target 86017; HLA-B*46:01; TDRD12; ENSG00000173809; TAA
IVKSITSSA

SEQ ID NO: 86018 - protein, 9 aa, Homo sapiens
  misc_feature: Table A; Target 86018; HLA-B*54:01; TDRD12; ENSG00000173809; TAA
IVKSITSSA

SEQ ID NO: 86019 - protein, 9 aa, Homo sapiens
  misc_feature: Table A; Target 86019; HLA-B*55:01; TDRD12; ENSG00000173809; TAA
IVKSITSSA

SEQ ID NO: 86020 - protein, 9 aa, Homo sapiens
  misc_feature: Table A; Target 86020; HLA-B*56:01; TDRD12; ENSG00000173809; TAA
IVKSITSSA

SEQ ID NO: 86021 - protein, 9 aa, Homo sapiens
  misc_feature: Table A; Target 86021; HLA-C*02:02; TDRD12; ENSG00000173809; TAA
IVKSITSSA

SEQ ID NO: 86022 - protein, 9 aa, Homo sapiens
  misc_feature: Table A; Target 86022; HLA-C*07:02; TDRD12; ENSG00000173809; TAA
IVKSITSSA

SEQ ID NO: 86023 - protein, 8 aa, Homo sapiens
  misc_feature: Table A; Target 86023; HLA-A*23:01; TDRD12; ENSG00000173809; TAA
IVTTPYSL

SEQ ID NO: 86024 - protein, 8 aa, Homo sapiens
  misc_feature: Table A; Target 86024; HLA-C*16:01; TDRD12; ENSG00000173809; TAA
IVTTPYSL

SEQ ID NO: 86025 - protein, 9 aa, Homo sapiens
  misc_feature: Table A; Target 86025; HLA-A*23:01; TDRD12; ENSG00000173809; TAA
IVTTPYSLL

SEQ ID NO: 86026 - protein, 9 aa, Homo sapiens
  misc_feature: Table A; Target 86026; HLA-A*24:02; TDRD12; ENSG00000173809; TAA
IVTTPYSLL

SEQ ID NO: 86027 - protein, 9 aa, Homo sapiens
  misc_feature: Table A; Target 86027; HLA-A*25:01; TDRD12; ENSG00000173809; TAA
IVTTPYSLL

SEQ ID NO: 86028 - protein, 9 aa, Homo sapiens
  misc_feature: Table A; Target 86028; HLA-C*01:02; TDRD12; ENSG00000173809; TAA
IVTTPYSLL

SEQ ID NO: 86029 - protein, 9 aa, Homo sapiens
  misc_feature: Table A; Target 86029; HLA-C*03:03; TDRD12; ENSG00000173809; TAA
IVTTPYSLL

SEQ ID NO: 86030 - protein, 9 aa, Homo sapiens
  misc_feature: Table A; Target 86030; HLA-C*03:04; TDRD12; ENSG00000173809; TAA
IVTTPYSLL

SEQ ID NO: 86031 - protein, 9 aa, Homo sapiens
  misc_feature: Table A; Target 86031; HLA-C*05:01; TDRD12; ENSG00000173809; TAA
IVTTPYSLL

SEQ ID NO: 86032 - protein, 9 aa, Homo sapiens
  misc_feature: Table A; Target 86032; HLA-B*57:01; TDRD12; ENSG00000173809; TAA
KAQFIFELL

SEQ ID NO: 86033 - protein, 8 aa, Homo sapiens
  misc_feature: Table A; Target 86033; HLA-C*16:01; TDRD12; ENSG00000173809; TAA
KATTQVEA

SEQ ID NO: 86034 - protein, 8 aa, Homo sapiens
  misc_feature: Table A; Target 86034; HLA-C*16:02; TDRD12; ENSG00000173809; TAA
KATTQVEA

SEQ ID NO: 86035 - protein, 9 aa, Homo sapiens
  misc_feature: Table A; Target 86035; HLA-A*31:01; TDRD12; ENSG00000173809; TAA
KATTQVEAR

SEQ ID NO: 86036 - protein, 9 aa, Homo sapiens
  misc_feature: Table A; Target 86036; HLA-A*68:01; TDRD12; ENSG00000173809; TAA
KATTQVEAR

SEQ ID NO: 86037 - protein, 9 aa, Homo sapiens
  misc_feature: Table A; Target 86037; HLA-B*57:01; TDRD12; ENSG00000173809; TAA
KATTQVEAR

SEQ ID NO: 86038 - protein, 9 aa, Homo sapiens
  misc_feature: Table A; Target 86038; HLA-C*07:06; TDRD12; ENSG00000173809; TAA
KATTQVEAR

SEQ ID NO: 86039 - protein, 9 aa, Homo sapiens
  misc_feature: Table A; Target 86039; HLA-C*16:02; TDRD12; ENSG00000173809; TAA
KATTQVEAR

SEQ ID NO: 86040 - protein, 10 aa, Homo sapiens
  misc_feature: Table A; Target 86040; HLA-B*40:01; TDRD12; ENSG00000173809; TAA
KATTQVEARL

SEQ ID NO: 86041 - protein, 10 aa, Homo sapiens
  misc_feature: Table A; Target 86041; HLA-B*58:01; TDRD12; ENSG00000173809; TAA
KATTQVEARL

SEQ ID NO: 86042 - protein, 10 aa, Homo sapiens
  misc_feature: Table A; Target 86042; HLA-C*16:02; TDRD12; ENSG00000173809; TAA
KATTQVEARL

SEQ ID NO: 86043 - protein, 9 aa, Homo sapiens
  misc_feature: Table A; Target 86043; HLA-B*37:01; TDRD12; ENSG00000173809; TAA
KDASHAVGV

SEQ ID NO: 86044 - protein, 9 aa, Homo sapiens
  misc_feature: Table A; Target 86044; HLA-B*40:02; TDRD12; ENSG00000173809; TAA
KDASHAVGV

SEQ ID NO: 86045 - protein, 9 aa, Homo sapiens
  misc_feature: Table A; Target 86045; HLA-C*16:02; TDRD12; ENSG00000173809; TAA
KDASHAVGV

SEQ ID NO: 86046 - protein, 11 aa, Homo sapiens
  misc_feature: Table A; Target 86046; HLA-A*31:01; TDRD12; ENSG00000173809; TAA
KDASHAVGVLR

SEQ ID NO: 86047 - protein, 8 aa, Homo sapiens
  misc_feature: Table A; Target 86047; HLA-B*37:01; TDRD12; ENSG00000173809; TAA
KDSNKTTV

SEQ ID NO: 86048 - protein, 10 aa, Homo sapiens
  misc_feature: Table A; Target 86048; HLA-A*03:02; TDRD12; ENSG00000173809; TAA
KDSNKTTVEK

SEQ ID NO: 86049 - protein, 9 aa, Homo sapiens
  misc_feature: Table A; Target 86049; HLA-B*40:01; TDRD12; ENSG00000173809; TAA
KEEAKNTKL

SEQ ID NO: 86050 - protein, 9 aa, Homo sapiens
  misc_feature: Table A; Target 86050; HLA-B*40:01; TDRD12; ENSG00000173809; TAA
KEFMNDPYI

SEQ ID NO: 86051 - protein, 9 aa, Homo sapiens
  misc_feature: Table A; Target 86051; HLA-B*44:03; TDRD12; ENSG00000173809; TAA
KEFMNDPYI

SEQ ID NO: 86052 - protein, 9 aa, Homo sapiens
  misc_feature: Table A; Target 86052; HLA-B*49:01; TDRD12; ENSG00000173809; TAA
KEFMNDPYI

SEQ ID NO: 86053 - protein, 10 aa, Homo sapiens
  misc_feature: Table A; Target 86053; HLA-A*30:01; TDRD12; ENSG00000173809; TAA
KEFMNDPYIV

SEQ ID NO: 86054 - protein, 10 aa, Homo sapiens
  misc_feature: Table A; Target 86054; HLA-B*40:01; TDRD12; ENSG00000173809; TAA
KEFMNDPYIV

SEQ ID NO: 86055 - protein, 10 aa, Homo sapiens
  misc_feature: Table A; Target 86055; HLA-A*30:01; TDRD12; ENSG00000173809; TAA
KEMIFNLQNV

SEQ ID NO: 86056 - protein, 10 aa, Homo sapiens
  misc_feature: Table A; Target 86056; HLA-B*40:02; TDRD12; ENSG00000173809; TAA
KEMIFNLQNV

SEQ ID NO: 86057 - protein, 10 aa, Homo sapiens
  misc_feature: Table A; Target 86057; HLA-B*49:01; TDRD12; ENSG00000173809; TAA
KEMIFNLQNV

SEQ ID NO: 86058 - protein, 11 aa, Homo sapiens
  misc_feature: Table A; Target 86058; HLA-A*30:01; TDRD12; ENSG00000173809; TAA
KEMIFNLQNVL

SEQ ID NO: 86059 - protein, 9 aa, Homo sapiens
  misc_feature: Table A; Target 86059; HLA-B*40:02; TDRD12; ENSG00000173809; TAA
KEYDEKNSC

SEQ ID NO: 86060 - protein, 9 aa, Homo sapiens
  misc_feature: Table A; Target 86060; HLA-B*49:01; TDRD12; ENSG00000173809; TAA
KEYDEKNSC

SEQ ID NO: 86061 - protein, 10 aa, Homo sapiens
  misc_feature: Table A; Target 86061; HLA-A*30:01; TDRD12; ENSG00000173809; TAA
KEYDEKNSCV

SEQ ID NO: 86062 - protein, 10 aa, Homo sapiens
  misc_feature: Table A; Target 86062; HLA-B*40:01; TDRD12; ENSG00000173809; TAA
KEYDEKNSCV

SEQ ID NO: 86063 - protein, 10 aa, Homo sapiens
  misc_feature: Table A; Target 86063; HLA-B*40:02; TDRD12; ENSG00000173809; TAA
KEYDEKNSCV

SEQ ID NO: 86064 - protein, 10 aa, Homo sapiens
  misc_feature: Table A; Target 86064; HLA-B*49:01; TDRD12; ENSG00000173809; TAA
KEYDEKNSCV

SEQ ID NO: 86065 - protein, 11 aa, Homo sapiens
  misc_feature: Table A; Target 86065; HLA-A*29:02; TDRD12; ENSG00000173809; TAA
KFPGPSHTESY

SEQ ID NO: 86066 - protein, 11 aa, Homo sapiens
  misc_feature: Table A; Target 86066; HLA-A*30:02; TDRD12; ENSG00000173809; TAA
KFPGPSHTESY

SEQ ID NO: 86067 - protein, 10 aa, Homo sapiens
  misc_feature: Table A; Target 86067; HLA-A*03:01; TDRD12; ENSG00000173809; TAA
KGLQPPVVVL

SEQ ID NO: 86068 - protein, 11 aa, Homo sapiens
  misc_feature: Table A; Target 86068; HLA-A*31:01; TDRD12; ENSG00000173809; TAA
KGLQPPVVVLR

SEQ ID NO: 86069 - protein, 9 aa, Homo sapiens
  misc_feature: Table A; Target 86069; HLA-A*24:02; TDRD12; ENSG00000173809; TAA
KHMDLYATL

SEQ ID NO: 86070 - protein, 9 aa, Homo sapiens
  misc_feature: Table A; Target 86070; HLA-B*38:01; TDRD12; ENSG00000173809; TAA
KHMDLYATL

SEQ ID NO: 86071 - protein, 10 aa, Homo sapiens
  misc_feature: Table A; Target 86071; HLA-A*02:03; TDRD12; ENSG00000173809; TAA
KIIPFYILNA

SEQ ID NO: 86072 - protein, 10 aa, Homo sapiens
  misc_feature: Table A; Target 86072; HLA-A*02:04; TDRD12; ENSG00000173809; TAA
KIIPFYILNA

SEQ ID NO: 86073 - protein, 9 aa, Homo sapiens
  misc_feature: Table A; Target 86073; HLA-C*01:02; TDRD12; ENSG00000173809; TAA
KIPACEESL

SEQ ID NO: 86074 - protein, 9 aa, Homo sapiens
  misc_feature: Table A; Target 86074; HLA-B*15:03; TDRD12; ENSG00000173809; TAA
KKLSSGSQI

SEQ ID NO: 86075 - protein, 10 aa, Homo sapiens
  misc_feature: Table A; Target 86075; HLA-B*15:03; TDRD12; ENSG00000173809; TAA
KKWDNAAIQY

SEQ ID NO: 86076 - protein, 10 aa, Homo sapiens
  misc_feature: Table A; Target 86076; HLA-A*02:03; TDRD12; ENSG00000173809; TAA
KLHDAKVILA

SEQ ID NO: 86077 - protein, 11 aa, Homo sapiens
  misc_feature: Table A; Target 86077; HLA-A*02:04; TDRD12; ENSG00000173809; TAA
KLHDAKVILAL

SEQ ID NO: 86078 - protein, 11 aa, Homo sapiens
  misc_feature: Table A; Target 86078; HLA-A*02:07; TDRD12; ENSG00000173809; TAA
KLHDAKVILAL

SEQ ID NO: 86079 - protein, 10 aa, Homo sapiens
  misc_feature: Table A; Target 86079; HLA-A*02:01; TDRD12; ENSG00000173809; TAA
KLKGLQPPVV

SEQ ID NO: 86080 - protein, 10 aa, Homo sapiens
  misc_feature: Table A; Target 86080; HLA-A*02:03; TDRD12; ENSG00000173809; TAA
KLKGLQPPVV

SEQ ID NO: 86081 - protein, 11 aa, Homo sapiens
  misc_feature: Table A; Target 86081; HLA-A*02:03; TDRD12; ENSG00000173809; TAA
KLKGLQPPVVV

SEQ ID NO: 86082 - protein, 9 aa, Homo sapiens
  misc_feature: Table A; Target 86082; HLA-A*32:01; TDRD12; ENSG00000173809; TAA
KLNPALTLW

SEQ ID NO: 86083 - protein, 9 aa, Homo sapiens
  misc_feature: Table A; Target 86083; HLA-B*57:01; TDRD12; ENSG00000173809; TAA
KLNPALTLW

SEQ ID NO: 86084 - protein, 9 aa, Homo sapiens
  misc_feature: Table A; Target 86084; HLA-B*58:01; TDRD12; ENSG00000173809; TAA
KLNPALTLW

SEQ ID NO: 86085 - protein, 9 aa, Homo sapiens
  misc_feature: Table A; Target 86085; HLA-A*32:01; TDRD12; ENSG00000173809; TAA
KLNSAMNDF

SEQ ID NO: 86086 - protein, 9 aa, Homo sapiens
  misc_feature: Table A; Target 86086; HLA-B*15:01; TDRD12; ENSG00000173809; TAA
KLNSAMNDF

SEQ ID NO: 86087 - protein, 10 aa, Homo sapiens
  misc_feature: Table A; Target 86087; HLA-A*01:01; TDRD12; ENSG00000173809; TAA
KLNSAMNDFY

SEQ ID NO: 86088 - protein, 10 aa, Homo sapiens
  misc_feature: Table A; Target 86088; HLA-A*30:02; TDRD12; ENSG00000173809; TAA
KLNSAMNDFY

SEQ ID NO: 86089 - protein, 10 aa, Homo sapiens
  misc_feature: Table A; Target 86089; HLA-B*15:01; TDRD12; ENSG00000173809; TAA
KLNSAMNDFY

SEQ ID NO: 86090 - protein, 11 aa, Homo sapiens
  misc_feature: Table A; Target 86090; HLA-A*02:01; TDRD12; ENSG00000173809; TAA
KLSSGSQIILA

SEQ ID NO: 86091 - protein, 9 aa, Homo sapiens
  misc_feature: Table A; Target 86091; HLA-B*57:01; TDRD12; ENSG00000173809; TAA
KPADNEIEW

SEQ ID NO: 86092 - protein, 9 aa, Homo sapiens
  misc_feature: Table A; Target 86092; HLA-B*58:01; TDRD12; ENSG00000173809; TAA
KPADNEIEW

SEQ ID NO: 86093 - protein, 9 aa, Homo sapiens
  misc_feature: Table A; Target 86093; HLA-B*07:02; TDRD12; ENSG00000173809; TAA
KPRLNIKSA

SEQ ID NO: 86094 - protein, 9 aa, Homo sapiens
  misc_feature: Table A; Target 86094; HLA-B*54:01; TDRD12; ENSG00000173809; TAA
KPRLNIKSA

SEQ ID NO: 86095 - protein, 9 aa, Homo sapiens
  misc_feature: Table A; Target 86095; HLA-B*55:01; TDRD12; ENSG00000173809; TAA
KPRLNIKSA

SEQ ID NO: 86096 - protein, 9 aa, Homo sapiens
  misc_feature: Table A; Target 86096; HLA-B*56:01; TDRD12; ENSG00000173809; TAA
KPRLNIKSA

SEQ ID NO: 86097 - protein, 9 aa, Homo sapiens
  misc_feature: Table A; Target 86097; HLA-B*35:01; TDRD12; ENSG00000173809; TAA
KPVTLHIDF

SEQ ID NO: 86098 - protein, 8 aa, Homo sapiens
  misc_feature: Table A; Target 86098; HLA-B*15:03; TDRD12; ENSG00000173809; TAA
KRVESSVY

SEQ ID NO: 86099 - protein, 9 aa, Homo sapiens
  misc_feature: Table A; Target 86099; HLA-B*27:02; TDRD12; ENSG00000173809; TAA
KRVESSVYW

SEQ ID NO: 86100 - protein, 8 aa, Homo sapiens
  misc_feature: Table A; Target 86100; HLA-A*03:02; TDRD12; ENSG00000173809; TAA
KSAPSFNK

SEQ ID NO: 86101 - protein, 8 aa, Homo sapiens
  misc_feature: Table A; Target 86101; HLA-A*11:01; TDRD12; ENSG00000173809; TAA
KSAPSFNK

SEQ ID NO: 86102 - protein, 9 aa, Homo sapiens
  misc_feature: Table A; Target 86102; HLA-A*24:02; TDRD12; ENSG00000173809; TAA
KSAPSFNKL

SEQ ID NO: 86103 - protein, 9 aa, Homo sapiens
  misc_feature: Table A; Target 86103; HLA-A*31:01; TDRD12; ENSG00000173809; TAA
KSAPSFNKL

SEQ ID NO: 86104 - protein, 9 aa, Homo sapiens
  misc_feature: Table A; Target 86104; HLA-A*32:01; TDRD12; ENSG00000173809; TAA
KSAPSFNKL

SEQ ID NO: 86105 - protein, 9 aa, Homo sapiens
  misc_feature: Table A; Target 86105; HLA-B*57:01; TDRD12; ENSG00000173809; TAA
KSAPSFNKL

SEQ ID NO: 86106 - protein, 9 aa, Homo sapiens
  misc_feature: Table A; Target 86106; HLA-B*58:01; TDRD12; ENSG00000173809; TAA
KSAPSFNKL

SEQ ID NO: 86107 - protein, 9 aa, Homo sapiens
  misc_feature: Table A; Target 86107; HLA-C*02:02; TDRD12; ENSG00000173809; TAA
KSAPSFNKL

SEQ ID NO: 86108 - protein, 9 aa, Homo sapiens
  misc_feature: Table A; Target 86108; HLA-C*03:04; TDRD12; ENSG00000173809; TAA
KSAPSFNKL

SEQ ID NO: 86109 - protein, 9 aa, Homo sapiens
  misc_feature: Table A; Target 86109; HLA-C*16:01; TDRD12; ENSG00000173809; TAA
KSAPSFNKL

SEQ ID NO: 86110 - protein, 9 aa, Homo sapiens
  misc_feature: Table A; Target 86110; HLA-C*16:02; TDRD12; ENSG00000173809; TAA
KSAPSFNKL

SEQ ID NO: 86111 - protein, 10 aa, Homo sapiens
  misc_feature: Table A; Target 86111; HLA-A*01:01; TDRD12; ENSG00000173809; TAA
KSITSSADQY

SEQ ID NO: 86112 - protein, 10 aa, Homo sapiens
  misc_feature: Table A; Target 86112; HLA-A*30:02; TDRD12; ENSG00000173809; TAA
KSITSSADQY

SEQ ID NO: 86113 - protein, 10 aa, Homo sapiens
  misc_feature: Table A; Target 86113; HLA-B*15:01; TDRD12; ENSG00000173809; TAA
KSITSSADQY

SEQ ID NO: 86114 - protein, 10 aa, Homo sapiens
  misc_feature: Table A; Target 86114; HLA-B*58:01; TDRD12; ENSG00000173809; TAA
KSITSSADQY

SEQ ID NO: 86115 - protein, 10 aa, Homo sapiens
  misc_feature: Table A; Target 86115; HLA-C*16:04; TDRD12; ENSG00000173809; TAA
KSITSSADQY

SEQ ID NO: 86116 - protein, 11 aa, Homo sapiens
  misc_feature: Table A; Target 86116; HLA-B*58:01; TDRD12; ENSG00000173809; TAA
KSITSSADQYL

SEQ ID NO: 86117 - protein, 9 aa, Homo sapiens
  misc_feature: Table A; Target 86117; HLA-A*03:01; TDRD12; ENSG00000173809; TAA
KSNEKPLRL

SEQ ID NO: 86118 - protein, 9 aa, Homo sapiens
  misc_feature: Table A; Target 86118; HLA-A*31:01; TDRD12; ENSG00000173809; TAA
KSNEKPLRL

SEQ ID NO: 86119 - protein, 9 aa, Homo sapiens
  misc_feature: Table A; Target 86119; HLA-B*58:01; TDRD12; ENSG00000173809; TAA
KSNEKPLRL

SEQ ID NO: 86120 - protein, 9 aa, Homo sapiens
  misc_feature: Table A; Target 86120; HLA-A*03:01; TDRD12; ENSG00000173809; TAA
KSVLLLTEK

SEQ ID NO: 86121 - protein, 9 aa, Homo sapiens
  misc_feature: Table A; Target 86121; HLA-A*03:02; TDRD12; ENSG00000173809; TAA
KSVLLLTEK

SEQ ID NO: 86122 - protein, 9 aa, Homo sapiens
  misc_feature: Table A; Target 86122; HLA-A*11:01; TDRD12; ENSG00000173809; TAA
KSVLLLTEK

SEQ ID NO: 86123 - protein, 9 aa, Homo sapiens
  misc_feature: Table A; Target 86123; HLA-B*57:01; TDRD12; ENSG00000173809; TAA
KSVLLLTEK

SEQ ID NO: 86124 - protein, 9 aa, Homo sapiens
  misc_feature: Table A; Target 86124; HLA-A*31:01; TDRD12; ENSG00000173809; TAA
KTSSLLQAL

SEQ ID NO: 86125 - protein, 9 aa, Homo sapiens
  misc_feature: Table A; Target 86125; HLA-A*32:01; TDRD12; ENSG00000173809; TAA
KTSSLLQAL

SEQ ID NO: 86126 - protein, 9 aa, Homo sapiens
  misc_feature: Table A; Target 86126; HLA-B*58:01; TDRD12; ENSG00000173809; TAA
KTSSLLQAL

SEQ ID NO: 86127 - protein, 9 aa, Homo sapiens
  misc_feature: Table A; Target 86127; HLA-C*01:02; TDRD12; ENSG00000173809; TAA
KTSSLLQAL

SEQ ID NO: 86128 - protein, 9 aa, Homo sapiens
  misc_feature: Table A; Target 86128; HLA-A*02:01; TDRD12; ENSG00000173809; TAA
KTSVIDYNV

SEQ ID NO: 86129 - protein, 9 aa, Homo sapiens
  misc_feature: Table A; Target 86129; HLA-A*03:02; TDRD12; ENSG00000173809; TAA
KTSVIDYNV

SEQ ID NO: 86130 - protein, 9 aa, Homo sapiens
  misc_feature: Table A; Target 86130; HLA-A*68:02; TDRD12; ENSG00000173809; TAA
KTSVIDYNV

SEQ ID NO: 86131 - protein, 9 aa, Homo sapiens
  misc_feature: Table A; Target 86131; HLA-B*13:02; TDRD12; ENSG00000173809; TAA
KTSVIDYNV

SEQ ID NO: 86132 - protein, 9 aa, Homo sapiens
  misc_feature: Table A; Target 86132; HLA-B*27:05; TDRD12; ENSG00000173809; TAA
KTSVIDYNV

SEQ ID NO: 86133 - protein, 9 aa, Homo sapiens
  misc_feature: Table A; Target 86133; HLA-B*40:02; TDRD12; ENSG00000173809; TAA
KTSVIDYNV

SEQ ID NO: 86134 - protein, 9 aa, Homo sapiens
  misc_feature: Table A; Target 86134; HLA-B*58:01; TDRD12; ENSG00000173809; TAA
KTSVIDYNV

SEQ ID NO: 86135 - protein, 9 aa, Homo sapiens
  misc_feature: Table A; Target 86135; HLA-C*06:02; TDRD12; ENSG00000173809; TAA
KTSVIDYNV

SEQ ID NO: 86136 - protein, 10 aa, Homo sapiens
  misc_feature: Table A; Target 86136; HLA-A*11:01; TDRD12; ENSG00000173809; TAA
KTSVIDYNVR

SEQ ID NO: 86137 - protein, 10 aa, Homo sapiens
  misc_feature: Table A; Target 86137; HLA-A*31:01; TDRD12; ENSG00000173809; TAA
KTSVIDYNVR

SEQ ID NO: 86138 - protein, 10 aa, Homo sapiens
  misc_feature: Table A; Target 86138; HLA-A*68:01; TDRD12; ENSG00000173809; TAA
KTSVIDYNVR

SEQ ID NO: 86139 - protein, 9 aa, Homo sapiens
  misc_feature: Table A; Target 86139; HLA-A*03:01; TDRD12; ENSG00000173809; TAA
KTTVEKVEK

SEQ ID NO: 86140 - protein, 9 aa, Homo sapiens
  misc_feature: Table A; Target 86140; HLA-A*03:02; TDRD12; ENSG00000173809; TAA
KTTVEKVEK

SEQ ID NO: 86141 - protein, 9 aa, Homo sapiens
  misc_feature: Table A; Target 86141; HLA-A*11:01; TDRD12; ENSG00000173809; TAA
KTTVEKVEK

SEQ ID NO: 86142 - protein, 10 aa, Homo sapiens
  misc_feature: Table A; Target 86142; HLA-B*57:01; TDRD12; ENSG00000173809; TAA
KTTVEKVEKF

SEQ ID NO: 86143 - protein, 10 aa, Homo sapiens
  misc_feature: Table A; Target 86143; HLA-B*58:01; TDRD12; ENSG00000173809; TAA
KTTVEKVEKF

SEQ ID NO: 86144 - protein, 11 aa, Homo sapiens
  misc_feature: Table A; Target 86144; HLA-A*03:02; TDRD12; ENSG00000173809; TAA
KVCVNDDLVAK

SEQ ID NO: 86145 - protein, 11 aa, Homo sapiens
  misc_feature: Table A; Target 86145; HLA-A*11:01; TDRD12; ENSG00000173809; TAA
KVCVNDDLVAK

SEQ ID NO: 86146 - protein, 11 aa, Homo sapiens
  misc_feature: Table A; Target 86146; HLA-B*57:01; TDRD12; ENSG00000173809; TAA
KVILALGNTVW

SEQ ID NO: 86147 - protein, 9 aa, Homo sapiens
  misc_feature: Table A; Target 86147; HLA-A*02:07; TDRD12; ENSG00000173809; TAA
KVPAELYEF

SEQ ID NO: 86148 - protein, 9 aa, Homo sapiens
  misc_feature: Table A; Target 86148; HLA-A*24:02; TDRD12; ENSG00000173809; TAA
KVPAELYEF

SEQ ID NO: 86149 - protein, 9 aa, Homo sapiens
  misc_feature: Table A; Target 86149; HLA-A*29:02; TDRD12; ENSG00000173809; TAA
KVPAELYEF

SEQ ID NO: 86150 - protein, 9 aa, Homo sapiens
  misc_feature: Table A; Target 86150; HLA-B*57:01; TDRD12; ENSG00000173809; TAA
KVPAELYEF

SEQ ID NO: 86151 - protein, 9 aa, Homo sapiens
  misc_feature: Table A; Target 86151; HLA-A*23:01; TDRD12; ENSG00000173809; TAA
KVVESSSIF

SEQ ID NO: 86152 - protein, 9 aa, Homo sapiens
  misc_feature: Table A; Target 86152; HLA-A*24:02; TDRD12; ENSG00000173809; TAA
KVVESSSIF

SEQ ID NO: 86153 - protein, 9 aa, Homo sapiens
  misc_feature: Table A; Target 86153; HLA-A*25:01; TDRD12; ENSG00000173809; TAA
KVVESSSIF

SEQ ID NO: 86154 - protein, 9 aa, Homo sapiens
  misc_feature: Table A; Target 86154; HLA-A*26:01; TDRD12; ENSG00000173809; TAA
KVVESSSIF

SEQ ID NO: 86155 - protein, 9 aa, Homo sapiens
  misc_feature: Table A; Target 86155; HLA-A*30:02; TDRD12; ENSG00000173809; TAA
KVVESSSIF

SEQ ID NO: 86156 - protein, 9 aa, Homo sapiens
  misc_feature: Table A; Target 86156; HLA-A*32:01; TDRD12; ENSG00000173809; TAA
KVVESSSIF

SEQ ID NO: 86157 - protein, 9 aa, Homo sapiens
  misc_feature: Table A; Target 86157; HLA-B*15:01; TDRD12; ENSG00000173809; TAA
KVVESSSIF

SEQ ID NO: 86158 - protein, 9 aa, Homo sapiens
  misc_feature: Table A; Target 86158; HLA-B*15:03; TDRD12; ENSG00000173809; TAA
KVVESSSIF

SEQ ID NO: 86159 - protein, 9 aa, Homo sapiens
  misc_feature: Table A; Target 86159; HLA-B*46:01; TDRD12; ENSG00000173809; TAA
KVVESSSIF

SEQ ID NO: 86160 - protein, 9 aa, Homo sapiens
  misc_feature: Table A; Target 86160; HLA-B*57:01; TDRD12; ENSG00000173809; TAA
KVVESSSIF

SEQ ID NO: 86161 - protein, 9 aa, Homo sapiens
  misc_feature: Table A; Target 86161; HLA-B*58:01; TDRD12; ENSG00000173809; TAA
KVVESSSIF

SEQ ID NO: 86162 - protein, 9 aa, Homo sapiens
  misc_feature: Table A; Target 86162; HLA-C*02:02; TDRD12; ENSG00000173809; TAA
KVVESSSIF

SEQ ID NO: 86163 - protein, 9 aa, Homo sapiens
  misc_feature: Table A; Target 86163; HLA-C*03:03; TDRD12; ENSG00000173809; TAA
KVVESSSIF

SEQ ID NO: 86164 - protein, 9 aa, Homo sapiens
  misc_feature: Table A; Target 86164; HLA-C*03:04; TDRD12; ENSG00000173809; TAA
KVVESSSIF

SEQ ID NO: 86165 - protein, 9 aa, Homo sapiens
  misc_feature: Table A; Target 86165; HLA-C*05:01; TDRD12; ENSG00000173809; TAA
KVVESSSIF

SEQ ID NO: 86166 - protein, 9 aa, Homo sapiens
  misc_feature: Table A; Target 86166; HLA-C*07:04; TDRD12; ENSG00000173809; TAA
KVVESSSIF

SEQ ID NO: 86167 - protein, 9 aa, Homo sapiens
  misc_feature: Table A; Target 86167; HLA-C*12:03; TDRD12; ENSG00000173809; TAA
KVVESSSIF

SEQ ID NO: 86168 - protein, 9 aa, Homo sapiens
  misc_feature: Table A; Target 86168; HLA-C*14:02; TDRD12; ENSG00000173809; TAA
KVVESSSIF

SEQ ID NO: 86169 - protein, 9 aa, Homo sapiens
  misc_feature: Table A; Target 86169; HLA-C*16:04; TDRD12; ENSG00000173809; TAA
KVVESSSIF

SEQ ID NO: 86170 - protein, 9 aa, Homo sapiens
  misc_feature: Table A; Target 86170; HLA-A*29:02; TDRD12; ENSG00000173809; TAA
KWDNAAIQY

SEQ ID NO: 86171 - protein, 9 aa, Homo sapiens
  misc_feature: Table A; Target 86171; HLA-C*04:01; TDRD12; ENSG00000173809; TAA
KWDNAAIQY

SEQ ID NO: 86172 - protein, 10 aa, Homo sapiens
  misc_feature: Table A; Target 86172; HLA-A*24:02; TDRD12; ENSG00000173809; TAA
KWDNAAIQYF

SEQ ID NO: 86173 - protein, 9 aa, Homo sapiens
  misc_feature: Table A; Target 86173; HLA-C*03:03; TDRD12; ENSG00000173809; TAA
LAITDATCV

SEQ ID NO: 86174 - protein, 9 aa, Homo sapiens
  misc_feature: Table A; Target 86174; HLA-C*03:04; TDRD12; ENSG00000173809; TAA
LAITDATCV

SEQ ID NO: 86175 - protein, 9 aa, Homo sapiens
  misc_feature: Table A; Target 86175; HLA-B*57:01; TDRD12; ENSG00000173809; TAA
LAVIVCPGW

SEQ ID NO: 86176 - protein, 10 aa, Homo sapiens
  misc_feature: Table A; Target 86176; HLA-A*03:01; TDRD12; ENSG00000173809; TAA
LDFIPSQAQK

SEQ ID NO: 86177 - protein, 10 aa, Homo sapiens
  misc_feature: Table A; Target 86177; HLA-A*03:02; TDRD12; ENSG00000173809; TAA
LDFIPSQAQK

SEQ ID NO: 86178 - protein, 10 aa, Homo sapiens
  misc_feature: Table A; Target 86178; HLA-A*11:01; TDRD12; ENSG00000173809; TAA
LDFIPSQAQK

SEQ ID NO: 86179 - protein, 10 aa, Homo sapiens
  misc_feature: Table A; Target 86179; HLA-B*27:02; TDRD12; ENSG00000173809; TAA
LDFIPSQAQK

SEQ ID NO: 86180 - protein, 8 aa, Homo sapiens
  misc_feature: Table A; Target 86180; HLA-B*18:01; TDRD12; ENSG00000173809; TAA
LEANEQMF

SEQ ID NO: 86181 - protein, 9 aa, Homo sapiens
  misc_feature: Table A; Target 86181; HLA-B*49:01; TDRD12; ENSG00000173809; TAA
LEANEQMFA

SEQ ID NO: 86182 - protein, 10 aa, Homo sapiens
  misc_feature: Table A; Target 86182; HLA-B*49:01; TDRD12; ENSG00000173809; TAA
LEANEQMFAI

SEQ ID NO: 86183 - protein, 9 aa, Homo sapiens
  misc_feature: Table A; Target 86183; HLA-A*30:01; TDRD12; ENSG00000173809; TAA
LECEKTSSL

SEQ ID NO: 86184 - protein, 9 aa, Homo sapiens
  misc_feature: Table A; Target 86184; HLA-B*18:01; TDRD12; ENSG00000173809; TAA
LECEKTSSL

SEQ ID NO: 86185 - protein, 9 aa, Homo sapiens
  misc_feature: Table A; Target 86185; HLA-B*37:01; TDRD12; ENSG00000173809; TAA
LECEKTSSL

SEQ ID NO: 86186 - protein, 9 aa, Homo sapiens
  misc_feature: Table A; Target 86186; HLA-B*40:01; TDRD12; ENSG00000173809; TAA
LECEKTSSL

SEQ ID NO: 86187 - protein, 9 aa, Homo sapiens
  misc_feature: Table A; Target 86187; HLA-B*40:02; TDRD12; ENSG00000173809; TAA
LECEKTSSL

SEQ ID NO: 86188 - protein, 9 aa, Homo sapiens
  misc_feature: Table A; Target 86188; HLA-B*49:01; TDRD12; ENSG00000173809; TAA
LECEKTSSL

SEQ ID NO: 86189 - protein, 9 aa, Homo sapiens
  misc_feature: Table A; Target 86189; HLA-A*30:01; TDRD12; ENSG00000173809; TAA
LEEGQVCVV

SEQ ID NO: 86190 - protein, 9 aa, Homo sapiens
  misc_feature: Table A; Target 86190; HLA-B*40:01; TDRD12; ENSG00000173809; TAA
LEEGQVCVV

SEQ ID NO: 86191 - protein, 9 aa, Homo sapiens
  misc_feature: Table A; Target 86191; HLA-B*40:02; TDRD12; ENSG00000173809; TAA
LEEGQVCVV

SEQ ID NO: 86192 - protein, 9 aa, Homo sapiens
  misc_feature: Table A; Target 86192; HLA-B*49:01; TDRD12; ENSG00000173809; TAA
LEEGQVCVV

SEQ ID NO: 86193 - protein, 10 aa, Homo sapiens
  misc_feature: Table A; Target 86193; HLA-B*18:01; TDRD12; ENSG00000173809; TAA
LEEGQVCVVY

SEQ ID NO: 86194 - protein, 10 aa, Homo sapiens
  misc_feature: Table A; Target 86194; HLA-B*40:01; TDRD12; ENSG00000173809; TAA
LEEGQVCVVY

SEQ ID NO: 86195 - protein, 10 aa, Homo sapiens
  misc_feature: Table A; Target 86195; HLA-B*44:02; TDRD12; ENSG00000173809; TAA
LEEGQVCVVY

SEQ ID NO: 86196 - protein, 10 aa, Homo sapiens
  misc_feature: Table A; Target 86196; HLA-B*40:02; TDRD12; ENSG00000173809; TAA
LERADAKVPA

SEQ ID NO: 86197 - protein, 10 aa, Homo sapiens
  misc_feature: Table A; Target 86197; HLA-B*27:02; TDRD12; ENSG00000173809; TAA
LEVNQKEDAW

SEQ ID NO: 86198 - protein, 10 aa, Homo sapiens
  misc_feature: Table A; Target 86198; HLA-B*44:02; TDRD12; ENSG00000173809; TAA
LEVNQKEDAW

SEQ ID NO: 86199 - protein, 10 aa, Homo sapiens
  misc_feature: Table A; Target 86199; HLA-B*44:03; TDRD12; ENSG00000173809; TAA
LEVNQKEDAW

SEQ ID NO: 86200 - protein, 10 aa, Homo sapiens
  misc_feature: Table A; Target 86200; HLA-C*16:04; TDRD12; ENSG00000173809; TAA
LEVNQKEDAW

SEQ ID NO: 86201 - protein, 9 aa, Homo sapiens
  misc_feature: Table A; Target 86201; HLA-A*23:01; TDRD12; ENSG00000173809; TAA
LFLEANEQM

SEQ ID NO: 86202 - protein, 9 aa, Homo sapiens
  misc_feature: Table A; Target 86202; HLA-C*14:02; TDRD12; ENSG00000173809; TAA
LFLEANEQM

SEQ ID NO: 86203 - protein, 10 aa, Homo sapiens
  misc_feature: Table A; Target 86203; HLA-A*23:01; TDRD12; ENSG00000173809; TAA
LFLEANEQMF

SEQ ID NO: 86204 - protein, 10 aa, Homo sapiens
  misc_feature: Table A; Target 86204; HLA-A*24:02; TDRD12; ENSG00000173809; TAA
LFLEANEQMF

SEQ ID NO: 86205 - protein, 8 aa, Homo sapiens
  misc_feature: Table A; Target 86205; HLA-B*38:01; TDRD12; ENSG00000173809; TAA
LHDAKVIL

SEQ ID NO: 86206 - protein, 10 aa, Homo sapiens
  misc_feature: Table A; Target 86206; HLA-B*38:01; TDRD12; ENSG00000173809; TAA
LHDAKVILAL

SEQ ID NO: 86207 - protein, 9 aa, Homo sapiens
  misc_feature: Table A; Target 86207; HLA-A*02:01; TDRD12; ENSG00000173809; TAA
LILDEVEVL

SEQ ID NO: 86208 - protein, 9 aa, Homo sapiens
  misc_feature: Table A; Target 86208; HLA-A*02:04; TDRD12; ENSG00000173809; TAA
LILDEVEVL

SEQ ID NO: 86209 - protein, 9 aa, Homo sapiens
  misc_feature: Table A; Target 86209; HLA-A*02:07; TDRD12; ENSG00000173809; TAA
LILDEVEVL

SEQ ID NO: 86210 - protein, 9 aa, Homo sapiens
  misc_feature: Table A; Target 86210; HLA-B*35:03; TDRD12; ENSG00000173809; TAA
LILDEVEVL

SEQ ID NO: 86211 - protein, 9 aa, Homo sapiens
  misc_feature: Table A; Target 86211; HLA-B*40:01; TDRD12; ENSG00000173809; TAA
LILDEVEVL

SEQ ID NO: 86212 - protein, 9 aa, Homo sapiens
  misc_feature: Table A; Target 86212; HLA-C*03:04; TDRD12; ENSG00000173809; TAA
LILDEVEVL

SEQ ID NO: 86213 - protein, 9 aa, Homo sapiens
  misc_feature: Table A; Target 86213; HLA-C*07:04; TDRD12; ENSG00000173809; TAA
LILDEVEVL

SEQ ID NO: 86214 - protein, 10 aa, Homo sapiens
  misc_feature: Table A; Target 86214; HLA-A*23:01; TDRD12; ENSG00000173809; TAA
LILDEVEVLF

SEQ ID NO: 86215 - protein, 11 aa, Homo sapiens
  misc_feature: Table A; Target 86215; HLA-A*02:01; TDRD12; ENSG00000173809; TAA
LILDEVEVLFL

SEQ ID NO: 86216 - protein, 11 aa, Homo sapiens
  misc_feature: Table A; Target 86216; HLA-A*02:04; TDRD12; ENSG00000173809; TAA
LILDEVEVLFL

SEQ ID NO: 86217 - protein, 9 aa, Homo sapiens
  misc_feature: Table A; Target 86217; HLA-B*15:03; TDRD12; ENSG00000173809; TAA
LKIEDPGCF

SEQ ID NO: 86218 - protein, 8 aa, Homo sapiens
  misc_feature: Table A; Target 86218; HLA-B*15:03; TDRD12; ENSG00000173809; TAA
LKTSVIDY

SEQ ID NO: 86219 - protein, 8 aa, Homo sapiens
  misc_feature: Table A; Target 86219; HLA-C*07:01; TDRD12; ENSG00000173809; TAA
LKTSVIDY

SEQ ID NO: 86220 - protein, 8 aa, Homo sapiens
  misc_feature: Table A; Target 86220; HLA-C*07:04; TDRD12; ENSG00000173809; TAA
LKTSVIDY

SEQ ID NO: 86221 - protein, 9 aa, Homo sapiens
  misc_feature: Table A; Target 86221; HLA-A*02:04; TDRD12; ENSG00000173809; TAA
LLFLRLCHL

SEQ ID NO: 86222 - protein, 8 aa, Homo sapiens
  misc_feature: Table A; Target 86222; HLA-A*02:03; TDRD12; ENSG00000173809; TAA
LLKATTQV

SEQ ID NO: 86223 - protein, 8 aa, Homo sapiens
  misc_feature: Table A; Target 86223; HLA-B*08:01; TDRD12; ENSG00000173809; TAA
LLKATTQV

SEQ ID NO: 86224 - protein, 11 aa, Homo sapiens
  misc_feature: Table A; Target 86224; HLA-A*33:01; TDRD12; ENSG00000173809; TAA
LLKATTQVEAR

SEQ ID NO: 86225 - protein, 8 aa, Homo sapiens
  misc_feature: Table A; Target 86225; HLA-A*02:07; TDRD12; ENSG00000173809; TAA
LLPVLTVL

SEQ ID NO: 86226 - protein, 11 aa, Homo sapiens
  misc_feature: Table A; Target 86226; HLA-A*02:07; TDRD12; ENSG00000173809; TAA
LLPVLTVLQTG

SEQ ID NO: 86227 - protein, 11 aa, Homo sapiens
  misc_feature: Table A; Target 86227; HLA-A*02:01; TDRD12; ENSG00000173809; TAA
LLTEKDASHAV

SEQ ID NO: 86228 - protein, 8 aa, Homo sapiens
  misc_feature: Table A; Target 86228; HLA-B*39:01; TDRD12; ENSG00000173809; TAA
LNAEMNEY

SEQ ID NO: 86229 - protein, 8 aa, Homo sapiens
  misc_feature: Table A; Target 86229; HLA-B*46:01; TDRD12; ENSG00000173809; TAA
LNAEMNEY

SEQ ID NO: 86230 - protein, 9 aa, Homo sapiens
  misc_feature: Table A; Target 86230; HLA-A*23:01; TDRD12; ENSG00000173809; TAA
LNIKSAPSF

SEQ ID NO: 86231 - protein, 9 aa, Homo sapiens
  misc_feature: Table A; Target 86231; HLA-A*24:02; TDRD12; ENSG00000173809; TAA
LNIKSAPSF

SEQ ID NO: 86232 - protein, 9 aa, Homo sapiens
  misc_feature: Table A; Target 86232; HLA-B*58:01; TDRD12; ENSG00000173809; TAA
LNIKSAPSF

SEQ ID NO: 86233 - protein, 9 aa, Homo sapiens
  misc_feature: Table A; Target 86233; HLA-A*01:01; TDRD12; ENSG00000173809; TAA
LNSAMNDFY

SEQ ID NO: 86234 - protein, 9 aa, Homo sapiens
  misc_feature: Table A; Target 86234; HLA-A*29:02; TDRD12; ENSG00000173809; TAA
LNSAMNDFY

SEQ ID NO: 86235 - protein, 8 aa, Homo sapiens
  misc_feature: Table A; Target 86235; HLA-B*08:01; TDRD12; ENSG00000173809; TAA
LPEHFHTL

SEQ ID NO: 86236 - protein, 8 aa, Homo sapiens
  misc_feature: Table A; Target 86236; HLA-B*35:03; TDRD12; ENSG00000173809; TAA
LPEHFHTL

SEQ ID NO: 86237 - protein, 8 aa, Homo sapiens
  misc_feature: Table A; Target 86237; HLA-B*51:01; TDRD12; ENSG00000173809; TAA
LPEHFHTL

SEQ ID NO: 86238 - protein, 8 aa, Homo sapiens
  misc_feature: Table A; Target 86238; HLA-B*35:01; TDRD12; ENSG00000173809; TAA
LPPQAVEF

SEQ ID NO: 86239 - protein, 8 aa, Homo sapiens
  misc_feature: Table A; Target 86239; HLA-B*35:03; TDRD12; ENSG00000173809; TAA
LPPQAVEF

SEQ ID NO: 86240 - protein, 8 aa, Homo sapiens
  misc_feature: Table A; Target 86240; HLA-B*51:01; TDRD12; ENSG00000173809; TAA
LPPQAVEF

SEQ ID NO: 86241 - protein, 9 aa, Homo sapiens
  misc_feature: Table A; Target 86241; HLA-B*51:01; TDRD12; ENSG00000173809; TAA
LPPQAVEFI

SEQ ID NO: 86242 - protein, 11 aa, Homo sapiens
  misc_feature: Table A; Target 86242; HLA-B*54:01; TDRD12; ENSG00000173809; TAA
LPPQAVEFIVC

SEQ ID NO: 86243 - protein, 9 aa, Homo sapiens
  misc_feature: Table A; Target 86243; HLA-B*07:02; TDRD12; ENSG00000173809; TAA
LPRKLSSQA

SEQ ID NO: 86244 - protein, 9 aa, Homo sapiens
  misc_feature: Table A; Target 86244; HLA-B*54:01; TDRD12; ENSG00000173809; TAA
LPRKLSSQA

SEQ ID NO: 86245 - protein, 9 aa, Homo sapiens
  misc_feature: Table A; Target 86245; HLA-B*55:01; TDRD12; ENSG00000173809; TAA
LPRKLSSQA

SEQ ID NO: 86246 - protein, 9 aa, Homo sapiens
  misc_feature: Table A; Target 86246; HLA-B*56:01; TDRD12; ENSG00000173809; TAA
LPRKLSSQA

SEQ ID NO: 86247 - protein, 10 aa, Homo sapiens
  misc_feature: Table A; Target 86247; HLA-B*07:02; TDRD12; ENSG00000173809; TAA
LPRKLSSQAL

SEQ ID NO: 86248 - protein, 10 aa, Homo sapiens
  misc_feature: Table A; Target 86248; HLA-C*07:02; TDRD12; ENSG00000173809; TAA
LPRKLSSQAL

SEQ ID NO: 86249 - protein, 9 aa, Homo sapiens
  misc_feature: Table A; Target 86249; HLA-B*51:01; TDRD12; ENSG00000173809; TAA
LPSFGYIKI

SEQ ID NO: 86250 - protein, 9 aa, Homo sapiens
  misc_feature: Table A; Target 86250; HLA-B*54:01; TDRD12; ENSG00000173809; TAA
LPSRNGPLA

SEQ ID NO: 86251 - protein, 9 aa, Homo sapiens
  misc_feature: Table A; Target 86251; HLA-B*56:01; TDRD12; ENSG00000173809; TAA
LPSRNGPLA

SEQ ID NO: 86252 - protein, 10 aa, Homo sapiens
  misc_feature: Table A; Target 86252; HLA-B*07:02; TDRD12; ENSG00000173809; TAA
LPSRNGPLAV

SEQ ID NO: 86253 - protein, 10 aa, Homo sapiens
  misc_feature: Table A; Target 86253; HLA-B*51:01; TDRD12; ENSG00000173809; TAA
LPSRNGPLAV

SEQ ID NO: 86254 - protein, 10 aa, Homo sapiens
  misc_feature: Table A; Target 86254; HLA-B*54:01; TDRD12; ENSG00000173809; TAA
LPSRNGPLAV

SEQ ID NO: 86255 - protein, 10 aa, Homo sapiens
  misc_feature: Table A; Target 86255; HLA-B*56:01; TDRD12; ENSG00000173809; TAA
LPSRNGPLAV

SEQ ID NO: 86256 - protein, 10 aa, Homo sapiens
  misc_feature: Table A; Target 86256; HLA-C*07:02; TDRD12; ENSG00000173809; TAA
LPSRNGPLAV

SEQ ID NO: 86257 - protein, 11 aa, Homo sapiens
  misc_feature: Table A; Target 86257; HLA-B*51:01; TDRD12; ENSG00000173809; TAA
LPSRNGPLAVI

SEQ ID NO: 86258 - protein, 11 aa, Homo sapiens
  misc_feature: Table A; Target 86258; HLA-B*56:01; TDRD12; ENSG00000173809; TAA
LPSRNGPLAVI

SEQ ID NO: 86259 - protein, 9 aa, Homo sapiens
  misc_feature: Table A; Target 86259; HLA-B*54:01; TDRD12; ENSG00000173809; TAA
LPVLTVLQT

SEQ ID NO: 86260 - protein, 9 aa, Homo sapiens
  misc_feature: Table A; Target 86260; HLA-B*56:01; TDRD12; ENSG00000173809; TAA
LPVLTVLQT

SEQ ID NO: 86261 - protein, 10 aa, Homo sapiens
  misc_feature: Table A; Target 86261; HLA-B*54:01; TDRD12; ENSG00000173809; TAA
LPVLTVLQTG

SEQ ID NO: 86262 - protein, 10 aa, Homo sapiens
  misc_feature: Table A; Target 86262; HLA-B*56:01; TDRD12; ENSG00000173809; TAA
LPVLTVLQTG

SEQ ID NO: 86263 - protein, 10 aa, Homo sapiens
  misc_feature: Table A; Target 86263; HLA-C*07:02; TDRD12; ENSG00000173809; TAA
LPVLTVLQTG

SEQ ID NO: 86264 - protein, 11 aa, Homo sapiens
  misc_feature: Table A; Target 86264; HLA-B*54:01; TDRD12; ENSG00000173809; TAA
LPVLTVLQTGA

SEQ ID NO: 86265 - protein, 11 aa, Homo sapiens
  misc_feature: Table A; Target 86265; HLA-B*55:01; TDRD12; ENSG00000173809; TAA
LPVLTVLQTGA

SEQ ID NO: 86266 - protein, 11 aa, Homo sapiens
  misc_feature: Table A; Target 86266; HLA-B*56:01; TDRD12; ENSG00000173809; TAA
LPVLTVLQTGA

SEQ ID NO: 86267 - protein, 8 aa, Homo sapiens
  misc_feature: Table A; Target 86267; HLA-B*08:01; TDRD12; ENSG00000173809; TAA
LPYRAKKF

SEQ ID NO: 86268 - protein, 8 aa, Homo sapiens
  misc_feature: Table A; Target 86268; HLA-B*51:01; TDRD12; ENSG00000173809; TAA
LPYRAKKF

SEQ ID NO: 86269 - protein, 9 aa, Homo sapiens
  misc_feature: Table A; Target 86269; HLA-A*02:01; TDRD12; ENSG00000173809; TAA
LQFLNPDPL

SEQ ID NO: 86270 - protein, 9 aa, Homo sapiens
  misc_feature: Table A; Target 86270; HLA-A*02:04; TDRD12; ENSG00000173809; TAA
LQFLNPDPL

SEQ ID NO: 86271 - protein, 9 aa, Homo sapiens
  misc_feature: Table A; Target 86271; HLA-B*15:01; TDRD12; ENSG00000173809; TAA
LQFLNPDPL

SEQ ID NO: 86272 - protein, 9 aa, Homo sapiens
  misc_feature: Table A; Target 86272; HLA-B*15:03; TDRD12; ENSG00000173809; TAA
LQFLNPDPL

SEQ ID NO: 86273 - protein, 9 aa, Homo sapiens
  misc_feature: Table A; Target 86273; HLA-B*27:05; TDRD12; ENSG00000173809; TAA
LQFLNPDPL

SEQ ID NO: 86274 - protein, 9 aa, Homo sapiens
  misc_feature: Table A; Target 86274; HLA-B*39:01; TDRD12; ENSG00000173809; TAA
LQFLNPDPL

SEQ ID NO: 86275 - protein, 9 aa, Homo sapiens
  misc_feature: Table A; Target 86275; HLA-C*06:02; TDRD12; ENSG00000173809; TAA
LQFLNPDPL

SEQ ID NO: 86276 - protein, 9 aa, Homo sapiens
  misc_feature: Table A; Target 86276; HLA-C*07:04; TDRD12; ENSG00000173809; TAA
LQFLNPDPL

SEQ ID NO: 86277 - protein, 9 aa, Homo sapiens
  misc_feature: Table A; Target 86277; HLA-C*12:03; TDRD12; ENSG00000173809; TAA
LQFLNPDPL

SEQ ID NO: 86278 - protein, 9 aa, Homo sapiens
  misc_feature: Table A; Target 86278; HLA-C*07:04; TDRD12; ENSG00000173809; TAA
LQGKDVQGM

SEQ ID NO: 86279 - protein, 8 aa, Homo sapiens
  misc_feature: Table A; Target 86279; HLA-B*13:02; TDRD12; ENSG00000173809; TAA
LQLLVLKI

SEQ ID NO: 86280 - protein, 8 aa, Homo sapiens
  misc_feature: Table A; Target 86280; HLA-B*15:01; TDRD12; ENSG00000173809; TAA
LQPPVVVL

SEQ ID NO: 86281 - protein, 9 aa, Homo sapiens
  misc_feature: Table A; Target 86281; HLA-A*02:07; TDRD12; ENSG00000173809; TAA
LQPPVVVLR

SEQ ID NO: 86282 - protein, 9 aa, Homo sapiens
  misc_feature: Table A; Target 86282; HLA-A*24:02; TDRD12; ENSG00000173809; TAA
LQPPVVVLR

SEQ ID NO: 86283 - protein, 9 aa, Homo sapiens
  misc_feature: Table A; Target 86283; HLA-A*31:01; TDRD12; ENSG00000173809; TAA
LQPPVVVLR

SEQ ID NO: 86284 - protein, 9 aa, Homo sapiens
  misc_feature: Table A; Target 86284; HLA-A*33:03; TDRD12; ENSG00000173809; TAA
LQPPVVVLR

SEQ ID NO: 86285 - protein, 9 aa, Homo sapiens
  misc_feature: Table A; Target 86285; HLA-A*68:02; TDRD12; ENSG00000173809; TAA
LQPPVVVLR

SEQ ID NO: 86286 - protein, 9 aa, Homo sapiens
  misc_feature: Table A; Target 86286; HLA-C*07:06; TDRD12; ENSG00000173809; TAA
LQPPVVVLR

SEQ ID NO: 86287 - protein, 9 aa, Homo sapiens
  misc_feature: Table A; Target 86287; HLA-B*27:05; TDRD12; ENSG00000173809; TAA
LRADGISDL

SEQ ID NO: 86288 - protein, 9 aa, Homo sapiens
  misc_feature: Table A; Target 86288; HLA-B*39:01; TDRD12; ENSG00000173809; TAA
LRADGISDL

SEQ ID NO: 86289 - protein, 9 aa, Homo sapiens
  misc_feature: Table A; Target 86289; HLA-A*32:01; TDRD12; ENSG00000173809; TAA
LSADLKKAL

SEQ ID NO: 86290 - protein, 9 aa, Homo sapiens
  misc_feature: Table A; Target 86290; HLA-B*07:02; TDRD12; ENSG00000173809; TAA
LSADLKKAL

SEQ ID NO: 86291 - protein, 9 aa, Homo sapiens
  misc_feature: Table A; Target 86291; HLA-C*03:04; TDRD12; ENSG00000173809; TAA
LSADLKKAL

SEQ ID NO: 86292 - protein, 9 aa, Homo sapiens
  misc_feature: Table A; Target 86292; HLA-C*06:02; TDRD12; ENSG00000173809; TAA
LSADLKKAL

SEQ ID NO: 86293 - protein, 9 aa, Homo sapiens
  misc_feature: Table A; Target 86293; HLA-C*16:01; TDRD12; ENSG00000173809; TAA
LSADLKKAL

SEQ ID NO: 86294 - protein, 9 aa, Homo sapiens
  misc_feature: Table A; Target 86294; HLA-C*16:02; TDRD12; ENSG00000173809; TAA
LSADLKKAL

SEQ ID NO: 86295 - protein, 9 aa, Homo sapiens
  misc_feature: Table A; Target 86295; HLA-C*16:01; TDRD12; ENSG00000173809; TAA
LSQTPPRVT

SEQ ID NO: 86296 - protein, 9 aa, Homo sapiens
  misc_feature: Table A; Target 86296; HLA-C*07:04; TDRD12; ENSG00000173809; TAA
LSSGSQIIL

SEQ ID NO: 86297 - protein, 9 aa, Homo sapiens
  misc_feature: Table A; Target 86297; HLA-B*46:01; TDRD12; ENSG00000173809; TAA
LSSQALPSF

SEQ ID NO: 86298 - protein, 9 aa, Homo sapiens
  misc_feature: Table A; Target 86298; HLA-B*57:01; TDRD12; ENSG00000173809; TAA
LSSQALPSF

SEQ ID NO: 86299 - protein, 9 aa, Homo sapiens
  misc_feature: Table A; Target 86299; HLA-B*58:01; TDRD12; ENSG00000173809; TAA
LSSQALPSF

SEQ ID NO: 86300 - protein, 11 aa, Homo sapiens
  misc_feature: Table A; Target 86300; HLA-A*01:01; TDRD12; ENSG00000173809; TAA
LSSQALPSFGY

SEQ ID NO: 86301 - protein, 11 aa, Homo sapiens
  misc_feature: Table A; Target 86301; HLA-A*29:02; TDRD12; ENSG00000173809; TAA
LSSQALPSFGY

SEQ ID NO: 86302 - protein, 11 aa, Homo sapiens
  misc_feature: Table A; Target 86302; HLA-A*30:02; TDRD12; ENSG00000173809; TAA
LSSQALPSFGY

SEQ ID NO: 86303 - protein, 9 aa, Homo sapiens
  misc_feature: Table A; Target 86303; HLA-A*01:01; TDRD12; ENSG00000173809; TAA
LTDDCVPLL

SEQ ID NO: 86304 - protein, 9 aa, Homo sapiens
  misc_feature: Table A; Target 86304; HLA-A*02:01; TDRD12; ENSG00000173809; TAA
LTDDCVPLL

SEQ ID NO: 86305 - protein, 9 aa, Homo sapiens
  misc_feature: Table A; Target 86305; HLA-A*02:07; TDRD12; ENSG00000173809; TAA
LTDDCVPLL

SEQ ID NO: 86306 - protein, 9 aa, Homo sapiens
  misc_feature: Table A; Target 86306; HLA-A*23:01; TDRD12; ENSG00000173809; TAA
LTDDCVPLL

SEQ ID NO: 86307 - protein, 9 aa, Homo sapiens
  misc_feature: Table A; Target 86307; HLA-B*35:03; TDRD12; ENSG00000173809; TAA
LTDDCVPLL

SEQ ID NO: 86308 - protein, 9 aa, Homo sapiens
  misc_feature: Table A; Target 86308; HLA-B*38:01; TDRD12; ENSG00000173809; TAA
LTDDCVPLL

SEQ ID NO: 86309 - protein, 9 aa, Homo sapiens
  misc_feature: Table A; Target 86309; HLA-C*03:03; TDRD12; ENSG00000173809; TAA
LTDDCVPLL

SEQ ID NO: 86310 - protein, 9 aa, Homo sapiens
  misc_feature: Table A; Target 86310; HLA-C*03:04; TDRD12; ENSG00000173809; TAA
LTDDCVPLL

SEQ ID NO: 86311 - protein, 9 aa, Homo sapiens
  misc_feature: Table A; Target 86311; HLA-C*04:01; TDRD12; ENSG00000173809; TAA
LTDDCVPLL

SEQ ID NO: 86312 - protein, 9 aa, Homo sapiens
  misc_feature: Table A; Target 86312; HLA-C*05:01; TDRD12; ENSG00000173809; TAA
LTDDCVPLL

SEQ ID NO: 86313 - protein, 9 aa, Homo sapiens
  misc_feature: Table A; Target 86313; HLA-C*07:04; TDRD12; ENSG00000173809; TAA
LTDDCVPLL

SEQ ID NO: 86314 - protein, 10 aa, Homo sapiens
  misc_feature: Table A; Target 86314; HLA-A*01:01; TDRD12; ENSG00000173809; TAA
LTEKDASHAV

SEQ ID NO: 86315 - protein, 8 aa, Homo sapiens
  misc_feature: Table A; Target 86315; HLA-C*03:03; TDRD12; ENSG00000173809; TAA
LTIDSSPL

SEQ ID NO: 86316 - protein, 8 aa, Homo sapiens
  misc_feature: Table A; Target 86316; HLA-C*03:04; TDRD12; ENSG00000173809; TAA
LTIDSSPL

SEQ ID NO: 86317 - protein, 9 aa, Homo sapiens
  misc_feature: Table A; Target 86317; HLA-C*03:04; TDRD12; ENSG00000173809; TAA
LTLEEGQVC

SEQ ID NO: 86318 - protein, 10 aa, Homo sapiens
  misc_feature: Table A; Target 86318; HLA-A*01:01; TDRD12; ENSG00000173809; TAA
LTVLQTGACY

SEQ ID NO: 86319 - protein, 10 aa, Homo sapiens
  misc_feature: Table A; Target 86319; HLA-A*26:01; TDRD12; ENSG00000173809; TAA
LTVLQTGACY

SEQ ID NO: 86320 - protein, 10 aa, Homo sapiens
  misc_feature: Table A; Target 86320; HLA-A*30:02; TDRD12; ENSG00000173809; TAA
LTVLQTGACY

SEQ ID NO: 86321 - protein, 10 aa, Homo sapiens
  misc_feature: Table A; Target 86321; HLA-B*58:01; TDRD12; ENSG00000173809; TAA
LTVLQTGACY

SEQ ID NO: 86322 - protein, 9 aa, Homo sapiens
  misc_feature: Table A; Target 86322; HLA-A*25:01; TDRD12; ENSG00000173809; TAA
LVAKNYACY

SEQ ID NO: 86323 - protein, 9 aa, Homo sapiens
  misc_feature: Table A; Target 86323; HLA-A*26:01; TDRD12; ENSG00000173809; TAA
LVAKNYACY

SEQ ID NO: 86324 - protein, 9 aa, Homo sapiens
  misc_feature: Table A; Target 86324; HLA-A*29:02; TDRD12; ENSG00000173809; TAA
LVAKNYACY

SEQ ID NO: 86325 - protein, 9 aa, Homo sapiens
  misc_feature: Table A; Target 86325; HLA-A*30:02; TDRD12; ENSG00000173809; TAA
LVAKNYACY

SEQ ID NO: 86326 - protein, 9 aa, Homo sapiens
  misc_feature: Table A; Target 86326; HLA-C*07:04; TDRD12; ENSG00000173809; TAA
LVAKNYACY

SEQ ID NO: 86327 - protein, 9 aa, Homo sapiens
  misc_feature: Table A; Target 86327; HLA-A*23:01; TDRD12; ENSG00000173809; TAA
LYATLNAEM

SEQ ID NO: 86328 - protein, 9 aa, Homo sapiens
  misc_feature: Table A; Target 86328; HLA-A*24:02; TDRD12; ENSG00000173809; TAA
LYATLNAEM

SEQ ID NO: 86329 - protein, 9 aa, Homo sapiens
  misc_feature: Table A; Target 86329; HLA-A*29:02; TDRD12; ENSG00000173809; TAA
LYATLNAEM

SEQ ID NO: 86330 - protein, 9 aa, Homo sapiens
  misc_feature: Table A; Target 86330; HLA-B*27:05; TDRD12; ENSG00000173809; TAA
LYATLNAEM

SEQ ID NO: 86331 - protein, 9 aa, Homo sapiens
  misc_feature: Table A; Target 86331; HLA-C*01:02; TDRD12; ENSG00000173809; TAA
LYATLNAEM

SEQ ID NO: 86332 - protein, 9 aa, Homo sapiens
  misc_feature: Table A; Target 86332; HLA-C*14:02; TDRD12; ENSG00000173809; TAA
LYATLNAEM

SEQ ID NO: 86333 - protein, 9 aa, Homo sapiens
  misc_feature: Table A; Target 86333; HLA-A*23:01; TDRD12; ENSG00000173809; TAA
LYCTKPVTL

SEQ ID NO: 86334 - protein, 9 aa, Homo sapiens
  misc_feature: Table A; Target 86334; HLA-A*24:02; TDRD12; ENSG00000173809; TAA
LYCTKPVTL

SEQ ID NO: 86335 - protein, 9 aa, Homo sapiens
  misc_feature: Table A; Target 86335; HLA-C*14:02; TDRD12; ENSG00000173809; TAA
LYCTKPVTL

SEQ ID NO: 86336 - protein, 10 aa, Homo sapiens
  misc_feature: Table A; Target 86336; HLA-A*23:01; TDRD12; ENSG00000173809; TAA
LYGLAEKTLF

SEQ ID NO: 86337 - protein, 10 aa, Homo sapiens
  misc_feature: Table A; Target 86337; HLA-A*24:02; TDRD12; ENSG00000173809; TAA
LYGLAEKTLF

SEQ ID NO: 86338 - protein, 8 aa, Homo sapiens
  misc_feature: Table A; Target 86338; HLA-A*24:02; TDRD12; ENSG00000173809; TAA
LYGNVQQV

SEQ ID NO: 86339 - protein, 8 aa, Homo sapiens
  misc_feature: Table A; Target 86339; HLA-C*04:01; TDRD12; ENSG00000173809; TAA
LYGNVQQV

SEQ ID NO: 86340 - protein, 8 aa, Homo sapiens
  misc_feature: Table A; Target 86340; HLA-C*14:02; TDRD12; ENSG00000173809; TAA
LYGNVQQV

SEQ ID NO: 86341 - protein, 9 aa, Homo sapiens
  misc_feature: Table A; Target 86341; HLA-A*23:01; TDRD12; ENSG00000173809; TAA
LYGNVQQVV

SEQ ID NO: 86342 - protein, 9 aa, Homo sapiens
  misc_feature: Table A; Target 86342; HLA-A*24:02; TDRD12; ENSG00000173809; TAA
LYGNVQQVV

SEQ ID NO: 86343 - protein, 9 aa, Homo sapiens
  misc_feature: Table A; Target 86343; HLA-C*14:02; TDRD12; ENSG00000173809; TAA
LYGNVQQVV

SEQ ID NO: 86344 - protein, 11 aa, Homo sapiens
  misc_feature: Table A; Target 86344; HLA-A*24:02; TDRD12; ENSG00000173809; TAA
LYGNVQQVVHL

SEQ ID NO: 86345 - protein, 9 aa, Homo sapiens
  misc_feature: Table A; Target 86345; HLA-B*37:01; TDRD12; ENSG00000173809; TAA
MDSLRDSPK

SEQ ID NO: 86346 - protein, 9 aa, Homo sapiens
  misc_feature: Table A; Target 86346; HLA-A*02:07; TDRD12; ENSG00000173809; TAA
MEDSHGVNF

SEQ ID NO: 86347 - protein, 9 aa, Homo sapiens
  misc_feature: Table A; Target 86347; HLA-A*23:01; TDRD12; ENSG00000173809; TAA
MEDSHGVNF

SEQ ID NO: 86348 - protein, 9 aa, Homo sapiens
  misc_feature: Table A; Target 86348; HLA-A*30:01; TDRD12; ENSG00000173809; TAA
MEDSHGVNF

SEQ ID NO: 86349 - protein, 9 aa, Homo sapiens
  misc_feature: Table A; Target 86349; HLA-B*15:03; TDRD12; ENSG00000173809; TAA
MEDSHGVNF

SEQ ID NO: 86350 - protein, 9 aa, Homo sapiens
  misc_feature: Table A; Target 86350; HLA-B*18:01; TDRD12; ENSG00000173809; TAA
MEDSHGVNF

SEQ ID NO: 86351 - protein, 9 aa, Homo sapiens
  misc_feature: Table A; Target 86351; HLA-B*35:01; TDRD12; ENSG00000173809; TAA
MEDSHGVNF

SEQ ID NO: 86352 - protein, 9 aa, Homo sapiens
  misc_feature: Table A; Target 86352; HLA-B*35:03; TDRD12; ENSG00000173809; TAA
MEDSHGVNF

SEQ ID NO: 86353 - protein, 9 aa, Homo sapiens
  misc_feature: Table A; Target 86353; HLA-B*37:01; TDRD12; ENSG00000173809; TAA
MEDSHGVNF

SEQ ID NO: 86354 - protein, 9 aa, Homo sapiens
  misc_feature: Table A; Target 86354; HLA-B*38:01; TDRD12; ENSG00000173809; TAA
MEDSHGVNF

SEQ ID NO: 86355 - protein, 9 aa, Homo sapiens
  misc_feature: Table A; Target 86355; HLA-B*40:01; TDRD12; ENSG00000173809; TAA
MEDSHGVNF

SEQ ID NO: 86356 - protein, 9 aa, Homo sapiens
  misc_feature: Table A; Target 86356; HLA-B*44:02; TDRD12; ENSG00000173809; TAA
MEDSHGVNF

SEQ ID NO: 86357 - protein, 9 aa, Homo sapiens
  misc_feature: Table A; Target 86357; HLA-B*44:03; TDRD12; ENSG00000173809; TAA
MEDSHGVNF

SEQ ID NO: 86358 - protein, 9 aa, Homo sapiens
  misc_feature: Table A; Target 86358; HLA-B*49:01; TDRD12; ENSG00000173809; TAA
MEDSHGVNF

SEQ ID NO: 86359 - protein, 9 aa, Homo sapiens
  misc_feature: Table A; Target 86359; HLA-C*02:02; TDRD12; ENSG00000173809; TAA
MEDSHGVNF

SEQ ID NO: 86360 - protein, 9 aa, Homo sapiens
  misc_feature: Table A; Target 86360; HLA-C*04:01; TDRD12; ENSG00000173809; TAA
MEDSHGVNF

SEQ ID NO: 86361 - protein, 9 aa, Homo sapiens
  misc_feature: Table A; Target 86361; HLA-C*05:01; TDRD12; ENSG00000173809; TAA
MEDSHGVNF

SEQ ID NO: 86362 - protein, 9 aa, Homo sapiens
  misc_feature: Table A; Target 86362; HLA-C*07:04; TDRD12; ENSG00000173809; TAA
MEDSHGVNF

SEQ ID NO: 86363 - protein, 9 aa, Homo sapiens
  misc_feature: Table A; Target 86363; HLA-C*16:04; TDRD12; ENSG00000173809; TAA
MEDSHGVNF

SEQ ID NO: 86364 - protein, 10 aa, Homo sapiens
  misc_feature: Table A; Target 86364; HLA-B*49:01; TDRD12; ENSG00000173809; TAA
MEEAALYGNV

SEQ ID NO: 86365 - protein, 9 aa, Homo sapiens
  misc_feature: Table A; Target 86365; HLA-B*13:02; TDRD12; ENSG00000173809; TAA
MGIDNPEHI

SEQ ID NO: 86366 - protein, 9 aa, Homo sapiens
  misc_feature: Table A; Target 86366; HLA-B*38:01; TDRD12; ENSG00000173809; TAA
MGIDNPEHI

SEQ ID NO: 86367 - protein, 10 aa, Homo sapiens
  misc_feature: Table A; Target 86367; HLA-B*54:01; TDRD12; ENSG00000173809; TAA
MNDPYIVITA

SEQ ID NO: 86368 - protein, 9 aa, Homo sapiens
  misc_feature: Table A; Target 86368; HLA-B*54:01; TDRD12; ENSG00000173809; TAA
MSSRPLHPV

SEQ ID NO: 86369 - protein, 9 aa, Homo sapiens
  misc_feature: Table A; Target 86369; HLA-C*16:01; TDRD12; ENSG00000173809; TAA
MSSRPLHPV

SEQ ID NO: 86370 - protein, 8 aa, Homo sapiens
  misc_feature: Table A; Target 86370; HLA-C*04:01; TDRD12; ENSG00000173809; TAA
NAEMNEYF

SEQ ID NO: 86371 - protein, 8 aa, Homo sapiens
  misc_feature: Table A; Target 86371; HLA-C*05:01; TDRD12; ENSG00000173809; TAA
NAEMNEYF

SEQ ID NO: 86372 - protein, 9 aa, Homo sapiens
  misc_feature: Table A; Target 86372; HLA-C*16:02; TDRD12; ENSG00000173809; TAA
NATNYFGRI

SEQ ID NO: 86373 - protein, 9 aa, Homo sapiens
  misc_feature: Table A; Target 86373; HLA-B*18:01; TDRD12; ENSG00000173809; TAA
NDDLVAKNY

SEQ ID NO: 86374 - protein, 9 aa, Homo sapiens
  misc_feature: Table A; Target 86374; HLA-B*44:02; TDRD12; ENSG00000173809; TAA
NDDLVAKNY

SEQ ID NO: 86375 - protein, 9 aa, Homo sapiens
  misc_feature: Table A; Target 86375; HLA-B*44:03; TDRD12; ENSG00000173809; TAA
NDDLVAKNY

SEQ ID NO: 86376 - protein, 9 aa, Homo sapiens
  misc_feature: Table A; Target 86376; HLA-C*16:04; TDRD12; ENSG00000173809; TAA
NDDLVAKNY

SEQ ID NO: 86377 - protein, 9 aa, Homo sapiens
  misc_feature: Table A; Target 86377; HLA-A*68:02; TDRD12; ENSG00000173809; TAA
NDPYIVITA

SEQ ID NO: 86378 - protein, 9 aa, Homo sapiens
  misc_feature: Table A; Target 86378; HLA-A*02:04; TDRD12; ENSG00000173809; TAA
NEIEWNPKV

SEQ ID NO: 86379 - protein, 9 aa, Homo sapiens
  misc_feature: Table A; Target 86379; HLA-A*30:01; TDRD12; ENSG00000173809; TAA
NEIEWNPKV

SEQ ID NO: 86380 - protein, 9 aa, Homo sapiens
  misc_feature: Table A; Target 86380; HLA-B*18:01; TDRD12; ENSG00000173809; TAA
NEIEWNPKV

SEQ ID NO: 86381 - protein, 9 aa, Homo sapiens
  misc_feature: Table A; Target 86381; HLA-B*44:03; TDRD12; ENSG00000173809; TAA
NEIEWNPKV

SEQ ID NO: 86382 - protein, 9 aa, Homo sapiens
  misc_feature: Table A; Target 86382; HLA-B*49:01; TDRD12; ENSG00000173809; TAA
NEIEWNPKV

SEQ ID NO: 86383 - protein, 8 aa, Homo sapiens
  misc_feature: Table A; Target 86383; HLA-B*18:01; TDRD12; ENSG00000173809; TAA
NEQMFAIL

SEQ ID NO: 86384 - protein, 11 aa, Homo sapiens
  misc_feature: Table A; Target 86384; HLA-A*23:01; TDRD12; ENSG00000173809; TAA
NFPAQSLQHTW

SEQ ID NO: 86385 - protein, 11 aa, Homo sapiens
  misc_feature: Table A; Target 86385; HLA-A*24:02; TDRD12; ENSG00000173809; TAA
NFPAQSLQHTW

SEQ ID NO: 86386 - protein, 8 aa, Homo sapiens
  misc_feature: Table A; Target 86386; HLA-B*51:01; TDRD12; ENSG00000173809; TAA
NGPLAVIV

SEQ ID NO: 86387 - protein, 8 aa, Homo sapiens
  misc_feature: Table A; Target 86387; HLA-B*08:01; TDRD12; ENSG00000173809; TAA
NIKSAPSF

SEQ ID NO: 86388 - protein, 10 aa, Homo sapiens
  misc_feature: Table A; Target 86388; HLA-A*03:01; TDRD12; ENSG00000173809; TAA
NIKSAPSFNK

SEQ ID NO: 86389 - protein, 9 aa, Homo sapiens
  misc_feature: Table A; Target 86389; HLA-A*25:01; TDRD12; ENSG00000173809; TAA
NIRVVVESF

SEQ ID NO: 86390 - protein, 9 aa, Homo sapiens
  misc_feature: Table A; Target 86390; HLA-A*32:01; TDRD12; ENSG00000173809; TAA
NIRVVVESF

SEQ ID NO: 86391 - protein, 9 aa, Homo sapiens
  misc_feature: Table A; Target 86391; HLA-B*15:01; TDRD12; ENSG00000173809; TAA
NIRVVVESF

SEQ ID NO: 86392 - protein, 9 aa, Homo sapiens
  misc_feature: Table A; Target 86392; HLA-B*15:03; TDRD12; ENSG00000173809; TAA
NIRVVVESF

SEQ ID NO: 86393 - protein, 9 aa, Homo sapiens
  misc_feature: Table A; Target 86393; HLA-B*18:01; TDRD12; ENSG00000173809; TAA
NIRVVVESF

SEQ ID NO: 86394 - protein, 9 aa, Homo sapiens
  misc_feature: Table A; Target 86394; HLA-B*46:01; TDRD12; ENSG00000173809; TAA
NIRVVVESF

SEQ ID NO: 86395 - protein, 9 aa, Homo sapiens
  misc_feature: Table A; Target 86395; HLA-B*15:03; TDRD12; ENSG00000173809; TAA
NKRVESSVY

SEQ ID NO: 86396 - protein, 10 aa, Homo sapiens
  misc_feature: Table A; Target 86396; HLA-A*02:07; TDRD12; ENSG00000173809; TAA
NLDYLEKPRL

SEQ ID NO: 86397 - protein, 9 aa, Homo sapiens
  misc_feature: Table A; Target 86397; HLA-A*02:01; TDRD12; ENSG00000173809; TAA
NLLKATTQV

SEQ ID NO: 86398 - protein, 9 aa, Homo sapiens
  misc_feature: Table A; Target 86398; HLA-A*02:03; TDRD12; ENSG00000173809; TAA
NLLKATTQV

SEQ ID NO: 86399 - protein, 9 aa, Homo sapiens
  misc_feature: Table A; Target 86399; HLA-A*02:04; TDRD12; ENSG00000173809; TAA
NLLKATTQV

SEQ ID NO: 86400 - protein, 9 aa, Homo sapiens
  misc_feature: Table A; Target 86400; HLA-A*02:07; TDRD12; ENSG00000173809; TAA
NLLKATTQV

SEQ ID NO: 86401 - protein, 9 aa, Homo sapiens
  misc_feature: Table A; Target 86401; HLA-B*13:02; TDRD12; ENSG00000173809; TAA
NLLKATTQV

SEQ ID NO: 86402 - protein, 9 aa, Homo sapiens
  misc_feature: Table A; Target 86402; HLA-B*55:01; TDRD12; ENSG00000173809; TAA
NLLKATTQV

SEQ ID NO: 86403 - protein, 9 aa, Homo sapiens
  misc_feature: Table A; Target 86403; HLA-A*25:01; TDRD12; ENSG00000173809; TAA
NLQNVLEQW

SEQ ID NO: 86404 - protein, 9 aa, Homo sapiens
  misc_feature: Table A; Target 86404; HLA-B*58:01; TDRD12; ENSG00000173809; TAA
NLQNVLEQW

SEQ ID NO: 86405 - protein, 9 aa, Homo sapiens
  misc_feature: Table A; Target 86405; HLA-A*02:01; TDRD12; ENSG00000173809; TAA
NLSSLKTSV

SEQ ID NO: 86406 - protein, 9 aa, Homo sapiens
  misc_feature: Table A; Target 86406; HLA-A*02:03; TDRD12; ENSG00000173809; TAA
NLSSLKTSV

SEQ ID NO: 86407 - protein, 9 aa, Homo sapiens
  misc_feature: Table A; Target 86407; HLA-A*32:01; TDRD12; ENSG00000173809; TAA
NLSSLKTSV

SEQ ID NO: 86408 - protein, 9 aa, Homo sapiens
  misc_feature: Table A; Target 86408; HLA-B*08:01; TDRD12; ENSG00000173809; TAA
NLSSLKTSV

SEQ ID NO: 86409 - protein, 9 aa, Homo sapiens
  misc_feature: Table A; Target 86409; HLA-B*13:02; TDRD12; ENSG00000173809; TAA
NLSSLKTSV

SEQ ID NO: 86410 - protein, 9 aa, Homo sapiens
  misc_feature: Table A; Target 86410; HLA-B*55:01; TDRD12; ENSG00000173809; TAA
NLSSLKTSV

SEQ ID NO: 86411 - protein, 10 aa, Homo sapiens
  misc_feature: Table A; Target 86411; HLA-A*01:01; TDRD12; ENSG00000173809; TAA
NMDSLRDSPK

SEQ ID NO: 86412 - protein, 10 aa, Homo sapiens
  misc_feature: Table A; Target 86412; HLA-A*03:02; TDRD12; ENSG00000173809; TAA
NMDSLRDSPK

SEQ ID NO: 86413 - protein, 8 aa, Homo sapiens
  misc_feature: Table A; Target 86413; HLA-B*35:03; TDRD12; ENSG00000173809; TAA
NPEHIEQL

SEQ ID NO: 86414 - protein, 10 aa, Homo sapiens
  misc_feature: Table A; Target 86414; HLA-B*35:03; TDRD12; ENSG00000173809; TAA
NPETDLPRKL

SEQ ID NO: 86415 - protein, 9 aa, Homo sapiens
  misc_feature: Table A; Target 86415; HLA-B*39:01; TDRD12; ENSG00000173809; TAA
NQKEDAWAL

SEQ ID NO: 86416 - protein, 9 aa, Homo sapiens
  misc_feature: Table A; Target 86416; HLA-A*02:03; TDRD12; ENSG00000173809; TAA
NQKPGGYLV

SEQ ID NO: 86417 - protein, 9 aa, Homo sapiens
  misc_feature: Table A; Target 86417; HLA-A*02:04; TDRD12; ENSG00000173809; TAA
NQKPGGYLV

SEQ ID NO: 86418 - protein, 9 aa, Homo sapiens
  misc_feature: Table A; Target 86418; HLA-B*13:02; TDRD12; ENSG00000173809; TAA
NQKPGGYLV

SEQ ID NO: 86419 - protein, 9 aa, Homo sapiens
  misc_feature: Table A; Target 86419; HLA-B*38:01; TDRD12; ENSG00000173809; TAA
NQKPGGYLV

SEQ ID NO: 86420 - protein, 9 aa, Homo sapiens
  misc_feature: Table A; Target 86420; HLA-B*39:01; TDRD12; ENSG00000173809; TAA
NQKPGGYLV

SEQ ID NO: 86421 - protein, 9 aa, Homo sapiens
  misc_feature: Table A; Target 86421; HLA-C*02:02; TDRD12; ENSG00000173809; TAA
NQKPGGYLV

SEQ ID NO: 86422 - protein, 10 aa, Homo sapiens
  misc_feature: Table A; Target 86422; HLA-A*23:01; TDRD12; ENSG00000173809; TAA
NQKPGGYLVF

SEQ ID NO: 86423 - protein, 10 aa, Homo sapiens
  misc_feature: Table A; Target 86423; HLA-A*24:02; TDRD12; ENSG00000173809; TAA
NQKPGGYLVF

SEQ ID NO: 86424 - protein, 10 aa, Homo sapiens
  misc_feature: Table A; Target 86424; HLA-A*25:01; TDRD12; ENSG00000173809; TAA
NQKPGGYLVF

SEQ ID NO: 86425 - protein, 10 aa, Homo sapiens
  misc_feature: Table A; Target 86425; HLA-A*30:02; TDRD12; ENSG00000173809; TAA
NQKPGGYLVF

SEQ ID NO: 86426 - protein, 10 aa, Homo sapiens
  misc_feature: Table A; Target 86426; HLA-A*32:01; TDRD12; ENSG00000173809; TAA
NQKPGGYLVF

SEQ ID NO: 86427 - protein, 10 aa, Homo sapiens
  misc_feature: Table A; Target 86427; HLA-B*15:01; TDRD12; ENSG00000173809; TAA
NQKPGGYLVF

SEQ ID NO: 86428 - protein, 10 aa, Homo sapiens
  misc_feature: Table A; Target 86428; HLA-B*15:03; TDRD12; ENSG00000173809; TAA
NQKPGGYLVF

SEQ ID NO: 86429 - protein, 10 aa, Homo sapiens
  misc_feature: Table A; Target 86429; HLA-B*46:01; TDRD12; ENSG00000173809; TAA
NQKPGGYLVF

SEQ ID NO: 86430 - protein, 10 aa, Homo sapiens
  misc_feature: Table A; Target 86430; HLA-C*02:02; TDRD12; ENSG00000173809; TAA
NQKPGGYLVF

SEQ ID NO: 86431 - protein, 10 aa, Homo sapiens
  misc_feature: Table A; Target 86431; HLA-C*07:04; TDRD12; ENSG00000173809; TAA
NQKPGGYLVF

SEQ ID NO: 86432 - protein, 11 aa, Homo sapiens
  misc_feature: Table A; Target 86432; HLA-A*31:01; TDRD12; ENSG00000173809; TAA
NQKPGGYLVFK

SEQ ID NO: 86433 - protein, 8 aa, Homo sapiens
  misc_feature: Table A; Target 86433; HLA-A*01:01; TDRD12; ENSG00000173809; TAA
NSAMNDFY

SEQ ID NO: 86434 - protein, 9 aa, Homo sapiens
  misc_feature: Table A; Target 86434; HLA-A*68:02; TDRD12; ENSG00000173809; TAA
NTVWIDPMV

SEQ ID NO: 86435 - protein, 9 aa, Homo sapiens
  misc_feature: Table A; Target 86435; HLA-A*25:01; TDRD12; ENSG00000173809; TAA
NVRAEILSM

SEQ ID NO: 86436 - protein, 9 aa, Homo sapiens
  misc_feature: Table A; Target 86436; HLA-A*26:01; TDRD12; ENSG00000173809; TAA
NVRAEILSM

SEQ ID NO: 86437 - protein, 9 aa, Homo sapiens
  misc_feature: Table A; Target 86437; HLA-B*07:02; TDRD12; ENSG00000173809; TAA
NVRAEILSM

SEQ ID NO: 86438 - protein, 9 aa, Homo sapiens
  misc_feature: Table A; Target 86438; HLA-B*08:01; TDRD12; ENSG00000173809; TAA
NVRAEILSM

SEQ ID NO: 86439 - protein, 9 aa, Homo sapiens
  misc_feature: Table A; Target 86439; HLA-B*35:01; TDRD12; ENSG00000173809; TAA
NVRAEILSM

SEQ ID NO: 86440 - protein, 9 aa, Homo sapiens
  misc_feature: Table A; Target 86440; HLA-B*40:02; TDRD12; ENSG00000173809; TAA
NVRAEILSM

SEQ ID NO: 86441 - protein, 9 aa, Homo sapiens
  misc_feature: Table A; Target 86441; HLA-B*46:01; TDRD12; ENSG00000173809; TAA
NVRAEILSM

SEQ ID NO: 86442 - protein, 9 aa, Homo sapiens
  misc_feature: Table A; Target 86442; HLA-B*51:01; TDRD12; ENSG00000173809; TAA
NVRAEILSM

SEQ ID NO: 86443 - protein, 9 aa, Homo sapiens
  misc_feature: Table A; Target 86443; HLA-C*01:02; TDRD12; ENSG00000173809; TAA
NVRAEILSM

SEQ ID NO: 86444 - protein, 9 aa, Homo sapiens
  misc_feature: Table A; Target 86444; HLA-C*07:02; TDRD12; ENSG00000173809; TAA
NVRAEILSM

SEQ ID NO: 86445 - protein, 9 aa, Homo sapiens
  misc_feature: Table A; Target 86445; HLA-A*31:01; TDRD12; ENSG00000173809; TAA
NYFGRIVDK

SEQ ID NO: 86446 - protein, 9 aa, Homo sapiens
  misc_feature: Table A; Target 86446; HLA-A*33:01; TDRD12; ENSG00000173809; TAA
NYFGRIVDK

SEQ ID NO: 86447 - protein, 9 aa, Homo sapiens
  misc_feature: Table A; Target 86447; HLA-A*33:03; TDRD12; ENSG00000173809; TAA
NYFGRIVDK

SEQ ID NO: 86448 - protein, 9 aa, Homo sapiens
  misc_feature: Table A; Target 86448; HLA-A*32:01; TDRD12; ENSG00000173809; TAA
PAQSLQHTW

SEQ ID NO: 86449 - protein, 9 aa, Homo sapiens
  misc_feature: Table A; Target 86449; HLA-B*57:01; TDRD12; ENSG00000173809; TAA
PAQSLQHTW

SEQ ID NO: 86450 - protein, 9 aa, Homo sapiens
  misc_feature: Table A; Target 86450; HLA-B*58:01; TDRD12; ENSG00000173809; TAA
PAQSLQHTW

SEQ ID NO: 86451 - protein, 9 aa, Homo sapiens
  misc_feature: Table A; Target 86451; HLA-C*12:03; TDRD12; ENSG00000173809; TAA
PAQSLQHTW

SEQ ID NO: 86452 - protein, 9 aa, Homo sapiens
  misc_feature: Table A; Target 86452; HLA-C*16:02; TDRD12; ENSG00000173809; TAA
PAQSLQHTW

SEQ ID NO: 86453 - protein, 9 aa, Homo sapiens
  misc_feature: Table A; Target 86453; HLA-B*44:02; TDRD12; ENSG00000173809; TAA
PETDLPRKL

SEQ ID NO: 86454 - protein, 9 aa, Homo sapiens
  misc_feature: Table A; Target 86454; HLA-B*44:03; TDRD12; ENSG00000173809; TAA
PETDLPRKL

SEQ ID NO: 86455 - protein, 9 aa, Homo sapiens
  misc_feature: Table A; Target 86455; HLA-C*12:03; TDRD12; ENSG00000173809; TAA
PETDLPRKL

SEQ ID NO: 86456 - protein, 9 aa, Homo sapiens
  misc_feature: Table A; Target 86456; HLA-A*29:02; TDRD12; ENSG00000173809; TAA
PFLDHDVDY

SEQ ID NO: 86457 - protein, 10 aa, Homo sapiens
  misc_feature: Table A; Target 86457; HLA-A*29:02; TDRD12; ENSG00000173809; TAA
PFYILNATNY

SEQ ID NO: 86458 - protein, 9 aa, Homo sapiens
  misc_feature: Table A; Target 86458; HLA-C*07:01; TDRD12; ENSG00000173809; TAA
PGPSHTESY

SEQ ID NO: 86459 - protein, 9 aa, Homo sapiens
  misc_feature: Table A; Target 86459; HLA-A*02:04; TDRD12; ENSG00000173809; TAA
PLHPVLLTI

SEQ ID NO: 86460 - protein, 9 aa, Homo sapiens
  misc_feature: Table A; Target 86460; HLA-B*35:03; TDRD12; ENSG00000173809; TAA
PPAEDAACL

SEQ ID NO: 86461 - protein, 9 aa, Homo sapiens
  misc_feature: Table A; Target 86461; HLA-B*07:02; TDRD12; ENSG00000173809; TAA
PPRVTGTSP

SEQ ID NO: 86462 - protein, 9 aa, Homo sapiens
  misc_feature: Table A; Target 86462; HLA-C*07:02; TDRD12; ENSG00000173809; TAA
PPRVTGTSP

SEQ ID NO: 86463 - protein, 9 aa, Homo sapiens
  misc_feature: Table A; Target 86463; HLA-C*07:02; TDRD12; ENSG00000173809; TAA
PRKLSSQAL

SEQ ID NO: 86464 - protein, 11 aa, Homo sapiens
  misc_feature: Table A; Target 86464; HLA-A*03:02; TDRD12; ENSG00000173809; TAA
PTATAQDKAVK

SEQ ID NO: 86465 - protein, 11 aa, Homo sapiens
  misc_feature: Table A; Target 86465; HLA-A*11:01; TDRD12; ENSG00000173809; TAA
PTATAQDKAVK

SEQ ID NO: 86466 - protein, 8 aa, Homo sapiens
  misc_feature: Table A; Target 86466; HLA-C*14:02; TDRD12; ENSG00000173809; TAA
PYIVITAM

SEQ ID NO: 86467 - protein, 8 aa, Homo sapiens
  misc_feature: Table A; Target 86467; HLA-A*24:02; TDRD12; ENSG00000173809; TAA
PYLKAFGF

SEQ ID NO: 86468 - protein, 10 aa, Homo sapiens
  misc_feature: Table A; Target 86468; HLA-B*54:01; TDRD12; ENSG00000173809; TAA
QALDFIPSQA

SEQ ID NO: 86469 - protein, 8 aa, Homo sapiens
  misc_feature: Table A; Target 86469; HLA-A*30:02; TDRD12; ENSG00000173809; TAA
QALPSFGY

SEQ ID NO: 86470 - protein, 8 aa, Homo sapiens
  misc_feature: Table A; Target 86470; HLA-B*35:01; TDRD12; ENSG00000173809; TAA
QALPSFGY

SEQ ID NO: 86471 - protein, 9 aa, Homo sapiens
  misc_feature: Table A; Target 86471; HLA-A*23:01; TDRD12; ENSG00000173809; TAA
QALPSFGYI

SEQ ID NO: 86472 - protein, 9 aa, Homo sapiens
  misc_feature: Table A; Target 86472; HLA-A*24:02; TDRD12; ENSG00000173809; TAA
QALPSFGYI

SEQ ID NO: 86473 - protein, 9 aa, Homo sapiens
  misc_feature: Table A; Target 86473; HLA-B*51:01; TDRD12; ENSG00000173809; TAA
QALPSFGYI

SEQ ID NO: 86474 - protein, 9 aa, Homo sapiens
  misc_feature: Table A; Target 86474; HLA-A*33:01; TDRD12; ENSG00000173809; TAA
QAVEFIVCR

SEQ ID NO: 86475 - protein, 9 aa, Homo sapiens
  misc_feature: Table A; Target 86475; HLA-A*33:03; TDRD12; ENSG00000173809; TAA
QAVEFIVCR

SEQ ID NO: 86476 - protein, 9 aa, Homo sapiens
  misc_feature: Table A; Target 86476; HLA-A*68:01; TDRD12; ENSG00000173809; TAA
QAVEFIVCR

SEQ ID NO: 86477 - protein, 9 aa, Homo sapiens
  misc_feature: Table A; Target 86477; HLA-B*35:01; TDRD12; ENSG00000173809; TAA
QAVEFIVCR

SEQ ID NO: 86478 - protein, 9 aa, Homo sapiens
  misc_feature: Table A; Target 86478; HLA-C*07:06; TDRD12; ENSG00000173809; TAA
QAVEFIVCR

SEQ ID NO: 86479 - protein, 8 aa, Homo sapiens
  misc_feature: Table A; Target 86479; HLA-B*37:01; TDRD12; ENSG00000173809; TAA
QDIEIKPL

SEQ ID NO: 86480 - protein, 10 aa, Homo sapiens
  misc_feature: Table A; Target 86480; HLA-A*30:01; TDRD12; ENSG00000173809; TAA
QDIEIKPLTL

SEQ ID NO: 86481 - protein, 10 aa, Homo sapiens
  misc_feature: Table A; Target 86481; HLA-B*40:01; TDRD12; ENSG00000173809; TAA
QDIEIKPLTL

SEQ ID NO: 86482 - protein, 10 aa, Homo sapiens
  misc_feature: Table A; Target 86482; HLA-B*40:02; TDRD12; ENSG00000173809; TAA
QDIEIKPLTL

SEQ ID NO: 86483 - protein, 10 aa, Homo sapiens
  misc_feature: Table A; Target 86483; HLA-B*44:02; TDRD12; ENSG00000173809; TAA
QDIEIKPLTL

SEQ ID NO: 86484 - protein, 10 aa, Homo sapiens
  misc_feature: Table A; Target 86484; HLA-B*44:03; TDRD12; ENSG00000173809; TAA
QDIEIKPLTL

SEQ ID NO: 86485 - protein, 9 aa, Homo sapiens
  misc_feature: Table A; Target 86485; HLA-B*37:01; TDRD12; ENSG00000173809; TAA
QDKAVKCNM

SEQ ID NO: 86486 - protein, 10 aa, Homo sapiens
  misc_feature: Table A; Target 86486; HLA-A*29:02; TDRD12; ENSG00000173809; TAA
QFIFELLGEY

SEQ ID NO: 86487 - protein, 10 aa, Homo sapiens
  misc_feature: Table A; Target 86487; HLA-A*30:02; TDRD12; ENSG00000173809; TAA
QFIFELLGEY

SEQ ID NO: 86488 - protein, 9 aa, Homo sapiens
  misc_feature: Table A; Target 86488; HLA-A*25:01; TDRD12; ENSG00000173809; TAA
QIVAVGVHW

SEQ ID NO: 86489 - protein, 9 aa, Homo sapiens
  misc_feature: Table A; Target 86489; HLA-B*44:02; TDRD12; ENSG00000173809; TAA
QIVAVGVHW

SEQ ID NO: 86490 - protein, 9 aa, Homo sapiens
  misc_feature: Table A; Target 86490; HLA-B*44:03; TDRD12; ENSG00000173809; TAA
QIVAVGVHW

SEQ ID NO: 86491 - protein, 9 aa, Homo sapiens
  misc_feature: Table A; Target 86491; HLA-B*57:01; TDRD12; ENSG00000173809; TAA
QIVAVGVHW

SEQ ID NO: 86492 - protein, 9 aa, Homo sapiens
  misc_feature: Table A; Target 86492; HLA-B*58:01; TDRD12; ENSG00000173809; TAA
QIVAVGVHW

SEQ ID NO: 86493 - protein, 10 aa, Homo sapiens
  misc_feature: Table A; Target 86493; HLA-B*15:03; TDRD12; ENSG00000173809; TAA
QKLNSAMNDF

SEQ ID NO: 86494 - protein, 9 aa, Homo sapiens
  misc_feature: Table A; Target 86494; HLA-B*15:03; TDRD12; ENSG00000173809; TAA
QKPGGYLVF

SEQ ID NO: 86495 - protein, 9 aa, Homo sapiens
  misc_feature: Table A; Target 86495; HLA-A*02:07; TDRD12; ENSG00000173809; TAA
QMFAILDNF

SEQ ID NO: 86496 - protein, 9 aa, Homo sapiens
  misc_feature: Table A; Target 86496; HLA-A*23:01; TDRD12; ENSG00000173809; TAA
QMFAILDNF

SEQ ID NO: 86497 - protein, 9 aa, Homo sapiens
  misc_feature: Table A; Target 86497; HLA-A*29:02; TDRD12; ENSG00000173809; TAA
QMFAILDNF

SEQ ID NO: 86498 - protein, 9 aa, Homo sapiens
  misc_feature: Table A; Target 86498; HLA-B*57:01; TDRD12; ENSG00000173809; TAA
QMFAILDNF

SEQ ID NO: 86499 - protein, 9 aa, Homo sapiens
  misc_feature: Table A; Target 86499; HLA-B*08:01; TDRD12; ENSG00000173809; TAA
QVEARLCAV

SEQ ID NO: 86500 - protein, 8 aa, Homo sapiens
  misc_feature: Table A; Target 86500; HLA-A*03:02; TDRD12; ENSG00000173809; TAA
QVLEVNQK

SEQ ID NO: 86501 - protein, 8 aa, Homo sapiens
  misc_feature: Table A; Target 86501; HLA-A*11:01; TDRD12; ENSG00000173809; TAA
QVLEVNQK

SEQ ID NO: 86502 - protein, 9 aa, Homo sapiens
  misc_feature: Table A; Target 86502; HLA-B*54:01; TDRD12; ENSG00000173809; TAA
QYFQNLLKA

SEQ ID NO: 86503 - protein, 10 aa, Homo sapiens
  misc_feature: Table A; Target 86503; HLA-C*05:01; TDRD12; ENSG00000173809; TAA
RADAKVPAEL

SEQ ID NO: 86504 - protein, 11 aa, Homo sapiens
  misc_feature: Table A; Target 86504; HLA-A*01:01; TDRD12; ENSG00000173809; TAA
RADAKVPAELY

SEQ ID NO: 86505 - protein, 8 aa, Homo sapiens
  misc_feature: Table A; Target 86505; HLA-C*05:01; TDRD12; ENSG00000173809; TAA
RADGISDL

SEQ ID NO: 86506 - protein, 11 aa, Homo sapiens
  misc_feature: Table A; Target 86506; HLA-B*38:01; TDRD12; ENSG00000173809; TAA
RADGISDLQQL

SEQ ID NO: 86507 - protein, 11 aa, Homo sapiens
  misc_feature: Table A; Target 86507; HLA-C*05:01; TDRD12; ENSG00000173809; TAA
RADGISDLQQL

SEQ ID NO: 86508 - protein, 10 aa, Homo sapiens
  misc_feature: Table A; Target 86508; HLA-A*03:02; TDRD12; ENSG00000173809; TAA
RDSTDIVPAK

SEQ ID NO: 86509 - protein, 8 aa, Homo sapiens
  misc_feature: Table A; Target 86509; HLA-B*37:01; TDRD12; ENSG00000173809; TAA
RESAPHQI

SEQ ID NO: 86510 - protein, 9 aa, Homo sapiens
  misc_feature: Table A; Target 86510; HLA-B*37:01; TDRD12; ENSG00000173809; TAA
RESAPHQIV

SEQ ID NO: 86511 - protein, 9 aa, Homo sapiens
  misc_feature: Table A; Target 86511; HLA-B*40:01; TDRD12; ENSG00000173809; TAA
RESAPHQIV

SEQ ID NO: 86512 - protein, 9 aa, Homo sapiens
  misc_feature: Table A; Target 86512; HLA-B*44:02; TDRD12; ENSG00000173809; TAA
RESAPHQIV

SEQ ID NO: 86513 - protein, 9 aa, Homo sapiens
  misc_feature: Table A; Target 86513; HLA-B*49:01; TDRD12; ENSG00000173809; TAA
RESAPHQIV

SEQ ID NO: 86514 - protein, 10 aa, Homo sapiens
  misc_feature: Table A; Target 86514; HLA-A*30:01; TDRD12; ENSG00000173809; TAA
RESAPHQIVA

SEQ ID NO: 86515 - protein, 10 aa, Homo sapiens
  misc_feature: Table A; Target 86515; HLA-B*40:01; TDRD12; ENSG00000173809; TAA
RESAPHQIVA

SEQ ID NO: 86516 - protein, 10 aa, Homo sapiens
  misc_feature: Table A; Target 86516; HLA-B*49:01; TDRD12; ENSG00000173809; TAA
RESAPHQIVA

SEQ ID NO: 86517 - protein, 11 aa, Homo sapiens
  misc_feature: Table A; Target 86517; HLA-A*30:01; TDRD12; ENSG00000173809; TAA
RESAPHQIVAV

SEQ ID NO: 86518 - protein, 11 aa, Homo sapiens
  misc_feature: Table A; Target 86518; HLA-B*40:01; TDRD12; ENSG00000173809; TAA
RESAPHQIVAV

SEQ ID NO: 86519 - protein, 11 aa, Homo sapiens
  misc_feature: Table A; Target 86519; HLA-A*30:02; TDRD12; ENSG00000173809; TAA
RGCDVIVTTPY

SEQ ID NO: 86520 - protein, 10 aa, Homo sapiens
  misc_feature: Table A; Target 86520; HLA-A*31:01; TDRD12; ENSG00000173809; TAA
RINPETDLPR

SEQ ID NO: 86521 - protein, 10 aa, Homo sapiens
  misc_feature: Table A; Target 86521; HLA-C*07:06; TDRD12; ENSG00000173809; TAA
RINPETDLPR

SEQ ID NO: 86522 - protein, 11 aa, Homo sapiens
  misc_feature: Table A; Target 86522; HLA-A*03:01; TDRD12; ENSG00000173809; TAA
RINPETDLPRK

SEQ ID NO: 86523 - protein, 11 aa, Homo sapiens
  misc_feature: Table A; Target 86523; HLA-A*03:02; TDRD12; ENSG00000173809; TAA
RINPETDLPRK

SEQ ID NO: 86524 - protein, 11 aa, Homo sapiens
  misc_feature: Table A; Target 86524; HLA-A*11:01; TDRD12; ENSG00000173809; TAA
RINPETDLPRK

SEQ ID NO: 86525 - protein, 10 aa, Homo sapiens
  misc_feature: Table A; Target 86525; HLA-A*29:02; TDRD12; ENSG00000173809; TAA
RIVDKHMDLY

SEQ ID NO: 86526 - protein, 10 aa, Homo sapiens
  misc_feature: Table A; Target 86526; HLA-B*51:01; TDRD12; ENSG00000173809; TAA
RPLHPVLLTI

SEQ ID NO: 86527 - protein, 10 aa, Homo sapiens
  misc_feature: Table A; Target 86527; HLA-B*54:01; TDRD12; ENSG00000173809; TAA
RPLHPVLLTI

SEQ ID NO: 86528 - protein, 10 aa, Homo sapiens
  misc_feature: Table A; Target 86528; HLA-B*55:01; TDRD12; ENSG00000173809; TAA
RPTATAQDKA

SEQ ID NO: 86529 - protein, 10 aa, Homo sapiens
  misc_feature: Table A; Target 86529; HLA-B*56:01; TDRD12; ENSG00000173809; TAA
RPTATAQDKA

SEQ ID NO: 86530 - protein, 11 aa, Homo sapiens
  misc_feature: Table A; Target 86530; HLA-B*56:01; TDRD12; ENSG00000173809; TAA
RPTATAQDKAV

SEQ ID NO: 86531 - protein, 9 aa, Homo sapiens
  misc_feature: Table A; Target 86531; HLA-A*32:01; TDRD12; ENSG00000173809; TAA
RVKPADNEI

SEQ ID NO: 86532 - protein, 9 aa, Homo sapiens
  misc_feature: Table A; Target 86532; HLA-B*58:01; TDRD12; ENSG00000173809; TAA
RVKPADNEI

SEQ ID NO: 86533 - protein, 11 aa, Homo sapiens
  misc_feature: Table A; Target 86533; HLA-A*25:01; TDRD12; ENSG00000173809; TAA
RVKPADNEIEW

SEQ ID NO: 86534 - protein, 11 aa, Homo sapiens
  misc_feature: Table A; Target 86534; HLA-A*31:01; TDRD12; ENSG00000173809; TAA
RVKPADNEIEW

SEQ ID NO: 86535 - protein, 11 aa, Homo sapiens
  misc_feature: Table A; Target 86535; HLA-B*57:01; TDRD12; ENSG00000173809; TAA
RVKPADNEIEW

SEQ ID NO: 86536 - protein, 11 aa, Homo sapiens
  misc_feature: Table A; Target 86536; HLA-B*58:01; TDRD12; ENSG00000173809; TAA
RVKPADNEIEW

SEQ ID NO: 86537 - protein, 10 aa, Homo sapiens
  misc_feature: Table A; Target 86537; HLA-A*03:01; TDRD12; ENSG00000173809; TAA
RVQVLEVNQK

SEQ ID NO: 86538 - protein, 10 aa, Homo sapiens
  misc_feature: Table A; Target 86538; HLA-A*03:02; TDRD12; ENSG00000173809; TAA
RVQVLEVNQK

SEQ ID NO: 86539 - protein, 10 aa, Homo sapiens
  misc_feature: Table A; Target 86539; HLA-A*11:01; TDRD12; ENSG00000173809; TAA
RVQVLEVNQK

SEQ ID NO: 86540 - protein, 10 aa, Homo sapiens
  misc_feature: Table A; Target 86540; HLA-B*27:02; TDRD12; ENSG00000173809; TAA
RVQVLEVNQK

SEQ ID NO: 86541 - protein, 8 aa, Homo sapiens
  misc_feature: Table A; Target 86541; HLA-B*07:02; TDRD12; ENSG00000173809; TAA
SADLKKAL

SEQ ID NO: 86542 - protein, 8 aa, Homo sapiens
  misc_feature: Table A; Target 86542; HLA-B*08:01; TDRD12; ENSG00000173809; TAA
SADLKKAL

SEQ ID NO: 86543 - protein, 8 aa, Homo sapiens
  misc_feature: Table A; Target 86543; HLA-C*03:04; TDRD12; ENSG00000173809; TAA
SADLKKAL

SEQ ID NO: 86544 - protein, 8 aa, Homo sapiens
  misc_feature: Table A; Target 86544; HLA-C*07:02; TDRD12; ENSG00000173809; TAA
SADLKKAL

SEQ ID NO: 86545 - protein, 8 aa, Homo sapiens
  misc_feature: Table A; Target 86545; HLA-C*16:01; TDRD12; ENSG00000173809; TAA
SADLKKAL

SEQ ID NO: 86546 - protein, 9 aa, Homo sapiens
  misc_feature: Table A; Target 86546; HLA-C*05:01; TDRD12; ENSG00000173809; TAA
SADQYLAEC

SEQ ID NO: 86547 - protein, 10 aa, Homo sapiens
  misc_feature: Table A; Target 86547; HLA-C*05:01; TDRD12; ENSG00000173809; TAA
SADQYLAECF

SEQ ID NO: 86548 - protein, 10 aa, Homo sapiens
  misc_feature: Table A; Target 86548; HLA-B*56:01; TDRD12; ENSG00000173809; TAA
SAMNDFYNST

SEQ ID NO: 86549 - protein, 9 aa, Homo sapiens
  misc_feature: Table A; Target 86549; HLA-A*02:03; TDRD12; ENSG00000173809; TAA
SAPHQIVAV

SEQ ID NO: 86550 - protein, 9 aa, Homo sapiens
  misc_feature: Table A; Target 86550; HLA-A*02:07; TDRD12; ENSG00000173809; TAA
SAPHQIVAV

SEQ ID NO: 86551 - protein, 9 aa, Homo sapiens
  misc_feature: Table A; Target 86551; HLA-A*68:02; TDRD12; ENSG00000173809; TAA
SAPHQIVAV

SEQ ID NO: 86552 - protein, 9 aa, Homo sapiens
  misc_feature: Table A; Target 86552; HLA-B*46:01; TDRD12; ENSG00000173809; TAA
SAPHQIVAV

SEQ ID NO: 86553 - protein, 9 aa, Homo sapiens
  misc_feature: Table A; Target 86553; HLA-B*51:01; TDRD12; ENSG00000173809; TAA
SAPHQIVAV

SEQ ID NO: 86554 - protein, 9 aa, Homo sapiens
  misc_feature: Table A; Target 86554; HLA-B*54:01; TDRD12; ENSG00000173809; TAA
SAPHQIVAV

SEQ ID NO: 86555 - protein, 9 aa, Homo sapiens
  misc_feature: Table A; Target 86555; HLA-C*01:02; TDRD12; ENSG00000173809; TAA
SAPHQIVAV

SEQ ID NO: 86556 - protein, 9 aa, Homo sapiens
  misc_feature: Table A; Target 86556; HLA-C*02:02; TDRD12; ENSG00000173809; TAA
SAPHQIVAV

SEQ ID NO: 86557 - protein, 9 aa, Homo sapiens
  misc_feature: Table A; Target 86557; HLA-C*12:03; TDRD12; ENSG00000173809; TAA
SAPHQIVAV

SEQ ID NO: 86558 - protein, 9 aa, Homo sapiens
  misc_feature: Table A; Target 86558; HLA-C*16:02; TDRD12; ENSG00000173809; TAA
SAPHQIVAV

SEQ ID NO: 86559 - protein, 8 aa, Homo sapiens
  misc_feature: Table A; Target 86559; HLA-B*08:01; TDRD12; ENSG00000173809; TAA
SAPSFNKL

SEQ ID NO: 86560 - protein, 8 aa, Homo sapiens
  misc_feature: Table A; Target 86560; HLA-B*51:01; TDRD12; ENSG00000173809; TAA
SAPSFNKL

SEQ ID NO: 86561 - protein, 8 aa, Homo sapiens
  misc_feature: Table A; Target 86561; HLA-C*01:02; TDRD12; ENSG00000173809; TAA
SAPSFNKL

SEQ ID NO: 86562 - protein, 8 aa, Homo sapiens
  misc_feature: Table A; Target 86562; HLA-C*05:01; TDRD12; ENSG00000173809; TAA
SAPSFNKL

SEQ ID NO: 86563 - protein, 9 aa, Homo sapiens
  misc_feature: Table A; Target 86563; HLA-A*30:01; TDRD12; ENSG00000173809; TAA
SDLQQLQKL

SEQ ID NO: 86564 - protein, 9 aa, Homo sapiens
  misc_feature: Table A; Target 86564; HLA-B*37:01; TDRD12; ENSG00000173809; TAA
SDLQQLQKL

SEQ ID NO: 86565 - protein, 9 aa, Homo sapiens
  misc_feature: Table A; Target 86565; HLA-B*40:02; TDRD12; ENSG00000173809; TAA
SDLQQLQKL

SEQ ID NO: 86566 - protein, 9 aa, Homo sapiens
  misc_feature: Table A; Target 86566; HLA-B*44:02; TDRD12; ENSG00000173809; TAA
SDLQQLQKL

SEQ ID NO: 86567 - protein, 9 aa, Homo sapiens
  misc_feature: Table A; Target 86567; HLA-B*44:03; TDRD12; ENSG00000173809; TAA
SDLQQLQKL

SEQ ID NO: 86568 - protein, 9 aa, Homo sapiens
  misc_feature: Table A; Target 86568; HLA-A*30:02; TDRD12; ENSG00000173809; TAA
SENQKPGGY

SEQ ID NO: 86569 - protein, 9 aa, Homo sapiens
  misc_feature: Table A; Target 86569; HLA-B*18:01; TDRD12; ENSG00000173809; TAA
SENQKPGGY

SEQ ID NO: 86570 - protein, 9 aa, Homo sapiens
  misc_feature: Table A; Target 86570; HLA-B*27:02; TDRD12; ENSG00000173809; TAA
SENQKPGGY

SEQ ID NO: 86571 - protein, 9 aa, Homo sapiens
  misc_feature: Table A; Target 86571; HLA-B*37:01; TDRD12; ENSG00000173809; TAA
SENQKPGGY

SEQ ID NO: 86572 - protein, 9 aa, Homo sapiens
  misc_feature: Table A; Target 86572; HLA-B*44:02; TDRD12; ENSG00000173809; TAA
SENQKPGGY

SEQ ID NO: 86573 - protein, 9 aa, Homo sapiens
  misc_feature: Table A; Target 86573; HLA-B*44:03; TDRD12; ENSG00000173809; TAA
SENQKPGGY

SEQ ID NO: 86574 - protein, 9 aa, Homo sapiens
  misc_feature: Table A; Target 86574; HLA-C*02:02; TDRD12; ENSG00000173809; TAA
SENQKPGGY

SEQ ID NO: 86575 - protein, 9 aa, Homo sapiens
  misc_feature: Table A; Target 86575; HLA-C*16:04; TDRD12; ENSG00000173809; TAA
SENQKPGGY

SEQ ID NO: 86576 - protein, 10 aa, Homo sapiens
  misc_feature: Table A; Target 86576; HLA-B*40:01; TDRD12; ENSG00000173809; TAA
SENQKPGGYL

SEQ ID NO: 86577 - protein, 10 aa, Homo sapiens
  misc_feature: Table A; Target 86577; HLA-B*40:02; TDRD12; ENSG00000173809; TAA
SENQKPGGYL

SEQ ID NO: 86578 - protein, 10 aa, Homo sapiens
  misc_feature: Table A; Target 86578; HLA-B*44:02; TDRD12; ENSG00000173809; TAA
SENQKPGGYL

SEQ ID NO: 86579 - protein, 10 aa, Homo sapiens
  misc_feature: Table A; Target 86579; HLA-B*44:03; TDRD12; ENSG00000173809; TAA
SENQKPGGYL

SEQ ID NO: 86580 - protein, 11 aa, Homo sapiens
  misc_feature: Table A; Target 86580; HLA-B*49:01; TDRD12; ENSG00000173809; TAA
SENQKPGGYLV

SEQ ID NO: 86581 - protein, 9 aa, Homo sapiens
  misc_feature: Table A; Target 86581; HLA-A*23:01; TDRD12; ENSG00000173809; TAA
SFNKLNPAL

SEQ ID NO: 86582 - protein, 9 aa, Homo sapiens
  misc_feature: Table A; Target 86582; HLA-C*14:02; TDRD12; ENSG00000173809; TAA
SFNKLNPAL

SEQ ID NO: 86583 - protein, 9 aa, Homo sapiens
  misc_feature: Table A; Target 86583; HLA-A*23:01; TDRD12; ENSG00000173809; TAA
SFPASPKVF

SEQ ID NO: 86584 - protein, 9 aa, Homo sapiens
  misc_feature: Table A; Target 86584; HLA-A*24:02; TDRD12; ENSG00000173809; TAA
SFPASPKVF

SEQ ID NO: 86585 - protein, 9 aa, Homo sapiens
  misc_feature: Table A; Target 86585; HLA-C*14:02; TDRD12; ENSG00000173809; TAA
SFPASPKVF

SEQ ID NO: 86586 - protein, 9 aa, Homo sapiens
  misc_feature: Table A; Target 86586; HLA-A*02:04; TDRD12; ENSG00000173809; TAA
SGSQIILAL

SEQ ID NO: 86587 - protein, 9 aa, Homo sapiens
  misc_feature: Table A; Target 86587; HLA-A*30:01; TDRD12; ENSG00000173809; TAA
SGSQIILAL

SEQ ID NO: 86588 - protein, 9 aa, Homo sapiens
  misc_feature: Table A; Target 86588; HLA-A*68:02; TDRD12; ENSG00000173809; TAA
SGSQIILAL

SEQ ID NO: 86589 - protein, 9 aa, Homo sapiens
  misc_feature: Table A; Target 86589; HLA-B*13:02; TDRD12; ENSG00000173809; TAA
SGSQIILAL

SEQ ID NO: 86590 - protein, 9 aa, Homo sapiens
  misc_feature: Table A; Target 86590; HLA-B*27:05; TDRD12; ENSG00000173809; TAA
SGSQIILAL

SEQ ID NO: 86591 - protein, 9 aa, Homo sapiens
  misc_feature: Table A; Target 86591; HLA-B*35:03; TDRD12; ENSG00000173809; TAA
SGSQIILAL

SEQ ID NO: 86592 - protein, 9 aa, Homo sapiens
  misc_feature: Table A; Target 86592; HLA-C*02:02; TDRD12; ENSG00000173809; TAA
SGSQIILAL

SEQ ID NO: 86593 - protein, 9 aa, Homo sapiens
  misc_feature: Table A; Target 86593; HLA-A*01:01; TDRD12; ENSG00000173809; TAA
SHAVGVLRY

SEQ ID NO: 86594 - protein, 9 aa, Homo sapiens
  misc_feature: Table A; Target 86594; HLA-A*29:02; TDRD12; ENSG00000173809; TAA
SHAVGVLRY

SEQ ID NO: 86595 - protein, 9 aa, Homo sapiens
  misc_feature: Table A; Target 86595; HLA-B*15:03; TDRD12; ENSG00000173809; TAA
SHAVGVLRY

SEQ ID NO: 86596 - protein, 9 aa, Homo sapiens
  misc_feature: Table A; Target 86596; HLA-B*38:01; TDRD12; ENSG00000173809; TAA
SHAVGVLRY

SEQ ID NO: 86597 - protein, 9 aa, Homo sapiens
  misc_feature: Table A; Target 86597; HLA-B*39:01; TDRD12; ENSG00000173809; TAA
SHAVGVLRY

SEQ ID NO: 86598 - protein, 9 aa, Homo sapiens
  misc_feature: Table A; Target 86598; HLA-B*44:03; TDRD12; ENSG00000173809; TAA
SHAVGVLRY

SEQ ID NO: 86599 - protein, 9 aa, Homo sapiens
  misc_feature: Table A; Target 86599; HLA-C*16:01; TDRD12; ENSG00000173809; TAA
SHAVGVLRY

SEQ ID NO: 86600 - protein, 9 aa, Homo sapiens
  misc_feature: Table A; Target 86600; HLA-B*27:05; TDRD12; ENSG00000173809; TAA
SHCESNPLL

SEQ ID NO: 86601 - protein, 9 aa, Homo sapiens
  misc_feature: Table A; Target 86601; HLA-B*38:01; TDRD12; ENSG00000173809; TAA
SHCESNPLL

SEQ ID NO: 86602 - protein, 9 aa, Homo sapiens
  misc_feature: Table A; Target 86602; HLA-B*39:01; TDRD12; ENSG00000173809; TAA
SHCESNPLL

SEQ ID NO: 86603 - protein, 9 aa, Homo sapiens
  misc_feature: Table A; Target 86603; HLA-A*29:02; TDRD12; ENSG00000173809; TAA
SITSSADQY

SEQ ID NO: 86604 - protein, 9 aa, Homo sapiens
  misc_feature: Table A; Target 86604; HLA-A*30:02; TDRD12; ENSG00000173809; TAA
SITSSADQY

SEQ ID NO: 86605 - protein, 9 aa, Homo sapiens
  misc_feature: Table A; Target 86605; HLA-B*15:01; TDRD12; ENSG00000173809; TAA
SITSSADQY

SEQ ID NO: 86606 - protein, 9 aa, Homo sapiens
  misc_feature: Table A; Target 86606; HLA-B*39:01; TDRD12; ENSG00000173809; TAA
SITSSADQY

SEQ ID NO: 86607 - protein, 9 aa, Homo sapiens
  misc_feature: Table A; Target 86607; HLA-C*07:04; TDRD12; ENSG00000173809; TAA
SITSSADQY

SEQ ID NO: 86608 - protein, 10 aa, Homo sapiens
  misc_feature: Table A; Target 86608; HLA-B*27:05; TDRD12; ENSG00000173809; TAA
SITSSADQYL

SEQ ID NO: 86609 - protein, 9 aa, Homo sapiens
  misc_feature: Table A; Target 86609; HLA-A*03:01; TDRD12; ENSG00000173809; TAA
SLKTSVIDY

SEQ ID NO: 86610 - protein, 9 aa, Homo sapiens
  misc_feature: Table A; Target 86610; HLA-A*26:01; TDRD12; ENSG00000173809; TAA
SLKTSVIDY

SEQ ID NO: 86611 - protein, 9 aa, Homo sapiens
  misc_feature: Table A; Target 86611; HLA-A*29:02; TDRD12; ENSG00000173809; TAA
SLKTSVIDY

SEQ ID NO: 86612 - protein, 9 aa, Homo sapiens
  misc_feature: Table A; Target 86612; HLA-A*30:02; TDRD12; ENSG00000173809; TAA
SLKTSVIDY

SEQ ID NO: 86613 - protein, 9 aa, Homo sapiens
  misc_feature: Table A; Target 86613; HLA-A*32:01; TDRD12; ENSG00000173809; TAA
SLKTSVIDY

SEQ ID NO: 86614 - protein, 9 aa, Homo sapiens
  misc_feature: Table A; Target 86614; HLA-B*15:01; TDRD12; ENSG00000173809; TAA
SLKTSVIDY

SEQ ID NO: 86615 - protein, 9 aa, Homo sapiens
  misc_feature: Table A; Target 86615; HLA-B*15:03; TDRD12; ENSG00000173809; TAA
SLKTSVIDY

SEQ ID NO: 86616 - protein, 9 aa, Homo sapiens
  misc_feature: Table A; Target 86616; HLA-B*46:01; TDRD12; ENSG00000173809; TAA
SLKTSVIDY

SEQ ID NO: 86617 - protein, 9 aa, Homo sapiens
  misc_feature: Table A; Target 86617; HLA-C*01:02; TDRD12; ENSG00000173809; TAA
SLKTSVIDY

SEQ ID NO: 86618 - protein, 9 aa, Homo sapiens
  misc_feature: Table A; Target 86618; HLA-C*02:02; TDRD12; ENSG00000173809; TAA
SLKTSVIDY

SEQ ID NO: 86619 - protein, 9 aa, Homo sapiens
  misc_feature: Table A; Target 86619; HLA-C*07:04; TDRD12; ENSG00000173809; TAA
SLKTSVIDY

SEQ ID NO: 86620 - protein, 9 aa, Homo sapiens
  misc_feature: Table A; Target 86620; HLA-C*12:03; TDRD12; ENSG00000173809; TAA
SLKTSVIDY

SEQ ID NO: 86621 - protein, 9 aa, Homo sapiens
  misc_feature: Table A; Target 86621; HLA-C*14:02; TDRD12; ENSG00000173809; TAA
SLKTSVIDY

SEQ ID NO: 86622 - protein, 9 aa, Homo sapiens
  misc_feature: Table A; Target 86622; HLA-C*16:01; TDRD12; ENSG00000173809; TAA
SLKTSVIDY

SEQ ID NO: 86623 - protein, 9 aa, Homo sapiens
  misc_feature: Table A; Target 86623; HLA-A*02:01; TDRD12; ENSG00000173809; TAA
SLLQALDFI

SEQ ID NO: 86624 - protein, 9 aa, Homo sapiens
  misc_feature: Table A; Target 86624; HLA-A*02:04; TDRD12; ENSG00000173809; TAA
SLLQALDFI

SEQ ID NO: 86625 - protein, 9 aa, Homo sapiens
  misc_feature: Table A; Target 86625; HLA-C*01:02; TDRD12; ENSG00000173809; TAA
SLPSRNGPL

SEQ ID NO: 86626 - protein, 9 aa, Homo sapiens
  misc_feature: Table A; Target 86626; HLA-C*07:02; TDRD12; ENSG00000173809; TAA
SLPSRNGPL

SEQ ID NO: 86627 - protein, 11 aa, Homo sapiens
  misc_feature: Table A; Target 86627; HLA-A*02:03; TDRD12; ENSG00000173809; TAA
SLPSRNGPLAV

SEQ ID NO: 86628 - protein, 11 aa, Homo sapiens
  misc_feature: Table A; Target 86628; HLA-A*02:07; TDRD12; ENSG00000173809; TAA
SLPSRNGPLAV

SEQ ID NO: 86629 - protein, 9 aa, Homo sapiens
  misc_feature: Table A; Target 86629; HLA-A*02:01; TDRD12; ENSG00000173809; TAA
SLSQTPPRV

SEQ ID NO: 86630 - protein, 9 aa, Homo sapiens
  misc_feature: Table A; Target 86630; HLA-A*02:03; TDRD12; ENSG00000173809; TAA
SLSQTPPRV

SEQ ID NO: 86631 - protein, 9 aa, Homo sapiens
  misc_feature: Table A; Target 86631; HLA-A*02:04; TDRD12; ENSG00000173809; TAA
SLSQTPPRV

SEQ ID NO: 86632 - protein, 9 aa, Homo sapiens
  misc_feature: Table A; Target 86632; HLA-A*02:07; TDRD12; ENSG00000173809; TAA
SLSQTPPRV

SEQ ID NO: 86633 - protein, 9 aa, Homo sapiens
  misc_feature: Table A; Target 86633; HLA-B*13:02; TDRD12; ENSG00000173809; TAA
SLSQTPPRV

SEQ ID NO: 86634 - protein, 9 aa, Homo sapiens
  misc_feature: Table A; Target 86634; HLA-B*55:01; TDRD12; ENSG00000173809; TAA
SLSQTPPRV

SEQ ID NO: 86635 - protein, 10 aa, Homo sapiens
  misc_feature: Table A; Target 86635; HLA-A*02:01; TDRD12; ENSG00000173809; TAA
SLYCTKPVTL

SEQ ID NO: 86636 - protein, 10 aa, Homo sapiens
  misc_feature: Table A; Target 86636; HLA-A*02:03; TDRD12; ENSG00000173809; TAA
SLYCTKPVTL

SEQ ID NO: 86637 - protein, 10 aa, Homo sapiens
  misc_feature: Table A; Target 86637; HLA-A*02:04; TDRD12; ENSG00000173809; TAA
SLYCTKPVTL

SEQ ID NO: 86638 - protein, 10 aa, Homo sapiens
  misc_feature: Table A; Target 86638; HLA-A*03:01; TDRD12; ENSG00000173809; TAA
SLYCTKPVTL

SEQ ID NO: 86639 - protein, 8 aa, Homo sapiens
  misc_feature: Table A; Target 86639; HLA-B*56:01; TDRD12; ENSG00000173809; TAA
SPFLDHDV

SEQ ID NO: 86640 - protein, 10 aa, Homo sapiens
  misc_feature: Table A; Target 86640; HLA-B*35:01; TDRD12; ENSG00000173809; TAA
SPFLDHDVDY

SEQ ID NO: 86641 - protein, 10 aa, Homo sapiens
  misc_feature: Table A; Target 86641; HLA-B*35:03; TDRD12; ENSG00000173809; TAA
SPFLDHDVDY

SEQ ID NO: 86642 - protein, 10 aa, Homo sapiens
  misc_feature: Table A; Target 86642; HLA-B*55:01; TDRD12; ENSG00000173809; TAA
SPFLDHDVDY

SEQ ID NO: 86643 - protein, 10 aa, Homo sapiens
  misc_feature: Table A; Target 86643; HLA-C*03:03; TDRD12; ENSG00000173809; TAA
SPFLDHDVDY

SEQ ID NO: 86644 - protein, 9 aa, Homo sapiens
  misc_feature: Table A; Target 86644; HLA-B*07:02; TDRD12; ENSG00000173809; TAA
SPKVFGGRL

SEQ ID NO: 86645 - protein, 9 aa, Homo sapiens
  misc_feature: Table A; Target 86645; HLA-C*07:02; TDRD12; ENSG00000173809; TAA
SPKVFGGRL

SEQ ID NO: 86646 - protein, 10 aa, Homo sapiens
  misc_feature: Table A; Target 86646; HLA-B*56:01; TDRD12; ENSG00000173809; TAA
SPLSADLKKA

SEQ ID NO: 86647 - protein, 11 aa, Homo sapiens
  misc_feature: Table A; Target 86647; HLA-B*07:02; TDRD12; ENSG00000173809; TAA
SPLSADLKKAL

SEQ ID NO: 86648 - protein, 11 aa, Homo sapiens
  misc_feature: Table A; Target 86648; HLA-C*07:02; TDRD12; ENSG00000173809; TAA
SPLSADLKKAL

SEQ ID NO: 86649 - protein, 8 aa, Homo sapiens
  misc_feature: Table A; Target 86649; HLA-B*07:02; TDRD12; ENSG00000173809; TAA
SPTKNKNL

SEQ ID NO: 86650 - protein, 8 aa, Homo sapiens
  misc_feature: Table A; Target 86650; HLA-C*07:02; TDRD12; ENSG00000173809; TAA
SPTKNKNL

SEQ ID NO: 86651 - protein, 9 aa, Homo sapiens
  misc_feature: Table A; Target 86651; HLA-A*26:01; TDRD12; ENSG00000173809; TAA
SQALPSFGY

SEQ ID NO: 86652 - protein, 9 aa, Homo sapiens
  misc_feature: Table A; Target 86652; HLA-A*29:02; TDRD12; ENSG00000173809; TAA
SQALPSFGY

SEQ ID NO: 86653 - protein, 9 aa, Homo sapiens
  misc_feature: Table A; Target 86653; HLA-A*30:02; TDRD12; ENSG00000173809; TAA
SQALPSFGY

SEQ ID NO: 86654 - protein, 9 aa, Homo sapiens
  misc_feature: Table A; Target 86654; HLA-A*32:01; TDRD12; ENSG00000173809; TAA
SQALPSFGY

SEQ ID NO: 86655 - protein, 9 aa, Homo sapiens
  misc_feature: Table A; Target 86655; HLA-B*13:02; TDRD12; ENSG00000173809; TAA
SQALPSFGY

SEQ ID NO: 86656 - protein, 9 aa, Homo sapiens
  misc_feature: Table A; Target 86656; HLA-B*15:01; TDRD12; ENSG00000173809; TAA
SQALPSFGY

SEQ ID NO: 86657 - protein, 9 aa, Homo sapiens
  misc_feature: Table A; Target 86657; HLA-B*15:03; TDRD12; ENSG00000173809; TAA
SQALPSFGY

SEQ ID NO: 86658 - protein, 9 aa, Homo sapiens
  misc_feature: Table A; Target 86658; HLA-B*27:05; TDRD12; ENSG00000173809; TAA
SQALPSFGY

SEQ ID NO: 86659 - protein, 9 aa, Homo sapiens
  misc_feature: Table A; Target 86659; HLA-B*37:01; TDRD12; ENSG00000173809; TAA
SQALPSFGY

SEQ ID NO: 86660 - protein, 9 aa, Homo sapiens
  misc_feature: Table A; Target 86660; HLA-B*39:01; TDRD12; ENSG00000173809; TAA
SQALPSFGY

SEQ ID NO: 86661 - protein, 9 aa, Homo sapiens
  misc_feature: Table A; Target 86661; HLA-B*44:02; TDRD12; ENSG00000173809; TAA
SQALPSFGY

SEQ ID NO: 86662 - protein, 9 aa, Homo sapiens
  misc_feature: Table A; Target 86662; HLA-B*44:03; TDRD12; ENSG00000173809; TAA
SQALPSFGY

SEQ ID NO: 86663 - protein, 9 aa, Homo sapiens
  misc_feature: Table A; Target 86663; HLA-B*46:01; TDRD12; ENSG00000173809; TAA
SQALPSFGY

SEQ ID NO: 86664 - protein, 9 aa, Homo sapiens
  misc_feature: Table A; Target 86664; HLA-C*02:02; TDRD12; ENSG00000173809; TAA
SQALPSFGY

SEQ ID NO: 86665 - protein, 9 aa, Homo sapiens
  misc_feature: Table A; Target 86665; HLA-C*07:04; TDRD12; ENSG00000173809; TAA
SQALPSFGY

SEQ ID NO: 86666 - protein, 9 aa, Homo sapiens
  misc_feature: Table A; Target 86666; HLA-C*14:02; TDRD12; ENSG00000173809; TAA
SQALPSFGY

SEQ ID NO: 86667 - protein, 9 aa, Homo sapiens
  misc_feature: Table A; Target 86667; HLA-C*16:01; TDRD12; ENSG00000173809; TAA
SQALPSFGY

SEQ ID NO: 86668 - protein, 9 aa, Homo sapiens
  misc_feature: Table A; Target 86668; HLA-C*16:04; TDRD12; ENSG00000173809; TAA
SQALPSFGY

SEQ ID NO: 86669 - protein, 11 aa, Homo sapiens
  misc_feature: Table A; Target 86669; HLA-A*11:01; TDRD12; ENSG00000173809; TAA
SQALPSFGYIK

SEQ ID NO: 86670 - protein, 8 aa, Homo sapiens
  misc_feature: Table A; Target 86670; HLA-B*13:02; TDRD12; ENSG00000173809; TAA
SQAQKTLI

SEQ ID NO: 86671 - protein, 9 aa, Homo sapiens
  misc_feature: Table A; Target 86671; HLA-A*32:01; TDRD12; ENSG00000173809; TAA
SQAQKTLIF

SEQ ID NO: 86672 - protein, 9 aa, Homo sapiens
  misc_feature: Table A; Target 86672; HLA-B*15:01; TDRD12; ENSG00000173809; TAA
SQAQKTLIF

SEQ ID NO: 86673 - protein, 9 aa, Homo sapiens
  misc_feature: Table A; Target 86673; HLA-B*15:03; TDRD12; ENSG00000173809; TAA
SQAQKTLIF

SEQ ID NO: 86674 - protein, 9 aa, Homo sapiens
  misc_feature: Table A; Target 86674; HLA-B*27:05; TDRD12; ENSG00000173809; TAA
SRNGPLAVI

SEQ ID NO: 86675 - protein, 10 aa, Homo sapiens
  misc_feature: Table A; Target 86675; HLA-A*01:01; TDRD12; ENSG00000173809; TAA
SSENQKPGGY

SEQ ID NO: 86676 - protein, 10 aa, Homo sapiens
  misc_feature: Table A; Target 86676; HLA-A*30:02; TDRD12; ENSG00000173809; TAA
SSENQKPGGY

SEQ ID NO: 86677 - protein, 10 aa, Homo sapiens
  misc_feature: Table A; Target 86677; HLA-A*30:02; TDRD12; ENSG00000173809; TAA
SSLKTSVIDY

SEQ ID NO: 86678 - protein, 8 aa, Homo sapiens
  misc_feature: Table A; Target 86678; HLA-C*01:02; TDRD12; ENSG00000173809; TAA
SSPLSADL

SEQ ID NO: 86679 - protein, 9 aa, Homo sapiens
  misc_feature: Table A; Target 86679; HLA-A*11:01; TDRD12; ENSG00000173809; TAA
SSPLSADLK

SEQ ID NO: 86680 - protein, 10 aa, Homo sapiens
  misc_feature: Table A; Target 86680; HLA-A*01:01; TDRD12; ENSG00000173809; TAA
SSQALPSFGY

SEQ ID NO: 86681 - protein, 10 aa, Homo sapiens
  misc_feature: Table A; Target 86681; HLA-A*29:02; TDRD12; ENSG00000173809; TAA
SSQALPSFGY

SEQ ID NO: 86682 - protein, 10 aa, Homo sapiens
  misc_feature: Table A; Target 86682; HLA-A*30:02; TDRD12; ENSG00000173809; TAA
SSQALPSFGY

SEQ ID NO: 86683 - protein, 9 aa, Homo sapiens
  misc_feature: Table A; Target 86683; HLA-B*57:01; TDRD12; ENSG00000173809; TAA
SSRPLHPVL

SEQ ID NO: 86684 - protein, 9 aa, Homo sapiens
  misc_feature: Table A; Target 86684; HLA-C*16:01; TDRD12; ENSG00000173809; TAA
SSRPLHPVL

SEQ ID NO: 86685 - protein, 9 aa, Homo sapiens
  misc_feature: Table A; Target 86685; HLA-A*31:01; TDRD12; ENSG00000173809; TAA
SSVYWPAKR

SEQ ID NO: 86686 - protein, 8 aa, Homo sapiens
  misc_feature: Table A; Target 86686; HLA-A*01:01; TDRD12; ENSG00000173809; TAA
STDIVPAK

SEQ ID NO: 86687 - protein, 8 aa, Homo sapiens
  misc_feature: Table A; Target 86687; HLA-A*03:01; TDRD12; ENSG00000173809; TAA
STDIVPAK

SEQ ID NO: 86688 - protein, 8 aa, Homo sapiens
  misc_feature: Table A; Target 86688; HLA-A*03:02; TDRD12; ENSG00000173809; TAA
STDIVPAK

SEQ ID NO: 86689 - protein, 8 aa, Homo sapiens
  misc_feature: Table A; Target 86689; HLA-A*11:01; TDRD12; ENSG00000173809; TAA
STDIVPAK

SEQ ID NO: 86690 - protein, 9 aa, Homo sapiens
  misc_feature: Table A; Target 86690; HLA-A*01:01; TDRD12; ENSG00000173809; TAA
STDIVPAKK

SEQ ID NO: 86691 - protein, 9 aa, Homo sapiens
  misc_feature: Table A; Target 86691; HLA-A*03:01; TDRD12; ENSG00000173809; TAA
STDIVPAKK

SEQ ID NO: 86692 - protein, 9 aa, Homo sapiens
  misc_feature: Table A; Target 86692; HLA-A*03:02; TDRD12; ENSG00000173809; TAA
STDIVPAKK

SEQ ID NO: 86693 - protein, 9 aa, Homo sapiens
  misc_feature: Table A; Target 86693; HLA-A*11:01; TDRD12; ENSG00000173809; TAA
STDIVPAKK

SEQ ID NO: 86694 - protein, 10 aa, Homo sapiens
  misc_feature: Table A; Target 86694; HLA-A*25:01; TDRD12; ENSG00000173809; TAA
STDIVPAKKW

SEQ ID NO: 86695 - protein, 10 aa, Homo sapiens
  misc_feature: Table A; Target 86695; HLA-B*44:02; TDRD12; ENSG00000173809; TAA
STDIVPAKKW

SEQ ID NO: 86696 - protein, 10 aa, Homo sapiens
  misc_feature: Table A; Target 86696; HLA-B*44:03; TDRD12; ENSG00000173809; TAA
STDIVPAKKW

SEQ ID NO: 86697 - protein, 10 aa, Homo sapiens
  misc_feature: Table A; Target 86697; HLA-B*57:01; TDRD12; ENSG00000173809; TAA
STDIVPAKKW

SEQ ID NO: 86698 - protein, 10 aa, Homo sapiens
  misc_feature: Table A; Target 86698; HLA-B*58:01; TDRD12; ENSG00000173809; TAA
STDIVPAKKW

SEQ ID NO: 86699 - protein, 10 aa, Homo sapiens
  misc_feature: Table A; Target 86699; HLA-A*03:01; TDRD12; ENSG00000173809; TAA
SVAETEIVCK

SEQ ID NO: 86700 - protein, 10 aa, Homo sapiens
  misc_feature: Table A; Target 86700; HLA-A*03:02; TDRD12; ENSG00000173809; TAA
SVAETEIVCK

SEQ ID NO: 86701 - protein, 10 aa, Homo sapiens
  misc_feature: Table A; Target 86701; HLA-A*11:01; TDRD12; ENSG00000173809; TAA
SVAETEIVCK

SEQ ID NO: 86702 - protein, 10 aa, Homo sapiens
  misc_feature: Table A; Target 86702; HLA-A*68:01; TDRD12; ENSG00000173809; TAA
SVAETEIVCK

SEQ ID NO: 86703 - protein, 10 aa, Homo sapiens
  misc_feature: Table A; Target 86703; HLA-B*27:02; TDRD12; ENSG00000173809; TAA
SVAETEIVCK

SEQ ID NO: 86704 - protein, 10 aa, Homo sapiens
  misc_feature: Table A; Target 86704; HLA-B*27:05; TDRD12; ENSG00000173809; TAA
SVAETEIVCK

SEQ ID NO: 86705 - protein, 10 aa, Homo sapiens
  misc_feature: Table A; Target 86705; HLA-C*07:06; TDRD12; ENSG00000173809; TAA
SVAETEIVCK

SEQ ID NO: 86706 - protein, 11 aa, Homo sapiens
  misc_feature: Table A; Target 86706; HLA-A*26:01; TDRD12; ENSG00000173809; TAA
SVAETEIVCKV

SEQ ID NO: 86707 - protein, 11 aa, Homo sapiens
  misc_feature: Table A; Target 86707; HLA-A*68:02; TDRD12; ENSG00000173809; TAA
SVAETEIVCKV

SEQ ID NO: 86708 - protein, 9 aa, Homo sapiens
  misc_feature: Table A; Target 86708; HLA-A*02:01; TDRD12; ENSG00000173809; TAA
SVIDYNVRA

SEQ ID NO: 86709 - protein, 11 aa, Homo sapiens
  misc_feature: Table A; Target 86709; HLA-A*68:02; TDRD12; ENSG00000173809; TAA
SVIDYNVRAEI

SEQ ID NO: 86710 - protein, 8 aa, Homo sapiens
  misc_feature: Table A; Target 86710; HLA-A*11:01; TDRD12; ENSG00000173809; TAA
SVLLLTEK

SEQ ID NO: 86711 - protein, 8 aa, Homo sapiens
  misc_feature: Table A; Target 86711; HLA-A*31:01; TDRD12; ENSG00000173809; TAA
SVYWPAKR

SEQ ID NO: 86712 - protein, 9 aa, Homo sapiens
  misc_feature: Table A; Target 86712; HLA-A*31:01; TDRD12; ENSG00000173809; TAA
SYSWPPIAR

SEQ ID NO: 86713 - protein, 9 aa, Homo sapiens
  misc_feature: Table A; Target 86713; HLA-A*33:01; TDRD12; ENSG00000173809; TAA
SYSWPPIAR

SEQ ID NO: 86714 - protein, 9 aa, Homo sapiens
  misc_feature: Table A; Target 86714; HLA-A*33:03; TDRD12; ENSG00000173809; TAA
SYSWPPIAR

SEQ ID NO: 86715 - protein, 8 aa, Homo sapiens
  misc_feature: Table A; Target 86715; HLA-B*27:02; TDRD12; ENSG00000173809; TAA
TAGVLEAK

SEQ ID NO: 86716 - protein, 8 aa, Homo sapiens
  misc_feature: Table A; Target 86716; HLA-B*35:03; TDRD12; ENSG00000173809; TAA
TAMEEAAL

SEQ ID NO: 86717 - protein, 8 aa, Homo sapiens
  misc_feature: Table A; Target 86717; HLA-C*03:03; TDRD12; ENSG00000173809; TAA
TAMEEAAL

SEQ ID NO: 86718 - protein, 8 aa, Homo sapiens
  misc_feature: Table A; Target 86718; HLA-C*03:04; TDRD12; ENSG00000173809; TAA
TAMEEAAL

SEQ ID NO: 86719 - protein, 8 aa, Homo sapiens
  misc_feature: Table A; Target 86719; HLA-C*05:01; TDRD12; ENSG00000173809; TAA
TAMEEAAL

SEQ ID NO: 86720 - protein, 9 aa, Homo sapiens
  misc_feature: Table A; Target 86720; HLA-A*01:01; TDRD12; ENSG00000173809; TAA
TAMEEAALY

SEQ ID NO: 86721 - protein, 9 aa, Homo sapiens
  misc_feature: Table A; Target 86721; HLA-A*03:02; TDRD12; ENSG00000173809; TAA
TAMEEAALY

SEQ ID NO: 86722 - protein, 9 aa, Homo sapiens
  misc_feature: Table A; Target 86722; HLA-A*11:01; TDRD12; ENSG00000173809; TAA
TAMEEAALY

SEQ ID NO: 86723 - protein, 9 aa, Homo sapiens
  misc_feature: Table A; Target 86723; HLA-A*23:01; TDRD12; ENSG00000173809; TAA
TAMEEAALY

SEQ ID NO: 86724 - protein, 9 aa, Homo sapiens
  misc_feature: Table A; Target 86724; HLA-A*25:01; TDRD12; ENSG00000173809; TAA
TAMEEAALY

SEQ ID NO: 86725 - protein, 9 aa, Homo sapiens
  misc_feature: Table A; Target 86725; HLA-A*26:01; TDRD12; ENSG00000173809; TAA
TAMEEAALY

SEQ ID NO: 86726 - protein, 9 aa, Homo sapiens
  misc_feature: Table A; Target 86726; HLA-A*29:02; TDRD12; ENSG00000173809; TAA
TAMEEAALY

SEQ ID NO: 86727 - protein, 9 aa, Homo sapiens
  misc_feature: Table A; Target 86727; HLA-A*30:02; TDRD12; ENSG00000173809; TAA
TAMEEAALY

SEQ ID NO: 86728 - protein, 9 aa, Homo sapiens
  misc_feature: Table A; Target 86728; HLA-A*32:01; TDRD12; ENSG00000173809; TAA
TAMEEAALY

SEQ ID NO: 86729 - protein, 9 aa, Homo sapiens
  misc_feature: Table A; Target 86729; HLA-A*33:01; TDRD12; ENSG00000173809; TAA
TAMEEAALY

SEQ ID NO: 86730 - protein, 9 aa, Homo sapiens
  misc_feature: Table A; Target 86730; HLA-A*68:01; TDRD12; ENSG00000173809; TAA
TAMEEAALY

SEQ ID NO: 86731 - protein, 9 aa, Homo sapiens
  misc_feature: Table A; Target 86731; HLA-B*15:01; TDRD12; ENSG00000173809; TAA
TAMEEAALY

SEQ ID NO: 86732 - protein, 9 aa, Homo sapiens
  misc_feature: Table A; Target 86732; HLA-B*15:03; TDRD12; ENSG00000173809; TAA
TAMEEAALY

SEQ ID NO: 86733 - protein, 9 aa, Homo sapiens
  misc_feature: Table A; Target 86733; HLA-B*18:01; TDRD12; ENSG00000173809; TAA
TAMEEAALY

SEQ ID NO: 86734 - protein, 9 aa, Homo sapiens
  misc_feature: Table A; Target 86734; HLA-B*27:02; TDRD12; ENSG00000173809; TAA
TAMEEAALY

SEQ ID NO: 86735 - protein, 9 aa, Homo sapiens
  misc_feature: Table A; Target 86735; HLA-B*35:01; TDRD12; ENSG00000173809; TAA
TAMEEAALY

SEQ ID NO: 86736 - protein, 9 aa, Homo sapiens
  misc_feature: Table A; Target 86736; HLA-B*35:03; TDRD12; ENSG00000173809; TAA
TAMEEAALY

SEQ ID NO: 86737 - protein, 9 aa, Homo sapiens
  misc_feature: Table A; Target 86737; HLA-B*39:01; TDRD12; ENSG00000173809; TAA
TAMEEAALY

SEQ ID NO: 86738 - protein, 9 aa, Homo sapiens
  misc_feature: Table A; Target 86738; HLA-B*46:01; TDRD12; ENSG00000173809; TAA
TAMEEAALY

SEQ ID NO: 86739 - protein, 9 aa, Homo sapiens
  misc_feature: Table A; Target 86739; HLA-B*55:01; TDRD12; ENSG00000173809; TAA
TAMEEAALY

SEQ ID NO: 86740 - protein, 9 aa, Homo sapiens
  misc_feature: Table A; Target 86740; HLA-B*58:01; TDRD12; ENSG00000173809; TAA
TAMEEAALY

SEQ ID NO: 86741 - protein, 9 aa, Homo sapiens
  misc_feature: Table A; Target 86741; HLA-C*02:02; TDRD12; ENSG00000173809; TAA
TAMEEAALY

SEQ ID NO: 86742 - protein, 9 aa, Homo sapiens
  misc_feature: Table A; Target 86742; HLA-C*03:03; TDRD12; ENSG00000173809; TAA
TAMEEAALY

SEQ ID NO: 86743 - protein, 9 aa, Homo sapiens
  misc_feature: Table A; Target 86743; HLA-C*05:01; TDRD12; ENSG00000173809; TAA
TAMEEAALY

SEQ ID NO: 86744 - protein, 9 aa, Homo sapiens
  misc_feature: Table A; Target 86744; HLA-C*07:04; TDRD12; ENSG00000173809; TAA
TAMEEAALY

SEQ ID NO: 86745 - protein, 9 aa, Homo sapiens
  misc_feature: Table A; Target 86745; HLA-C*07:06; TDRD12; ENSG00000173809; TAA
TAMEEAALY

SEQ ID NO: 86746 - protein, 9 aa, Homo sapiens
  misc_feature: Table A; Target 86746; HLA-C*12:03; TDRD12; ENSG00000173809; TAA
TAMEEAALY

SEQ ID NO: 86747 - protein, 9 aa, Homo sapiens
  misc_feature: Table A; Target 86747; HLA-C*14:02; TDRD12; ENSG00000173809; TAA
TAMEEAALY

SEQ ID NO: 86748 - protein, 9 aa, Homo sapiens
  misc_feature: Table A; Target 86748; HLA-C*16:01; TDRD12; ENSG00000173809; TAA
TAMEEAALY

SEQ ID NO: 86749 - protein, 9 aa, Homo sapiens
  misc_feature: Table A; Target 86749; HLA-C*16:02; TDRD12; ENSG00000173809; TAA
TAMEEAALY

SEQ ID NO: 86750 - protein, 9 aa, Homo sapiens
  misc_feature: Table A; Target 86750; HLA-C*16:04; TDRD12; ENSG00000173809; TAA
TAMEEAALY

SEQ ID NO: 86751 - protein, 9 aa, Homo sapiens
  misc_feature: Table A; Target 86751; HLA-C*12:03; TDRD12; ENSG00000173809; TAA
TAQDKAVKC

SEQ ID NO: 86752 - protein, 9 aa, Homo sapiens
  misc_feature: Table A; Target 86752; HLA-C*16:02; TDRD12; ENSG00000173809; TAA
TAQDKAVKC

SEQ ID NO: 86753 - protein, 10 aa, Homo sapiens
  misc_feature: Table A; Target 86753; HLA-C*06:02; TDRD12; ENSG00000173809; TAA
TAQDKAVKCN

SEQ ID NO: 86754 - protein, 9 aa, Homo sapiens
  misc_feature: Table A; Target 86754; HLA-B*35:03; TDRD12; ENSG00000173809; TAA
TATAQDKAV

SEQ ID NO: 86755 - protein, 9 aa, Homo sapiens
  misc_feature: Table A; Target 86755; HLA-C*16:02; TDRD12; ENSG00000173809; TAA
TATAQDKAV

SEQ ID NO: 86756 - protein, 9 aa, Homo sapiens
  misc_feature: Table A; Target 86756; HLA-B*37:01; TDRD12; ENSG00000173809; TAA
TDATCVIHF

SEQ ID NO: 86757 - protein, 9 aa, Homo sapiens
  misc_feature: Table A; Target 86757; HLA-C*04:01; TDRD12; ENSG00000173809; TAA
TDATCVIHF

SEQ ID NO: 86758 - protein, 9 aa, Homo sapiens
  misc_feature: Table A; Target 86758; HLA-C*07:01; TDRD12; ENSG00000173809; TAA
TDATCVIHF

SEQ ID NO: 86759 - protein, 9 aa, Homo sapiens
  misc_feature: Table A; Target 86759; HLA-C*12:03; TDRD12; ENSG00000173809; TAA
TDATCVIHF

SEQ ID NO: 86760 - protein, 9 aa, Homo sapiens
  misc_feature: Table A; Target 86760; HLA-C*16:02; TDRD12; ENSG00000173809; TAA
TDATCVIHF

SEQ ID NO: 86761 - protein, 8 aa, Homo sapiens
  misc_feature: Table A; Target 86761; HLA-A*03:02; TDRD12; ENSG00000173809; TAA
TDIVPAKK

SEQ ID NO: 86762 - protein, 8 aa, Homo sapiens
  misc_feature: Table A; Target 86762; HLA-C*06:02; TDRD12; ENSG00000173809; TAA
TDIVPAKK

SEQ ID NO: 86763 - protein, 9 aa, Homo sapiens
  misc_feature: Table A; Target 86763; HLA-B*44:02; TDRD12; ENSG00000173809; TAA
TDIVPAKKW

SEQ ID NO: 86764 - protein, 9 aa, Homo sapiens
  misc_feature: Table A; Target 86764; HLA-B*44:03; TDRD12; ENSG00000173809; TAA
TDIVPAKKW

SEQ ID NO: 86765 - protein, 9 aa, Homo sapiens
  misc_feature: Table A; Target 86765; HLA-C*16:04; TDRD12; ENSG00000173809; TAA
TDIVPAKKW

SEQ ID NO: 86766 - protein, 9 aa, Homo sapiens
  misc_feature: Table A; Target 86766; HLA-B*37:01; TDRD12; ENSG00000173809; TAA
TDLPRKLSS

SEQ ID NO: 86767 - protein, 8 aa, Homo sapiens
  misc_feature: Table A; Target 86767; HLA-B*18:01; TDRD12; ENSG00000173809; TAA
TEIVCKVV

SEQ ID NO: 86768 - protein, 8 aa, Homo sapiens
  misc_feature: Table A; Target 86768; HLA-B*49:01; TDRD12; ENSG00000173809; TAA
TEIVCKVV

SEQ ID NO: 86769 - protein, 9 aa, Homo sapiens
  misc_feature: Table A; Target 86769; HLA-A*30:01; TDRD12; ENSG00000173809; TAA
TEKDASHAV

SEQ ID NO: 86770 - protein, 9 aa, Homo sapiens
  misc_feature: Table A; Target 86770; HLA-A*32:01; TDRD12; ENSG00000173809; TAA
TEKDASHAV

SEQ ID NO: 86771 - protein, 9 aa, Homo sapiens
  misc_feature: Table A; Target 86771; HLA-B*13:02; TDRD12; ENSG00000173809; TAA
TEKDASHAV

SEQ ID NO: 86772 - protein, 9 aa, Homo sapiens
  misc_feature: Table A; Target 86772; HLA-B*18:01; TDRD12; ENSG00000173809; TAA
TEKDASHAV

SEQ ID NO: 86773 - protein, 9 aa, Homo sapiens
  misc_feature: Table A; Target 86773; HLA-B*37:01; TDRD12; ENSG00000173809; TAA
TEKDASHAV

SEQ ID NO: 86774 - protein, 9 aa, Homo sapiens
  misc_feature: Table A; Target 86774; HLA-B*40:01; TDRD12; ENSG00000173809; TAA
TEKDASHAV

SEQ ID NO: 86775 - protein, 9 aa, Homo sapiens
  misc_feature: Table A; Target 86775; HLA-B*40:02; TDRD12; ENSG00000173809; TAA
TEKDASHAV

SEQ ID NO: 86776 - protein, 9 aa, Homo sapiens
  misc_feature: Table A; Target 86776; HLA-B*44:02; TDRD12; ENSG00000173809; TAA
TEKDASHAV

SEQ ID NO: 86777 - protein, 9 aa, Homo sapiens
  misc_feature: Table A; Target 86777; HLA-B*44:03; TDRD12; ENSG00000173809; TAA
TEKDASHAV

SEQ ID NO: 86778 - protein, 9 aa, Homo sapiens
  misc_feature: Table A; Target 86778; HLA-B*49:01; TDRD12; ENSG00000173809; TAA
TEKDASHAV

SEQ ID NO: 86779 - protein, 9 aa, Homo sapiens
  misc_feature: Table A; Target 86779; HLA-C*02:02; TDRD12; ENSG00000173809; TAA
TEKDASHAV

SEQ ID NO: 86780 - protein, 9 aa, Homo sapiens
  misc_feature: Table A; Target 86780; HLA-C*06:02; TDRD12; ENSG00000173809; TAA
TEKDASHAV

SEQ ID NO: 86781 - protein, 9 aa, Homo sapiens
  misc_feature: Table A; Target 86781; HLA-C*16:01; TDRD12; ENSG00000173809; TAA
TEKDASHAV

SEQ ID NO: 86782 - protein, 9 aa, Homo sapiens
  misc_feature: Table A; Target 86782; HLA-C*16:02; TDRD12; ENSG00000173809; TAA
TEKDASHAV

SEQ ID NO: 86783 - protein, 9 aa, Homo sapiens
  misc_feature: Table A; Target 86783; HLA-C*16:04; TDRD12; ENSG00000173809; TAA
TEKDASHAV

SEQ ID NO: 86784 - protein, 11 aa, Homo sapiens
  misc_feature: Table A; Target 86784; HLA-A*30:01; TDRD12; ENSG00000173809; TAA
TEKDASHAVGV

SEQ ID NO: 86785 - protein, 11 aa, Homo sapiens
  misc_feature: Table A; Target 86785; HLA-B*37:01; TDRD12; ENSG00000173809; TAA
TEKDASHAVGV

SEQ ID NO: 86786 - protein, 11 aa, Homo sapiens
  misc_feature: Table A; Target 86786; HLA-B*40:01; TDRD12; ENSG00000173809; TAA
TEKDASHAVGV

SEQ ID NO: 86787 - protein, 11 aa, Homo sapiens
  misc_feature: Table A; Target 86787; HLA-B*40:02; TDRD12; ENSG00000173809; TAA
TEKDASHAVGV

SEQ ID NO: 86788 - protein, 11 aa, Homo sapiens
  misc_feature: Table A; Target 86788; HLA-B*49:01; TDRD12; ENSG00000173809; TAA
TEKDASHAVGV

SEQ ID NO: 86789 - protein, 11 aa, Homo sapiens
  misc_feature: Table A; Target 86789; HLA-C*06:02; TDRD12; ENSG00000173809; TAA
TEKDASHAVGV

SEQ ID NO: 86790 - protein, 9 aa, Homo sapiens
  misc_feature: Table A; Target 86790; HLA-B*49:01; TDRD12; ENSG00000173809; TAA
TESYSWPPI

SEQ ID NO: 86791 - protein, 9 aa, Homo sapiens
  misc_feature: Table A; Target 86791; HLA-A*01:01; TDRD12; ENSG00000173809; TAA
TIDSSPLSA

SEQ ID NO: 86792 - protein, 9 aa, Homo sapiens
  misc_feature: Table A; Target 86792; HLA-A*02:01; TDRD12; ENSG00000173809; TAA
TIDSSPLSA

SEQ ID NO: 86793 - protein, 9 aa, Homo sapiens
  misc_feature: Table A; Target 86793; HLA-A*02:07; TDRD12; ENSG00000173809; TAA
TIDSSPLSA

SEQ ID NO: 86794 - protein, 9 aa, Homo sapiens
  misc_feature: Table A; Target 86794; HLA-C*05:01; TDRD12; ENSG00000173809; TAA
TIDSSPLSA

SEQ ID NO: 86795 - protein, 11 aa, Homo sapiens
  misc_feature: Table A; Target 86795; HLA-C*05:01; TDRD12; ENSG00000173809; TAA
TIDSSPLSADL

SEQ ID NO: 86796 - protein, 9 aa, Homo sapiens
  misc_feature: Table A; Target 86796; HLA-B*08:01; TDRD12; ENSG00000173809; TAA
TIKDEKVCV

SEQ ID NO: 86797 - protein, 11 aa, Homo sapiens
  misc_feature: Table A; Target 86797; HLA-A*02:01; TDRD12; ENSG00000173809; TAA
TIYADPDVPEA

SEQ ID NO: 86798 - protein, 9 aa, Homo sapiens
  misc_feature: Table A; Target 86798; HLA-A*02:01; TDRD12; ENSG00000173809; TAA
TLEEGQVCV

SEQ ID NO: 86799 - protein, 9 aa, Homo sapiens
  misc_feature: Table A; Target 86799; HLA-B*55:01; TDRD12; ENSG00000173809; TAA
TLEEGQVCV

SEQ ID NO: 86800 - protein, 9 aa, Homo sapiens
  misc_feature: Table A; Target 86800; HLA-C*05:01; TDRD12; ENSG00000173809; TAA
TLEEGQVCV

SEQ ID NO: 86801 - protein, 10 aa, Homo sapiens
  misc_feature: Table A; Target 86801; HLA-A*02:01; TDRD12; ENSG00000173809; TAA
TLEEGQVCVV

SEQ ID NO: 86802 - protein, 11 aa, Homo sapiens
  misc_feature: Table A; Target 86802; HLA-A*01:01; TDRD12; ENSG00000173809; TAA
TLEEGQVCVVY

SEQ ID NO: 86803 - protein, 11 aa, Homo sapiens
  misc_feature: Table A; Target 86803; HLA-A*30:02; TDRD12; ENSG00000173809; TAA
TLEEGQVCVVY

SEQ ID NO: 86804 - protein, 9 aa, Homo sapiens
  misc_feature: Table A; Target 86804; HLA-A*02:01; TDRD12; ENSG00000173809; TAA
TLFHRVQVL

SEQ ID NO: 86805 - protein, 9 aa, Homo sapiens
  misc_feature: Table A; Target 86805; HLA-A*02:03; TDRD12; ENSG00000173809; TAA
TLFHRVQVL

SEQ ID NO: 86806 - protein, 9 aa, Homo sapiens
  misc_feature: Table A; Target 86806; HLA-A*02:04; TDRD12; ENSG00000173809; TAA
TLFHRVQVL

SEQ ID NO: 86807 - protein, 9 aa, Homo sapiens
  misc_feature: Table A; Target 86807; HLA-A*02:07; TDRD12; ENSG00000173809; TAA
TLFHRVQVL

SEQ ID NO: 86808 - protein, 9 aa, Homo sapiens
  misc_feature: Table A; Target 86808; HLA-B*08:01; TDRD12; ENSG00000173809; TAA
TLFHRVQVL

SEQ ID NO: 86809 - protein, 11 aa, Homo sapiens
  misc_feature: Table A; Target 86809; HLA-A*02:01; TDRD12; ENSG00000173809; TAA
TLFHRVQVLEV

SEQ ID NO: 86810 - protein, 11 aa, Homo sapiens
  misc_feature: Table A; Target 86810; HLA-A*02:03; TDRD12; ENSG00000173809; TAA
TLFHRVQVLEV

SEQ ID NO: 86811 - protein, 11 aa, Homo sapiens
  misc_feature: Table A; Target 86811; HLA-A*02:04; TDRD12; ENSG00000173809; TAA
TLFHRVQVLEV

SEQ ID NO: 86812 - protein, 9 aa, Homo sapiens
  misc_feature: Table A; Target 86812; HLA-A*01:01; TDRD12; ENSG00000173809; TAA
TLNAEMNEY

SEQ ID NO: 86813 - protein, 9 aa, Homo sapiens
  misc_feature: Table A; Target 86813; HLA-A*03:01; TDRD12; ENSG00000173809; TAA
TLNAEMNEY

SEQ ID NO: 86814 - protein, 9 aa, Homo sapiens
  misc_feature: Table A; Target 86814; HLA-A*03:02; TDRD12; ENSG00000173809; TAA
TLNAEMNEY

SEQ ID NO: 86815 - protein, 9 aa, Homo sapiens
  misc_feature: Table A; Target 86815; HLA-A*25:01; TDRD12; ENSG00000173809; TAA
TLNAEMNEY

SEQ ID NO: 86816 - protein, 9 aa, Homo sapiens
  misc_feature: Table A; Target 86816; HLA-A*26:01; TDRD12; ENSG00000173809; TAA
TLNAEMNEY

SEQ ID NO: 86817 - protein, 9 aa, Homo sapiens
  misc_feature: Table A; Target 86817; HLA-A*29:02; TDRD12; ENSG00000173809; TAA
TLNAEMNEY

SEQ ID NO: 86818 - protein, 9 aa, Homo sapiens
  misc_feature: Table A; Target 86818; HLA-A*30:02; TDRD12; ENSG00000173809; TAA
TLNAEMNEY

SEQ ID NO: 86819 - protein, 9 aa, Homo sapiens
  misc_feature: Table A; Target 86819; HLA-A*32:01; TDRD12; ENSG00000173809; TAA
TLNAEMNEY

SEQ ID NO: 86820 - protein, 9 aa, Homo sapiens
  misc_feature: Table A; Target 86820; HLA-B*15:01; TDRD12; ENSG00000173809; TAA
TLNAEMNEY

SEQ ID NO: 86821 - protein, 9 aa, Homo sapiens
  misc_feature: Table A; Target 86821; HLA-B*15:03; TDRD12; ENSG00000173809; TAA
TLNAEMNEY

SEQ ID NO: 86822 - protein, 9 aa, Homo sapiens
  misc_feature: Table A; Target 86822; HLA-B*18:01; TDRD12; ENSG00000173809; TAA
TLNAEMNEY

SEQ ID NO: 86823 - protein, 9 aa, Homo sapiens
  misc_feature: Table A; Target 86823; HLA-B*27:05; TDRD12; ENSG00000173809; TAA
TLNAEMNEY

SEQ ID NO: 86824 - protein, 9 aa, Homo sapiens
  misc_feature: Table A; Target 86824; HLA-B*35:01; TDRD12; ENSG00000173809; TAA
TLNAEMNEY

SEQ ID NO: 86825 - protein, 9 aa, Homo sapiens
  misc_feature: Table A; Target 86825; HLA-B*39:01; TDRD12; ENSG00000173809; TAA
TLNAEMNEY

SEQ ID NO: 86826 - protein, 9 aa, Homo sapiens
  misc_feature: Table A; Target 86826; HLA-B*46:01; TDRD12; ENSG00000173809; TAA
TLNAEMNEY

SEQ ID NO: 86827 - protein, 9 aa, Homo sapiens
  misc_feature: Table A; Target 86827; HLA-B*55:01; TDRD12; ENSG00000173809; TAA
TLNAEMNEY

SEQ ID NO: 86828 - protein, 9 aa, Homo sapiens
  misc_feature: Table A; Target 86828; HLA-B*58:01; TDRD12; ENSG00000173809; TAA
TLNAEMNEY

SEQ ID NO: 86829 - protein, 9 aa, Homo sapiens
  misc_feature: Table A; Target 86829; HLA-C*01:02; TDRD12; ENSG00000173809; TAA
TLNAEMNEY

SEQ ID NO: 86830 - protein, 9 aa, Homo sapiens
  misc_feature: Table A; Target 86830; HLA-C*02:02; TDRD12; ENSG00000173809; TAA
TLNAEMNEY

SEQ ID NO: 86831 - protein, 9 aa, Homo sapiens
  misc_feature: Table A; Target 86831; HLA-C*03:03; TDRD12; ENSG00000173809; TAA
TLNAEMNEY

SEQ ID NO: 86832 - protein, 9 aa, Homo sapiens
  misc_feature: Table A; Target 86832; HLA-C*07:04; TDRD12; ENSG00000173809; TAA
TLNAEMNEY

SEQ ID NO: 86833 - protein, 9 aa, Homo sapiens
  misc_feature: Table A; Target 86833; HLA-C*14:02; TDRD12; ENSG00000173809; TAA
TLNAEMNEY

SEQ ID NO: 86834 - protein, 9 aa, Homo sapiens
  misc_feature: Table A; Target 86834; HLA-C*16:01; TDRD12; ENSG00000173809; TAA
TLNAEMNEY

SEQ ID NO: 86835 - protein, 9 aa, Homo sapiens
  misc_feature: Table A; Target 86835; HLA-C*16:02; TDRD12; ENSG00000173809; TAA
TLNAEMNEY

SEQ ID NO: 86836 - protein, 9 aa, Homo sapiens
  misc_feature: Table A; Target 86836; HLA-C*16:04; TDRD12; ENSG00000173809; TAA
TLNAEMNEY

SEQ ID NO: 86837 - protein, 10 aa, Homo sapiens
  misc_feature: Table A; Target 86837; HLA-B*15:01; TDRD12; ENSG00000173809; TAA
TLNAEMNEYF

SEQ ID NO: 86838 - protein, 11 aa, Homo sapiens
  misc_feature: Table A; Target 86838; HLA-A*03:02; TDRD12; ENSG00000173809; TAA
TLNAEMNEYFK

SEQ ID NO: 86839 - protein, 11 aa, Homo sapiens
  misc_feature: Table A; Target 86839; HLA-B*27:02; TDRD12; ENSG00000173809; TAA
TLNAEMNEYFK

SEQ ID NO: 86840 - protein, 9 aa, Homo sapiens
  misc_feature: Table A; Target 86840; HLA-A*02:07; TDRD12; ENSG00000173809; TAA
TLPPQAVEF

SEQ ID NO: 86841 - protein, 9 aa, Homo sapiens
  misc_feature: Table A; Target 86841; HLA-A*23:01; TDRD12; ENSG00000173809; TAA
TLPPQAVEF

SEQ ID NO: 86842 - protein, 9 aa, Homo sapiens
  misc_feature: Table A; Target 86842; HLA-A*24:02; TDRD12; ENSG00000173809; TAA
TLPPQAVEF

SEQ ID NO: 86843 - protein, 9 aa, Homo sapiens
  misc_feature: Table A; Target 86843; HLA-A*25:01; TDRD12; ENSG00000173809; TAA
TLPPQAVEF

SEQ ID NO: 86844 - protein, 9 aa, Homo sapiens
  misc_feature: Table A; Target 86844; HLA-A*26:01; TDRD12; ENSG00000173809; TAA
TLPPQAVEF

SEQ ID NO: 86845 - protein, 9 aa, Homo sapiens
  misc_feature: Table A; Target 86845; HLA-A*29:02; TDRD12; ENSG00000173809; TAA
TLPPQAVEF

SEQ ID NO: 86846 - protein, 9 aa, Homo sapiens
  misc_feature: Table A; Target 86846; HLA-A*32:01; TDRD12; ENSG00000173809; TAA
TLPPQAVEF

SEQ ID NO: 86847 - protein, 9 aa, Homo sapiens
  misc_feature: Table A; Target 86847; HLA-B*15:01; TDRD12; ENSG00000173809; TAA
TLPPQAVEF

SEQ ID NO: 86848 - protein, 9 aa, Homo sapiens
  misc_feature: Table A; Target 86848; HLA-B*15:03; TDRD12; ENSG00000173809; TAA
TLPPQAVEF

SEQ ID NO: 86849 - protein, 9 aa, Homo sapiens
  misc_feature: Table A; Target 86849; HLA-B*35:01; TDRD12; ENSG00000173809; TAA
TLPPQAVEF

SEQ ID NO: 86850 - protein, 9 aa, Homo sapiens
  misc_feature: Table A; Target 86850; HLA-B*37:01; TDRD12; ENSG00000173809; TAA
TLPPQAVEF

SEQ ID NO: 86851 - protein, 9 aa, Homo sapiens
  misc_feature: Table A; Target 86851; HLA-B*46:01; TDRD12; ENSG00000173809; TAA
TLPPQAVEF

SEQ ID NO: 86852 - protein, 9 aa, Homo sapiens
  misc_feature: Table A; Target 86852; HLA-C*01:02; TDRD12; ENSG00000173809; TAA
TLPPQAVEF

SEQ ID NO: 86853 - protein, 9 aa, Homo sapiens
  misc_feature: Table A; Target 86853; HLA-C*02:02; TDRD12; ENSG00000173809; TAA
TLPPQAVEF

SEQ ID NO: 86854 - protein, 9 aa, Homo sapiens
  misc_feature: Table A; Target 86854; HLA-C*07:04; TDRD12; ENSG00000173809; TAA
TLPPQAVEF

SEQ ID NO: 86855 - protein, 10 aa, Homo sapiens
  misc_feature: Table A; Target 86855; HLA-A*02:07; TDRD12; ENSG00000173809; TAA
TLPPQAVEFI

SEQ ID NO: 86856 - protein, 11 aa, Homo sapiens
  misc_feature: Table A; Target 86856; HLA-A*02:07; TDRD12; ENSG00000173809; TAA
TLPPQAVEFIV

SEQ ID NO: 86857 - protein, 10 aa, Homo sapiens
  misc_feature: Table A; Target 86857; HLA-B*35:03; TDRD12; ENSG00000173809; TAA
TPPAEDAACL

SEQ ID NO: 86858 - protein, 11 aa, Homo sapiens
  misc_feature: Table A; Target 86858; HLA-B*56:01; TDRD12; ENSG00000173809; TAA
TPPRVTGTSPA

SEQ ID NO: 86859 - protein, 8 aa, Homo sapiens
  misc_feature: Table A; Target 86859; HLA-B*51:01; TDRD12; ENSG00000173809; TAA
TPYSLLRL

SEQ ID NO: 86860 - protein, 9 aa, Homo sapiens
  misc_feature: Table A; Target 86860; HLA-B*51:01; TDRD12; ENSG00000173809; TAA
TPYSLLRLL

SEQ ID NO: 86861 - protein, 10 aa, Homo sapiens
  misc_feature: Table A; Target 86861; HLA-B*54:01; TDRD12; ENSG00000173809; TAA
TPYSLLRLLA

SEQ ID NO: 86862 - protein, 10 aa, Homo sapiens
  misc_feature: Table A; Target 86862; HLA-B*56:01; TDRD12; ENSG00000173809; TAA
TPYSLLRLLA

SEQ ID NO: 86863 - protein, 11 aa, Homo sapiens
  misc_feature: Table A; Target 86863; HLA-B*54:01; TDRD12; ENSG00000173809; TAA
TPYSLLRLLAC

SEQ ID NO: 86864 - protein, 10 aa, Homo sapiens
  misc_feature: Table A; Target 86864; HLA-A*02:01; TDRD12; ENSG00000173809; TAA
TQVEARLCAV

SEQ ID NO: 86865 - protein, 10 aa, Homo sapiens
  misc_feature: Table A; Target 86865; HLA-A*02:03; TDRD12; ENSG00000173809; TAA
TQVEARLCAV

SEQ ID NO: 86866 - protein, 10 aa, Homo sapiens
  misc_feature: Table A; Target 86866; HLA-B*40:02; TDRD12; ENSG00000173809; TAA
TQVEARLCAV

SEQ ID NO: 86867 - protein, 11 aa, Homo sapiens
  misc_feature: Table A; Target 86867; HLA-A*01:01; TDRD12; ENSG00000173809; TAA
TSSENQKPGGY

SEQ ID NO: 86868 - protein, 11 aa, Homo sapiens
  misc_feature: Table A; Target 86868; HLA-A*30:02; TDRD12; ENSG00000173809; TAA
TSSENQKPGGY

SEQ ID NO: 86869 - protein, 9 aa, Homo sapiens
  misc_feature: Table A; Target 86869; HLA-A*33:03; TDRD12; ENSG00000173809; TAA
TSVIDYNVR

SEQ ID NO: 86870 - protein, 9 aa, Homo sapiens
  misc_feature: Table A; Target 86870; HLA-A*68:01; TDRD12; ENSG00000173809; TAA
TSVIDYNVR

SEQ ID NO: 86871 - protein, 9 aa, Homo sapiens
  misc_feature: Table A; Target 86871; HLA-C*07:06; TDRD12; ENSG00000173809; TAA
TSVIDYNVR

SEQ ID NO: 86872 - protein, 9 aa, Homo sapiens
  misc_feature: Table A; Target 86872; HLA-A*23:01; TDRD12; ENSG00000173809; TAA
TTVEKVEKF

SEQ ID NO: 86873 - protein, 9 aa, Homo sapiens
  misc_feature: Table A; Target 86873; HLA-A*24:02; TDRD12; ENSG00000173809; TAA
TTVEKVEKF

SEQ ID NO: 86874 - protein, 9 aa, Homo sapiens
  misc_feature: Table A; Target 86874; HLA-A*25:01; TDRD12; ENSG00000173809; TAA
TTVEKVEKF

SEQ ID NO: 86875 - protein, 9 aa, Homo sapiens
  misc_feature: Table A; Target 86875; HLA-A*26:01; TDRD12; ENSG00000173809; TAA
TTVEKVEKF

SEQ ID NO: 86876 - protein, 9 aa, Homo sapiens
  misc_feature: Table A; Target 86876; HLA-A*29:02; TDRD12; ENSG00000173809; TAA
TTVEKVEKF

SEQ ID NO: 86877 - protein, 9 aa, Homo sapiens
  misc_feature: Table A; Target 86877; HLA-A*32:01; TDRD12; ENSG00000173809; TAA
TTVEKVEKF

SEQ ID NO: 86878 - protein, 9 aa, Homo sapiens
  misc_feature: Table A; Target 86878; HLA-A*33:01; TDRD12; ENSG00000173809; TAA
TTVEKVEKF

SEQ ID NO: 86879 - protein, 9 aa, Homo sapiens
  misc_feature: Table A; Target 86879; HLA-A*33:03; TDRD12; ENSG00000173809; TAA
TTVEKVEKF

SEQ ID NO: 86880 - protein, 9 aa, Homo sapiens
  misc_feature: Table A; Target 86880; HLA-A*68:01; TDRD12; ENSG00000173809; TAA
TTVEKVEKF

SEQ ID NO: 86881 - protein, 9 aa, Homo sapiens
  misc_feature: Table A; Target 86881; HLA-A*68:02; TDRD12; ENSG00000173809; TAA
TTVEKVEKF

SEQ ID NO: 86882 - protein, 9 aa, Homo sapiens
  misc_feature: Table A; Target 86882; HLA-B*18:01; TDRD12; ENSG00000173809; TAA
TTVEKVEKF

SEQ ID NO: 86883 - protein, 9 aa, Homo sapiens
  misc_feature: Table A; Target 86883; HLA-B*27:02; TDRD12; ENSG00000173809; TAA
TTVEKVEKF

SEQ ID NO: 86884 - protein, 9 aa, Homo sapiens
  misc_feature: Table A; Target 86884; HLA-B*35:01; TDRD12; ENSG00000173809; TAA
TTVEKVEKF

SEQ ID NO: 86885 - protein, 9 aa, Homo sapiens
  misc_feature: Table A; Target 86885; HLA-B*44:02; TDRD12; ENSG00000173809; TAA
TTVEKVEKF

SEQ ID NO: 86886 - protein, 9 aa, Homo sapiens
  misc_feature: Table A; Target 86886; HLA-B*44:03; TDRD12; ENSG00000173809; TAA
TTVEKVEKF

SEQ ID NO: 86887 - protein, 9 aa, Homo sapiens
  misc_feature: Table A; Target 86887; HLA-B*46:01; TDRD12; ENSG00000173809; TAA
TTVEKVEKF

SEQ ID NO: 86888 - protein, 9 aa, Homo sapiens
  misc_feature: Table A; Target 86888; HLA-B*57:01; TDRD12; ENSG00000173809; TAA
TTVEKVEKF

SEQ ID NO: 86889 - protein, 9 aa, Homo sapiens
  misc_feature: Table A; Target 86889; HLA-B*58:01; TDRD12; ENSG00000173809; TAA
TTVEKVEKF

SEQ ID NO: 86890 - protein, 9 aa, Homo sapiens
  misc_feature: Table A; Target 86890; HLA-C*02:02; TDRD12; ENSG00000173809; TAA
TTVEKVEKF

SEQ ID NO: 86891 - protein, 9 aa, Homo sapiens
  misc_feature: Table A; Target 86891; HLA-C*07:06; TDRD12; ENSG00000173809; TAA
TTVEKVEKF

SEQ ID NO: 86892 - protein, 9 aa, Homo sapiens
  misc_feature: Table A; Target 86892; HLA-C*12:03; TDRD12; ENSG00000173809; TAA
TTVEKVEKF

SEQ ID NO: 86893 - protein, 9 aa, Homo sapiens
  misc_feature: Table A; Target 86893; HLA-C*16:01; TDRD12; ENSG00000173809; TAA
TTVEKVEKF

SEQ ID NO: 86894 - protein, 9 aa, Homo sapiens
  misc_feature: Table A; Target 86894; HLA-C*16:02; TDRD12; ENSG00000173809; TAA
TTVEKVEKF

SEQ ID NO: 86895 - protein, 9 aa, Homo sapiens
  misc_feature: Table A; Target 86895; HLA-C*16:04; TDRD12; ENSG00000173809; TAA
TTVEKVEKF

SEQ ID NO: 86896 - protein, 8 aa, Homo sapiens
  misc_feature: Table A; Target 86896; HLA-B*18:01; TDRD12; ENSG00000173809; TAA
TVEKVEKF

SEQ ID NO: 86897 - protein, 8 aa, Homo sapiens
  misc_feature: Table A; Target 86897; HLA-C*05:01; TDRD12; ENSG00000173809; TAA
TVEKVEKF

SEQ ID NO: 86898 - protein, 11 aa, Homo sapiens
  misc_feature: Table A; Target 86898; HLA-A*01:01; TDRD12; ENSG00000173809; TAA
TVEKVEKFGLY

SEQ ID NO: 86899 - protein, 9 aa, Homo sapiens
  misc_feature: Table A; Target 86899; HLA-A*25:01; TDRD12; ENSG00000173809; TAA
TVLQTGACY

SEQ ID NO: 86900 - protein, 9 aa, Homo sapiens
  misc_feature: Table A; Target 86900; HLA-A*26:01; TDRD12; ENSG00000173809; TAA
TVLQTGACY

SEQ ID NO: 86901 - protein, 9 aa, Homo sapiens
  misc_feature: Table A; Target 86901; HLA-A*29:02; TDRD12; ENSG00000173809; TAA
TVLQTGACY

SEQ ID NO: 86902 - protein, 9 aa, Homo sapiens
  misc_feature: Table A; Target 86902; HLA-A*30:02; TDRD12; ENSG00000173809; TAA
TVLQTGACY

SEQ ID NO: 86903 - protein, 9 aa, Homo sapiens
  misc_feature: Table A; Target 86903; HLA-A*32:01; TDRD12; ENSG00000173809; TAA
TVLQTGACY

SEQ ID NO: 86904 - protein, 9 aa, Homo sapiens
  misc_feature: Table A; Target 86904; HLA-B*15:01; TDRD12; ENSG00000173809; TAA
TVLQTGACY

SEQ ID NO: 86905 - protein, 9 aa, Homo sapiens
  misc_feature: Table A; Target 86905; HLA-B*15:03; TDRD12; ENSG00000173809; TAA
TVLQTGACY

SEQ ID NO: 86906 - protein, 9 aa, Homo sapiens
  misc_feature: Table A; Target 86906; HLA-B*35:01; TDRD12; ENSG00000173809; TAA
TVLQTGACY

SEQ ID NO: 86907 - protein, 9 aa, Homo sapiens
  misc_feature: Table A; Target 86907; HLA-B*46:01; TDRD12; ENSG00000173809; TAA
TVLQTGACY

SEQ ID NO: 86908 - protein, 9 aa, Homo sapiens
  misc_feature: Table A; Target 86908; HLA-C*03:03; TDRD12; ENSG00000173809; TAA
TVLQTGACY

SEQ ID NO: 86909 - protein, 9 aa, Homo sapiens
  misc_feature: Table A; Target 86909; HLA-C*07:04; TDRD12; ENSG00000173809; TAA
TVLQTGACY

SEQ ID NO: 86910 - protein, 9 aa, Homo sapiens
  misc_feature: Table A; Target 86910; HLA-C*14:02; TDRD12; ENSG00000173809; TAA
TVLQTGACY

SEQ ID NO: 86911 - protein, 10 aa, Homo sapiens
  misc_feature: Table A; Target 86911; HLA-A*03:01; TDRD12; ENSG00000173809; TAA
TVLQTGACYK

SEQ ID NO: 86912 - protein, 10 aa, Homo sapiens
  misc_feature: Table A; Target 86912; HLA-A*03:02; TDRD12; ENSG00000173809; TAA
TVLQTGACYK

SEQ ID NO: 86913 - protein, 10 aa, Homo sapiens
  misc_feature: Table A; Target 86913; HLA-A*11:01; TDRD12; ENSG00000173809; TAA
TVLQTGACYK

SEQ ID NO: 86914 - protein, 10 aa, Homo sapiens
  misc_feature: Table A; Target 86914; HLA-A*68:01; TDRD12; ENSG00000173809; TAA
TVLQTGACYK

SEQ ID NO: 86915 - protein, 10 aa, Homo sapiens
  misc_feature: Table A; Target 86915; HLA-B*27:02; TDRD12; ENSG00000173809; TAA
TVLQTGACYK

SEQ ID NO: 86916 - protein, 9 aa, Homo sapiens
  misc_feature: Table A; Target 86916; HLA-A*01:01; TDRD12; ENSG00000173809; TAA
VAETEIVCK

SEQ ID NO: 86917 - protein, 9 aa, Homo sapiens
  misc_feature: Table A; Target 86917; HLA-A*03:02; TDRD12; ENSG00000173809; TAA
VAETEIVCK

SEQ ID NO: 86918 - protein, 9 aa, Homo sapiens
  misc_feature: Table A; Target 86918; HLA-A*11:01; TDRD12; ENSG00000173809; TAA
VAETEIVCK

SEQ ID NO: 86919 - protein, 9 aa, Homo sapiens
  misc_feature: Table A; Target 86919; HLA-B*27:02; TDRD12; ENSG00000173809; TAA
VAETEIVCK

SEQ ID NO: 86920 - protein, 9 aa, Homo sapiens
  misc_feature: Table A; Target 86920; HLA-C*05:01; TDRD12; ENSG00000173809; TAA
VAETEIVCK

SEQ ID NO: 86921 - protein, 8 aa, Homo sapiens
  misc_feature: Table A; Target 86921; HLA-B*46:01; TDRD12; ENSG00000173809; TAA
VAKNYACY

SEQ ID NO: 86922 - protein, 9 aa, Homo sapiens
  misc_feature: Table A; Target 86922; HLA-B*46:01; TDRD12; ENSG00000173809; TAA
VAKNYACYM

SEQ ID NO: 86923 - protein, 9 aa, Homo sapiens
  misc_feature: Table A; Target 86923; HLA-C*02:02; TDRD12; ENSG00000173809; TAA
VAKNYACYM

SEQ ID NO: 86924 - protein, 9 aa, Homo sapiens
  misc_feature: Table A; Target 86924; HLA-C*12:03; TDRD12; ENSG00000173809; TAA
VAKNYACYM

SEQ ID NO: 86925 - protein, 9 aa, Homo sapiens
  misc_feature: Table A; Target 86925; HLA-C*16:02; TDRD12; ENSG00000173809; TAA
VAKNYACYM

SEQ ID NO: 86926 - protein, 9 aa, Homo sapiens
  misc_feature: Table A; Target 86926; HLA-A*11:01; TDRD12; ENSG00000173809; TAA
VAVGVHWNK

SEQ ID NO: 86927 - protein, 9 aa, Homo sapiens
  misc_feature: Table A; Target 86927; HLA-A*31:01; TDRD12; ENSG00000173809; TAA
VAVGVHWNK

SEQ ID NO: 86928 - protein, 9 aa, Homo sapiens
  misc_feature: Table A; Target 86928; HLA-A*68:02; TDRD12; ENSG00000173809; TAA
VAVGVHWNK

SEQ ID NO: 86929 - protein, 10 aa, Homo sapiens
  misc_feature: Table A; Target 86929; HLA-A*11:01; TDRD12; ENSG00000173809; TAA
VCVNDDLVAK

SEQ ID NO: 86930 - protein, 10 aa, Homo sapiens
  misc_feature: Table A; Target 86930; HLA-B*27:02; TDRD12; ENSG00000173809; TAA
VCVNDDLVAK

SEQ ID NO: 86931 - protein, 9 aa, Homo sapiens
  misc_feature: Table A; Target 86931; HLA-B*37:01; TDRD12; ENSG00000173809; TAA
VDFAKNIPV

SEQ ID NO: 86932 - protein, 9 aa, Homo sapiens
  misc_feature: Table A; Target 86932; HLA-B*40:02; TDRD12; ENSG00000173809; TAA
VDFAKNIPV

SEQ ID NO: 86933 - protein, 9 aa, Homo sapiens
  misc_feature: Table A; Target 86933; HLA-C*06:02; TDRD12; ENSG00000173809; TAA
VDFAKNIPV

SEQ ID NO: 86934 - protein, 10 aa, Homo sapiens
  misc_feature: Table A; Target 86934; HLA-A*11:01; TDRD12; ENSG00000173809; TAA
VDFAKNIPVK

SEQ ID NO: 86935 - protein, 8 aa, Homo sapiens
  misc_feature: Table A; Target 86935; HLA-C*07:01; TDRD12; ENSG00000173809; TAA
VDKHMDLY

SEQ ID NO: 86936 - protein, 8 aa, Homo sapiens
  misc_feature: Table A; Target 86936; HLA-C*07:04; TDRD12; ENSG00000173809; TAA
VDKHMDLY

SEQ ID NO: 86937 - protein, 8 aa, Homo sapiens
  misc_feature: Table A; Target 86937; HLA-C*12:03; TDRD12; ENSG00000173809; TAA
VDKHMDLY

SEQ ID NO: 86938 - protein, 9 aa, Homo sapiens
  misc_feature: Table A; Target 86938; HLA-A*30:01; TDRD12; ENSG00000173809; TAA
VDYQKLNSA

SEQ ID NO: 86939 - protein, 9 aa, Homo sapiens
  misc_feature: Table A; Target 86939; HLA-B*08:01; TDRD12; ENSG00000173809; TAA
VDYQKLNSA

SEQ ID NO: 86940 - protein, 9 aa, Homo sapiens
  misc_feature: Table A; Target 86940; HLA-B*37:01; TDRD12; ENSG00000173809; TAA
VDYQKLNSA

SEQ ID NO: 86941 - protein, 9 aa, Homo sapiens
  misc_feature: Table A; Target 86941; HLA-B*49:01; TDRD12; ENSG00000173809; TAA
VDYQKLNSA

SEQ ID NO: 86942 - protein, 9 aa, Homo sapiens
  misc_feature: Table A; Target 86942; HLA-B*56:01; TDRD12; ENSG00000173809; TAA
VDYQKLNSA

SEQ ID NO: 86943 - protein, 8 aa, Homo sapiens
  misc_feature: Table A; Target 86943; HLA-B*18:01; TDRD12; ENSG00000173809; TAA
VEARLCAV

SEQ ID NO: 86944 - protein, 8 aa, Homo sapiens
  misc_feature: Table A; Target 86944; HLA-B*49:01; TDRD12; ENSG00000173809; TAA
VEARLCAV

SEQ ID NO: 86945 - protein, 8 aa, Homo sapiens
  misc_feature: Table A; Target 86945; HLA-B*49:01; TDRD12; ENSG00000173809; TAA
VEEDTFEV

SEQ ID NO: 86946 - protein, 9 aa, Homo sapiens
  misc_feature: Table A; Target 86946; HLA-A*01:01; TDRD12; ENSG00000173809; TAA
VEEDTFEVY

SEQ ID NO: 86947 - protein, 9 aa, Homo sapiens
  misc_feature: Table A; Target 86947; HLA-B*15:03; TDRD12; ENSG00000173809; TAA
VEEDTFEVY

SEQ ID NO: 86948 - protein, 9 aa, Homo sapiens
  misc_feature: Table A; Target 86948; HLA-B*18:01; TDRD12; ENSG00000173809; TAA
VEEDTFEVY

SEQ ID NO: 86949 - protein, 9 aa, Homo sapiens
  misc_feature: Table A; Target 86949; HLA-B*40:01; TDRD12; ENSG00000173809; TAA
VEEDTFEVY

SEQ ID NO: 86950 - protein, 9 aa, Homo sapiens
  misc_feature: Table A; Target 86950; HLA-B*44:02; TDRD12; ENSG00000173809; TAA
VEEDTFEVY

SEQ ID NO: 86951 - protein, 9 aa, Homo sapiens
  misc_feature: Table A; Target 86951; HLA-B*44:03; TDRD12; ENSG00000173809; TAA
VEEDTFEVY

SEQ ID NO: 86952 - protein, 9 aa, Homo sapiens
  misc_feature: Table A; Target 86952; HLA-B*49:01; TDRD12; ENSG00000173809; TAA
VEEDTFEVY

SEQ ID NO: 86953 - protein, 9 aa, Homo sapiens
  misc_feature: Table A; Target 86953; HLA-C*16:04; TDRD12; ENSG00000173809; TAA
VEEDTFEVY

SEQ ID NO: 86954 - protein, 10 aa, Homo sapiens
  misc_feature: Table A; Target 86954; HLA-B*40:01; TDRD12; ENSG00000173809; TAA
VEEDTFEVYL

SEQ ID NO: 86955 - protein, 10 aa, Homo sapiens
  misc_feature: Table A; Target 86955; HLA-B*49:01; TDRD12; ENSG00000173809; TAA
VEEDTFEVYL

SEQ ID NO: 86956 - protein, 11 aa, Homo sapiens
  misc_feature: Table A; Target 86956; HLA-B*40:01; TDRD12; ENSG00000173809; TAA
VEERESAPHQI

SEQ ID NO: 86957 - protein, 11 aa, Homo sapiens
  misc_feature: Table A; Target 86957; HLA-B*49:01; TDRD12; ENSG00000173809; TAA
VEERESAPHQI

SEQ ID NO: 86958 - protein, 11 aa, Homo sapiens
  misc_feature: Table A; Target 86958; HLA-A*30:01; TDRD12; ENSG00000173809; TAA
VEFIDEGRTGL

SEQ ID NO: 86959 - protein, 11 aa, Homo sapiens
  misc_feature: Table A; Target 86959; HLA-B*40:01; TDRD12; ENSG00000173809; TAA
VEFIDEGRTGL

SEQ ID NO: 86960 - protein, 11 aa, Homo sapiens
  misc_feature: Table A; Target 86960; HLA-B*40:02; TDRD12; ENSG00000173809; TAA
VEFIDEGRTGL

SEQ ID NO: 86961 - protein, 11 aa, Homo sapiens
  misc_feature: Table A; Target 86961; HLA-B*49:01; TDRD12; ENSG00000173809; TAA
VEFIDEGRTGL

SEQ ID NO: 86962 - protein, 8 aa, Homo sapiens
  misc_feature: Table A; Target 86962; HLA-B*18:01; TDRD12; ENSG00000173809; TAA
VEFIVCRV

SEQ ID NO: 86963 - protein, 8 aa, Homo sapiens
  misc_feature: Table A; Target 86963; HLA-B*37:01; TDRD12; ENSG00000173809; TAA
VEFIVCRV

SEQ ID NO: 86964 - protein, 8 aa, Homo sapiens
  misc_feature: Table A; Target 86964; HLA-B*49:01; TDRD12; ENSG00000173809; TAA
VEFIVCRV

SEQ ID NO: 86965 - protein, 9 aa, Homo sapiens
  misc_feature: Table A; Target 86965; HLA-A*30:01; TDRD12; ENSG00000173809; TAA
VEKFGLYGL

SEQ ID NO: 86966 - protein, 9 aa, Homo sapiens
  misc_feature: Table A; Target 86966; HLA-B*37:01; TDRD12; ENSG00000173809; TAA
VEKFGLYGL

SEQ ID NO: 86967 - protein, 9 aa, Homo sapiens
  misc_feature: Table A; Target 86967; HLA-B*40:02; TDRD12; ENSG00000173809; TAA
VEKFGLYGL

SEQ ID NO: 86968 - protein, 9 aa, Homo sapiens
  misc_feature: Table A; Target 86968; HLA-B*44:02; TDRD12; ENSG00000173809; TAA
VEKFGLYGL

SEQ ID NO: 86969 - protein, 9 aa, Homo sapiens
  misc_feature: Table A; Target 86969; HLA-A*30:01; TDRD12; ENSG00000173809; TAA
VEKVEKFGL

SEQ ID NO: 86970 - protein, 9 aa, Homo sapiens
  misc_feature: Table A; Target 86970; HLA-B*37:01; TDRD12; ENSG00000173809; TAA
VEKVEKFGL

SEQ ID NO: 86971 - protein, 9 aa, Homo sapiens
  misc_feature: Table A; Target 86971; HLA-B*40:02; TDRD12; ENSG00000173809; TAA
VEKVEKFGL

SEQ ID NO: 86972 - protein, 10 aa, Homo sapiens
  misc_feature: Table A; Target 86972; HLA-B*44:02; TDRD12; ENSG00000173809; TAA
VEKVEKFGLY

SEQ ID NO: 86973 - protein, 9 aa, Homo sapiens
  misc_feature: Table A; Target 86973; HLA-A*29:02; TDRD12; ENSG00000173809; TAA
VESFMQLPY

SEQ ID NO: 86974 - protein, 9 aa, Homo sapiens
  misc_feature: Table A; Target 86974; HLA-B*18:01; TDRD12; ENSG00000173809; TAA
VESFMQLPY

SEQ ID NO: 86975 - protein, 9 aa, Homo sapiens
  misc_feature: Table A; Target 86975; HLA-A*30:01; TDRD12; ENSG00000173809; TAA
VESSSIFCL

SEQ ID NO: 86976 - protein, 9 aa, Homo sapiens
  misc_feature: Table A; Target 86976; HLA-B*18:01; TDRD12; ENSG00000173809; TAA
VESSSIFCL

SEQ ID NO: 86977 - protein, 9 aa, Homo sapiens
  misc_feature: Table A; Target 86977; HLA-B*27:02; TDRD12; ENSG00000173809; TAA
VESSSIFCL

SEQ ID NO: 86978 - protein, 9 aa, Homo sapiens
  misc_feature: Table A; Target 86978; HLA-B*37:01; TDRD12; ENSG00000173809; TAA
VESSSIFCL

SEQ ID NO: 86979 - protein, 9 aa, Homo sapiens
  misc_feature: Table A; Target 86979; HLA-B*38:01; TDRD12; ENSG00000173809; TAA
VESSSIFCL

SEQ ID NO: 86980 - protein, 9 aa, Homo sapiens
  misc_feature: Table A; Target 86980; HLA-B*40:01; TDRD12; ENSG00000173809; TAA
VESSSIFCL

SEQ ID NO: 86981 - protein, 9 aa, Homo sapiens
  misc_feature: Table A; Target 86981; HLA-B*40:02; TDRD12; ENSG00000173809; TAA
VESSSIFCL

SEQ ID NO: 86982 - protein, 9 aa, Homo sapiens
  misc_feature: Table A; Target 86982; HLA-B*44:02; TDRD12; ENSG00000173809; TAA
VESSSIFCL

SEQ ID NO: 86983 - protein, 9 aa, Homo sapiens
  misc_feature: Table A; Target 86983; HLA-B*44:03; TDRD12; ENSG00000173809; TAA
VESSSIFCL

SEQ ID NO: 86984 - protein, 9 aa, Homo sapiens
  misc_feature: Table A; Target 86984; HLA-B*49:01; TDRD12; ENSG00000173809; TAA
VESSSIFCL

SEQ ID NO: 86985 - protein, 10 aa, Homo sapiens
  misc_feature: Table A; Target 86985; HLA-A*03:01; TDRD12; ENSG00000173809; TAA
VESSSIFCLK

SEQ ID NO: 86986 - protein, 10 aa, Homo sapiens
  misc_feature: Table A; Target 86986; HLA-B*27:02; TDRD12; ENSG00000173809; TAA
VESSSIFCLK

SEQ ID NO: 86987 - protein, 8 aa, Homo sapiens
  misc_feature: Table A; Target 86987; HLA-A*30:01; TDRD12; ENSG00000173809; TAA
VEVLFLEA

SEQ ID NO: 86988 - protein, 8 aa, Homo sapiens
  misc_feature: Table A; Target 86988; HLA-B*18:01; TDRD12; ENSG00000173809; TAA
VEVLFLEA

SEQ ID NO: 86989 - protein, 8 aa, Homo sapiens
  misc_feature: Table A; Target 86989; HLA-B*49:01; TDRD12; ENSG00000173809; TAA
VEVLFLEA

SEQ ID NO: 86990 - protein, 9 aa, Homo sapiens
  misc_feature: Table A; Target 86990; HLA-B*08:01; TDRD12; ENSG00000173809; TAA
VGDLRPTAT

SEQ ID NO: 86991 - protein, 9 aa, Homo sapiens
  misc_feature: Table A; Target 86991; HLA-A*23:01; TDRD12; ENSG00000173809; TAA
VHITNLSSL

SEQ ID NO: 86992 - protein, 9 aa, Homo sapiens
  misc_feature: Table A; Target 86992; HLA-A*25:01; TDRD12; ENSG00000173809; TAA
VHITNLSSL

SEQ ID NO: 86993 - protein, 9 aa, Homo sapiens
  misc_feature: Table A; Target 86993; HLA-B*38:01; TDRD12; ENSG00000173809; TAA
VHITNLSSL

SEQ ID NO: 86994 - protein, 9 aa, Homo sapiens
  misc_feature: Table A; Target 86994; HLA-B*39:01; TDRD12; ENSG00000173809; TAA
VHITNLSSL

SEQ ID NO: 86995 - protein, 9 aa, Homo sapiens
  misc_feature: Table A; Target 86995; HLA-B*46:01; TDRD12; ENSG00000173809; TAA
VHITNLSSL

SEQ ID NO: 86996 - protein, 9 aa, Homo sapiens
  misc_feature: Table A; Target 86996; HLA-C*01:02; TDRD12; ENSG00000173809; TAA
VHITNLSSL

SEQ ID NO: 86997 - protein, 9 aa, Homo sapiens
  misc_feature: Table A; Target 86997; HLA-C*03:03; TDRD12; ENSG00000173809; TAA
VHITNLSSL

SEQ ID NO: 86998 - protein, 9 aa, Homo sapiens
  misc_feature: Table A; Target 86998; HLA-C*03:04; TDRD12; ENSG00000173809; TAA
VHITNLSSL

SEQ ID NO: 86999 - protein, 9 aa, Homo sapiens
  misc_feature: Table A; Target 86999; HLA-C*14:02; TDRD12; ENSG00000173809; TAA
VHITNLSSL

SEQ ID NO: 87000 - protein, 10 aa, Homo sapiens
  misc_feature: Table A; Target 87000; HLA-B*57:01; TDRD12; ENSG00000173809; TAA
VILALGNTVW

SEQ ID NO: 87001 - protein, 11 aa, Homo sapiens
  misc_feature: Table A; Target 87001; HLA-A*29:02; TDRD12; ENSG00000173809; TAA
VITAMEEAALY

SEQ ID NO: 87002 - protein, 9 aa, Homo sapiens
  misc_feature: Table A; Target 87002; HLA-A*23:01; TDRD12; ENSG00000173809; TAA
VIVTTPYSL

SEQ ID NO: 87003 - protein, 9 aa, Homo sapiens
  misc_feature: Table A; Target 87003; HLA-A*24:02; TDRD12; ENSG00000173809; TAA
VIVTTPYSL

SEQ ID NO: 87004 - protein, 9 aa, Homo sapiens
  misc_feature: Table A; Target 87004; HLA-B*46:01; TDRD12; ENSG00000173809; TAA
VIVTTPYSL

SEQ ID NO: 87005 - protein, 9 aa, Homo sapiens
  misc_feature: Table A; Target 87005; HLA-C*01:02; TDRD12; ENSG00000173809; TAA
VIVTTPYSL

SEQ ID NO: 87006 - protein, 9 aa, Homo sapiens
  misc_feature: Table A; Target 87006; HLA-C*03:03; TDRD12; ENSG00000173809; TAA
VIVTTPYSL

SEQ ID NO: 87007 - protein, 9 aa, Homo sapiens
  misc_feature: Table A; Target 87007; HLA-C*03:04; TDRD12; ENSG00000173809; TAA
VIVTTPYSL

SEQ ID NO: 87008 - protein, 11 aa, Homo sapiens
  misc_feature: Table A; Target 87008; HLA-B*15:03; TDRD12; ENSG00000173809; TAA
VKSITSSADQY

SEQ ID NO: 87009 - protein, 9 aa, Homo sapiens
  misc_feature: Table A; Target 87009; HLA-A*03:01; TDRD12; ENSG00000173809; TAA
VLLTIGLHK

SEQ ID NO: 87010 - protein, 8 aa, Homo sapiens
  misc_feature: Table A; Target 87010; HLA-A*30:02; TDRD12; ENSG00000173809; TAA
VLQTGACY

SEQ ID NO: 87011 - protein, 8 aa, Homo sapiens
  misc_feature: Table A; Target 87011; HLA-A*32:01; TDRD12; ENSG00000173809; TAA
VLQTGACY

SEQ ID NO: 87012 - protein, 8 aa, Homo sapiens
  misc_feature: Table A; Target 87012; HLA-B*15:01; TDRD12; ENSG00000173809; TAA
VLQTGACY

SEQ ID NO: 87013 - protein, 8 aa, Homo sapiens
  misc_feature: Table A; Target 87013; HLA-C*14:02; TDRD12; ENSG00000173809; TAA
VLQTGACY

SEQ ID NO: 87014 - protein, 9 aa, Homo sapiens
  misc_feature: Table A; Target 87014; HLA-A*03:01; TDRD12; ENSG00000173809; TAA
VLQTGACYK

SEQ ID NO: 87015 - protein, 9 aa, Homo sapiens
  misc_feature: Table A; Target 87015; HLA-A*03:02; TDRD12; ENSG00000173809; TAA
VLQTGACYK

SEQ ID NO: 87016 - protein, 9 aa, Homo sapiens
  misc_feature: Table A; Target 87016; HLA-A*11:01; TDRD12; ENSG00000173809; TAA
VLQTGACYK

SEQ ID NO: 87017 - protein, 11 aa, Homo sapiens
  misc_feature: Table A; Target 87017; HLA-A*30:02; TDRD12; ENSG00000173809; TAA
VLTVLQTGACY

SEQ ID NO: 87018 - protein, 8 aa, Homo sapiens
  misc_feature: Table A; Target 87018; HLA-B*27:02; TDRD12; ENSG00000173809; TAA
VNDDLVAK

SEQ ID NO: 87019 - protein, 10 aa, Homo sapiens
  misc_feature: Table A; Target 87019; HLA-A*01:01; TDRD12; ENSG00000173809; TAA
VNDDLVAKNY

SEQ ID NO: 87020 - protein, 10 aa, Homo sapiens
  misc_feature: Table A; Target 87020; HLA-A*29:02; TDRD12; ENSG00000173809; TAA
VNDDLVAKNY

SEQ ID NO: 87021 - protein, 10 aa, Homo sapiens
  misc_feature: Table A; Target 87021; HLA-A*30:02; TDRD12; ENSG00000173809; TAA
VNDDLVAKNY

SEQ ID NO: 87022 - protein, 10 aa, Homo sapiens
  misc_feature: Table A; Target 87022; HLA-B*44:02; TDRD12; ENSG00000173809; TAA
VNDDLVAKNY

SEQ ID NO: 87023 - protein, 10 aa, Homo sapiens
  misc_feature: Table A; Target 87023; HLA-B*44:03; TDRD12; ENSG00000173809; TAA
VNDDLVAKNY

SEQ ID NO: 87024 - protein, 8 aa, Homo sapiens
  misc_feature: Table A; Target 87024; HLA-A*23:01; TDRD12; ENSG00000173809; TAA
VNFPAQSL

SEQ ID NO: 87025 - protein, 8 aa, Homo sapiens
  misc_feature: Table A; Target 87025; HLA-A*30:01; TDRD12; ENSG00000173809; TAA
VNFPAQSL

SEQ ID NO: 87026 - protein, 8 aa, Homo sapiens
  misc_feature: Table A; Target 87026; HLA-A*32:01; TDRD12; ENSG00000173809; TAA
VNFPAQSL

SEQ ID NO: 87027 - protein, 8 aa, Homo sapiens
  misc_feature: Table A; Target 87027; HLA-B*08:01; TDRD12; ENSG00000173809; TAA
VNFPAQSL

SEQ ID NO: 87028 - protein, 8 aa, Homo sapiens
  misc_feature: Table A; Target 87028; HLA-B*15:03; TDRD12; ENSG00000173809; TAA
VNFPAQSL

SEQ ID NO: 87029 - protein, 8 aa, Homo sapiens
  misc_feature: Table A; Target 87029; HLA-B*27:05; TDRD12; ENSG00000173809; TAA
VNFPAQSL

SEQ ID NO: 87030 - protein, 8 aa, Homo sapiens
  misc_feature: Table A; Target 87030; HLA-B*37:01; TDRD12; ENSG00000173809; TAA
VNFPAQSL

SEQ ID NO: 87031 - protein, 8 aa, Homo sapiens
  misc_feature: Table A; Target 87031; HLA-B*39:01; TDRD12; ENSG00000173809; TAA
VNFPAQSL

SEQ ID NO: 87032 - protein, 8 aa, Homo sapiens
  misc_feature: Table A; Target 87032; HLA-B*40:02; TDRD12; ENSG00000173809; TAA
VNFPAQSL

SEQ ID NO: 87033 - protein, 8 aa, Homo sapiens
  misc_feature: Table A; Target 87033; HLA-B*46:01; TDRD12; ENSG00000173809; TAA
VNFPAQSL

SEQ ID NO: 87034 - protein, 8 aa, Homo sapiens
  misc_feature: Table A; Target 87034; HLA-C*03:03; TDRD12; ENSG00000173809; TAA
VNFPAQSL

SEQ ID NO: 87035 - protein, 8 aa, Homo sapiens
  misc_feature: Table A; Target 87035; HLA-C*03:04; TDRD12; ENSG00000173809; TAA
VNFPAQSL

SEQ ID NO: 87036 - protein, 8 aa, Homo sapiens
  misc_feature: Table A; Target 87036; HLA-C*07:04; TDRD12; ENSG00000173809; TAA
VNFPAQSL

SEQ ID NO: 87037 - protein, 8 aa, Homo sapiens
  misc_feature: Table A; Target 87037; HLA-C*12:03; TDRD12; ENSG00000173809; TAA
VNFPAQSL

SEQ ID NO: 87038 - protein, 8 aa, Homo sapiens
  misc_feature: Table A; Target 87038; HLA-C*14:02; TDRD12; ENSG00000173809; TAA
VNFPAQSL

SEQ ID NO: 87039 - protein, 8 aa, Homo sapiens
  misc_feature: Table A; Target 87039; HLA-C*16:01; TDRD12; ENSG00000173809; TAA
VNFPAQSL

SEQ ID NO: 87040 - protein, 8 aa, Homo sapiens
  misc_feature: Table A; Target 87040; HLA-B*18:01; TDRD12; ENSG00000173809; TAA
VPAELYEF

SEQ ID NO: 87041 - protein, 8 aa, Homo sapiens
  misc_feature: Table A; Target 87041; HLA-B*35:01; TDRD12; ENSG00000173809; TAA
VPAELYEF

SEQ ID NO: 87042 - protein, 8 aa, Homo sapiens
  misc_feature: Table A; Target 87042; HLA-B*35:03; TDRD12; ENSG00000173809; TAA
VPAELYEF

SEQ ID NO: 87043 - protein, 8 aa, Homo sapiens
  misc_feature: Table A; Target 87043; HLA-B*46:01; TDRD12; ENSG00000173809; TAA
VPAELYEF

SEQ ID NO: 87044 - protein, 8 aa, Homo sapiens
  misc_feature: Table A; Target 87044; HLA-B*51:01; TDRD12; ENSG00000173809; TAA
VPAELYEF

SEQ ID NO: 87045 - protein, 8 aa, Homo sapiens
  misc_feature: Table A; Target 87045; HLA-B*54:01; TDRD12; ENSG00000173809; TAA
VPAELYEF

SEQ ID NO: 87046 - protein, 8 aa, Homo sapiens
  misc_feature: Table A; Target 87046; HLA-B*55:01; TDRD12; ENSG00000173809; TAA
VPAELYEF

SEQ ID NO: 87047 - protein, 8 aa, Homo sapiens
  misc_feature: Table A; Target 87047; HLA-B*56:01; TDRD12; ENSG00000173809; TAA
VPAELYEF

SEQ ID NO: 87048 - protein, 10 aa, Homo sapiens
  misc_feature: Table A; Target 87048; HLA-B*54:01; TDRD12; ENSG00000173809; TAA
VPAELYEFTA

SEQ ID NO: 87049 - protein, 10 aa, Homo sapiens
  misc_feature: Table A; Target 87049; HLA-B*55:01; TDRD12; ENSG00000173809; TAA
VPAELYEFTA

SEQ ID NO: 87050 - protein, 10 aa, Homo sapiens
  misc_feature: Table A; Target 87050; HLA-B*56:01; TDRD12; ENSG00000173809; TAA
VPAELYEFTA

SEQ ID NO: 87051 - protein, 9 aa, Homo sapiens
  misc_feature: Table A; Target 87051; HLA-B*54:01; TDRD12; ENSG00000173809; TAA
VPLLAITDA

SEQ ID NO: 87052 - protein, 9 aa, Homo sapiens
  misc_feature: Table A; Target 87052; HLA-B*55:01; TDRD12; ENSG00000173809; TAA
VPLLAITDA

SEQ ID NO: 87053 - protein, 9 aa, Homo sapiens
  misc_feature: Table A; Target 87053; HLA-B*56:01; TDRD12; ENSG00000173809; TAA
VPLLAITDA

SEQ ID NO: 87054 - protein, 9 aa, Homo sapiens
  misc_feature: Table A; Target 87054; HLA-B*13:02; TDRD12; ENSG00000173809; TAA
VQQVVHLCL

SEQ ID NO: 87055 - protein, 9 aa, Homo sapiens
  misc_feature: Table A; Target 87055; HLA-A*03:02; TDRD12; ENSG00000173809; TAA
VQVLEVNQK

SEQ ID NO: 87056 - protein, 9 aa, Homo sapiens
  misc_feature: Table A; Target 87056; HLA-A*11:01; TDRD12; ENSG00000173809; TAA
VQVLEVNQK

SEQ ID NO: 87057 - protein, 9 aa, Homo sapiens
  misc_feature: Table A; Target 87057; HLA-B*27:05; TDRD12; ENSG00000173809; TAA
VQVLEVNQK

SEQ ID NO: 87058 - protein, 8 aa, Homo sapiens
  misc_feature: Table A; Target 87058; HLA-B*37:01; TDRD12; ENSG00000173809; TAA
VRAEILSM

SEQ ID NO: 87059 - protein, 10 aa, Homo sapiens
  misc_feature: Table A; Target 87059; HLA-B*27:05; TDRD12; ENSG00000173809; TAA
VRAEILSMGM

SEQ ID NO: 87060 - protein, 9 aa, Homo sapiens
  misc_feature: Table A; Target 87060; HLA-A*03:01; TDRD12; ENSG00000173809; TAA
VTTPYSLLR

SEQ ID NO: 87061 - protein, 9 aa, Homo sapiens
  misc_feature: Table A; Target 87061; HLA-A*11:01; TDRD12; ENSG00000173809; TAA
VTTPYSLLR

SEQ ID NO: 87062 - protein, 9 aa, Homo sapiens
  misc_feature: Table A; Target 87062; HLA-A*29:02; TDRD12; ENSG00000173809; TAA
VTTPYSLLR

SEQ ID NO: 87063 - protein, 9 aa, Homo sapiens
  misc_feature: Table A; Target 87063; HLA-A*31:01; TDRD12; ENSG00000173809; TAA
VTTPYSLLR

SEQ ID NO: 87064 - protein, 9 aa, Homo sapiens
  misc_feature: Table A; Target 87064; HLA-B*57:01; TDRD12; ENSG00000173809; TAA
VTTPYSLLR

SEQ ID NO: 87065 - protein, 9 aa, Homo sapiens
  misc_feature: Table A; Target 87065; HLA-C*07:06; TDRD12; ENSG00000173809; TAA
VTTPYSLLR

SEQ ID NO: 87066 - protein, 10 aa, Homo sapiens
  misc_feature: Table A; Target 87066; HLA-A*01:01; TDRD12; ENSG00000173809; TAA
VVESFMQLPY

SEQ ID NO: 87067 - protein, 10 aa, Homo sapiens
  misc_feature: Table A; Target 87067; HLA-A*29:02; TDRD12; ENSG00000173809; TAA
VVESFMQLPY

SEQ ID NO: 87068 - protein, 10 aa, Homo sapiens
  misc_feature: Table A; Target 87068; HLA-C*07:01; TDRD12; ENSG00000173809; TAA
VVESFMQLPY

SEQ ID NO: 87069 - protein, 8 aa, Homo sapiens
  misc_feature: Table A; Target 87069; HLA-C*05:01; TDRD12; ENSG00000173809; TAA
VVESSSIF

SEQ ID NO: 87070 - protein, 11 aa, Homo sapiens
  misc_feature: Table A; Target 87070; HLA-A*03:01; TDRD12; ENSG00000173809; TAA
VVESSSIFCLK

SEQ ID NO: 87071 - protein, 11 aa, Homo sapiens
  misc_feature: Table A; Target 87071; HLA-A*03:02; TDRD12; ENSG00000173809; TAA
VVESSSIFCLK

SEQ ID NO: 87072 - protein, 11 aa, Homo sapiens
  misc_feature: Table A; Target 87072; HLA-A*11:01; TDRD12; ENSG00000173809; TAA
VVESSSIFCLK

SEQ ID NO: 87073 - protein, 9 aa, Homo sapiens
  misc_feature: Table A; Target 87073; HLA-A*02:07; TDRD12; ENSG00000173809; TAA
VVVESFMQL

SEQ ID NO: 87074 - protein, 9 aa, Homo sapiens
  misc_feature: Table A; Target 87074; HLA-A*23:01; TDRD12; ENSG00000173809; TAA
VVVESFMQL

SEQ ID NO: 87075 - protein, 9 aa, Homo sapiens
  misc_feature: Table A; Target 87075; HLA-A*24:02; TDRD12; ENSG00000173809; TAA
VVVESFMQL

SEQ ID NO: 87076 - protein, 9 aa, Homo sapiens
  misc_feature: Table A; Target 87076; HLA-A*25:01; TDRD12; ENSG00000173809; TAA
VVVESFMQL

SEQ ID NO: 87077 - protein, 9 aa, Homo sapiens
  misc_feature: Table A; Target 87077; HLA-A*26:01; TDRD12; ENSG00000173809; TAA
VVVESFMQL

SEQ ID NO: 87078 - protein, 9 aa, Homo sapiens
  misc_feature: Table A; Target 87078; HLA-B*46:01; TDRD12; ENSG00000173809; TAA
VVVESFMQL

SEQ ID NO: 87079 - protein, 9 aa, Homo sapiens
  misc_feature: Table A; Target 87079; HLA-C*01:02; TDRD12; ENSG00000173809; TAA
VVVESFMQL

SEQ ID NO: 87080 - protein, 9 aa, Homo sapiens
  misc_feature: Table A; Target 87080; HLA-C*02:02; TDRD12; ENSG00000173809; TAA
VVVESFMQL

SEQ ID NO: 87081 - protein, 9 aa, Homo sapiens
  misc_feature: Table A; Target 87081; HLA-C*03:03; TDRD12; ENSG00000173809; TAA
VVVESFMQL

SEQ ID NO: 87082 - protein, 9 aa, Homo sapiens
  misc_feature: Table A; Target 87082; HLA-C*03:04; TDRD12; ENSG00000173809; TAA
VVVESFMQL

SEQ ID NO: 87083 - protein, 9 aa, Homo sapiens
  misc_feature: Table A; Target 87083; HLA-A*23:01; TDRD12; ENSG00000173809; TAA
VWIDPMVHI

SEQ ID NO: 87084 - protein, 9 aa, Homo sapiens
  misc_feature: Table A; Target 87084; HLA-A*24:02; TDRD12; ENSG00000173809; TAA
VWIDPMVHI

SEQ ID NO: 87085 - protein, 11 aa, Homo sapiens
  misc_feature: Table A; Target 87085; HLA-A*24:02; TDRD12; ENSG00000173809; TAA
VYWPAKRGITI

SEQ ID NO: 87086 - protein, 10 aa, Homo sapiens
  misc_feature: Table A; Target 87086; HLA-B*35:01; TDRD12; ENSG00000173809; TAA
WALDDILVEF

SEQ ID NO: 87087 - protein, 8 aa, Homo sapiens
  misc_feature: Table A; Target 87087; HLA-B*18:01; TDRD12; ENSG00000173809; TAA
WDNAAIQY

SEQ ID NO: 87088 - protein, 8 aa, Homo sapiens
  misc_feature: Table A; Target 87088; HLA-C*07:01; TDRD12; ENSG00000173809; TAA
WDNAAIQY

SEQ ID NO: 87089 - protein, 9 aa, Homo sapiens
  misc_feature: Table A; Target 87089; HLA-B*07:02; TDRD12; ENSG00000173809; TAA
WPAKRGITI

SEQ ID NO: 87090 - protein, 9 aa, Homo sapiens
  misc_feature: Table A; Target 87090; HLA-B*08:01; TDRD12; ENSG00000173809; TAA
WPAKRGITI

SEQ ID NO: 87091 - protein, 9 aa, Homo sapiens
  misc_feature: Table A; Target 87091; HLA-B*51:01; TDRD12; ENSG00000173809; TAA
WPAKRGITI

SEQ ID NO: 87092 - protein, 9 aa, Homo sapiens
  misc_feature: Table A; Target 87092; HLA-B*27:02; TDRD12; ENSG00000173809; TAA
YACYMSPTK

SEQ ID NO: 87093 - protein, 9 aa, Homo sapiens
  misc_feature: Table A; Target 87093; HLA-C*03:03; TDRD12; ENSG00000173809; TAA
YACYMSPTK

SEQ ID NO: 87094 - protein, 9 aa, Homo sapiens
  misc_feature: Table A; Target 87094; HLA-A*01:01; TDRD12; ENSG00000173809; TAA
YADPDVPEA

SEQ ID NO: 87095 - protein, 9 aa, Homo sapiens
  misc_feature: Table A; Target 87095; HLA-A*02:01; TDRD12; ENSG00000173809; TAA
YADPDVPEA

SEQ ID NO: 87096 - protein, 9 aa, Homo sapiens
  misc_feature: Table A; Target 87096; HLA-A*02:07; TDRD12; ENSG00000173809; TAA
YADPDVPEA

SEQ ID NO: 87097 - protein, 9 aa, Homo sapiens
  misc_feature: Table A; Target 87097; HLA-B*35:01; TDRD12; ENSG00000173809; TAA
YADPDVPEA

SEQ ID NO: 87098 - protein, 9 aa, Homo sapiens
  misc_feature: Table A; Target 87098; HLA-B*35:03; TDRD12; ENSG00000173809; TAA
YADPDVPEA

SEQ ID NO: 87099 - protein, 9 aa, Homo sapiens
  misc_feature: Table A; Target 87099; HLA-B*38:01; TDRD12; ENSG00000173809; TAA
YADPDVPEA

SEQ ID NO: 87100 - protein, 9 aa, Homo sapiens
  misc_feature: Table A; Target 87100; HLA-B*39:01; TDRD12; ENSG00000173809; TAA
YADPDVPEA

SEQ ID NO: 87101 - protein, 9 aa, Homo sapiens
  misc_feature: Table A; Target 87101; HLA-B*54:01; TDRD12; ENSG00000173809; TAA
YADPDVPEA

SEQ ID NO: 87102 - protein, 9 aa, Homo sapiens
  misc_feature: Table A; Target 87102; HLA-B*55:01; TDRD12; ENSG00000173809; TAA
YADPDVPEA

SEQ ID NO: 87103 - protein, 9 aa, Homo sapiens
  misc_feature: Table A; Target 87103; HLA-B*56:01; TDRD12; ENSG00000173809; TAA
YADPDVPEA

SEQ ID NO: 87104 - protein, 9 aa, Homo sapiens
  misc_feature: Table A; Target 87104; HLA-C*03:03; TDRD12; ENSG00000173809; TAA
YADPDVPEA

SEQ ID NO: 87105 - protein, 9 aa, Homo sapiens
  misc_feature: Table A; Target 87105; HLA-C*03:04; TDRD12; ENSG00000173809; TAA
YADPDVPEA

SEQ ID NO: 87106 - protein, 9 aa, Homo sapiens
  misc_feature: Table A; Target 87106; HLA-C*05:01; TDRD12; ENSG00000173809; TAA
YADPDVPEA

SEQ ID NO: 87107 - protein, 9 aa, Homo sapiens
  misc_feature: Table A; Target 87107; HLA-C*07:04; TDRD12; ENSG00000173809; TAA
YADPDVPEA

SEQ ID NO: 87108 - protein, 9 aa, Homo sapiens
  misc_feature: Table A; Target 87108; HLA-C*12:03; TDRD12; ENSG00000173809; TAA
YADPDVPEA

SEQ ID NO: 87109 - protein, 9 aa, Homo sapiens
  misc_feature: Table A; Target 87109; HLA-C*16:02; TDRD12; ENSG00000173809; TAA
YADPDVPEA

SEQ ID NO: 87110 - protein, 8 aa, Homo sapiens
  misc_feature: Table A; Target 87110; HLA-B*08:01; TDRD12; ENSG00000173809; TAA
YATLNAEM

SEQ ID NO: 87111 - protein, 8 aa, Homo sapiens
  misc_feature: Table A; Target 87111; HLA-B*35:01; TDRD12; ENSG00000173809; TAA
YATLNAEM

SEQ ID NO: 87112 - protein, 8 aa, Homo sapiens
  misc_feature: Table A; Target 87112; HLA-B*35:03; TDRD12; ENSG00000173809; TAA
YATLNAEM

SEQ ID NO: 87113 - protein, 8 aa, Homo sapiens
  misc_feature: Table A; Target 87113; HLA-B*39:01; TDRD12; ENSG00000173809; TAA
YATLNAEM

SEQ ID NO: 87114 - protein, 8 aa, Homo sapiens
  misc_feature: Table A; Target 87114; HLA-B*40:02; TDRD12; ENSG00000173809; TAA
YATLNAEM

SEQ ID NO: 87115 - protein, 8 aa, Homo sapiens
  misc_feature: Table A; Target 87115; HLA-B*46:01; TDRD12; ENSG00000173809; TAA
YATLNAEM

SEQ ID NO: 87116 - protein, 8 aa, Homo sapiens
  misc_feature: Table A; Target 87116; HLA-B*51:01; TDRD12; ENSG00000173809; TAA
YATLNAEM

SEQ ID NO: 87117 - protein, 8 aa, Homo sapiens
  misc_feature: Table A; Target 87117; HLA-B*54:01; TDRD12; ENSG00000173809; TAA
YATLNAEM

SEQ ID NO: 87118 - protein, 8 aa, Homo sapiens
  misc_feature: Table A; Target 87118; HLA-B*55:01; TDRD12; ENSG00000173809; TAA
YATLNAEM

SEQ ID NO: 87119 - protein, 8 aa, Homo sapiens
  misc_feature: Table A; Target 87119; HLA-B*58:01; TDRD12; ENSG00000173809; TAA
YATLNAEM

SEQ ID NO: 87120 - protein, 8 aa, Homo sapiens
  misc_feature: Table A; Target 87120; HLA-C*01:02; TDRD12; ENSG00000173809; TAA
YATLNAEM

SEQ ID NO: 87121 - protein, 8 aa, Homo sapiens
  misc_feature: Table A; Target 87121; HLA-C*02:02; TDRD12; ENSG00000173809; TAA
YATLNAEM

SEQ ID NO: 87122 - protein, 8 aa, Homo sapiens
  misc_feature: Table A; Target 87122; HLA-C*03:03; TDRD12; ENSG00000173809; TAA
YATLNAEM

SEQ ID NO: 87123 - protein, 8 aa, Homo sapiens
  misc_feature: Table A; Target 87123; HLA-C*03:04; TDRD12; ENSG00000173809; TAA
YATLNAEM

SEQ ID NO: 87124 - protein, 8 aa, Homo sapiens
  misc_feature: Table A; Target 87124; HLA-C*05:01; TDRD12; ENSG00000173809; TAA
YATLNAEM

SEQ ID NO: 87125 - protein, 8 aa, Homo sapiens
  misc_feature: Table A; Target 87125; HLA-C*12:03; TDRD12; ENSG00000173809; TAA
YATLNAEM

SEQ ID NO: 87126 - protein, 8 aa, Homo sapiens
  misc_feature: Table A; Target 87126; HLA-C*14:02; TDRD12; ENSG00000173809; TAA
YATLNAEM

SEQ ID NO: 87127 - protein, 8 aa, Homo sapiens
  misc_feature: Table A; Target 87127; HLA-C*16:01; TDRD12; ENSG00000173809; TAA
YATLNAEM

SEQ ID NO: 87128 - protein, 8 aa, Homo sapiens
  misc_feature: Table A; Target 87128; HLA-C*16:02; TDRD12; ENSG00000173809; TAA
YATLNAEM

SEQ ID NO: 87129 - protein, 8 aa, Homo sapiens
  misc_feature: Table A; Target 87129; HLA-C*16:04; TDRD12; ENSG00000173809; TAA
YATLNAEM

SEQ ID NO: 87130 - protein, 11 aa, Homo sapiens
  misc_feature: Table A; Target 87130; HLA-A*01:01; TDRD12; ENSG00000173809; TAA
YATLNAEMNEY

SEQ ID NO: 87131 - protein, 11 aa, Homo sapiens
  misc_feature: Table A; Target 87131; HLA-B*27:02; TDRD12; ENSG00000173809; TAA
YATLNAEMNEY

SEQ ID NO: 87132 - protein, 11 aa, Homo sapiens
  misc_feature: Table A; Target 87132; HLA-B*39:01; TDRD12; ENSG00000173809; TAA
YATLNAEMNEY

SEQ ID NO: 87133 - protein, 11 aa, Homo sapiens
  misc_feature: Table A; Target 87133; HLA-C*16:04; TDRD12; ENSG00000173809; TAA
YATLNAEMNEY

SEQ ID NO: 87134 - protein, 8 aa, Homo sapiens
  misc_feature: Table A; Target 87134; HLA-C*03:03; TDRD12; ENSG00000173809; TAA
YCTKPVTL

SEQ ID NO: 87135 - protein, 8 aa, Homo sapiens
  misc_feature: Table A; Target 87135; HLA-C*03:04; TDRD12; ENSG00000173809; TAA
YCTKPVTL

SEQ ID NO: 87136 - protein, 8 aa, Homo sapiens
  misc_feature: Table A; Target 87136; HLA-C*16:01; TDRD12; ENSG00000173809; TAA
YCTKPVTL

SEQ ID NO: 87137 - protein, 8 aa, Homo sapiens
  misc_feature: Table A; Target 87137; HLA-C*16:02; TDRD12; ENSG00000173809; TAA
YCTKPVTL

SEQ ID NO: 87138 - protein, 8 aa, Homo sapiens
  misc_feature: Table A; Target 87138; HLA-A*30:01; TDRD12; ENSG00000173809; TAA
YEFTAGVL

SEQ ID NO: 87139 - protein, 8 aa, Homo sapiens
  misc_feature: Table A; Target 87139; HLA-B*15:03; TDRD12; ENSG00000173809; TAA
YEFTAGVL

SEQ ID NO: 87140 - protein, 8 aa, Homo sapiens
  misc_feature: Table A; Target 87140; HLA-B*18:01; TDRD12; ENSG00000173809; TAA
YEFTAGVL

SEQ ID NO: 87141 - protein, 8 aa, Homo sapiens
  misc_feature: Table A; Target 87141; HLA-B*37:01; TDRD12; ENSG00000173809; TAA
YEFTAGVL

SEQ ID NO: 87142 - protein, 8 aa, Homo sapiens
  misc_feature: Table A; Target 87142; HLA-B*40:01; TDRD12; ENSG00000173809; TAA
YEFTAGVL

SEQ ID NO: 87143 - protein, 8 aa, Homo sapiens
  misc_feature: Table A; Target 87143; HLA-B*40:02; TDRD12; ENSG00000173809; TAA
YEFTAGVL

SEQ ID NO: 87144 - protein, 8 aa, Homo sapiens
  misc_feature: Table A; Target 87144; HLA-B*49:01; TDRD12; ENSG00000173809; TAA
YEFTAGVL

SEQ ID NO: 87145 - protein, 8 aa, Homo sapiens
  misc_feature: Table A; Target 87145; HLA-C*03:03; TDRD12; ENSG00000173809; TAA
YEFTAGVL

SEQ ID NO: 87146 - protein, 8 aa, Homo sapiens
  misc_feature: Table A; Target 87146; HLA-C*12:03; TDRD12; ENSG00000173809; TAA
YEFTAGVL

SEQ ID NO: 87147 - protein, 10 aa, Homo sapiens
  misc_feature: Table A; Target 87147; HLA-A*30:01; TDRD12; ENSG00000173809; TAA
YEFTAGVLEA

SEQ ID NO: 87148 - protein, 10 aa, Homo sapiens
  misc_feature: Table A; Target 87148; HLA-A*68:02; TDRD12; ENSG00000173809; TAA
YEFTAGVLEA

SEQ ID NO: 87149 - protein, 10 aa, Homo sapiens
  misc_feature: Table A; Target 87149; HLA-B*18:01; TDRD12; ENSG00000173809; TAA
YEFTAGVLEA

SEQ ID NO: 87150 - protein, 10 aa, Homo sapiens
  misc_feature: Table A; Target 87150; HLA-B*40:01; TDRD12; ENSG00000173809; TAA
YEFTAGVLEA

SEQ ID NO: 87151 - protein, 10 aa, Homo sapiens
  misc_feature: Table A; Target 87151; HLA-B*40:02; TDRD12; ENSG00000173809; TAA
YEFTAGVLEA

SEQ ID NO: 87152 - protein, 10 aa, Homo sapiens
  misc_feature: Table A; Target 87152; HLA-B*49:01; TDRD12; ENSG00000173809; TAA
YEFTAGVLEA

SEQ ID NO: 87153 - protein, 10 aa, Homo sapiens
  misc_feature: Table A; Target 87153; HLA-B*54:01; TDRD12; ENSG00000173809; TAA
YEFTAGVLEA

SEQ ID NO: 87154 - protein, 10 aa, Homo sapiens
  misc_feature: Table A; Target 87154; HLA-B*56:01; TDRD12; ENSG00000173809; TAA
YEFTAGVLEA

SEQ ID NO: 87155 - protein, 11 aa, Homo sapiens
  misc_feature: Table A; Target 87155; HLA-B*18:01; TDRD12; ENSG00000173809; TAA
YEFTAGVLEAK

SEQ ID NO: 87156 - protein, 11 aa, Homo sapiens
  misc_feature: Table A; Target 87156; HLA-B*27:02; TDRD12; ENSG00000173809; TAA
YEFTAGVLEAK

SEQ ID NO: 87157 - protein, 11 aa, Homo sapiens
  misc_feature: Table A; Target 87157; HLA-B*49:01; TDRD12; ENSG00000173809; TAA
YEFTAGVLEAK

SEQ ID NO: 87158 - protein, 9 aa, Homo sapiens
  misc_feature: Table A; Target 87158; HLA-A*23:01; TDRD12; ENSG00000173809; TAA
YGLAEKTLF

SEQ ID NO: 87159 - protein, 9 aa, Homo sapiens
  misc_feature: Table A; Target 87159; HLA-A*24:02; TDRD12; ENSG00000173809; TAA
YGLAEKTLF

SEQ ID NO: 87160 - protein, 9 aa, Homo sapiens
  misc_feature: Table A; Target 87160; HLA-C*02:02; TDRD12; ENSG00000173809; TAA
YGLAEKTLF

SEQ ID NO: 87161 - protein, 8 aa, Homo sapiens
  misc_feature: Table A; Target 87161; HLA-B*08:01; TDRD12; ENSG00000173809; TAA
YGNVQQVV

SEQ ID NO: 87162 - protein, 8 aa, Homo sapiens
  misc_feature: Table A; Target 87162; HLA-B*13:02; TDRD12; ENSG00000173809; TAA
YGNVQQVV

SEQ ID NO: 87163 - protein, 8 aa, Homo sapiens
  misc_feature: Table A; Target 87163; HLA-B*40:02; TDRD12; ENSG00000173809; TAA
YGNVQQVV

SEQ ID NO: 87164 - protein, 8 aa, Homo sapiens
  misc_feature: Table A; Target 87164; HLA-B*46:01; TDRD12; ENSG00000173809; TAA
YGNVQQVV

SEQ ID NO: 87165 - protein, 8 aa, Homo sapiens
  misc_feature: Table A; Target 87165; HLA-B*51:01; TDRD12; ENSG00000173809; TAA
YGNVQQVV

SEQ ID NO: 87166 - protein, 8 aa, Homo sapiens
  misc_feature: Table A; Target 87166; HLA-C*03:03; TDRD12; ENSG00000173809; TAA
YGNVQQVV

SEQ ID NO: 87167 - protein, 8 aa, Homo sapiens
  misc_feature: Table A; Target 87167; HLA-C*03:04; TDRD12; ENSG00000173809; TAA
YGNVQQVV

SEQ ID NO: 87168 - protein, 8 aa, Homo sapiens
  misc_feature: Table A; Target 87168; HLA-C*06:02; TDRD12; ENSG00000173809; TAA
YGNVQQVV

SEQ ID NO: 87169 - protein, 8 aa, Homo sapiens
  misc_feature: Table A; Target 87169; HLA-C*07:04; TDRD12; ENSG00000173809; TAA
YGNVQQVV

SEQ ID NO: 87170 - protein, 8 aa, Homo sapiens
  misc_feature: Table A; Target 87170; HLA-C*12:03; TDRD12; ENSG00000173809; TAA
YGNVQQVV

SEQ ID NO: 87171 - protein, 8 aa, Homo sapiens
  misc_feature: Table A; Target 87171; HLA-C*16:02; TDRD12; ENSG00000173809; TAA
YGNVQQVV

SEQ ID NO: 87172 - protein, 8 aa, Homo sapiens
  misc_feature: Table A; Target 87172; HLA-C*16:04; TDRD12; ENSG00000173809; TAA
YGNVQQVV

SEQ ID NO: 87173 - protein, 9 aa, Homo sapiens
  misc_feature: Table A; Target 87173; HLA-B*46:01; TDRD12; ENSG00000173809; TAA
YGNVQQVVH

SEQ ID NO: 87174 - protein, 9 aa, Homo sapiens
  misc_feature: Table A; Target 87174; HLA-C*07:06; TDRD12; ENSG00000173809; TAA
YGNVQQVVH

SEQ ID NO: 87175 - protein, 9 aa, Homo sapiens
  misc_feature: Table A; Target 87175; HLA-A*33:01; TDRD12; ENSG00000173809; TAA
YIHHKIVGK

SEQ ID NO: 87176 - protein, 9 aa, Homo sapiens
  misc_feature: Table A; Target 87176; HLA-B*08:01; TDRD12; ENSG00000173809; TAA
YIHHKIVGK

SEQ ID NO: 87177 - protein, 8 aa, Homo sapiens
  misc_feature: Table A; Target 87177; HLA-A*23:01; TDRD12; ENSG00000173809; TAA
YILNATNY

SEQ ID NO: 87178 - protein, 8 aa, Homo sapiens
  misc_feature: Table A; Target 87178; HLA-A*29:02; TDRD12; ENSG00000173809; TAA
YILNATNY

SEQ ID NO: 87179 - protein, 8 aa, Homo sapiens
  misc_feature: Table A; Target 87179; HLA-A*30:02; TDRD12; ENSG00000173809; TAA
YILNATNY

SEQ ID NO: 87180 - protein, 8 aa, Homo sapiens
  misc_feature: Table A; Target 87180; HLA-A*32:01; TDRD12; ENSG00000173809; TAA
YILNATNY

SEQ ID NO: 87181 - protein, 8 aa, Homo sapiens
  misc_feature: Table A; Target 87181; HLA-B*15:03; TDRD12; ENSG00000173809; TAA
YILNATNY

SEQ ID NO: 87182 - protein, 8 aa, Homo sapiens
  misc_feature: Table A; Target 87182; HLA-B*39:01; TDRD12; ENSG00000173809; TAA
YILNATNY

SEQ ID NO: 87183 - protein, 8 aa, Homo sapiens
  misc_feature: Table A; Target 87183; HLA-B*46:01; TDRD12; ENSG00000173809; TAA
YILNATNY

SEQ ID NO: 87184 - protein, 8 aa, Homo sapiens
  misc_feature: Table A; Target 87184; HLA-B*58:01; TDRD12; ENSG00000173809; TAA
YILNATNY

SEQ ID NO: 87185 - protein, 8 aa, Homo sapiens
  misc_feature: Table A; Target 87185; HLA-C*01:02; TDRD12; ENSG00000173809; TAA
YILNATNY

SEQ ID NO: 87186 - protein, 8 aa, Homo sapiens
  misc_feature: Table A; Target 87186; HLA-C*02:02; TDRD12; ENSG00000173809; TAA
YILNATNY

SEQ ID NO: 87187 - protein, 8 aa, Homo sapiens
  misc_feature: Table A; Target 87187; HLA-C*14:02; TDRD12; ENSG00000173809; TAA
YILNATNY

SEQ ID NO: 87188 - protein, 9 aa, Homo sapiens
  misc_feature: Table A; Target 87188; HLA-A*23:01; TDRD12; ENSG00000173809; TAA
YILNATNYF

SEQ ID NO: 87189 - protein, 9 aa, Homo sapiens
  misc_feature: Table A; Target 87189; HLA-A*24:02; TDRD12; ENSG00000173809; TAA
YILNATNYF

SEQ ID NO: 87190 - protein, 8 aa, Homo sapiens
  misc_feature: Table A; Target 87190; HLA-A*02:01; TDRD12; ENSG00000173809; TAA
YLLPVLTV

SEQ ID NO: 87191 - protein, 8 aa, Homo sapiens
  misc_feature: Table A; Target 87191; HLA-A*02:04; TDRD12; ENSG00000173809; TAA
YLLPVLTV

SEQ ID NO: 87192 - protein, 8 aa, Homo sapiens
  misc_feature: Table A; Target 87192; HLA-A*02:07; TDRD12; ENSG00000173809; TAA
YLLPVLTV

SEQ ID NO: 87193 - protein, 9 aa, Homo sapiens
  misc_feature: Table A; Target 87193; HLA-A*02:01; TDRD12; ENSG00000173809; TAA
YLLPVLTVL

SEQ ID NO: 87194 - protein, 9 aa, Homo sapiens
  misc_feature: Table A; Target 87194; HLA-A*02:03; TDRD12; ENSG00000173809; TAA
YLLPVLTVL

SEQ ID NO: 87195 - protein, 9 aa, Homo sapiens
  misc_feature: Table A; Target 87195; HLA-A*02:04; TDRD12; ENSG00000173809; TAA
YLLPVLTVL

SEQ ID NO: 87196 - protein, 9 aa, Homo sapiens
  misc_feature: Table A; Target 87196; HLA-A*02:07; TDRD12; ENSG00000173809; TAA
YLLPVLTVL

SEQ ID NO: 87197 - protein, 9 aa, Homo sapiens
  misc_feature: Table A; Target 87197; HLA-A*23:01; TDRD12; ENSG00000173809; TAA
YLLPVLTVL

SEQ ID NO: 87198 - protein, 9 aa, Homo sapiens
  misc_feature: Table A; Target 87198; HLA-A*24:02; TDRD12; ENSG00000173809; TAA
YLLPVLTVL

SEQ ID NO: 87199 - protein, 9 aa, Homo sapiens
  misc_feature: Table A; Target 87199; HLA-B*13:02; TDRD12; ENSG00000173809; TAA
YLLPVLTVL

SEQ ID NO: 87200 - protein, 10 aa, Homo sapiens
  misc_feature: Table A; Target 87200; HLA-A*03:01; TDRD12; ENSG00000173809; TAA
YLYVTIKDEK

SEQ ID NO: 87201 - protein, 8 aa, Homo sapiens
  misc_feature: Table A; Target 87201; HLA-B*08:01; TDRD12; ENSG00000173809; TAA
YQKLNSAM

SEQ ID NO: 87202 - protein, 8 aa, Homo sapiens
  misc_feature: Table A; Target 87202; HLA-B*15:01; TDRD12; ENSG00000173809; TAA
YQKLNSAM

SEQ ID NO: 87203 - protein, 8 aa, Homo sapiens
  misc_feature: Table A; Target 87203; HLA-B*15:03; TDRD12; ENSG00000173809; TAA
YQKLNSAM

SEQ ID NO: 87204 - protein, 8 aa, Homo sapiens
  misc_feature: Table A; Target 87204; HLA-B*46:01; TDRD12; ENSG00000173809; TAA
YQKLNSAM

SEQ ID NO: 87205 - protein, 8 aa, Homo sapiens
  misc_feature: Table A; Target 87205; HLA-C*07:04; TDRD12; ENSG00000173809; TAA
YQKLNSAM

SEQ ID NO: 87206 - protein, 8 aa, Homo sapiens
  misc_feature: Table A; Target 87206; HLA-C*03:03; TDRD12; ENSG00000173809; TAA
YSMSSRPL

SEQ ID NO: 87207 - protein, 8 aa, Homo sapiens
  misc_feature: Table A; Target 87207; HLA-C*03:04; TDRD12; ENSG00000173809; TAA
YSMSSRPL

SEQ ID NO: 87208 - protein, 8 aa, Homo sapiens
  misc_feature: Table A; Target 87208; HLA-C*16:01; TDRD12; ENSG00000173809; TAA
YSMSSRPL

SEQ ID NO: 87209 - protein, 8 aa, Homo sapiens
  misc_feature: Table A; Target 87209; HLA-A*31:01; TDRD12; ENSG00000173809; TAA
YSWPPIAR

SEQ ID NO: 87210 - protein, 8 aa, Homo sapiens
  misc_feature: Table A; Target 87210; HLA-C*16:01; TDRD12; ENSG00000173809; TAA
YVTIKDEK

SEQ ID NO: 87211 - protein, 9 aa, Homo sapiens
  misc_feature: Table A; Target 87211; HLA-A*68:02; TDRD12; ENSG00000173809; TAA
YVTIKDEKV

SEQ ID NO: 87212 - protein, 9 aa, Homo sapiens
  misc_feature: Table A; Target 87212; HLA-B*13:02; TDRD12; ENSG00000173809; TAA
YVTIKDEKV

SEQ ID NO: 87213 - protein, 8 aa, Homo sapiens
  misc_feature: Table A; Target 87213; HLA-B*13:02; TFDP3; ENSG00000183434; CTA
AASNIPVV

SEQ ID NO: 87214 - protein, 8 aa, Homo sapiens
  misc_feature: Table A; Target 87214; HLA-C*12:03; TFDP3; ENSG00000183434; CTA
AASNIPVV

SEQ ID NO: 87215 - protein, 8 aa, Homo sapiens
  misc_feature: Table A; Target 87215; HLA-C*16:02; TFDP3; ENSG00000183434; CTA
AASNIPVV

SEQ ID NO: 87216 - protein, 9 aa, Homo sapiens
  misc_feature: Table A; Target 87216; HLA-C*12:03; TFDP3; ENSG00000183434; CTA
AASNIPVVG

SEQ ID NO: 87217 - protein, 10 aa, Homo sapiens
  misc_feature: Table A; Target 87217; HLA-B*40:01; TFDP3; ENSG00000183434; CTA
AEDLKMARNL

SEQ ID NO: 87218 - protein, 10 aa, Homo sapiens
  misc_feature: Table A; Target 87218; HLA-B*44:02; TFDP3; ENSG00000183434; CTA
AEDLKMARNL

SEQ ID NO: 87219 - protein, 10 aa, Homo sapiens
  misc_feature: Table A; Target 87219; HLA-B*44:03; TFDP3; ENSG00000183434; CTA
AEDLKMARNL

SEQ ID NO: 87220 - protein, 8 aa, Homo sapiens
  misc_feature: Table A; Target 87220; HLA-A*31:01; TFDP3; ENSG00000183434; CTA
AFKNLVLR

SEQ ID NO: 87221 - protein, 9 aa, Homo sapiens
  misc_feature: Table A; Target 87221; HLA-B*58:01; TFDP3; ENSG00000183434; CTA
AGSRSNGTW

SEQ ID NO: 87222 - protein, 9 aa, Homo sapiens
  misc_feature: Table A; Target 87222; HLA-B*15:03; TFDP3; ENSG00000183434; CTA
AKYVSLTEA

SEQ ID NO: 87223 - protein, 9 aa, Homo sapiens
  misc_feature: Table A; Target 87223; HLA-A*01:01; TFDP3; ENSG00000183434; CTA
ALEPYVTEM

SEQ ID NO: 87224 - protein, 9 aa, Homo sapiens
  misc_feature: Table A; Target 87224; HLA-A*02:01; TFDP3; ENSG00000183434; CTA
ALEPYVTEM

SEQ ID NO: 87225 - protein, 9 aa, Homo sapiens
  misc_feature: Table A; Target 87225; HLA-A*02:03; TFDP3; ENSG00000183434; CTA
ALEPYVTEM

SEQ ID NO: 87226 - protein, 9 aa, Homo sapiens
  misc_feature: Table A; Target 87226; HLA-A*02:04; TFDP3; ENSG00000183434; CTA
ALEPYVTEM

SEQ ID NO: 87227 - protein, 9 aa, Homo sapiens
  misc_feature: Table A; Target 87227; HLA-A*02:07; TFDP3; ENSG00000183434; CTA
ALEPYVTEM

SEQ ID NO: 87228 - protein, 9 aa, Homo sapiens
  misc_feature: Table A; Target 87228; HLA-A*32:01; TFDP3; ENSG00000183434; CTA
ALEPYVTEM

SEQ ID NO: 87229 - protein, 9 aa, Homo sapiens
  misc_feature: Table A; Target 87229; HLA-B*15:01; TFDP3; ENSG00000183434; CTA
ALEPYVTEM

SEQ ID NO: 87230 - protein, 9 aa, Homo sapiens
  misc_feature: Table A; Target 87230; HLA-B*46:01; TFDP3; ENSG00000183434; CTA
ALEPYVTEM

SEQ ID NO: 87231 - protein, 9 aa, Homo sapiens
  misc_feature: Table A; Target 87231; HLA-B*55:01; TFDP3; ENSG00000183434; CTA
ALEPYVTEM

SEQ ID NO: 87232 - protein, 9 aa, Homo sapiens
  misc_feature: Table A; Target 87232; HLA-C*01:02; TFDP3; ENSG00000183434; CTA
ALEPYVTEM

SEQ ID NO: 87233 - protein, 9 aa, Homo sapiens
  misc_feature: Table A; Target 87233; HLA-C*02:02; TFDP3; ENSG00000183434; CTA
ALEPYVTEM

SEQ ID NO: 87234 - protein, 9 aa, Homo sapiens
  misc_feature: Table A; Target 87234; HLA-C*05:01; TFDP3; ENSG00000183434; CTA
ALEPYVTEM

SEQ ID NO: 87235 - protein, 9 aa, Homo sapiens
  misc_feature: Table A; Target 87235; HLA-C*07:04; TFDP3; ENSG00000183434; CTA
ALEPYVTEM

SEQ ID NO: 87236 - protein, 9 aa, Homo sapiens
  misc_feature: Table A; Target 87236; HLA-C*14:02; TFDP3; ENSG00000183434; CTA
ALEPYVTEM

SEQ ID NO: 87237 - protein, 9 aa, Homo sapiens
  misc_feature: Table A; Target 87237; HLA-C*16:02; TFDP3; ENSG00000183434; CTA
ALEPYVTEM

SEQ ID NO: 87238 - protein, 9 aa, Homo sapiens
  misc_feature: Table A; Target 87238; HLA-A*03:01; TFDP3; ENSG00000183434; CTA
AMNIISREK

SEQ ID NO: 87239 - protein, 9 aa, Homo sapiens
  misc_feature: Table A; Target 87239; HLA-A*03:02; TFDP3; ENSG00000183434; CTA
AMNIISREK

SEQ ID NO: 87240 - protein, 9 aa, Homo sapiens
  misc_feature: Table A; Target 87240; HLA-A*11:01; TFDP3; ENSG00000183434; CTA
AMNIISREK

SEQ ID NO: 87241 - protein, 9 aa, Homo sapiens
  misc_feature: Table A; Target 87241; HLA-A*31:01; TFDP3; ENSG00000183434; CTA
AMNIISREK

SEQ ID NO: 87242 - protein, 9 aa, Homo sapiens
  misc_feature: Table A; Target 87242; HLA-A*26:01; TFDP3; ENSG00000183434; CTA
AQGTFGGVF

SEQ ID NO: 87243 - protein, 9 aa, Homo sapiens
  misc_feature: Table A; Target 87243; HLA-A*30:02; TFDP3; ENSG00000183434; CTA
AQGTFGGVF

SEQ ID NO: 87244 - protein, 9 aa, Homo sapiens
  misc_feature: Table A; Target 87244; HLA-A*32:01; TFDP3; ENSG00000183434; CTA
AQGTFGGVF

SEQ ID NO: 87245 - protein, 9 aa, Homo sapiens
  misc_feature: Table A; Target 87245; HLA-B*13:02; TFDP3; ENSG00000183434; CTA
AQGTFGGVF

SEQ ID NO: 87246 - protein, 9 aa, Homo sapiens
  misc_feature: Table A; Target 87246; HLA-B*15:03; TFDP3; ENSG00000183434; CTA
AQGTFGGVF

SEQ ID NO: 87247 - protein, 9 aa, Homo sapiens
  misc_feature: Table A; Target 87247; HLA-B*27:02; TFDP3; ENSG00000183434; CTA
AQGTFGGVF

SEQ ID NO: 87248 - protein, 9 aa, Homo sapiens
  misc_feature: Table A; Target 87248; HLA-B*27:05; TFDP3; ENSG00000183434; CTA
AQGTFGGVF

SEQ ID NO: 87249 - protein, 9 aa, Homo sapiens
  misc_feature: Table A; Target 87249; HLA-B*37:01; TFDP3; ENSG00000183434; CTA
AQGTFGGVF

SEQ ID NO: 87250 - protein, 9 aa, Homo sapiens
  misc_feature: Table A; Target 87250; HLA-B*38:01; TFDP3; ENSG00000183434; CTA
AQGTFGGVF

SEQ ID NO: 87251 - protein, 9 aa, Homo sapiens
  misc_feature: Table A; Target 87251; HLA-B*39:01; TFDP3; ENSG00000183434; CTA
AQGTFGGVF

SEQ ID NO: 87252 - protein, 9 aa, Homo sapiens
  misc_feature: Table A; Target 87252; HLA-B*44:02; TFDP3; ENSG00000183434; CTA
AQGTFGGVF

SEQ ID NO: 87253 - protein, 9 aa, Homo sapiens
  misc_feature: Table A; Target 87253; HLA-B*44:03; TFDP3; ENSG00000183434; CTA
AQGTFGGVF

SEQ ID NO: 87254 - protein, 9 aa, Homo sapiens
  misc_feature: Table A; Target 87254; HLA-B*46:01; TFDP3; ENSG00000183434; CTA
AQGTFGGVF

SEQ ID NO: 87255 - protein, 9 aa, Homo sapiens
  misc_feature: Table A; Target 87255; HLA-C*02:02; TFDP3; ENSG00000183434; CTA
AQGTFGGVF

SEQ ID NO: 87256 - protein, 9 aa, Homo sapiens
  misc_feature: Table A; Target 87256; HLA-C*04:01; TFDP3; ENSG00000183434; CTA
AQGTFGGVF

SEQ ID NO: 87257 - protein, 9 aa, Homo sapiens
  misc_feature: Table A; Target 87257; HLA-C*07:04; TFDP3; ENSG00000183434; CTA
AQGTFGGVF

SEQ ID NO: 87258 - protein, 9 aa, Homo sapiens
  misc_feature: Table A; Target 87258; HLA-C*12:03; TFDP3; ENSG00000183434; CTA
AQGTFGGVF

SEQ ID NO: 87259 - protein, 9 aa, Homo sapiens
  misc_feature: Table A; Target 87259; HLA-C*16:04; TFDP3; ENSG00000183434; CTA
AQGTFGGVF

SEQ ID NO: 87260 - protein, 9 aa, Homo sapiens
  misc_feature: Table A; Target 87260; HLA-B*13:02; TFDP3; ENSG00000183434; CTA
AQNCQNLRV

SEQ ID NO: 87261 - protein, 9 aa, Homo sapiens
  misc_feature: Table A; Target 87261; HLA-B*27:05; TFDP3; ENSG00000183434; CTA
ARNLVPKAL

SEQ ID NO: 87262 - protein, 9 aa, Homo sapiens
  misc_feature: Table A; Target 87262; HLA-C*16:04; TFDP3; ENSG00000183434; CTA
ARNLVPKAL

SEQ ID NO: 87263 - protein, 9 aa, Homo sapiens
  misc_feature: Table A; Target 87263; HLA-A*01:01; TFDP3; ENSG00000183434; CTA
ASDLTNIAI

SEQ ID NO: 87264 - protein, 9 aa, Homo sapiens
  misc_feature: Table A; Target 87264; HLA-B*38:01; TFDP3; ENSG00000183434; CTA
ASDLTNIAI

SEQ ID NO: 87265 - protein, 9 aa, Homo sapiens
  misc_feature: Table A; Target 87265; HLA-B*40:01; TFDP3; ENSG00000183434; CTA
ASDLTNIAI

SEQ ID NO: 87266 - protein, 9 aa, Homo sapiens
  misc_feature: Table A; Target 87266; HLA-B*58:01; TFDP3; ENSG00000183434; CTA
ASDLTNIAI

SEQ ID NO: 87267 - protein, 9 aa, Homo sapiens
  misc_feature: Table A; Target 87267; HLA-C*05:01; TFDP3; ENSG00000183434; CTA
ASDLTNIAI

SEQ ID NO: 87268 - protein, 11 aa, Homo sapiens
  misc_feature: Table A; Target 87268; HLA-A*01:01; TFDP3; ENSG00000183434; CTA
ASDLTNIAIGM

SEQ ID NO: 87269 - protein, 8 aa, Homo sapiens
  misc_feature: Table A; Target 87269; HLA-C*01:02; TFDP3; ENSG00000183434; CTA
ASPNESAY

SEQ ID NO: 87270 - protein, 11 aa, Homo sapiens
  misc_feature: Table A; Target 87270; HLA-A*11:01; TFDP3; ENSG00000183434; CTA
ASPNESAYDVK

SEQ ID NO: 87271 - protein, 8 aa, Homo sapiens
  misc_feature: Table A; Target 87271; HLA-A*30:02; TFDP3; ENSG00000183434; CTA
ASQNQHSY

SEQ ID NO: 87272 - protein, 8 aa, Homo sapiens
  misc_feature: Table A; Target 87272; HLA-A*32:01; TFDP3; ENSG00000183434; CTA
ASQNQHSY

SEQ ID NO: 87273 - protein, 8 aa, Homo sapiens
  misc_feature: Table A; Target 87273; HLA-B*39:01; TFDP3; ENSG00000183434; CTA
ASQNQHSY

SEQ ID NO: 87274 - protein, 8 aa, Homo sapiens
  misc_feature: Table A; Target 87274; HLA-B*58:01; TFDP3; ENSG00000183434; CTA
ASQNQHSY

SEQ ID NO: 87275 - protein, 8 aa, Homo sapiens
  misc_feature: Table A; Target 87275; HLA-C*01:02; TFDP3; ENSG00000183434; CTA
ASQNQHSY

SEQ ID NO: 87276 - protein, 8 aa, Homo sapiens
  misc_feature: Table A; Target 87276; HLA-C*14:02; TFDP3; ENSG00000183434; CTA
ASQNQHSY

SEQ ID NO: 87277 - protein, 8 aa, Homo sapiens
  misc_feature: Table A; Target 87277; HLA-C*16:01; TFDP3; ENSG00000183434; CTA
ASQNQHSY

SEQ ID NO: 87278 - protein, 8 aa, Homo sapiens
  misc_feature: Table A; Target 87278; HLA-C*16:02; TFDP3; ENSG00000183434; CTA
ASQNQHSY

SEQ ID NO: 87279 - protein, 9 aa, Homo sapiens
  misc_feature: Table A; Target 87279; HLA-A*01:01; TFDP3; ENSG00000183434; CTA
ATSSGGSQY

SEQ ID NO: 87280 - protein, 9 aa, Homo sapiens
  misc_feature: Table A; Target 87280; HLA-A*11:01; TFDP3; ENSG00000183434; CTA
ATSSGGSQY

SEQ ID NO: 87281 - protein, 9 aa, Homo sapiens
  misc_feature: Table A; Target 87281; HLA-A*25:01; TFDP3; ENSG00000183434; CTA
ATSSGGSQY

SEQ ID NO: 87282 - protein, 9 aa, Homo sapiens
  misc_feature: Table A; Target 87282; HLA-A*26:01; TFDP3; ENSG00000183434; CTA
ATSSGGSQY

SEQ ID NO: 87283 - protein, 9 aa, Homo sapiens
  misc_feature: Table A; Target 87283; HLA-A*29:02; TFDP3; ENSG00000183434; CTA
ATSSGGSQY

SEQ ID NO: 87284 - protein, 9 aa, Homo sapiens
  misc_feature: Table A; Target 87284; HLA-A*30:02; TFDP3; ENSG00000183434; CTA
ATSSGGSQY

SEQ ID NO: 87285 - protein, 9 aa, Homo sapiens
  misc_feature: Table A; Target 87285; HLA-A*32:01; TFDP3; ENSG00000183434; CTA
ATSSGGSQY

SEQ ID NO: 87286 - protein, 9 aa, Homo sapiens
  misc_feature: Table A; Target 87286; HLA-B*15:01; TFDP3; ENSG00000183434; CTA
ATSSGGSQY

SEQ ID NO: 87287 - protein, 9 aa, Homo sapiens
  misc_feature: Table A; Target 87287; HLA-B*15:03; TFDP3; ENSG00000183434; CTA
ATSSGGSQY

SEQ ID NO: 87288 - protein, 9 aa, Homo sapiens
  misc_feature: Table A; Target 87288; HLA-B*39:01; TFDP3; ENSG00000183434; CTA
ATSSGGSQY

SEQ ID NO: 87289 - protein, 9 aa, Homo sapiens
  misc_feature: Table A; Target 87289; HLA-B*46:01; TFDP3; ENSG00000183434; CTA
ATSSGGSQY

SEQ ID NO: 87290 - protein, 9 aa, Homo sapiens
  misc_feature: Table A; Target 87290; HLA-B*58:01; TFDP3; ENSG00000183434; CTA
ATSSGGSQY

SEQ ID NO: 87291 - protein, 9 aa, Homo sapiens
  misc_feature: Table A; Target 87291; HLA-C*01:02; TFDP3; ENSG00000183434; CTA
ATSSGGSQY

SEQ ID NO: 87292 - protein, 9 aa, Homo sapiens
  misc_feature: Table A; Target 87292; HLA-C*02:02; TFDP3; ENSG00000183434; CTA
ATSSGGSQY

SEQ ID NO: 87293 - protein, 9 aa, Homo sapiens
  misc_feature: Table A; Target 87293; HLA-C*07:04; TFDP3; ENSG00000183434; CTA
ATSSGGSQY

SEQ ID NO: 87294 - protein, 9 aa, Homo sapiens
  misc_feature: Table A; Target 87294; HLA-C*14:02; TFDP3; ENSG00000183434; CTA
ATSSGGSQY

SEQ ID NO: 87295 - protein, 9 aa, Homo sapiens
  misc_feature: Table A; Target 87295; HLA-C*16:01; TFDP3; ENSG00000183434; CTA
ATSSGGSQY

SEQ ID NO: 87296 - protein, 9 aa, Homo sapiens
  misc_feature: Table A; Target 87296; HLA-C*16:02; TFDP3; ENSG00000183434; CTA
ATSSGGSQY

SEQ ID NO: 87297 - protein, 9 aa, Homo sapiens
  misc_feature: Table A; Target 87297; HLA-C*16:04; TFDP3; ENSG00000183434; CTA
ATSSGGSQY

SEQ ID NO: 87298 - protein, 9 aa, Homo sapiens
  misc_feature: Table A; Target 87298; HLA-A*31:01; TFDP3; ENSG00000183434; CTA
AYDVKNIKR

SEQ ID NO: 87299 - protein, 9 aa, Homo sapiens
  misc_feature: Table A; Target 87299; HLA-A*33:03; TFDP3; ENSG00000183434; CTA
AYDVKNIKR

SEQ ID NO: 87300 - protein, 9 aa, Homo sapiens
  misc_feature: Table A; Target 87300; HLA-C*04:01; TFDP3; ENSG00000183434; CTA
AYDVKNIKR

SEQ ID NO: 87301 - protein, 10 aa, Homo sapiens
  misc_feature: Table A; Target 87301; HLA-A*01:01; TFDP3; ENSG00000183434; CTA
CSISDDKSEY

SEQ ID NO: 87302 - protein, 10 aa, Homo sapiens
  misc_feature: Table A; Target 87302; HLA-A*30:02; TFDP3; ENSG00000183434; CTA
CSISDDKSEY

SEQ ID NO: 87303 - protein, 10 aa, Homo sapiens
  misc_feature: Table A; Target 87303; HLA-B*15:01; TFDP3; ENSG00000183434; CTA
CSISDDKSEY

SEQ ID NO: 87304 - protein, 8 aa, Homo sapiens
  misc_feature: Table A; Target 87304; HLA-B*51:01; TFDP3; ENSG00000183434; CTA
DALNVLMA

SEQ ID NO: 87305 - protein, 8 aa, Homo sapiens
  misc_feature: Table A; Target 87305; HLA-B*54:01; TFDP3; ENSG00000183434; CTA
DALNVLMA

SEQ ID NO: 87306 - protein, 9 aa, Homo sapiens
  misc_feature: Table A; Target 87306; HLA-A*23:01; TFDP3; ENSG00000183434; CTA
DALNVLMAM

SEQ ID NO: 87307 - protein, 9 aa, Homo sapiens
  misc_feature: Table A; Target 87307; HLA-A*25:01; TFDP3; ENSG00000183434; CTA
DALNVLMAM

SEQ ID NO: 87308 - protein, 9 aa, Homo sapiens
  misc_feature: Table A; Target 87308; HLA-A*26:01; TFDP3; ENSG00000183434; CTA
DALNVLMAM

SEQ ID NO: 87309 - protein, 9 aa, Homo sapiens
  misc_feature: Table A; Target 87309; HLA-A*33:01; TFDP3; ENSG00000183434; CTA
DALNVLMAM

SEQ ID NO: 87310 - protein, 9 aa, Homo sapiens
  misc_feature: Table A; Target 87310; HLA-A*33:03; TFDP3; ENSG00000183434; CTA
DALNVLMAM

SEQ ID NO: 87311 - protein, 9 aa, Homo sapiens
  misc_feature: Table A; Target 87311; HLA-B*18:01; TFDP3; ENSG00000183434; CTA
DALNVLMAM

SEQ ID NO: 87312 - protein, 9 aa, Homo sapiens
  misc_feature: Table A; Target 87312; HLA-B*35:01; TFDP3; ENSG00000183434; CTA
DALNVLMAM

SEQ ID NO: 87313 - protein, 9 aa, Homo sapiens
  misc_feature: Table A; Target 87313; HLA-B*35:03; TFDP3; ENSG00000183434; CTA
DALNVLMAM

SEQ ID NO: 87314 - protein, 9 aa, Homo sapiens
  misc_feature: Table A; Target 87314; HLA-B*46:01; TFDP3; ENSG00000183434; CTA
DALNVLMAM

SEQ ID NO: 87315 - protein, 9 aa, Homo sapiens
  misc_feature: Table A; Target 87315; HLA-B*51:01; TFDP3; ENSG00000183434; CTA
DALNVLMAM

SEQ ID NO: 87316 - protein, 9 aa, Homo sapiens
  misc_feature: Table A; Target 87316; HLA-C*03:03; TFDP3; ENSG00000183434; CTA
DALNVLMAM

SEQ ID NO: 87317 - protein, 9 aa, Homo sapiens
  misc_feature: Table A; Target 87317; HLA-C*07:06; TFDP3; ENSG00000183434; CTA
DALNVLMAM

SEQ ID NO: 87318 - protein, 9 aa, Homo sapiens
  misc_feature: Table A; Target 87318; HLA-A*33:01; TFDP3; ENSG00000183434; CTA
DDKSEYLFK

SEQ ID NO: 87319 - protein, 8 aa, Homo sapiens
  misc_feature: Table A; Target 87319; HLA-B*18:01; TFDP3; ENSG00000183434; CTA
DDTEVLMW

SEQ ID NO: 87320 - protein, 9 aa, Homo sapiens
  misc_feature: Table A; Target 87320; HLA-B*18:01; TFDP3; ENSG00000183434; CTA
DENQTSRPV

SEQ ID NO: 87321 - protein, 10 aa, Homo sapiens
  misc_feature: Table A; Target 87321; HLA-B*18:01; TFDP3; ENSG00000183434; CTA
DENQTSRPVA

SEQ ID NO: 87322 - protein, 11 aa, Homo sapiens
  misc_feature: Table A; Target 87322; HLA-A*30:01; TFDP3; ENSG00000183434; CTA
DENQTSRPVAV

SEQ ID NO: 87323 - protein, 11 aa, Homo sapiens
  misc_feature: Table A; Target 87323; HLA-B*18:01; TFDP3; ENSG00000183434; CTA
DENQTSRPVAV

SEQ ID NO: 87324 - protein, 8 aa, Homo sapiens
  misc_feature: Table A; Target 87324; HLA-B*08:01; TFDP3; ENSG00000183434; CTA
DLKMARNL

SEQ ID NO: 87325 - protein, 11 aa, Homo sapiens
  misc_feature: Table A; Target 87325; HLA-A*33:01; TFDP3; ENSG00000183434; CTA
DLKMARNLVPK

SEQ ID NO: 87326 - protein, 9 aa, Homo sapiens
  misc_feature: Table A; Target 87326; HLA-A*26:01; TFDP3; ENSG00000183434; CTA
DLTNIAIGM

SEQ ID NO: 87327 - protein, 9 aa, Homo sapiens
  misc_feature: Table A; Target 87327; HLA-A*68:01; TFDP3; ENSG00000183434; CTA
DLTNIAIGM

SEQ ID NO: 87328 - protein, 9 aa, Homo sapiens
  misc_feature: Table A; Target 87328; HLA-A*68:02; TFDP3; ENSG00000183434; CTA
DLTNIAIGM

SEQ ID NO: 87329 - protein, 9 aa, Homo sapiens
  misc_feature: Table A; Target 87329; HLA-C*07:04; TFDP3; ENSG00000183434; CTA
DLTNIAIGM

SEQ ID NO: 87330 - protein, 8 aa, Homo sapiens
  misc_feature: Table A; Target 87330; HLA-B*08:01; TFDP3; ENSG00000183434; CTA
DQQVVIGM

SEQ ID NO: 87331 - protein, 8 aa, Homo sapiens
  misc_feature: Table A; Target 87331; HLA-B*18:01; TFDP3; ENSG00000183434; CTA
DQQVVIGM

SEQ ID NO: 87332 - protein, 8 aa, Homo sapiens
  misc_feature: Table A; Target 87332; HLA-A*33:01; TFDP3; ENSG00000183434; CTA
DVKNIKRR

SEQ ID NO: 87333 - protein, 8 aa, Homo sapiens
  misc_feature: Table A; Target 87333; HLA-B*51:01; TFDP3; ENSG00000183434; CTA
EANEELKV

SEQ ID NO: 87334 - protein, 9 aa, Homo sapiens
  misc_feature: Table A; Target 87334; HLA-A*25:01; TFDP3; ENSG00000183434; CTA
EANEELKVL

SEQ ID NO: 87335 - protein, 9 aa, Homo sapiens
  misc_feature: Table A; Target 87335; HLA-A*33:01; TFDP3; ENSG00000183434; CTA
EANEELKVL

SEQ ID NO: 87336 - protein, 9 aa, Homo sapiens
  misc_feature: Table A; Target 87336; HLA-A*33:03; TFDP3; ENSG00000183434; CTA
EANEELKVL

SEQ ID NO: 87337 - protein, 9 aa, Homo sapiens
  misc_feature: Table A; Target 87337; HLA-B*35:03; TFDP3; ENSG00000183434; CTA
EANEELKVL

SEQ ID NO: 87338 - protein, 9 aa, Homo sapiens
  misc_feature: Table A; Target 87338; HLA-C*12:03; TFDP3; ENSG00000183434; CTA
EANEELKVL

SEQ ID NO: 87339 - protein, 10 aa, Homo sapiens
  misc_feature: Table A; Target 87339; HLA-A*26:01; TFDP3; ENSG00000183434; CTA
EANEELKVLM

SEQ ID NO: 87340 - protein, 10 aa, Homo sapiens
  misc_feature: Table A; Target 87340; HLA-A*33:03; TFDP3; ENSG00000183434; CTA
EANEELKVLM

SEQ ID NO: 87341 - protein, 10 aa, Homo sapiens
  misc_feature: Table A; Target 87341; HLA-C*07:06; TFDP3; ENSG00000183434; CTA
EANEELKVLM

SEQ ID NO: 87342 - protein, 9 aa, Homo sapiens
  misc_feature: Table A; Target 87342; HLA-B*40:01; TFDP3; ENSG00000183434; CTA
EEQVSQRPL

SEQ ID NO: 87343 - protein, 9 aa, Homo sapiens
  misc_feature: Table A; Target 87343; HLA-B*44:02; TFDP3; ENSG00000183434; CTA
EEQVSQRPL

SEQ ID NO: 87344 - protein, 9 aa, Homo sapiens
  misc_feature: Table A; Target 87344; HLA-B*44:03; TFDP3; ENSG00000183434; CTA
EEQVSQRPL

SEQ ID NO: 87345 - protein, 9 aa, Homo sapiens
  misc_feature: Table A; Target 87345; HLA-A*25:01; TFDP3; ENSG00000183434; CTA
EIHDDTEVL

SEQ ID NO: 87346 - protein, 9 aa, Homo sapiens
  misc_feature: Table A; Target 87346; HLA-B*35:03; TFDP3; ENSG00000183434; CTA
EIHDDTEVL

SEQ ID NO: 87347 - protein, 11 aa, Homo sapiens
  misc_feature: Table A; Target 87347; HLA-A*25:01; TFDP3; ENSG00000183434; CTA
EIHDDTEVLMW

SEQ ID NO: 87348 - protein, 10 aa, Homo sapiens
  misc_feature: Table A; Target 87348; HLA-A*68:02; TFDP3; ENSG00000183434; CTA
ELQQLILQQI

SEQ ID NO: 87349 - protein, 9 aa, Homo sapiens
  misc_feature: Table A; Target 87349; HLA-B*08:01; TFDP3; ENSG00000183434; CTA
ELVAKFRAA

SEQ ID NO: 87350 - protein, 10 aa, Homo sapiens
  misc_feature: Table A; Target 87350; HLA-A*26:01; TFDP3; ENSG00000183434; CTA
EMAQGTFGGV

SEQ ID NO: 87351 - protein, 11 aa, Homo sapiens
  misc_feature: Table A; Target 87351; HLA-A*25:01; TFDP3; ENSG00000183434; CTA
EMAQGTFGGVF

SEQ ID NO: 87352 - protein, 11 aa, Homo sapiens
  misc_feature: Table A; Target 87352; HLA-A*26:01; TFDP3; ENSG00000183434; CTA
EMAQGTFGGVF

SEQ ID NO: 87353 - protein, 11 aa, Homo sapiens
  misc_feature: Table A; Target 87353; HLA-A*33:01; TFDP3; ENSG00000183434; CTA
EMAQGTFGGVF

SEQ ID NO: 87354 - protein, 8 aa, Homo sapiens
  misc_feature: Table A; Target 87354; HLA-B*51:01; TFDP3; ENSG00000183434; CTA
EPYVTEMA

SEQ ID NO: 87355 - protein, 8 aa, Homo sapiens
  misc_feature: Table A; Target 87355; HLA-B*54:01; TFDP3; ENSG00000183434; CTA
EPYVTEMA

SEQ ID NO: 87356 - protein, 8 aa, Homo sapiens
  misc_feature: Table A; Target 87356; HLA-B*56:01; TFDP3; ENSG00000183434; CTA
EPYVTEMA

SEQ ID NO: 87357 - protein, 9 aa, Homo sapiens
  misc_feature: Table A; Target 87357; HLA-A*68:02; TFDP3; ENSG00000183434; CTA
ESAYDVKNI

SEQ ID NO: 87358 - protein, 10 aa, Homo sapiens
  misc_feature: Table A; Target 87358; HLA-A*68:01; TFDP3; ENSG00000183434; CTA
ESAYDVKNIK

SEQ ID NO: 87359 - protein, 10 aa, Homo sapiens
  misc_feature: Table A; Target 87359; HLA-C*07:06; TFDP3; ENSG00000183434; CTA
ESAYDVKNIK

SEQ ID NO: 87360 - protein, 11 aa, Homo sapiens
  misc_feature: Table A; Target 87360; HLA-A*33:03; TFDP3; ENSG00000183434; CTA
ESAYDVKNIKR

SEQ ID NO: 87361 - protein, 11 aa, Homo sapiens
  misc_feature: Table A; Target 87361; HLA-A*68:01; TFDP3; ENSG00000183434; CTA
ESAYDVKNIKR

SEQ ID NO: 87362 - protein, 9 aa, Homo sapiens
  misc_feature: Table A; Target 87362; HLA-A*03:02; TFDP3; ENSG00000183434; CTA
EVVGELVAK

SEQ ID NO: 87363 - protein, 9 aa, Homo sapiens
  misc_feature: Table A; Target 87363; HLA-A*11:01; TFDP3; ENSG00000183434; CTA
EVVGELVAK

SEQ ID NO: 87364 - protein, 9 aa, Homo sapiens
  misc_feature: Table A; Target 87364; HLA-A*25:01; TFDP3; ENSG00000183434; CTA
EVVGELVAK

SEQ ID NO: 87365 - protein, 9 aa, Homo sapiens
  misc_feature: Table A; Target 87365; HLA-A*26:01; TFDP3; ENSG00000183434; CTA
EVVGELVAK

SEQ ID NO: 87366 - protein, 9 aa, Homo sapiens
  misc_feature: Table A; Target 87366; HLA-A*33:01; TFDP3; ENSG00000183434; CTA
EVVGELVAK

SEQ ID NO: 87367 - protein, 9 aa, Homo sapiens
  misc_feature: Table A; Target 87367; HLA-A*33:03; TFDP3; ENSG00000183434; CTA
EVVGELVAK

SEQ ID NO: 87368 - protein, 9 aa, Homo sapiens
  misc_feature: Table A; Target 87368; HLA-A*68:02; TFDP3; ENSG00000183434; CTA
EVVGELVAK

SEQ ID NO: 87369 - protein, 9 aa, Homo sapiens
  misc_feature: Table A; Target 87369; HLA-C*07:06; TFDP3; ENSG00000183434; CTA
EVVGELVAK

SEQ ID NO: 87370 - protein, 10 aa, Homo sapiens
  misc_feature: Table A; Target 87370; HLA-A*25:01; TFDP3; ENSG00000183434; CTA
EVVGELVAKF

SEQ ID NO: 87371 - protein, 10 aa, Homo sapiens
  misc_feature: Table A; Target 87371; HLA-A*29:02; TFDP3; ENSG00000183434; CTA
EVVGELVAKF

SEQ ID NO: 87372 - protein, 10 aa, Homo sapiens
  misc_feature: Table A; Target 87372; HLA-A*33:01; TFDP3; ENSG00000183434; CTA
EVVGELVAKF

SEQ ID NO: 87373 - protein, 10 aa, Homo sapiens
  misc_feature: Table A; Target 87373; HLA-A*33:03; TFDP3; ENSG00000183434; CTA
EVVGELVAKF

SEQ ID NO: 87374 - protein, 10 aa, Homo sapiens
  misc_feature: Table A; Target 87374; HLA-A*68:02; TFDP3; ENSG00000183434; CTA
EVVGELVAKF

SEQ ID NO: 87375 - protein, 10 aa, Homo sapiens
  misc_feature: Table A; Target 87375; HLA-B*35:01; TFDP3; ENSG00000183434; CTA
EVVGELVAKF

SEQ ID NO: 87376 - protein, 10 aa, Homo sapiens
  misc_feature: Table A; Target 87376; HLA-B*44:02; TFDP3; ENSG00000183434; CTA
EVVGELVAKF

SEQ ID NO: 87377 - protein, 10 aa, Homo sapiens
  misc_feature: Table A; Target 87377; HLA-B*44:03; TFDP3; ENSG00000183434; CTA
EVVGELVAKF

SEQ ID NO: 87378 - protein, 10 aa, Homo sapiens
  misc_feature: Table A; Target 87378; HLA-B*57:01; TFDP3; ENSG00000183434; CTA
EVVGELVAKF

SEQ ID NO: 87379 - protein, 10 aa, Homo sapiens
  misc_feature: Table A; Target 87379; HLA-C*07:06; TFDP3; ENSG00000183434; CTA
EVVGELVAKF

SEQ ID NO: 87380 - protein, 11 aa, Homo sapiens
  misc_feature: Table A; Target 87380; HLA-A*33:01; TFDP3; ENSG00000183434; CTA
EVVGELVAKFR

SEQ ID NO: 87381 - protein, 11 aa, Homo sapiens
  misc_feature: Table A; Target 87381; HLA-A*33:03; TFDP3; ENSG00000183434; CTA
EVVGELVAKFR

SEQ ID NO: 87382 - protein, 11 aa, Homo sapiens
  misc_feature: Table A; Target 87382; HLA-A*68:01; TFDP3; ENSG00000183434; CTA
EVVGELVAKFR

SEQ ID NO: 87383 - protein, 11 aa, Homo sapiens
  misc_feature: Table A; Target 87383; HLA-C*07:06; TFDP3; ENSG00000183434; CTA
EVVGELVAKFR

SEQ ID NO: 87384 - protein, 10 aa, Homo sapiens
  misc_feature: Table A; Target 87384; HLA-A*24:02; TFDP3; ENSG00000183434; CTA
EYLFKFNSSF

SEQ ID NO: 87385 - protein, 9 aa, Homo sapiens
  misc_feature: Table A; Target 87385; HLA-A*01:01; TFDP3; ENSG00000183434; CTA
FASQNQHSY

SEQ ID NO: 87386 - protein, 9 aa, Homo sapiens
  misc_feature: Table A; Target 87386; HLA-A*25:01; TFDP3; ENSG00000183434; CTA
FASQNQHSY

SEQ ID NO: 87387 - protein, 9 aa, Homo sapiens
  misc_feature: Table A; Target 87387; HLA-A*26:01; TFDP3; ENSG00000183434; CTA
FASQNQHSY

SEQ ID NO: 87388 - protein, 9 aa, Homo sapiens
  misc_feature: Table A; Target 87388; HLA-A*29:02; TFDP3; ENSG00000183434; CTA
FASQNQHSY

SEQ ID NO: 87389 - protein, 9 aa, Homo sapiens
  misc_feature: Table A; Target 87389; HLA-A*30:02; TFDP3; ENSG00000183434; CTA
FASQNQHSY

SEQ ID NO: 87390 - protein, 9 aa, Homo sapiens
  misc_feature: Table A; Target 87390; HLA-A*32:01; TFDP3; ENSG00000183434; CTA
FASQNQHSY

SEQ ID NO: 87391 - protein, 9 aa, Homo sapiens
  misc_feature: Table A; Target 87391; HLA-B*15:01; TFDP3; ENSG00000183434; CTA
FASQNQHSY

SEQ ID NO: 87392 - protein, 9 aa, Homo sapiens
  misc_feature: Table A; Target 87392; HLA-B*15:03; TFDP3; ENSG00000183434; CTA
FASQNQHSY

SEQ ID NO: 87393 - protein, 9 aa, Homo sapiens
  misc_feature: Table A; Target 87393; HLA-B*18:01; TFDP3; ENSG00000183434; CTA
FASQNQHSY

SEQ ID NO: 87394 - protein, 9 aa, Homo sapiens
  misc_feature: Table A; Target 87394; HLA-B*27:05; TFDP3; ENSG00000183434; CTA
FASQNQHSY

SEQ ID NO: 87395 - protein, 9 aa, Homo sapiens
  misc_feature: Table A; Target 87395; HLA-B*35:01; TFDP3; ENSG00000183434; CTA
FASQNQHSY

SEQ ID NO: 87396 - protein, 9 aa, Homo sapiens
  misc_feature: Table A; Target 87396; HLA-B*39:01; TFDP3; ENSG00000183434; CTA
FASQNQHSY

SEQ ID NO: 87397 - protein, 9 aa, Homo sapiens
  misc_feature: Table A; Target 87397; HLA-B*44:03; TFDP3; ENSG00000183434; CTA
FASQNQHSY

SEQ ID NO: 87398 - protein, 9 aa, Homo sapiens
  misc_feature: Table A; Target 87398; HLA-B*46:01; TFDP3; ENSG00000183434; CTA
FASQNQHSY

SEQ ID NO: 87399 - protein, 9 aa, Homo sapiens
  misc_feature: Table A; Target 87399; HLA-B*54:01; TFDP3; ENSG00000183434; CTA
FASQNQHSY

SEQ ID NO: 87400 - protein, 9 aa, Homo sapiens
  misc_feature: Table A; Target 87400; HLA-B*55:01; TFDP3; ENSG00000183434; CTA
FASQNQHSY

SEQ ID NO: 87401 - protein, 9 aa, Homo sapiens
  misc_feature: Table A; Target 87401; HLA-B*57:01; TFDP3; ENSG00000183434; CTA
FASQNQHSY

SEQ ID NO: 87402 - protein, 9 aa, Homo sapiens
  misc_feature: Table A; Target 87402; HLA-B*58:01; TFDP3; ENSG00000183434; CTA
FASQNQHSY

SEQ ID NO: 87403 - protein, 9 aa, Homo sapiens
  misc_feature: Table A; Target 87403; HLA-C*01:02; TFDP3; ENSG00000183434; CTA
FASQNQHSY

SEQ ID NO: 87404 - protein, 9 aa, Homo sapiens
  misc_feature: Table A; Target 87404; HLA-C*02:02; TFDP3; ENSG00000183434; CTA
FASQNQHSY

SEQ ID NO: 87405 - protein, 9 aa, Homo sapiens
  misc_feature: Table A; Target 87405; HLA-C*03:03; TFDP3; ENSG00000183434; CTA
FASQNQHSY

SEQ ID NO: 87406 - protein, 9 aa, Homo sapiens
  misc_feature: Table A; Target 87406; HLA-C*03:04; TFDP3; ENSG00000183434; CTA
FASQNQHSY

SEQ ID NO: 87407 - protein, 9 aa, Homo sapiens
  misc_feature: Table A; Target 87407; HLA-C*07:04; TFDP3; ENSG00000183434; CTA
FASQNQHSY

SEQ ID NO: 87408 - protein, 9 aa, Homo sapiens
  misc_feature: Table A; Target 87408; HLA-C*07:06; TFDP3; ENSG00000183434; CTA
FASQNQHSY

SEQ ID NO: 87409 - protein, 9 aa, Homo sapiens
  misc_feature: Table A; Target 87409; HLA-C*12:03; TFDP3; ENSG00000183434; CTA
FASQNQHSY

SEQ ID NO: 87410 - protein, 9 aa, Homo sapiens
  misc_feature: Table A; Target 87410; HLA-C*14:02; TFDP3; ENSG00000183434; CTA
FASQNQHSY

SEQ ID NO: 87411 - protein, 9 aa, Homo sapiens
  misc_feature: Table A; Target 87411; HLA-C*16:02; TFDP3; ENSG00000183434; CTA
FASQNQHSY

SEQ ID NO: 87412 - protein, 9 aa, Homo sapiens
  misc_feature: Table A; Target 87412; HLA-C*16:04; TFDP3; ENSG00000183434; CTA
FASQNQHSY

SEQ ID NO: 87413 - protein, 9 aa, Homo sapiens
  misc_feature: Table A; Target 87413; HLA-A*30:01; TFDP3; ENSG00000183434; CTA
FEIHDDTEV

SEQ ID NO: 87414 - protein, 9 aa, Homo sapiens
  misc_feature: Table A; Target 87414; HLA-B*40:01; TFDP3; ENSG00000183434; CTA
FEIHDDTEV

SEQ ID NO: 87415 - protein, 9 aa, Homo sapiens
  misc_feature: Table A; Target 87415; HLA-B*40:02; TFDP3; ENSG00000183434; CTA
FEIHDDTEV

SEQ ID NO: 87416 - protein, 9 aa, Homo sapiens
  misc_feature: Table A; Target 87416; HLA-B*49:01; TFDP3; ENSG00000183434; CTA
FEIHDDTEV

SEQ ID NO: 87417 - protein, 10 aa, Homo sapiens
  misc_feature: Table A; Target 87417; HLA-A*30:01; TFDP3; ENSG00000183434; CTA
FEIHDDTEVL

SEQ ID NO: 87418 - protein, 10 aa, Homo sapiens
  misc_feature: Table A; Target 87418; HLA-B*40:01; TFDP3; ENSG00000183434; CTA
FEIHDDTEVL

SEQ ID NO: 87419 - protein, 10 aa, Homo sapiens
  misc_feature: Table A; Target 87419; HLA-B*40:02; TFDP3; ENSG00000183434; CTA
FEIHDDTEVL

SEQ ID NO: 87420 - protein, 10 aa, Homo sapiens
  misc_feature: Table A; Target 87420; HLA-B*49:01; TFDP3; ENSG00000183434; CTA
FEIHDDTEVL

SEQ ID NO: 87421 - protein, 11 aa, Homo sapiens
  misc_feature: Table A; Target 87421; HLA-B*40:01; TFDP3; ENSG00000183434; CTA
FEIHDDTEVLM

SEQ ID NO: 87422 - protein, 8 aa, Homo sapiens
  misc_feature: Table A; Target 87422; HLA-B*46:01; TFDP3; ENSG00000183434; CTA
FGGVFTTA

SEQ ID NO: 87423 - protein, 8 aa, Homo sapiens
  misc_feature: Table A; Target 87423; HLA-B*54:01; TFDP3; ENSG00000183434; CTA
FGGVFTTA

SEQ ID NO: 87424 - protein, 8 aa, Homo sapiens
  misc_feature: Table A; Target 87424; HLA-B*40:01; TFDP3; ENSG00000183434; CTA
GEKNGMGL

SEQ ID NO: 87425 - protein, 8 aa, Homo sapiens
  misc_feature: Table A; Target 87425; HLA-B*40:02; TFDP3; ENSG00000183434; CTA
GEKNGMGL

SEQ ID NO: 87426 - protein, 9 aa, Homo sapiens
  misc_feature: Table A; Target 87426; HLA-B*49:01; TFDP3; ENSG00000183434; CTA
GEKNGMGLC

SEQ ID NO: 87427 - protein, 9 aa, Homo sapiens
  misc_feature: Table A; Target 87427; HLA-B*15:03; TFDP3; ENSG00000183434; CTA
GKQLLPKTF

SEQ ID NO: 87428 - protein, 11 aa, Homo sapiens
  misc_feature: Table A; Target 87428; HLA-A*30:01; TFDP3; ENSG00000183434; CTA
GQSSVNIDQQV

SEQ ID NO: 87429 - protein, 11 aa, Homo sapiens
  misc_feature: Table A; Target 87429; HLA-B*13:02; TFDP3; ENSG00000183434; CTA
GQSSVNIDQQV

SEQ ID NO: 87430 - protein, 11 aa, Homo sapiens
  misc_feature: Table A; Target 87430; HLA-B*27:05; TFDP3; ENSG00000183434; CTA
GQSSVNIDQQV

SEQ ID NO: 87431 - protein, 11 aa, Homo sapiens
  misc_feature: Table A; Target 87431; HLA-B*38:01; TFDP3; ENSG00000183434; CTA
GQSSVNIDQQV

SEQ ID NO: 87432 - protein, 11 aa, Homo sapiens
  misc_feature: Table A; Target 87432; HLA-C*06:02; TFDP3; ENSG00000183434; CTA
GQSSVNIDQQV

SEQ ID NO: 87433 - protein, 9 aa, Homo sapiens
  misc_feature: Table A; Target 87433; HLA-A*11:01; TFDP3; ENSG00000183434; CTA
GTFGGVFTT

SEQ ID NO: 87434 - protein, 9 aa, Homo sapiens
  misc_feature: Table A; Target 87434; HLA-A*32:01; TFDP3; ENSG00000183434; CTA
GTFGGVFTT

SEQ ID NO: 87435 - protein, 9 aa, Homo sapiens
  misc_feature: Table A; Target 87435; HLA-B*13:02; TFDP3; ENSG00000183434; CTA
GTFGGVFTT

SEQ ID NO: 87436 - protein, 9 aa, Homo sapiens
  misc_feature: Table A; Target 87436; HLA-B*27:05; TFDP3; ENSG00000183434; CTA
GTFGGVFTT

SEQ ID NO: 87437 - protein, 9 aa, Homo sapiens
  misc_feature: Table A; Target 87437; HLA-C*16:02; TFDP3; ENSG00000183434; CTA
GTFGGVFTT

SEQ ID NO: 87438 - protein, 10 aa, Homo sapiens
  misc_feature: Table A; Target 87438; HLA-A*02:01; TFDP3; ENSG00000183434; CTA
GTFGGVFTTA

SEQ ID NO: 87439 - protein, 10 aa, Homo sapiens
  misc_feature: Table A; Target 87439; HLA-A*02:03; TFDP3; ENSG00000183434; CTA
GTFGGVFTTA

SEQ ID NO: 87440 - protein, 10 aa, Homo sapiens
  misc_feature: Table A; Target 87440; HLA-A*03:01; TFDP3; ENSG00000183434; CTA
GTFGGVFTTA

SEQ ID NO: 87441 - protein, 10 aa, Homo sapiens
  misc_feature: Table A; Target 87441; HLA-A*11:01; TFDP3; ENSG00000183434; CTA
GTFGGVFTTA

SEQ ID NO: 87442 - protein, 10 aa, Homo sapiens
  misc_feature: Table A; Target 87442; HLA-A*25:01; TFDP3; ENSG00000183434; CTA
GTFGGVFTTA

SEQ ID NO: 87443 - protein, 10 aa, Homo sapiens
  misc_feature: Table A; Target 87443; HLA-A*26:01; TFDP3; ENSG00000183434; CTA
GTFGGVFTTA

SEQ ID NO: 87444 - protein, 10 aa, Homo sapiens
  misc_feature: Table A; Target 87444; HLA-A*30:01; TFDP3; ENSG00000183434; CTA
GTFGGVFTTA

SEQ ID NO: 87445 - protein, 10 aa, Homo sapiens
  misc_feature: Table A; Target 87445; HLA-A*31:01; TFDP3; ENSG00000183434; CTA
GTFGGVFTTA

SEQ ID NO: 87446 - protein, 10 aa, Homo sapiens
  misc_feature: Table A; Target 87446; HLA-A*32:01; TFDP3; ENSG00000183434; CTA
GTFGGVFTTA

SEQ ID NO: 87447 - protein, 10 aa, Homo sapiens
  misc_feature: Table A; Target 87447; HLA-A*68:02; TFDP3; ENSG00000183434; CTA
GTFGGVFTTA

SEQ ID NO: 87448 - protein, 10 aa, Homo sapiens
  misc_feature: Table A; Target 87448; HLA-B*13:02; TFDP3; ENSG00000183434; CTA
GTFGGVFTTA

SEQ ID NO: 87449 - protein, 10 aa, Homo sapiens
  misc_feature: Table A; Target 87449; HLA-B*27:05; TFDP3; ENSG00000183434; CTA
GTFGGVFTTA

SEQ ID NO: 87450 - protein, 10 aa, Homo sapiens
  misc_feature: Table A; Target 87450; HLA-B*40:02; TFDP3; ENSG00000183434; CTA
GTFGGVFTTA

SEQ ID NO: 87451 - protein, 10 aa, Homo sapiens
  misc_feature: Table A; Target 87451; HLA-B*46:01; TFDP3; ENSG00000183434; CTA
GTFGGVFTTA

SEQ ID NO: 87452 - protein, 10 aa, Homo sapiens
  misc_feature: Table A; Target 87452; HLA-B*49:01; TFDP3; ENSG00000183434; CTA
GTFGGVFTTA

SEQ ID NO: 87453 - protein, 10 aa, Homo sapiens
  misc_feature: Table A; Target 87453; HLA-B*54:01; TFDP3; ENSG00000183434; CTA
GTFGGVFTTA

SEQ ID NO: 87454 - protein, 10 aa, Homo sapiens
  misc_feature: Table A; Target 87454; HLA-B*56:01; TFDP3; ENSG00000183434; CTA
GTFGGVFTTA

SEQ ID NO: 87455 - protein, 10 aa, Homo sapiens
  misc_feature: Table A; Target 87455; HLA-B*57:01; TFDP3; ENSG00000183434; CTA
GTFGGVFTTA

SEQ ID NO: 87456 - protein, 10 aa, Homo sapiens
  misc_feature: Table A; Target 87456; HLA-B*58:01; TFDP3; ENSG00000183434; CTA
GTFGGVFTTA

SEQ ID NO: 87457 - protein, 10 aa, Homo sapiens
  misc_feature: Table A; Target 87457; HLA-C*02:02; TFDP3; ENSG00000183434; CTA
GTFGGVFTTA

SEQ ID NO: 87458 - protein, 10 aa, Homo sapiens
  misc_feature: Table A; Target 87458; HLA-C*12:03; TFDP3; ENSG00000183434; CTA
GTFGGVFTTA

SEQ ID NO: 87459 - protein, 10 aa, Homo sapiens
  misc_feature: Table A; Target 87459; HLA-C*16:04; TFDP3; ENSG00000183434; CTA
GTFGGVFTTA

SEQ ID NO: 87460 - protein, 9 aa, Homo sapiens
  misc_feature: Table A; Target 87460; HLA-A*03:01; TFDP3; ENSG00000183434; CTA
GVFTTAGSR

SEQ ID NO: 87461 - protein, 9 aa, Homo sapiens
  misc_feature: Table A; Target 87461; HLA-A*03:02; TFDP3; ENSG00000183434; CTA
GVFTTAGSR

SEQ ID NO: 87462 - protein, 9 aa, Homo sapiens
  misc_feature: Table A; Target 87462; HLA-A*11:01; TFDP3; ENSG00000183434; CTA
GVFTTAGSR

SEQ ID NO: 87463 - protein, 9 aa, Homo sapiens
  misc_feature: Table A; Target 87463; HLA-A*31:01; TFDP3; ENSG00000183434; CTA
GVFTTAGSR

SEQ ID NO: 87464 - protein, 9 aa, Homo sapiens
  misc_feature: Table A; Target 87464; HLA-A*68:01; TFDP3; ENSG00000183434; CTA
GVFTTAGSR

SEQ ID NO: 87465 - protein, 9 aa, Homo sapiens
  misc_feature: Table A; Target 87465; HLA-B*27:05; TFDP3; ENSG00000183434; CTA
GVFTTAGSR

SEQ ID NO: 87466 - protein, 9 aa, Homo sapiens
  misc_feature: Table A; Target 87466; HLA-C*07:06; TFDP3; ENSG00000183434; CTA
GVFTTAGSR

SEQ ID NO: 87467 - protein, 9 aa, Homo sapiens
  misc_feature: Table A; Target 87467; HLA-A*01:01; TFDP3; ENSG00000183434; CTA
HASPNESAY

SEQ ID NO: 87468 - protein, 9 aa, Homo sapiens
  misc_feature: Table A; Target 87468; HLA-A*25:01; TFDP3; ENSG00000183434; CTA
HASPNESAY

SEQ ID NO: 87469 - protein, 9 aa, Homo sapiens
  misc_feature: Table A; Target 87469; HLA-A*26:01; TFDP3; ENSG00000183434; CTA
HASPNESAY

SEQ ID NO: 87470 - protein, 9 aa, Homo sapiens
  misc_feature: Table A; Target 87470; HLA-A*29:02; TFDP3; ENSG00000183434; CTA
HASPNESAY

SEQ ID NO: 87471 - protein, 9 aa, Homo sapiens
  misc_feature: Table A; Target 87471; HLA-A*30:02; TFDP3; ENSG00000183434; CTA
HASPNESAY

SEQ ID NO: 87472 - protein, 9 aa, Homo sapiens
  misc_feature: Table A; Target 87472; HLA-A*32:01; TFDP3; ENSG00000183434; CTA
HASPNESAY

SEQ ID NO: 87473 - protein, 9 aa, Homo sapiens
  misc_feature: Table A; Target 87473; HLA-B*15:01; TFDP3; ENSG00000183434; CTA
HASPNESAY

SEQ ID NO: 87474 - protein, 9 aa, Homo sapiens
  misc_feature: Table A; Target 87474; HLA-B*15:03; TFDP3; ENSG00000183434; CTA
HASPNESAY

SEQ ID NO: 87475 - protein, 9 aa, Homo sapiens
  misc_feature: Table A; Target 87475; HLA-B*27:05; TFDP3; ENSG00000183434; CTA
HASPNESAY

SEQ ID NO: 87476 - protein, 9 aa, Homo sapiens
  misc_feature: Table A; Target 87476; HLA-B*35:03; TFDP3; ENSG00000183434; CTA
HASPNESAY

SEQ ID NO: 87477 - protein, 9 aa, Homo sapiens
  misc_feature: Table A; Target 87477; HLA-B*39:01; TFDP3; ENSG00000183434; CTA
HASPNESAY

SEQ ID NO: 87478 - protein, 9 aa, Homo sapiens
  misc_feature: Table A; Target 87478; HLA-B*46:01; TFDP3; ENSG00000183434; CTA
HASPNESAY

SEQ ID NO: 87479 - protein, 9 aa, Homo sapiens
  misc_feature: Table A; Target 87479; HLA-B*55:01; TFDP3; ENSG00000183434; CTA
HASPNESAY

SEQ ID NO: 87480 - protein, 9 aa, Homo sapiens
  misc_feature: Table A; Target 87480; HLA-B*58:01; TFDP3; ENSG00000183434; CTA
HASPNESAY

SEQ ID NO: 87481 - protein, 9 aa, Homo sapiens
  misc_feature: Table A; Target 87481; HLA-C*01:02; TFDP3; ENSG00000183434; CTA
HASPNESAY

SEQ ID NO: 87482 - protein, 9 aa, Homo sapiens
  misc_feature: Table A; Target 87482; HLA-C*02:02; TFDP3; ENSG00000183434; CTA
HASPNESAY

SEQ ID NO: 87483 - protein, 9 aa, Homo sapiens
  misc_feature: Table A; Target 87483; HLA-C*03:03; TFDP3; ENSG00000183434; CTA
HASPNESAY

SEQ ID NO: 87484 - protein, 9 aa, Homo sapiens
  misc_feature: Table A; Target 87484; HLA-C*03:04; TFDP3; ENSG00000183434; CTA
HASPNESAY

SEQ ID NO: 87485 - protein, 9 aa, Homo sapiens
  misc_feature: Table A; Target 87485; HLA-C*05:01; TFDP3; ENSG00000183434; CTA
HASPNESAY

SEQ ID NO: 87486 - protein, 9 aa, Homo sapiens
  misc_feature: Table A; Target 87486; HLA-C*07:04; TFDP3; ENSG00000183434; CTA
HASPNESAY

SEQ ID NO: 87487 - protein, 9 aa, Homo sapiens
  misc_feature: Table A; Target 87487; HLA-C*07:06; TFDP3; ENSG00000183434; CTA
HASPNESAY

SEQ ID NO: 87488 - protein, 9 aa, Homo sapiens
  misc_feature: Table A; Target 87488; HLA-C*12:03; TFDP3; ENSG00000183434; CTA
HASPNESAY

SEQ ID NO: 87489 - protein, 9 aa, Homo sapiens
  misc_feature: Table A; Target 87489; HLA-C*14:02; TFDP3; ENSG00000183434; CTA
HASPNESAY

SEQ ID NO: 87490 - protein, 9 aa, Homo sapiens
  misc_feature: Table A; Target 87490; HLA-C*16:01; TFDP3; ENSG00000183434; CTA
HASPNESAY

SEQ ID NO: 87491 - protein, 9 aa, Homo sapiens
  misc_feature: Table A; Target 87491; HLA-C*16:02; TFDP3; ENSG00000183434; CTA
HASPNESAY

SEQ ID NO: 87492 - protein, 9 aa, Homo sapiens
  misc_feature: Table A; Target 87492; HLA-C*16:04; TFDP3; ENSG00000183434; CTA
HASPNESAY

SEQ ID NO: 87493 - protein, 10 aa, Homo sapiens
  misc_feature: Table A; Target 87493; HLA-A*29:02; TFDP3; ENSG00000183434; CTA
HFASQNQHSY

SEQ ID NO: 87494 - protein, 10 aa, Homo sapiens
  misc_feature: Table A; Target 87494; HLA-A*30:02; TFDP3; ENSG00000183434; CTA
HFASQNQHSY

SEQ ID NO: 87495 - protein, 10 aa, Homo sapiens
  misc_feature: Table A; Target 87495; HLA-C*14:02; TFDP3; ENSG00000183434; CTA
HFASQNQHSY

SEQ ID NO: 87496 - protein, 10 aa, Homo sapiens
  misc_feature: Table A; Target 87496; HLA-A*01:01; TFDP3; ENSG00000183434; CTA
HTSTVNPLGK

SEQ ID NO: 87497 - protein, 10 aa, Homo sapiens
  misc_feature: Table A; Target 87497; HLA-A*03:01; TFDP3; ENSG00000183434; CTA
HTSTVNPLGK

SEQ ID NO: 87498 - protein, 10 aa, Homo sapiens
  misc_feature: Table A; Target 87498; HLA-A*03:02; TFDP3; ENSG00000183434; CTA
HTSTVNPLGK

SEQ ID NO: 87499 - protein, 10 aa, Homo sapiens
  misc_feature: Table A; Target 87499; HLA-A*11:01; TFDP3; ENSG00000183434; CTA
HTSTVNPLGK

SEQ ID NO: 87500 - protein, 10 aa, Homo sapiens
  misc_feature: Table A; Target 87500; HLA-A*33:03; TFDP3; ENSG00000183434; CTA
HTSTVNPLGK

SEQ ID NO: 87501 - protein, 10 aa, Homo sapiens
  misc_feature: Table A; Target 87501; HLA-B*27:02; TFDP3; ENSG00000183434; CTA
HTSTVNPLGK

SEQ ID NO: 87502 - protein, 10 aa, Homo sapiens
  misc_feature: Table A; Target 87502; HLA-B*27:05; TFDP3; ENSG00000183434; CTA
HTSTVNPLGK

SEQ ID NO: 87503 - protein, 10 aa, Homo sapiens
  misc_feature: Table A; Target 87503; HLA-C*07:06; TFDP3; ENSG00000183434; CTA
HTSTVNPLGK

SEQ ID NO: 87504 - protein, 8 aa, Homo sapiens
  misc_feature: Table A; Target 87504; HLA-B*08:01; TFDP3; ENSG00000183434; CTA
IAFKNLVL

SEQ ID NO: 87505 - protein, 8 aa, Homo sapiens
  misc_feature: Table A; Target 87505; HLA-B*51:01; TFDP3; ENSG00000183434; CTA
IAFKNLVL

SEQ ID NO: 87506 - protein, 8 aa, Homo sapiens
  misc_feature: Table A; Target 87506; HLA-C*03:03; TFDP3; ENSG00000183434; CTA
IAFKNLVL

SEQ ID NO: 87507 - protein, 8 aa, Homo sapiens
  misc_feature: Table A; Target 87507; HLA-C*03:04; TFDP3; ENSG00000183434; CTA
IAFKNLVL

SEQ ID NO: 87508 - protein, 8 aa, Homo sapiens
  misc_feature: Table A; Target 87508; HLA-C*12:03; TFDP3; ENSG00000183434; CTA
IAFKNLVL

SEQ ID NO: 87509 - protein, 9 aa, Homo sapiens
  misc_feature: Table A; Target 87509; HLA-A*31:01; TFDP3; ENSG00000183434; CTA
IAFKNLVLR

SEQ ID NO: 87510 - protein, 9 aa, Homo sapiens
  misc_feature: Table A; Target 87510; HLA-A*33:01; TFDP3; ENSG00000183434; CTA
IAFKNLVLR

SEQ ID NO: 87511 - protein, 9 aa, Homo sapiens
  misc_feature: Table A; Target 87511; HLA-B*57:01; TFDP3; ENSG00000183434; CTA
IAFKNLVLR

SEQ ID NO: 87512 - protein, 9 aa, Homo sapiens
  misc_feature: Table A; Target 87512; HLA-B*27:05; TFDP3; ENSG00000183434; CTA
IAIGMLATS

SEQ ID NO: 87513 - protein, 9 aa, Homo sapiens
  misc_feature: Table A; Target 87513; HLA-B*37:01; TFDP3; ENSG00000183434; CTA
IDQQVVIGM

SEQ ID NO: 87514 - protein, 9 aa, Homo sapiens
  misc_feature: Table A; Target 87514; HLA-B*54:01; TFDP3; ENSG00000183434; CTA
IGMPQRPAA

SEQ ID NO: 87515 - protein, 9 aa, Homo sapiens
  misc_feature: Table A; Target 87515; HLA-B*56:01; TFDP3; ENSG00000183434; CTA
IGMPQRPAA

SEQ ID NO: 87516 - protein, 9 aa, Homo sapiens
  misc_feature: Table A; Target 87516; HLA-C*16:01; TFDP3; ENSG00000183434; CTA
IGMPQRPAA

SEQ ID NO: 87517 - protein, 8 aa, Homo sapiens
  misc_feature: Table A; Target 87517; HLA-B*38:01; TFDP3; ENSG00000183434; CTA
IHDDTEVL

SEQ ID NO: 87518 - protein, 8 aa, Homo sapiens
  misc_feature: Table A; Target 87518; HLA-B*39:01; TFDP3; ENSG00000183434; CTA
IHDDTEVL

SEQ ID NO: 87519 - protein, 8 aa, Homo sapiens
  misc_feature: Table A; Target 87519; HLA-C*05:01; TFDP3; ENSG00000183434; CTA
IHDDTEVL

SEQ ID NO: 87520 - protein, 9 aa, Homo sapiens
  misc_feature: Table A; Target 87520; HLA-B*35:03; TFDP3; ENSG00000183434; CTA
IHDDTEVLM

SEQ ID NO: 87521 - protein, 9 aa, Homo sapiens
  misc_feature: Table A; Target 87521; HLA-B*39:01; TFDP3; ENSG00000183434; CTA
IHDDTEVLM

SEQ ID NO: 87522 - protein, 9 aa, Homo sapiens
  misc_feature: Table A; Target 87522; HLA-C*04:01; TFDP3; ENSG00000183434; CTA
IHDDTEVLM

SEQ ID NO: 87523 - protein, 9 aa, Homo sapiens
  misc_feature: Table A; Target 87523; HLA-C*05:01; TFDP3; ENSG00000183434; CTA
IHDDTEVLM

SEQ ID NO: 87524 - protein, 10 aa, Homo sapiens
  misc_feature: Table A; Target 87524; HLA-B*38:01; TFDP3; ENSG00000183434; CTA
IHDDTEVLMW

SEQ ID NO: 87525 - protein, 9 aa, Homo sapiens
  misc_feature: Table A; Target 87525; HLA-C*16:02; TFDP3; ENSG00000183434; CTA
IISSSKKTV

SEQ ID NO: 87526 - protein, 8 aa, Homo sapiens
  misc_feature: Table A; Target 87526; HLA-A*03:02; TFDP3; ENSG00000183434; CTA
ILQQIAFK

SEQ ID NO: 87527 - protein, 10 aa, Homo sapiens
  misc_feature: Table A; Target 87527; HLA-B*56:01; TFDP3; ENSG00000183434; CTA
IPVVGSPNPP

SEQ ID NO: 87528 - protein, 8 aa, Homo sapiens
  misc_feature: Table A; Target 87528; HLA-A*01:01; TFDP3; ENSG00000183434; CTA
ISDDKSEY

SEQ ID NO: 87529 - protein, 8 aa, Homo sapiens
  misc_feature: Table A; Target 87529; HLA-C*05:01; TFDP3; ENSG00000183434; CTA
ISDDKSEY

SEQ ID NO: 87530 - protein, 8 aa, Homo sapiens
  misc_feature: Table A; Target 87530; HLA-C*16:01; TFDP3; ENSG00000183434; CTA
ISDDKSEY

SEQ ID NO: 87531 - protein, 8 aa, Homo sapiens
  misc_feature: Table A; Target 87531; HLA-C*16:02; TFDP3; ENSG00000183434; CTA
ISDDKSEY

SEQ ID NO: 87532 - protein, 9 aa, Homo sapiens
  misc_feature: Table A; Target 87532; HLA-A*01:01; TFDP3; ENSG00000183434; CTA
ISDDKSEYL

SEQ ID NO: 87533 - protein, 9 aa, Homo sapiens
  misc_feature: Table A; Target 87533; HLA-A*02:01; TFDP3; ENSG00000183434; CTA
ISDDKSEYL

SEQ ID NO: 87534 - protein, 9 aa, Homo sapiens
  misc_feature: Table A; Target 87534; HLA-A*02:07; TFDP3; ENSG00000183434; CTA
ISDDKSEYL

SEQ ID NO: 87535 - protein, 9 aa, Homo sapiens
  misc_feature: Table A; Target 87535; HLA-A*32:01; TFDP3; ENSG00000183434; CTA
ISDDKSEYL

SEQ ID NO: 87536 - protein, 9 aa, Homo sapiens
  misc_feature: Table A; Target 87536; HLA-B*38:01; TFDP3; ENSG00000183434; CTA
ISDDKSEYL

SEQ ID NO: 87537 - protein, 9 aa, Homo sapiens
  misc_feature: Table A; Target 87537; HLA-B*39:01; TFDP3; ENSG00000183434; CTA
ISDDKSEYL

SEQ ID NO: 87538 - protein, 9 aa, Homo sapiens
  misc_feature: Table A; Target 87538; HLA-C*01:02; TFDP3; ENSG00000183434; CTA
ISDDKSEYL

SEQ ID NO: 87539 - protein, 9 aa, Homo sapiens
  misc_feature: Table A; Target 87539; HLA-C*03:03; TFDP3; ENSG00000183434; CTA
ISDDKSEYL

SEQ ID NO: 87540 - protein, 9 aa, Homo sapiens
  misc_feature: Table A; Target 87540; HLA-C*03:04; TFDP3; ENSG00000183434; CTA
ISDDKSEYL

SEQ ID NO: 87541 - protein, 9 aa, Homo sapiens
  misc_feature: Table A; Target 87541; HLA-C*04:01; TFDP3; ENSG00000183434; CTA
ISDDKSEYL

SEQ ID NO: 87542 - protein, 9 aa, Homo sapiens
  misc_feature: Table A; Target 87542; HLA-C*05:01; TFDP3; ENSG00000183434; CTA
ISDDKSEYL

SEQ ID NO: 87543 - protein, 9 aa, Homo sapiens
  misc_feature: Table A; Target 87543; HLA-C*07:04; TFDP3; ENSG00000183434; CTA
ISDDKSEYL

SEQ ID NO: 87544 - protein, 10 aa, Homo sapiens
  misc_feature: Table A; Target 87544; HLA-A*01:01; TFDP3; ENSG00000183434; CTA
ISDDKSEYLF

SEQ ID NO: 87545 - protein, 10 aa, Homo sapiens
  misc_feature: Table A; Target 87545; HLA-A*02:07; TFDP3; ENSG00000183434; CTA
ISDDKSEYLF

SEQ ID NO: 87546 - protein, 10 aa, Homo sapiens
  misc_feature: Table A; Target 87546; HLA-B*57:01; TFDP3; ENSG00000183434; CTA
ISDDKSEYLF

SEQ ID NO: 87547 - protein, 10 aa, Homo sapiens
  misc_feature: Table A; Target 87547; HLA-C*04:01; TFDP3; ENSG00000183434; CTA
ISDDKSEYLF

SEQ ID NO: 87548 - protein, 10 aa, Homo sapiens
  misc_feature: Table A; Target 87548; HLA-C*05:01; TFDP3; ENSG00000183434; CTA
ISDDKSEYLF

SEQ ID NO: 87549 - protein, 11 aa, Homo sapiens
  misc_feature: Table A; Target 87549; HLA-A*03:01; TFDP3; ENSG00000183434; CTA
ISDDKSEYLFK

SEQ ID NO: 87550 - protein, 9 aa, Homo sapiens
  misc_feature: Table A; Target 87550; HLA-C*16:01; TFDP3; ENSG00000183434; CTA
ISSSKKTVI

SEQ ID NO: 87551 - protein, 10 aa, Homo sapiens
  misc_feature: Table A; Target 87551; HLA-A*32:01; TFDP3; ENSG00000183434; CTA
KALEPYVTEM

SEQ ID NO: 87552 - protein, 10 aa, Homo sapiens
  misc_feature: Table A; Target 87552; HLA-B*27:02; TFDP3; ENSG00000183434; CTA
KALEPYVTEM

SEQ ID NO: 87553 - protein, 10 aa, Homo sapiens
  misc_feature: Table A; Target 87553; HLA-B*40:01; TFDP3; ENSG00000183434; CTA
KALEPYVTEM

SEQ ID NO: 87554 - protein, 10 aa, Homo sapiens
  misc_feature: Table A; Target 87554; HLA-B*40:02; TFDP3; ENSG00000183434; CTA
KALEPYVTEM

SEQ ID NO: 87555 - protein, 10 aa, Homo sapiens
  misc_feature: Table A; Target 87555; HLA-B*46:01; TFDP3; ENSG00000183434; CTA
KALEPYVTEM

SEQ ID NO: 87556 - protein, 10 aa, Homo sapiens
  misc_feature: Table A; Target 87556; HLA-B*57:01; TFDP3; ENSG00000183434; CTA
KALEPYVTEM

SEQ ID NO: 87557 - protein, 10 aa, Homo sapiens
  misc_feature: Table A; Target 87557; HLA-B*58:01; TFDP3; ENSG00000183434; CTA
KALEPYVTEM

SEQ ID NO: 87558 - protein, 10 aa, Homo sapiens
  misc_feature: Table A; Target 87558; HLA-C*01:02; TFDP3; ENSG00000183434; CTA
KALEPYVTEM

SEQ ID NO: 87559 - protein, 10 aa, Homo sapiens
  misc_feature: Table A; Target 87559; HLA-C*02:02; TFDP3; ENSG00000183434; CTA
KALEPYVTEM

SEQ ID NO: 87560 - protein, 10 aa, Homo sapiens
  misc_feature: Table A; Target 87560; HLA-C*03:03; TFDP3; ENSG00000183434; CTA
KALEPYVTEM

SEQ ID NO: 87561 - protein, 10 aa, Homo sapiens
  misc_feature: Table A; Target 87561; HLA-C*03:04; TFDP3; ENSG00000183434; CTA
KALEPYVTEM

SEQ ID NO: 87562 - protein, 10 aa, Homo sapiens
  misc_feature: Table A; Target 87562; HLA-C*05:01; TFDP3; ENSG00000183434; CTA
KALEPYVTEM

SEQ ID NO: 87563 - protein, 10 aa, Homo sapiens
  misc_feature: Table A; Target 87563; HLA-C*12:03; TFDP3; ENSG00000183434; CTA
KALEPYVTEM

SEQ ID NO: 87564 - protein, 10 aa, Homo sapiens
  misc_feature: Table A; Target 87564; HLA-C*16:02; TFDP3; ENSG00000183434; CTA
KALEPYVTEM

SEQ ID NO: 87565 - protein, 10 aa, Homo sapiens
  misc_feature: Table A; Target 87565; HLA-C*16:04; TFDP3; ENSG00000183434; CTA
KALEPYVTEM

SEQ ID NO: 87566 - protein, 9 aa, Homo sapiens
  misc_feature: Table A; Target 87566; HLA-A*03:01; TFDP3; ENSG00000183434; CTA
KMARNLVPK

SEQ ID NO: 87567 - protein, 9 aa, Homo sapiens
  misc_feature: Table A; Target 87567; HLA-A*03:02; TFDP3; ENSG00000183434; CTA
KMARNLVPK

SEQ ID NO: 87568 - protein, 9 aa, Homo sapiens
  misc_feature: Table A; Target 87568; HLA-A*30:02; TFDP3; ENSG00000183434; CTA
KNLVLRNQY

SEQ ID NO: 87569 - protein, 9 aa, Homo sapiens
  misc_feature: Table A; Target 87569; HLA-A*30:01; TFDP3; ENSG00000183434; CTA
KQSELQQLI

SEQ ID NO: 87570 - protein, 9 aa, Homo sapiens
  misc_feature: Table A; Target 87570; HLA-B*13:02; TFDP3; ENSG00000183434; CTA
KQSELQQLI

SEQ ID NO: 87571 - protein, 9 aa, Homo sapiens
  misc_feature: Table A; Target 87571; HLA-B*38:01; TFDP3; ENSG00000183434; CTA
KQSELQQLI

SEQ ID NO: 87572 - protein, 9 aa, Homo sapiens
  misc_feature: Table A; Target 87572; HLA-C*06:02; TFDP3; ENSG00000183434; CTA
KQSELQQLI

SEQ ID NO: 87573 - protein, 10 aa, Homo sapiens
  misc_feature: Table A; Target 87573; HLA-B*58:01; TFDP3; ENSG00000183434; CTA
KTFGQSSVNI

SEQ ID NO: 87574 - protein, 11 aa, Homo sapiens
  misc_feature: Table A; Target 87574; HLA-A*31:01; TFDP3; ENSG00000183434; CTA
KVLMDENQTSR

SEQ ID NO: 87575 - protein, 8 aa, Homo sapiens
  misc_feature: Table A; Target 87575; HLA-A*31:01; TFDP3; ENSG00000183434; CTA
KVWETVQR

SEQ ID NO: 87576 - protein, 9 aa, Homo sapiens
  misc_feature: Table A; Target 87576; HLA-A*03:01; TFDP3; ENSG00000183434; CTA
KVWETVQRK

SEQ ID NO: 87577 - protein, 9 aa, Homo sapiens
  misc_feature: Table A; Target 87577; HLA-A*03:02; TFDP3; ENSG00000183434; CTA
KVWETVQRK

SEQ ID NO: 87578 - protein, 9 aa, Homo sapiens
  misc_feature: Table A; Target 87578; HLA-A*11:01; TFDP3; ENSG00000183434; CTA
KVWETVQRK

SEQ ID NO: 87579 - protein, 9 aa, Homo sapiens
  misc_feature: Table A; Target 87579; HLA-A*31:01; TFDP3; ENSG00000183434; CTA
KVWETVQRK

SEQ ID NO: 87580 - protein, 10 aa, Homo sapiens
  misc_feature: Table A; Target 87580; HLA-A*01:01; TFDP3; ENSG00000183434; CTA
LATSSGGSQY

SEQ ID NO: 87581 - protein, 10 aa, Homo sapiens
  misc_feature: Table A; Target 87581; HLA-A*26:01; TFDP3; ENSG00000183434; CTA
LATSSGGSQY

SEQ ID NO: 87582 - protein, 10 aa, Homo sapiens
  misc_feature: Table A; Target 87582; HLA-A*30:02; TFDP3; ENSG00000183434; CTA
LATSSGGSQY

SEQ ID NO: 87583 - protein, 10 aa, Homo sapiens
  misc_feature: Table A; Target 87583; HLA-B*15:01; TFDP3; ENSG00000183434; CTA
LATSSGGSQY

SEQ ID NO: 87584 - protein, 10 aa, Homo sapiens
  misc_feature: Table A; Target 87584; HLA-B*15:03; TFDP3; ENSG00000183434; CTA
LATSSGGSQY

SEQ ID NO: 87585 - protein, 10 aa, Homo sapiens
  misc_feature: Table A; Target 87585; HLA-B*39:01; TFDP3; ENSG00000183434; CTA
LATSSGGSQY

SEQ ID NO: 87586 - protein, 10 aa, Homo sapiens
  misc_feature: Table A; Target 87586; HLA-B*46:01; TFDP3; ENSG00000183434; CTA
LATSSGGSQY

SEQ ID NO: 87587 - protein, 10 aa, Homo sapiens
  misc_feature: Table A; Target 87587; HLA-C*02:02; TFDP3; ENSG00000183434; CTA
LATSSGGSQY

SEQ ID NO: 87588 - protein, 10 aa, Homo sapiens
  misc_feature: Table A; Target 87588; HLA-C*03:03; TFDP3; ENSG00000183434; CTA
LATSSGGSQY

SEQ ID NO: 87589 - protein, 10 aa, Homo sapiens
  misc_feature: Table A; Target 87589; HLA-C*03:04; TFDP3; ENSG00000183434; CTA
LATSSGGSQY

SEQ ID NO: 87590 - protein, 10 aa, Homo sapiens
  misc_feature: Table A; Target 87590; HLA-C*07:04; TFDP3; ENSG00000183434; CTA
LATSSGGSQY

SEQ ID NO: 87591 - protein, 10 aa, Homo sapiens
  misc_feature: Table A; Target 87591; HLA-C*14:02; TFDP3; ENSG00000183434; CTA
LATSSGGSQY

SEQ ID NO: 87592 - protein, 10 aa, Homo sapiens
  misc_feature: Table A; Target 87592; HLA-C*16:02; TFDP3; ENSG00000183434; CTA
LATSSGGSQY

SEQ ID NO: 87593 - protein, 10 aa, Homo sapiens
  misc_feature: Table A; Target 87593; HLA-C*16:04; TFDP3; ENSG00000183434; CTA
LATSSGGSQY

SEQ ID NO: 87594 - protein, 8 aa, Homo sapiens
  misc_feature: Table A; Target 87594; HLA-A*30:01; TFDP3; ENSG00000183434; CTA
LEPYVTEM

SEQ ID NO: 87595 - protein, 8 aa, Homo sapiens
  misc_feature: Table A; Target 87595; HLA-B*18:01; TFDP3; ENSG00000183434; CTA
LEPYVTEM

SEQ ID NO: 87596 - protein, 8 aa, Homo sapiens
  misc_feature: Table A; Target 87596; HLA-B*37:01; TFDP3; ENSG00000183434; CTA
LEPYVTEM

SEQ ID NO: 87597 - protein, 8 aa, Homo sapiens
  misc_feature: Table A; Target 87597; HLA-B*40:01; TFDP3; ENSG00000183434; CTA
LEPYVTEM

SEQ ID NO: 87598 - protein, 8 aa, Homo sapiens
  misc_feature: Table A; Target 87598; HLA-B*40:02; TFDP3; ENSG00000183434; CTA
LEPYVTEM

SEQ ID NO: 87599 - protein, 8 aa, Homo sapiens
  misc_feature: Table A; Target 87599; HLA-B*49:01; TFDP3; ENSG00000183434; CTA
LEPYVTEM

SEQ ID NO: 87600 - protein, 8 aa, Homo sapiens
  misc_feature: Table A; Target 87600; HLA-B*51:01; TFDP3; ENSG00000183434; CTA
LEPYVTEM

SEQ ID NO: 87601 - protein, 9 aa, Homo sapiens
  misc_feature: Table A; Target 87601; HLA-A*03:01; TFDP3; ENSG00000183434; CTA
LILQQIAFK

SEQ ID NO: 87602 - protein, 9 aa, Homo sapiens
  misc_feature: Table A; Target 87602; HLA-C*07:06; TFDP3; ENSG00000183434; CTA
LMAMNIISR

SEQ ID NO: 87603 - protein, 9 aa, Homo sapiens
  misc_feature: Table A; Target 87603; HLA-A*01:01; TFDP3; ENSG00000183434; CTA
LMDENQTSR

SEQ ID NO: 87604 - protein, 9 aa, Homo sapiens
  misc_feature: Table A; Target 87604; HLA-C*05:01; TFDP3; ENSG00000183434; CTA
LMDENQTSR

SEQ ID NO: 87605 - protein, 10 aa, Homo sapiens
  misc_feature: Table A; Target 87605; HLA-B*07:02; TFDP3; ENSG00000183434; CTA
LPKTFGQSSV

SEQ ID NO: 87606 - protein, 10 aa, Homo sapiens
  misc_feature: Table A; Target 87606; HLA-B*08:01; TFDP3; ENSG00000183434; CTA
LPKTFGQSSV

SEQ ID NO: 87607 - protein, 10 aa, Homo sapiens
  misc_feature: Table A; Target 87607; HLA-B*51:01; TFDP3; ENSG00000183434; CTA
LPKTFGQSSV

SEQ ID NO: 87608 - protein, 10 aa, Homo sapiens
  misc_feature: Table A; Target 87608; HLA-B*54:01; TFDP3; ENSG00000183434; CTA
LPKTFGQSSV

SEQ ID NO: 87609 - protein, 10 aa, Homo sapiens
  misc_feature: Table A; Target 87609; HLA-B*55:01; TFDP3; ENSG00000183434; CTA
LPKTFGQSSV

SEQ ID NO: 87610 - protein, 10 aa, Homo sapiens
  misc_feature: Table A; Target 87610; HLA-B*56:01; TFDP3; ENSG00000183434; CTA
LPKTFGQSSV

SEQ ID NO: 87611 - protein, 10 aa, Homo sapiens
  misc_feature: Table A; Target 87611; HLA-C*07:02; TFDP3; ENSG00000183434; CTA
LPKTFGQSSV

SEQ ID NO: 87612 - protein, 8 aa, Homo sapiens
  misc_feature: Table A; Target 87612; HLA-B*51:01; TFDP3; ENSG00000183434; CTA
LPNSVIHV

SEQ ID NO: 87613 - protein, 8 aa, Homo sapiens
  misc_feature: Table A; Target 87613; HLA-B*56:01; TFDP3; ENSG00000183434; CTA
LPNSVIHV

SEQ ID NO: 87614 - protein, 9 aa, Homo sapiens
  misc_feature: Table A; Target 87614; HLA-B*54:01; TFDP3; ENSG00000183434; CTA
LPNSVIHVP

SEQ ID NO: 87615 - protein, 9 aa, Homo sapiens
  misc_feature: Table A; Target 87615; HLA-B*56:01; TFDP3; ENSG00000183434; CTA
LPNSVIHVP

SEQ ID NO: 87616 - protein, 9 aa, Homo sapiens
  misc_feature: Table A; Target 87616; HLA-A*02:04; TFDP3; ENSG00000183434; CTA
LQQLILQQI

SEQ ID NO: 87617 - protein, 9 aa, Homo sapiens
  misc_feature: Table A; Target 87617; HLA-A*30:01; TFDP3; ENSG00000183434; CTA
LQQLILQQI

SEQ ID NO: 87618 - protein, 9 aa, Homo sapiens
  misc_feature: Table A; Target 87618; HLA-B*13:02; TFDP3; ENSG00000183434; CTA
LQQLILQQI

SEQ ID NO: 87619 - protein, 9 aa, Homo sapiens
  misc_feature: Table A; Target 87619; HLA-B*38:01; TFDP3; ENSG00000183434; CTA
LQQLILQQI

SEQ ID NO: 87620 - protein, 9 aa, Homo sapiens
  misc_feature: Table A; Target 87620; HLA-C*06:02; TFDP3; ENSG00000183434; CTA
LQQLILQQI

SEQ ID NO: 87621 - protein, 9 aa, Homo sapiens
  misc_feature: Table A; Target 87621; HLA-C*07:04; TFDP3; ENSG00000183434; CTA
LQQLILQQI

SEQ ID NO: 87622 - protein, 9 aa, Homo sapiens
  misc_feature: Table A; Target 87622; HLA-A*68:02; TFDP3; ENSG00000183434; CTA
LSMKVWETV

SEQ ID NO: 87623 - protein, 8 aa, Homo sapiens
  misc_feature: Table A; Target 87623; HLA-C*05:01; TFDP3; ENSG00000183434; CTA
LTEANEEL

SEQ ID NO: 87624 - protein, 9 aa, Homo sapiens
  misc_feature: Table A; Target 87624; HLA-A*01:01; TFDP3; ENSG00000183434; CTA
LTEANEELK

SEQ ID NO: 87625 - protein, 9 aa, Homo sapiens
  misc_feature: Table A; Target 87625; HLA-C*01:02; TFDP3; ENSG00000183434; CTA
LTNIAIGML

SEQ ID NO: 87626 - protein, 9 aa, Homo sapiens
  misc_feature: Table A; Target 87626; HLA-A*01:01; TFDP3; ENSG00000183434; CTA
LVPKALEPY

SEQ ID NO: 87627 - protein, 9 aa, Homo sapiens
  misc_feature: Table A; Target 87627; HLA-B*46:01; TFDP3; ENSG00000183434; CTA
LVPKALEPY

SEQ ID NO: 87628 - protein, 9 aa, Homo sapiens
  misc_feature: Table A; Target 87628; HLA-C*07:04; TFDP3; ENSG00000183434; CTA
LVPKALEPY

SEQ ID NO: 87629 - protein, 10 aa, Homo sapiens
  misc_feature: Table A; Target 87629; HLA-A*02:07; TFDP3; ENSG00000183434; CTA
LVPKALEPYV

SEQ ID NO: 87630 - protein, 10 aa, Homo sapiens
  misc_feature: Table A; Target 87630; HLA-B*54:01; TFDP3; ENSG00000183434; CTA
MAKYVSLTEA

SEQ ID NO: 87631 - protein, 8 aa, Homo sapiens
  misc_feature: Table A; Target 87631; HLA-A*11:01; TFDP3; ENSG00000183434; CTA
MAMNIISR

SEQ ID NO: 87632 - protein, 8 aa, Homo sapiens
  misc_feature: Table A; Target 87632; HLA-A*31:01; TFDP3; ENSG00000183434; CTA
MAMNIISR

SEQ ID NO: 87633 - protein, 8 aa, Homo sapiens
  misc_feature: Table A; Target 87633; HLA-A*33:01; TFDP3; ENSG00000183434; CTA
MAMNIISR

SEQ ID NO: 87634 - protein, 8 aa, Homo sapiens
  misc_feature: Table A; Target 87634; HLA-A*33:03; TFDP3; ENSG00000183434; CTA
MAMNIISR

SEQ ID NO: 87635 - protein, 8 aa, Homo sapiens
  misc_feature: Table A; Target 87635; HLA-A*68:01; TFDP3; ENSG00000183434; CTA
MAMNIISR

SEQ ID NO: 87636 - protein, 8 aa, Homo sapiens
  misc_feature: Table A; Target 87636; HLA-B*27:05; TFDP3; ENSG00000183434; CTA
MAMNIISR

SEQ ID NO: 87637 - protein, 8 aa, Homo sapiens
  misc_feature: Table A; Target 87637; HLA-B*54:01; TFDP3; ENSG00000183434; CTA
MAMNIISR

SEQ ID NO: 87638 - protein, 8 aa, Homo sapiens
  misc_feature: Table A; Target 87638; HLA-C*07:06; TFDP3; ENSG00000183434; CTA
MAMNIISR

SEQ ID NO: 87639 - protein, 9 aa, Homo sapiens
  misc_feature: Table A; Target 87639; HLA-C*12:03; TFDP3; ENSG00000183434; CTA
MAMNIISRE

SEQ ID NO: 87640 - protein, 10 aa, Homo sapiens
  misc_feature: Table A; Target 87640; HLA-A*03:01; TFDP3; ENSG00000183434; CTA
MAMNIISREK

SEQ ID NO: 87641 - protein, 10 aa, Homo sapiens
  misc_feature: Table A; Target 87641; HLA-A*11:01; TFDP3; ENSG00000183434; CTA
MAMNIISREK

SEQ ID NO: 87642 - protein, 10 aa, Homo sapiens
  misc_feature: Table A; Target 87642; HLA-C*02:02; TFDP3; ENSG00000183434; CTA
MAQGTFGGVF

SEQ ID NO: 87643 - protein, 9 aa, Homo sapiens
  misc_feature: Table A; Target 87643; HLA-B*54:01; TFDP3; ENSG00000183434; CTA
MARNLVPKA

SEQ ID NO: 87644 - protein, 10 aa, Homo sapiens
  misc_feature: Table A; Target 87644; HLA-C*04:01; TFDP3; ENSG00000183434; CTA
MDENQTSRPV

SEQ ID NO: 87645 - protein, 10 aa, Homo sapiens
  misc_feature: Table A; Target 87645; HLA-C*06:02; TFDP3; ENSG00000183434; CTA
MDENQTSRPV

SEQ ID NO: 87646 - protein, 10 aa, Homo sapiens
  misc_feature: Table A; Target 87646; HLA-C*07:01; TFDP3; ENSG00000183434; CTA
MDENQTSRPV

SEQ ID NO: 87647 - protein, 10 aa, Homo sapiens
  misc_feature: Table A; Target 87647; HLA-C*07:02; TFDP3; ENSG00000183434; CTA
MDENQTSRPV

SEQ ID NO: 87648 - protein, 11 aa, Homo sapiens
  misc_feature: Table A; Target 87648; HLA-A*01:01; TFDP3; ENSG00000183434; CTA
MLATSSGGSQY

SEQ ID NO: 87649 - protein, 11 aa, Homo sapiens
  misc_feature: Table A; Target 87649; HLA-A*25:01; TFDP3; ENSG00000183434; CTA
MLATSSGGSQY

SEQ ID NO: 87650 - protein, 11 aa, Homo sapiens
  misc_feature: Table A; Target 87650; HLA-A*26:01; TFDP3; ENSG00000183434; CTA
MLATSSGGSQY

SEQ ID NO: 87651 - protein, 11 aa, Homo sapiens
  misc_feature: Table A; Target 87651; HLA-A*29:02; TFDP3; ENSG00000183434; CTA
MLATSSGGSQY

SEQ ID NO: 87652 - protein, 11 aa, Homo sapiens
  misc_feature: Table A; Target 87652; HLA-A*30:02; TFDP3; ENSG00000183434; CTA
MLATSSGGSQY

SEQ ID NO: 87653 - protein, 11 aa, Homo sapiens
  misc_feature: Table A; Target 87653; HLA-A*32:01; TFDP3; ENSG00000183434; CTA
MLATSSGGSQY

SEQ ID NO: 87654 - protein, 11 aa, Homo sapiens
  misc_feature: Table A; Target 87654; HLA-B*15:01; TFDP3; ENSG00000183434; CTA
MLATSSGGSQY

SEQ ID NO: 87655 - protein, 11 aa, Homo sapiens
  misc_feature: Table A; Target 87655; HLA-B*15:03; TFDP3; ENSG00000183434; CTA
MLATSSGGSQY

SEQ ID NO: 87656 - protein, 11 aa, Homo sapiens
  misc_feature: Table A; Target 87656; HLA-B*35:01; TFDP3; ENSG00000183434; CTA
MLATSSGGSQY

SEQ ID NO: 87657 - protein, 11 aa, Homo sapiens
  misc_feature: Table A; Target 87657; HLA-B*46:01; TFDP3; ENSG00000183434; CTA
MLATSSGGSQY

SEQ ID NO: 87658 - protein, 11 aa, Homo sapiens
  misc_feature: Table A; Target 87658; HLA-C*02:02; TFDP3; ENSG00000183434; CTA
MLATSSGGSQY

SEQ ID NO: 87659 - protein, 11 aa, Homo sapiens
  misc_feature: Table A; Target 87659; HLA-C*07:04; TFDP3; ENSG00000183434; CTA
MLATSSGGSQY

SEQ ID NO: 87660 - protein, 11 aa, Homo sapiens
  misc_feature: Table A; Target 87660; HLA-C*14:02; TFDP3; ENSG00000183434; CTA
MLATSSGGSQY

SEQ ID NO: 87661 - protein, 10 aa, Homo sapiens
  misc_feature: Table A; Target 87661; HLA-B*07:02; TFDP3; ENSG00000183434; CTA
MPQRPAASNI

SEQ ID NO: 87662 - protein, 10 aa, Homo sapiens
  misc_feature: Table A; Target 87662; HLA-B*51:01; TFDP3; ENSG00000183434; CTA
MPQRPAASNI

SEQ ID NO: 87663 - protein, 10 aa, Homo sapiens
  misc_feature: Table A; Target 87663; HLA-C*07:02; TFDP3; ENSG00000183434; CTA
MPQRPAASNI

SEQ ID NO: 87664 - protein, 10 aa, Homo sapiens
  misc_feature: Table A; Target 87664; HLA-C*07:01; TFDP3; ENSG00000183434; CTA
MTFGLESGSC

SEQ ID NO: 87665 - protein, 9 aa, Homo sapiens
  misc_feature: Table A; Target 87665; HLA-A*33:01; TFDP3; ENSG00000183434; CTA
NCQNLRVER

SEQ ID NO: 87666 - protein, 8 aa, Homo sapiens
  misc_feature: Table A; Target 87666; HLA-B*18:01; TFDP3; ENSG00000183434; CTA
NEELKVLM

SEQ ID NO: 87667 - protein, 8 aa, Homo sapiens
  misc_feature: Table A; Target 87667; HLA-B*37:01; TFDP3; ENSG00000183434; CTA
NEELKVLM

SEQ ID NO: 87668 - protein, 10 aa, Homo sapiens
  misc_feature: Table A; Target 87668; HLA-B*44:02; TFDP3; ENSG00000183434; CTA
NESAYDVKNI

SEQ ID NO: 87669 - protein, 10 aa, Homo sapiens
  misc_feature: Table A; Target 87669; HLA-B*44:03; TFDP3; ENSG00000183434; CTA
NESAYDVKNI

SEQ ID NO: 87670 - protein, 10 aa, Homo sapiens
  misc_feature: Table A; Target 87670; HLA-B*49:01; TFDP3; ENSG00000183434; CTA
NESAYDVKNI

SEQ ID NO: 87671 - protein, 9 aa, Homo sapiens
  misc_feature: Table A; Target 87671; HLA-B*38:01; TFDP3; ENSG00000183434; CTA
NHASPNESA

SEQ ID NO: 87672 - protein, 9 aa, Homo sapiens
  misc_feature: Table A; Target 87672; HLA-B*39:01; TFDP3; ENSG00000183434; CTA
NHASPNESA

SEQ ID NO: 87673 - protein, 10 aa, Homo sapiens
  misc_feature: Table A; Target 87673; HLA-A*30:02; TFDP3; ENSG00000183434; CTA
NHASPNESAY

SEQ ID NO: 87674 - protein, 10 aa, Homo sapiens
  misc_feature: Table A; Target 87674; HLA-B*38:01; TFDP3; ENSG00000183434; CTA
NHASPNESAY

SEQ ID NO: 87675 - protein, 10 aa, Homo sapiens
  misc_feature: Table A; Target 87675; HLA-B*39:01; TFDP3; ENSG00000183434; CTA
NHASPNESAY

SEQ ID NO: 87676 - protein, 8 aa, Homo sapiens
  misc_feature: Table A; Target 87676; HLA-B*38:01; TFDP3; ENSG00000183434; CTA
NIDQQVVI

SEQ ID NO: 87677 - protein, 8 aa, Homo sapiens
  misc_feature: Table A; Target 87677; HLA-C*04:01; TFDP3; ENSG00000183434; CTA
NIDQQVVI

SEQ ID NO: 87678 - protein, 8 aa, Homo sapiens
  misc_feature: Table A; Target 87678; HLA-C*05:01; TFDP3; ENSG00000183434; CTA
NIDQQVVI

SEQ ID NO: 87679 - protein, 10 aa, Homo sapiens
  misc_feature: Table A; Target 87679; HLA-A*02:07; TFDP3; ENSG00000183434; CTA
NIDQQVVIGM

SEQ ID NO: 87680 - protein, 8 aa, Homo sapiens
  misc_feature: Table A; Target 87680; HLA-B*08:01; TFDP3; ENSG00000183434; CTA
NPLGKQLL

SEQ ID NO: 87681 - protein, 9 aa, Homo sapiens
  misc_feature: Table A; Target 87681; HLA-A*02:01; TFDP3; ENSG00000183434; CTA
NQTSRPVAV

SEQ ID NO: 87682 - protein, 9 aa, Homo sapiens
  misc_feature: Table A; Target 87682; HLA-A*02:03; TFDP3; ENSG00000183434; CTA
NQTSRPVAV

SEQ ID NO: 87683 - protein, 9 aa, Homo sapiens
  misc_feature: Table A; Target 87683; HLA-B*08:01; TFDP3; ENSG00000183434; CTA
NQTSRPVAV

SEQ ID NO: 87684 - protein, 9 aa, Homo sapiens
  misc_feature: Table A; Target 87684; HLA-B*13:02; TFDP3; ENSG00000183434; CTA
NQTSRPVAV

SEQ ID NO: 87685 - protein, 9 aa, Homo sapiens
  misc_feature: Table A; Target 87685; HLA-B*37:01; TFDP3; ENSG00000183434; CTA
NQTSRPVAV

SEQ ID NO: 87686 - protein, 9 aa, Homo sapiens
  misc_feature: Table A; Target 87686; HLA-B*39:01; TFDP3; ENSG00000183434; CTA
NQTSRPVAV

SEQ ID NO: 87687 - protein, 9 aa, Homo sapiens
  misc_feature: Table A; Target 87687; HLA-C*02:02; TFDP3; ENSG00000183434; CTA
NQTSRPVAV

SEQ ID NO: 87688 - protein, 9 aa, Homo sapiens
  misc_feature: Table A; Target 87688; HLA-C*07:02; TFDP3; ENSG00000183434; CTA
NQTSRPVAV

SEQ ID NO: 87689 - protein, 9 aa, Homo sapiens
  misc_feature: Table A; Target 87689; HLA-C*16:01; TFDP3; ENSG00000183434; CTA
NQTSRPVAV

SEQ ID NO: 87690 - protein, 9 aa, Homo sapiens
  misc_feature: Table A; Target 87690; HLA-C*16:02; TFDP3; ENSG00000183434; CTA
NQTSRPVAV

SEQ ID NO: 87691 - protein, 8 aa, Homo sapiens
  misc_feature: Table A; Target 87691; HLA-B*13:02; TFDP3; ENSG00000183434; CTA
NQYVEEQV

SEQ ID NO: 87692 - protein, 9 aa, Homo sapiens
  misc_feature: Table A; Target 87692; HLA-B*27:05; TFDP3; ENSG00000183434; CTA
NQYVEEQVS

SEQ ID NO: 87693 - protein, 11 aa, Homo sapiens
  misc_feature: Table A; Target 87693; HLA-A*68:01; TFDP3; ENSG00000183434; CTA
NQYVEEQVSQR

SEQ ID NO: 87694 - protein, 11 aa, Homo sapiens
  misc_feature: Table A; Target 87694; HLA-B*27:05; TFDP3; ENSG00000183434; CTA
NQYVEEQVSQR

SEQ ID NO: 87695 - protein, 11 aa, Homo sapiens
  misc_feature: Table A; Target 87695; HLA-C*07:06; TFDP3; ENSG00000183434; CTA
NQYVEEQVSQR

SEQ ID NO: 87696 - protein, 9 aa, Homo sapiens
  misc_feature: Table A; Target 87696; HLA-C*12:03; TFDP3; ENSG00000183434; CTA
PAASNIPVV

SEQ ID NO: 87697 - protein, 9 aa, Homo sapiens
  misc_feature: Table A; Target 87697; HLA-C*16:02; TFDP3; ENSG00000183434; CTA
PAASNIPVV

SEQ ID NO: 87698 - protein, 9 aa, Homo sapiens
  misc_feature: Table A; Target 87698; HLA-A*02:07; TFDP3; ENSG00000183434; CTA
PLPNSVIHV

SEQ ID NO: 87699 - protein, 9 aa, Homo sapiens
  misc_feature: Table A; Target 87699; HLA-A*02:03; TFDP3; ENSG00000183434; CTA
PVAVHTSTV

SEQ ID NO: 87700 - protein, 11 aa, Homo sapiens
  misc_feature: Table A; Target 87700; HLA-A*24:02; TFDP3; ENSG00000183434; CTA
PYVTEMAQGTF

SEQ ID NO: 87701 - protein, 8 aa, Homo sapiens
  misc_feature: Table A; Target 87701; HLA-A*30:01; TFDP3; ENSG00000183434; CTA
QEVVGELV

SEQ ID NO: 87702 - protein, 8 aa, Homo sapiens
  misc_feature: Table A; Target 87702; HLA-B*18:01; TFDP3; ENSG00000183434; CTA
QEVVGELV

SEQ ID NO: 87703 - protein, 8 aa, Homo sapiens
  misc_feature: Table A; Target 87703; HLA-B*37:01; TFDP3; ENSG00000183434; CTA
QEVVGELV

SEQ ID NO: 87704 - protein, 8 aa, Homo sapiens
  misc_feature: Table A; Target 87704; HLA-B*40:01; TFDP3; ENSG00000183434; CTA
QEVVGELV

SEQ ID NO: 87705 - protein, 8 aa, Homo sapiens
  misc_feature: Table A; Target 87705; HLA-B*49:01; TFDP3; ENSG00000183434; CTA
QEVVGELV

SEQ ID NO: 87706 - protein, 9 aa, Homo sapiens
  misc_feature: Table A; Target 87706; HLA-A*30:01; TFDP3; ENSG00000183434; CTA
QEVVGELVA

SEQ ID NO: 87707 - protein, 9 aa, Homo sapiens
  misc_feature: Table A; Target 87707; HLA-B*18:01; TFDP3; ENSG00000183434; CTA
QEVVGELVA

SEQ ID NO: 87708 - protein, 9 aa, Homo sapiens
  misc_feature: Table A; Target 87708; HLA-B*40:01; TFDP3; ENSG00000183434; CTA
QEVVGELVA

SEQ ID NO: 87709 - protein, 9 aa, Homo sapiens
  misc_feature: Table A; Target 87709; HLA-B*40:02; TFDP3; ENSG00000183434; CTA
QEVVGELVA

SEQ ID NO: 87710 - protein, 9 aa, Homo sapiens
  misc_feature: Table A; Target 87710; HLA-B*49:01; TFDP3; ENSG00000183434; CTA
QEVVGELVA

SEQ ID NO: 87711 - protein, 10 aa, Homo sapiens
  misc_feature: Table A; Target 87711; HLA-B*27:02; TFDP3; ENSG00000183434; CTA
QEVVGELVAK

SEQ ID NO: 87712 - protein, 11 aa, Homo sapiens
  misc_feature: Table A; Target 87712; HLA-A*25:01; TFDP3; ENSG00000183434; CTA
QEVVGELVAKF

SEQ ID NO: 87713 - protein, 11 aa, Homo sapiens
  misc_feature: Table A; Target 87713; HLA-A*30:01; TFDP3; ENSG00000183434; CTA
QEVVGELVAKF

SEQ ID NO: 87714 - protein, 11 aa, Homo sapiens
  misc_feature: Table A; Target 87714; HLA-B*18:01; TFDP3; ENSG00000183434; CTA
QEVVGELVAKF

SEQ ID NO: 87715 - protein, 11 aa, Homo sapiens
  misc_feature: Table A; Target 87715; HLA-B*27:02; TFDP3; ENSG00000183434; CTA
QEVVGELVAKF

SEQ ID NO: 87716 - protein, 11 aa, Homo sapiens
  misc_feature: Table A; Target 87716; HLA-B*40:01; TFDP3; ENSG00000183434; CTA
QEVVGELVAKF

SEQ ID NO: 87717 - protein, 11 aa, Homo sapiens
  misc_feature: Table A; Target 87717; HLA-B*44:02; TFDP3; ENSG00000183434; CTA
QEVVGELVAKF

SEQ ID NO: 87718 - protein, 11 aa, Homo sapiens
  misc_feature: Table A; Target 87718; HLA-B*44:03; TFDP3; ENSG00000183434; CTA
QEVVGELVAKF

SEQ ID NO: 87719 - protein, 11 aa, Homo sapiens
  misc_feature: Table A; Target 87719; HLA-C*16:04; TFDP3; ENSG00000183434; CTA
QEVVGELVAKF

SEQ ID NO: 87720 - protein, 8 aa, Homo sapiens
  misc_feature: Table A; Target 87720; HLA-C*03:04; TFDP3; ENSG00000183434; CTA
QGTFGGVF

SEQ ID NO: 87721 - protein, 8 aa, Homo sapiens
  misc_feature: Table A; Target 87721; HLA-C*04:01; TFDP3; ENSG00000183434; CTA
QGTFGGVF

SEQ ID NO: 87722 - protein, 8 aa, Homo sapiens
  misc_feature: Table A; Target 87722; HLA-C*07:04; TFDP3; ENSG00000183434; CTA
QGTFGGVF

SEQ ID NO: 87723 - protein, 9 aa, Homo sapiens
  misc_feature: Table A; Target 87723; HLA-B*38:01; TFDP3; ENSG00000183434; CTA
QHSYSSPPW

SEQ ID NO: 87724 - protein, 9 aa, Homo sapiens
  misc_feature: Table A; Target 87724; HLA-B*08:01; TFDP3; ENSG00000183434; CTA
QIAFKNLVL

SEQ ID NO: 87725 - protein, 9 aa, Homo sapiens
  misc_feature: Table A; Target 87725; HLA-A*23:01; TFDP3; ENSG00000183434; CTA
QLILQQIAF

SEQ ID NO: 87726 - protein, 9 aa, Homo sapiens
  misc_feature: Table A; Target 87726; HLA-A*32:01; TFDP3; ENSG00000183434; CTA
QLILQQIAF

SEQ ID NO: 87727 - protein, 9 aa, Homo sapiens
  misc_feature: Table A; Target 87727; HLA-B*15:01; TFDP3; ENSG00000183434; CTA
QLILQQIAF

SEQ ID NO: 87728 - protein, 9 aa, Homo sapiens
  misc_feature: Table A; Target 87728; HLA-B*15:03; TFDP3; ENSG00000183434; CTA
QLILQQIAF

SEQ ID NO: 87729 - protein, 9 aa, Homo sapiens
  misc_feature: Table A; Target 87729; HLA-B*44:02; TFDP3; ENSG00000183434; CTA
QLILQQIAF

SEQ ID NO: 87730 - protein, 9 aa, Homo sapiens
  misc_feature: Table A; Target 87730; HLA-B*44:03; TFDP3; ENSG00000183434; CTA
QLILQQIAF

SEQ ID NO: 87731 - protein, 9 aa, Homo sapiens
  misc_feature: Table A; Target 87731; HLA-B*46:01; TFDP3; ENSG00000183434; CTA
QLILQQIAF

SEQ ID NO: 87732 - protein, 9 aa, Homo sapiens
  misc_feature: Table A; Target 87732; HLA-B*13:02; TFDP3; ENSG00000183434; CTA
QQIAFKNLV

SEQ ID NO: 87733 - protein, 11 aa, Homo sapiens
  misc_feature: Table A; Target 87733; HLA-A*31:01; TFDP3; ENSG00000183434; CTA
QQIAFKNLVLR

SEQ ID NO: 87734 - protein, 8 aa, Homo sapiens
  misc_feature: Table A; Target 87734; HLA-B*13:02; TFDP3; ENSG00000183434; CTA
QQLILQQI

SEQ ID NO: 87735 - protein, 10 aa, Homo sapiens
  misc_feature: Table A; Target 87735; HLA-B*15:01; TFDP3; ENSG00000183434; CTA
QQLILQQIAF

SEQ ID NO: 87736 - protein, 10 aa, Homo sapiens
  misc_feature: Table A; Target 87736; HLA-B*15:03; TFDP3; ENSG00000183434; CTA
QQLILQQIAF

SEQ ID NO: 87737 - protein, 10 aa, Homo sapiens
  misc_feature: Table A; Target 87737; HLA-C*07:06; TFDP3; ENSG00000183434; CTA
QQVVIGMPQR

SEQ ID NO: 87738 - protein, 9 aa, Homo sapiens
  misc_feature: Table A; Target 87738; HLA-A*01:01; TFDP3; ENSG00000183434; CTA
QSELQQLIL

SEQ ID NO: 87739 - protein, 9 aa, Homo sapiens
  misc_feature: Table A; Target 87739; HLA-A*03:01; TFDP3; ENSG00000183434; CTA
QTSRPVAVH

SEQ ID NO: 87740 - protein, 9 aa, Homo sapiens
  misc_feature: Table A; Target 87740; HLA-A*03:02; TFDP3; ENSG00000183434; CTA
QTSRPVAVH

SEQ ID NO: 87741 - protein, 9 aa, Homo sapiens
  misc_feature: Table A; Target 87741; HLA-A*32:01; TFDP3; ENSG00000183434; CTA
QTSRPVAVH

SEQ ID NO: 87742 - protein, 9 aa, Homo sapiens
  misc_feature: Table A; Target 87742; HLA-A*68:01; TFDP3; ENSG00000183434; CTA
QVVIGMPQR

SEQ ID NO: 87743 - protein, 9 aa, Homo sapiens
  misc_feature: Table A; Target 87743; HLA-C*07:06; TFDP3; ENSG00000183434; CTA
QVVIGMPQR

SEQ ID NO: 87744 - protein, 10 aa, Homo sapiens
  misc_feature: Table A; Target 87744; HLA-A*31:01; TFDP3; ENSG00000183434; CTA
QYVEEQVSQR

SEQ ID NO: 87745 - protein, 10 aa, Homo sapiens
  misc_feature: Table A; Target 87745; HLA-A*33:01; TFDP3; ENSG00000183434; CTA
QYVEEQVSQR

SEQ ID NO: 87746 - protein, 10 aa, Homo sapiens
  misc_feature: Table A; Target 87746; HLA-A*33:03; TFDP3; ENSG00000183434; CTA
QYVEEQVSQR

SEQ ID NO: 87747 - protein, 10 aa, Homo sapiens
  misc_feature: Table A; Target 87747; HLA-A*68:01; TFDP3; ENSG00000183434; CTA
QYVEEQVSQR

SEQ ID NO: 87748 - protein, 10 aa, Homo sapiens
  misc_feature: Table A; Target 87748; HLA-B*27:02; TFDP3; ENSG00000183434; CTA
QYVEEQVSQR

SEQ ID NO: 87749 - protein, 10 aa, Homo sapiens
  misc_feature: Table A; Target 87749; HLA-C*07:06; TFDP3; ENSG00000183434; CTA
QYVEEQVSQR

SEQ ID NO: 87750 - protein, 9 aa, Homo sapiens
  misc_feature: Table A; Target 87750; HLA-B*08:01; TFDP3; ENSG00000183434; CTA
RIKQKQSEL

SEQ ID NO: 87751 - protein, 9 aa, Homo sapiens
  misc_feature: Table A; Target 87751; HLA-B*07:02; TFDP3; ENSG00000183434; CTA
RPAASNIPV

SEQ ID NO: 87752 - protein, 9 aa, Homo sapiens
  misc_feature: Table A; Target 87752; HLA-B*56:01; TFDP3; ENSG00000183434; CTA
RPAASNIPV

SEQ ID NO: 87753 - protein, 9 aa, Homo sapiens
  misc_feature: Table A; Target 87753; HLA-C*07:02; TFDP3; ENSG00000183434; CTA
RPAASNIPV

SEQ ID NO: 87754 - protein, 10 aa, Homo sapiens
  misc_feature: Table A; Target 87754; HLA-B*07:02; TFDP3; ENSG00000183434; CTA
RPAASNIPVV

SEQ ID NO: 87755 - protein, 10 aa, Homo sapiens
  misc_feature: Table A; Target 87755; HLA-B*56:01; TFDP3; ENSG00000183434; CTA
RPAASNIPVV

SEQ ID NO: 87756 - protein, 10 aa, Homo sapiens
  misc_feature: Table A; Target 87756; HLA-C*07:02; TFDP3; ENSG00000183434; CTA
RPAASNIPVV

SEQ ID NO: 87757 - protein, 10 aa, Homo sapiens
  misc_feature: Table A; Target 87757; HLA-B*56:01; TFDP3; ENSG00000183434; CTA
RPLPNSVIHV

SEQ ID NO: 87758 - protein, 10 aa, Homo sapiens
  misc_feature: Table A; Target 87758; HLA-C*07:02; TFDP3; ENSG00000183434; CTA
RPLPNSVIHV

SEQ ID NO: 87759 - protein, 9 aa, Homo sapiens
  misc_feature: Table A; Target 87759; HLA-B*07:02; TFDP3; ENSG00000183434; CTA
RPVAVHTST

SEQ ID NO: 87760 - protein, 9 aa, Homo sapiens
  misc_feature: Table A; Target 87760; HLA-B*56:01; TFDP3; ENSG00000183434; CTA
RPVAVHTST

SEQ ID NO: 87761 - protein, 9 aa, Homo sapiens
  misc_feature: Table A; Target 87761; HLA-C*07:02; TFDP3; ENSG00000183434; CTA
RPVAVHTST

SEQ ID NO: 87762 - protein, 10 aa, Homo sapiens
  misc_feature: Table A; Target 87762; HLA-B*07:02; TFDP3; ENSG00000183434; CTA
RPVAVHTSTV

SEQ ID NO: 87763 - protein, 10 aa, Homo sapiens
  misc_feature: Table A; Target 87763; HLA-B*51:01; TFDP3; ENSG00000183434; CTA
RPVAVHTSTV

SEQ ID NO: 87764 - protein, 10 aa, Homo sapiens
  misc_feature: Table A; Target 87764; HLA-B*56:01; TFDP3; ENSG00000183434; CTA
RPVAVHTSTV

SEQ ID NO: 87765 - protein, 10 aa, Homo sapiens
  misc_feature: Table A; Target 87765; HLA-C*07:02; TFDP3; ENSG00000183434; CTA
RPVAVHTSTV

SEQ ID NO: 87766 - protein, 9 aa, Homo sapiens
  misc_feature: Table A; Target 87766; HLA-A*03:01; TFDP3; ENSG00000183434; CTA
RTYDALNVL

SEQ ID NO: 87767 - protein, 9 aa, Homo sapiens
  misc_feature: Table A; Target 87767; HLA-B*58:01; TFDP3; ENSG00000183434; CTA
RTYDALNVL

SEQ ID NO: 87768 - protein, 9 aa, Homo sapiens
  misc_feature: Table A; Target 87768; HLA-C*03:04; TFDP3; ENSG00000183434; CTA
RTYDALNVL

SEQ ID NO: 87769 - protein, 10 aa, Homo sapiens
  misc_feature: Table A; Target 87769; HLA-A*31:01; TFDP3; ENSG00000183434; CTA
RTYDALNVLM

SEQ ID NO: 87770 - protein, 10 aa, Homo sapiens
  misc_feature: Table A; Target 87770; HLA-B*57:01; TFDP3; ENSG00000183434; CTA
RTYDALNVLM

SEQ ID NO: 87771 - protein, 10 aa, Homo sapiens
  misc_feature: Table A; Target 87771; HLA-B*58:01; TFDP3; ENSG00000183434; CTA
RTYDALNVLM

SEQ ID NO: 87772 - protein, 9 aa, Homo sapiens
  misc_feature: Table A; Target 87772; HLA-A*31:01; TFDP3; ENSG00000183434; CTA
SAEDLKMAR

SEQ ID NO: 87773 - protein, 9 aa, Homo sapiens
  misc_feature: Table A; Target 87773; HLA-A*33:01; TFDP3; ENSG00000183434; CTA
SAEDLKMAR

SEQ ID NO: 87774 - protein, 9 aa, Homo sapiens
  misc_feature: Table A; Target 87774; HLA-A*33:03; TFDP3; ENSG00000183434; CTA
SAEDLKMAR

SEQ ID NO: 87775 - protein, 9 aa, Homo sapiens
  misc_feature: Table A; Target 87775; HLA-A*68:01; TFDP3; ENSG00000183434; CTA
SAEDLKMAR

SEQ ID NO: 87776 - protein, 9 aa, Homo sapiens
  misc_feature: Table A; Target 87776; HLA-C*07:06; TFDP3; ENSG00000183434; CTA
SAEDLKMAR

SEQ ID NO: 87777 - protein, 9 aa, Homo sapiens
  misc_feature: Table A; Target 87777; HLA-C*07:06; TFDP3; ENSG00000183434; CTA
SAQNCQNLR

SEQ ID NO: 87778 - protein, 9 aa, Homo sapiens
  misc_feature: Table A; Target 87778; HLA-C*12:03; TFDP3; ENSG00000183434; CTA
SASDLTNIA

SEQ ID NO: 87779 - protein, 10 aa, Homo sapiens
  misc_feature: Table A; Target 87779; HLA-A*68:01; TFDP3; ENSG00000183434; CTA
SASDLTNIAI

SEQ ID NO: 87780 - protein, 10 aa, Homo sapiens
  misc_feature: Table A; Target 87780; HLA-B*13:02; TFDP3; ENSG00000183434; CTA
SASDLTNIAI

SEQ ID NO: 87781 - protein, 10 aa, Homo sapiens
  misc_feature: Table A; Target 87781; HLA-C*02:02; TFDP3; ENSG00000183434; CTA
SASDLTNIAI

SEQ ID NO: 87782 - protein, 10 aa, Homo sapiens
  misc_feature: Table A; Target 87782; HLA-C*07:06; TFDP3; ENSG00000183434; CTA
SASDLTNIAI

SEQ ID NO: 87783 - protein, 8 aa, Homo sapiens
  misc_feature: Table A; Target 87783; HLA-B*13:02; TFDP3; ENSG00000183434; CTA
SAYDVKNI

SEQ ID NO: 87784 - protein, 8 aa, Homo sapiens
  misc_feature: Table A; Target 87784; HLA-B*51:01; TFDP3; ENSG00000183434; CTA
SAYDVKNI

SEQ ID NO: 87785 - protein, 8 aa, Homo sapiens
  misc_feature: Table A; Target 87785; HLA-C*06:02; TFDP3; ENSG00000183434; CTA
SAYDVKNI

SEQ ID NO: 87786 - protein, 8 aa, Homo sapiens
  misc_feature: Table A; Target 87786; HLA-C*12:03; TFDP3; ENSG00000183434; CTA
SAYDVKNI

SEQ ID NO: 87787 - protein, 8 aa, Homo sapiens
  misc_feature: Table A; Target 87787; HLA-C*16:02; TFDP3; ENSG00000183434; CTA
SAYDVKNI

SEQ ID NO: 87788 - protein, 8 aa, Homo sapiens
  misc_feature: Table A; Target 87788; HLA-C*16:04; TFDP3; ENSG00000183434; CTA
SAYDVKNI

SEQ ID NO: 87789 - protein, 9 aa, Homo sapiens
  misc_feature: Table A; Target 87789; HLA-A*03:01; TFDP3; ENSG00000183434; CTA
SAYDVKNIK

SEQ ID NO: 87790 - protein, 9 aa, Homo sapiens
  misc_feature: Table A; Target 87790; HLA-A*03:02; TFDP3; ENSG00000183434; CTA
SAYDVKNIK

SEQ ID NO: 87791 - protein, 9 aa, Homo sapiens
  misc_feature: Table A; Target 87791; HLA-A*11:01; TFDP3; ENSG00000183434; CTA
SAYDVKNIK

SEQ ID NO: 87792 - protein, 9 aa, Homo sapiens
  misc_feature: Table A; Target 87792; HLA-A*68:01; TFDP3; ENSG00000183434; CTA
SAYDVKNIK

SEQ ID NO: 87793 - protein, 9 aa, Homo sapiens
  misc_feature: Table A; Target 87793; HLA-C*02:02; TFDP3; ENSG00000183434; CTA
SAYDVKNIK

SEQ ID NO: 87794 - protein, 9 aa, Homo sapiens
  misc_feature: Table A; Target 87794; HLA-C*07:06; TFDP3; ENSG00000183434; CTA
SAYDVKNIK

SEQ ID NO: 87795 - protein, 9 aa, Homo sapiens
  misc_feature: Table A; Target 87795; HLA-C*12:03; TFDP3; ENSG00000183434; CTA
SAYDVKNIK

SEQ ID NO: 87796 - protein, 9 aa, Homo sapiens
  misc_feature: Table A; Target 87796; HLA-C*16:01; TFDP3; ENSG00000183434; CTA
SAYDVKNIK

SEQ ID NO: 87797 - protein, 10 aa, Homo sapiens
  misc_feature: Table A; Target 87797; HLA-A*11:01; TFDP3; ENSG00000183434; CTA
SAYDVKNIKR

SEQ ID NO: 87798 - protein, 10 aa, Homo sapiens
  misc_feature: Table A; Target 87798; HLA-A*31:01; TFDP3; ENSG00000183434; CTA
SAYDVKNIKR

SEQ ID NO: 87799 - protein, 10 aa, Homo sapiens
  misc_feature: Table A; Target 87799; HLA-A*33:01; TFDP3; ENSG00000183434; CTA
SAYDVKNIKR

SEQ ID NO: 87800 - protein, 10 aa, Homo sapiens
  misc_feature: Table A; Target 87800; HLA-A*33:03; TFDP3; ENSG00000183434; CTA
SAYDVKNIKR

SEQ ID NO: 87801 - protein, 10 aa, Homo sapiens
  misc_feature: Table A; Target 87801; HLA-A*68:01; TFDP3; ENSG00000183434; CTA
SAYDVKNIKR

SEQ ID NO: 87802 - protein, 10 aa, Homo sapiens
  misc_feature: Table A; Target 87802; HLA-C*07:06; TFDP3; ENSG00000183434; CTA
SAYDVKNIKR

SEQ ID NO: 87803 - protein, 9 aa, Homo sapiens
  misc_feature: Table A; Target 87803; HLA-C*01:02; TFDP3; ENSG00000183434; CTA
SCQEVVGEL

SEQ ID NO: 87804 - protein, 9 aa, Homo sapiens
  misc_feature: Table A; Target 87804; HLA-B*38:01; TFDP3; ENSG00000183434; CTA
SDDKSEYLF

SEQ ID NO: 87805 - protein, 8 aa, Homo sapiens
  misc_feature: Table A; Target 87805; HLA-B*37:01; TFDP3; ENSG00000183434; CTA
SDLTNIAI

SEQ ID NO: 87806 - protein, 11 aa, Homo sapiens
  misc_feature: Table A; Target 87806; HLA-B*44:02; TFDP3; ENSG00000183434; CTA
SELQQLILQQI

SEQ ID NO: 87807 - protein, 11 aa, Homo sapiens
  misc_feature: Table A; Target 87807; HLA-B*44:03; TFDP3; ENSG00000183434; CTA
SELQQLILQQI

SEQ ID NO: 87808 - protein, 11 aa, Homo sapiens
  misc_feature: Table A; Target 87808; HLA-B*49:01; TFDP3; ENSG00000183434; CTA
SELQQLILQQI

SEQ ID NO: 87809 - protein, 9 aa, Homo sapiens
  misc_feature: Table A; Target 87809; HLA-A*26:01; TFDP3; ENSG00000183434; CTA
SISDDKSEY

SEQ ID NO: 87810 - protein, 9 aa, Homo sapiens
  misc_feature: Table A; Target 87810; HLA-A*30:02; TFDP3; ENSG00000183434; CTA
SISDDKSEY

SEQ ID NO: 87811 - protein, 9 aa, Homo sapiens
  misc_feature: Table A; Target 87811; HLA-A*32:01; TFDP3; ENSG00000183434; CTA
SISDDKSEY

SEQ ID NO: 87812 - protein, 9 aa, Homo sapiens
  misc_feature: Table A; Target 87812; HLA-B*15:01; TFDP3; ENSG00000183434; CTA
SISDDKSEY

SEQ ID NO: 87813 - protein, 9 aa, Homo sapiens
  misc_feature: Table A; Target 87813; HLA-B*46:01; TFDP3; ENSG00000183434; CTA
SISDDKSEY

SEQ ID NO: 87814 - protein, 9 aa, Homo sapiens
  misc_feature: Table A; Target 87814; HLA-C*07:04; TFDP3; ENSG00000183434; CTA
SISDDKSEY

SEQ ID NO: 87815 - protein, 9 aa, Homo sapiens
  misc_feature: Table A; Target 87815; HLA-C*16:01; TFDP3; ENSG00000183434; CTA
SISDDKSEY

SEQ ID NO: 87816 - protein, 9 aa, Homo sapiens
  misc_feature: Table A; Target 87816; HLA-A*02:01; TFDP3; ENSG00000183434; CTA
SLTEANEEL

SEQ ID NO: 87817 - protein, 9 aa, Homo sapiens
  misc_feature: Table A; Target 87817; HLA-B*35:03; TFDP3; ENSG00000183434; CTA
SLTEANEEL

SEQ ID NO: 87818 - protein, 9 aa, Homo sapiens
  misc_feature: Table A; Target 87818; HLA-B*39:01; TFDP3; ENSG00000183434; CTA
SLTEANEEL

SEQ ID NO: 87819 - protein, 9 aa, Homo sapiens
  misc_feature: Table A; Target 87819; HLA-B*55:01; TFDP3; ENSG00000183434; CTA
SLTEANEEL

SEQ ID NO: 87820 - protein, 9 aa, Homo sapiens
  misc_feature: Table A; Target 87820; HLA-C*01:02; TFDP3; ENSG00000183434; CTA
SLTEANEEL

SEQ ID NO: 87821 - protein, 9 aa, Homo sapiens
  misc_feature: Table A; Target 87821; HLA-C*14:02; TFDP3; ENSG00000183434; CTA
SLTEANEEL

SEQ ID NO: 87822 - protein, 11 aa, Homo sapiens
  misc_feature: Table A; Target 87822; HLA-A*02:01; TFDP3; ENSG00000183434; CTA
SLTEANEELKV

SEQ ID NO: 87823 - protein, 10 aa, Homo sapiens
  misc_feature: Table A; Target 87823; HLA-A*31:01; TFDP3; ENSG00000183434; CTA
SMKVWETVQR

SEQ ID NO: 87824 - protein, 10 aa, Homo sapiens
  misc_feature: Table A; Target 87824; HLA-A*33:03; TFDP3; ENSG00000183434; CTA
SMKVWETVQR

SEQ ID NO: 87825 - protein, 11 aa, Homo sapiens
  misc_feature: Table A; Target 87825; HLA-A*30:02; TFDP3; ENSG00000183434; CTA
SNHASPNESAY

SEQ ID NO: 87826 - protein, 9 aa, Homo sapiens
  misc_feature: Table A; Target 87826; HLA-B*07:02; TFDP3; ENSG00000183434; CTA
SPNESAYDV

SEQ ID NO: 87827 - protein, 9 aa, Homo sapiens
  misc_feature: Table A; Target 87827; HLA-B*35:01; TFDP3; ENSG00000183434; CTA
SPNESAYDV

SEQ ID NO: 87828 - protein, 9 aa, Homo sapiens
  misc_feature: Table A; Target 87828; HLA-B*35:03; TFDP3; ENSG00000183434; CTA
SPNESAYDV

SEQ ID NO: 87829 - protein, 9 aa, Homo sapiens
  misc_feature: Table A; Target 87829; HLA-B*55:01; TFDP3; ENSG00000183434; CTA
SPNESAYDV

SEQ ID NO: 87830 - protein, 9 aa, Homo sapiens
  misc_feature: Table A; Target 87830; HLA-B*56:01; TFDP3; ENSG00000183434; CTA
SPNESAYDV

SEQ ID NO: 87831 - protein, 10 aa, Homo sapiens
  misc_feature: Table A; Target 87831; HLA-B*35:01; TFDP3; ENSG00000183434; CTA
SPNESAYDVK

SEQ ID NO: 87832 - protein, 10 aa, Homo sapiens
  misc_feature: Table A; Target 87832; HLA-C*07:06; TFDP3; ENSG00000183434; CTA
SPNESAYDVK

SEQ ID NO: 87833 - protein, 9 aa, Homo sapiens
  misc_feature: Table A; Target 87833; HLA-A*23:01; TFDP3; ENSG00000183434; CTA
SPNPPSTHF

SEQ ID NO: 87834 - protein, 9 aa, Homo sapiens
  misc_feature: Table A; Target 87834; HLA-A*24:02; TFDP3; ENSG00000183434; CTA
SPNPPSTHF

SEQ ID NO: 87835 - protein, 9 aa, Homo sapiens
  misc_feature: Table A; Target 87835; HLA-A*25:01; TFDP3; ENSG00000183434; CTA
SPNPPSTHF

SEQ ID NO: 87836 - protein, 9 aa, Homo sapiens
  misc_feature: Table A; Target 87836; HLA-A*30:02; TFDP3; ENSG00000183434; CTA
SPNPPSTHF

SEQ ID NO: 87837 - protein, 9 aa, Homo sapiens
  misc_feature: Table A; Target 87837; HLA-A*32:01; TFDP3; ENSG00000183434; CTA
SPNPPSTHF

SEQ ID NO: 87838 - protein, 9 aa, Homo sapiens
  misc_feature: Table A; Target 87838; HLA-A*33:01; TFDP3; ENSG00000183434; CTA
SPNPPSTHF

SEQ ID NO: 87839 - protein, 9 aa, Homo sapiens
  misc_feature: Table A; Target 87839; HLA-A*33:03; TFDP3; ENSG00000183434; CTA
SPNPPSTHF

SEQ ID NO: 87840 - protein, 9 aa, Homo sapiens
  misc_feature: Table A; Target 87840; HLA-B*08:01; TFDP3; ENSG00000183434; CTA
SPNPPSTHF

SEQ ID NO: 87841 - protein, 9 aa, Homo sapiens
  misc_feature: Table A; Target 87841; HLA-B*15:01; TFDP3; ENSG00000183434; CTA
SPNPPSTHF

SEQ ID NO: 87842 - protein, 9 aa, Homo sapiens
  misc_feature: Table A; Target 87842; HLA-B*15:03; TFDP3; ENSG00000183434; CTA
SPNPPSTHF

SEQ ID NO: 87843 - protein, 9 aa, Homo sapiens
  misc_feature: Table A; Target 87843; HLA-B*35:01; TFDP3; ENSG00000183434; CTA
SPNPPSTHF

SEQ ID NO: 87844 - protein, 9 aa, Homo sapiens
  misc_feature: Table A; Target 87844; HLA-B*35:03; TFDP3; ENSG00000183434; CTA
SPNPPSTHF

SEQ ID NO: 87845 - protein, 9 aa, Homo sapiens
  misc_feature: Table A; Target 87845; HLA-B*37:01; TFDP3; ENSG00000183434; CTA
SPNPPSTHF

SEQ ID NO: 87846 - protein, 9 aa, Homo sapiens
  misc_feature: Table A; Target 87846; HLA-B*44:03; TFDP3; ENSG00000183434; CTA
SPNPPSTHF

SEQ ID NO: 87847 - protein, 9 aa, Homo sapiens
  misc_feature: Table A; Target 87847; HLA-B*46:01; TFDP3; ENSG00000183434; CTA
SPNPPSTHF

SEQ ID NO: 87848 - protein, 9 aa, Homo sapiens
  misc_feature: Table A; Target 87848; HLA-B*51:01; TFDP3; ENSG00000183434; CTA
SPNPPSTHF

SEQ ID NO: 87849 - protein, 9 aa, Homo sapiens
  misc_feature: Table A; Target 87849; HLA-B*55:01; TFDP3; ENSG00000183434; CTA
SPNPPSTHF

SEQ ID NO: 87850 - protein, 9 aa, Homo sapiens
  misc_feature: Table A; Target 87850; HLA-B*56:01; TFDP3; ENSG00000183434; CTA
SPNPPSTHF

SEQ ID NO: 87851 - protein, 9 aa, Homo sapiens
  misc_feature: Table A; Target 87851; HLA-B*58:01; TFDP3; ENSG00000183434; CTA
SPNPPSTHF

SEQ ID NO: 87852 - protein, 9 aa, Homo sapiens
  misc_feature: Table A; Target 87852; HLA-C*01:02; TFDP3; ENSG00000183434; CTA
SPNPPSTHF

SEQ ID NO: 87853 - protein, 9 aa, Homo sapiens
  misc_feature: Table A; Target 87853; HLA-C*02:02; TFDP3; ENSG00000183434; CTA
SPNPPSTHF

SEQ ID NO: 87854 - protein, 9 aa, Homo sapiens
  misc_feature: Table A; Target 87854; HLA-C*03:03; TFDP3; ENSG00000183434; CTA
SPNPPSTHF

SEQ ID NO: 87855 - protein, 9 aa, Homo sapiens
  misc_feature: Table A; Target 87855; HLA-C*03:04; TFDP3; ENSG00000183434; CTA
SPNPPSTHF

SEQ ID NO: 87856 - protein, 9 aa, Homo sapiens
  misc_feature: Table A; Target 87856; HLA-C*04:01; TFDP3; ENSG00000183434; CTA
SPNPPSTHF

SEQ ID NO: 87857 - protein, 9 aa, Homo sapiens
  misc_feature: Table A; Target 87857; HLA-C*05:01; TFDP3; ENSG00000183434; CTA
SPNPPSTHF

SEQ ID NO: 87858 - protein, 9 aa, Homo sapiens
  misc_feature: Table A; Target 87858; HLA-C*07:02; TFDP3; ENSG00000183434; CTA
SPNPPSTHF

SEQ ID NO: 87859 - protein, 9 aa, Homo sapiens
  misc_feature: Table A; Target 87859; HLA-C*07:06; TFDP3; ENSG00000183434; CTA
SPNPPSTHF

SEQ ID NO: 87860 - protein, 9 aa, Homo sapiens
  misc_feature: Table A; Target 87860; HLA-C*14:02; TFDP3; ENSG00000183434; CTA
SPNPPSTHF

SEQ ID NO: 87861 - protein, 9 aa, Homo sapiens
  misc_feature: Table A; Target 87861; HLA-C*16:01; TFDP3; ENSG00000183434; CTA
SPNPPSTHF

SEQ ID NO: 87862 - protein, 10 aa, Homo sapiens
  misc_feature: Table A; Target 87862; HLA-B*54:01; TFDP3; ENSG00000183434; CTA
SPNPPSTHFA

SEQ ID NO: 87863 - protein, 10 aa, Homo sapiens
  misc_feature: Table A; Target 87863; HLA-B*56:01; TFDP3; ENSG00000183434; CTA
SPNPPSTHFA

SEQ ID NO: 87864 - protein, 9 aa, Homo sapiens
  misc_feature: Table A; Target 87864; HLA-A*02:03; TFDP3; ENSG00000183434; CTA
SQRPLPNSV

SEQ ID NO: 87865 - protein, 9 aa, Homo sapiens
  misc_feature: Table A; Target 87865; HLA-A*32:01; TFDP3; ENSG00000183434; CTA
SQRPLPNSV

SEQ ID NO: 87866 - protein, 9 aa, Homo sapiens
  misc_feature: Table A; Target 87866; HLA-B*13:02; TFDP3; ENSG00000183434; CTA
SQRPLPNSV

SEQ ID NO: 87867 - protein, 9 aa, Homo sapiens
  misc_feature: Table A; Target 87867; HLA-B*15:03; TFDP3; ENSG00000183434; CTA
SQRPLPNSV

SEQ ID NO: 87868 - protein, 11 aa, Homo sapiens
  misc_feature: Table A; Target 87868; HLA-A*32:01; TFDP3; ENSG00000183434; CTA
SQYSGSRVETP

SEQ ID NO: 87869 - protein, 11 aa, Homo sapiens
  misc_feature: Table A; Target 87869; HLA-B*15:01; TFDP3; ENSG00000183434; CTA
SQYSGSRVETP

SEQ ID NO: 87870 - protein, 11 aa, Homo sapiens
  misc_feature: Table A; Target 87870; HLA-A*68:02; TFDP3; ENSG00000183434; CTA
SSFEIHDDTEV

SEQ ID NO: 87871 - protein, 11 aa, Homo sapiens
  misc_feature: Table A; Target 87871; HLA-A*31:01; TFDP3; ENSG00000183434; CTA
SSPPWAGQHNR

SEQ ID NO: 87872 - protein, 9 aa, Homo sapiens
  misc_feature: Table A; Target 87872; HLA-A*68:02; TFDP3; ENSG00000183434; CTA
SSVNIDQQV

SEQ ID NO: 87873 - protein, 9 aa, Homo sapiens
  misc_feature: Table A; Target 87873; HLA-B*13:02; TFDP3; ENSG00000183434; CTA
SSVNIDQQV

SEQ ID NO: 87874 - protein, 8 aa, Homo sapiens
  misc_feature: Table A; Target 87874; HLA-A*11:01; TFDP3; ENSG00000183434; CTA
STVNPLGK

SEQ ID NO: 87875 - protein, 9 aa, Homo sapiens
  misc_feature: Table A; Target 87875; HLA-B*13:02; TFDP3; ENSG00000183434; CTA
SVNIDQQVV

SEQ ID NO: 87876 - protein, 9 aa, Homo sapiens
  misc_feature: Table A; Target 87876; HLA-A*30:01; TFDP3; ENSG00000183434; CTA
TEANEELKV

SEQ ID NO: 87877 - protein, 9 aa, Homo sapiens
  misc_feature: Table A; Target 87877; HLA-B*13:02; TFDP3; ENSG00000183434; CTA
TEANEELKV

SEQ ID NO: 87878 - protein, 9 aa, Homo sapiens
  misc_feature: Table A; Target 87878; HLA-B*40:01; TFDP3; ENSG00000183434; CTA
TEANEELKV

SEQ ID NO: 87879 - protein, 9 aa, Homo sapiens
  misc_feature: Table A; Target 87879; HLA-B*44:03; TFDP3; ENSG00000183434; CTA
TEANEELKV

SEQ ID NO: 87880 - protein, 9 aa, Homo sapiens
  misc_feature: Table A; Target 87880; HLA-B*49:01; TFDP3; ENSG00000183434; CTA
TEANEELKV

SEQ ID NO: 87881 - protein, 10 aa, Homo sapiens
  misc_feature: Table A; Target 87881; HLA-A*30:01; TFDP3; ENSG00000183434; CTA
TEANEELKVL

SEQ ID NO: 87882 - protein, 10 aa, Homo sapiens
  misc_feature: Table A; Target 87882; HLA-B*27:05; TFDP3; ENSG00000183434; CTA
TEANEELKVL

SEQ ID NO: 87883 - protein, 10 aa, Homo sapiens
  misc_feature: Table A; Target 87883; HLA-B*40:01; TFDP3; ENSG00000183434; CTA
TEANEELKVL

SEQ ID NO: 87884 - protein, 10 aa, Homo sapiens
  misc_feature: Table A; Target 87884; HLA-B*40:02; TFDP3; ENSG00000183434; CTA
TEANEELKVL

SEQ ID NO: 87885 - protein, 10 aa, Homo sapiens
  misc_feature: Table A; Target 87885; HLA-B*44:02; TFDP3; ENSG00000183434; CTA
TEANEELKVL

SEQ ID NO: 87886 - protein, 10 aa, Homo sapiens
  misc_feature: Table A; Target 87886; HLA-B*44:03; TFDP3; ENSG00000183434; CTA
TEANEELKVL

SEQ ID NO: 87887 - protein, 10 aa, Homo sapiens
  misc_feature: Table A; Target 87887; HLA-B*49:01; TFDP3; ENSG00000183434; CTA
TEANEELKVL

SEQ ID NO: 87888 - protein, 11 aa, Homo sapiens
  misc_feature: Table A; Target 87888; HLA-A*30:01; TFDP3; ENSG00000183434; CTA
TEANEELKVLM

SEQ ID NO: 87889 - protein, 11 aa, Homo sapiens
  misc_feature: Table A; Target 87889; HLA-B*40:01; TFDP3; ENSG00000183434; CTA
TEANEELKVLM

SEQ ID NO: 87890 - protein, 11 aa, Homo sapiens
  misc_feature: Table A; Target 87890; HLA-B*44:02; TFDP3; ENSG00000183434; CTA
TEANEELKVLM

SEQ ID NO: 87891 - protein, 11 aa, Homo sapiens
  misc_feature: Table A; Target 87891; HLA-B*44:03; TFDP3; ENSG00000183434; CTA
TEANEELKVLM

SEQ ID NO: 87892 - protein, 8 aa, Homo sapiens
  misc_feature: Table A; Target 87892; HLA-B*18:01; TFDP3; ENSG00000183434; CTA
TEMAQGTF

SEQ ID NO: 87893 - protein, 8 aa, Homo sapiens
  misc_feature: Table A; Target 87893; HLA-B*37:01; TFDP3; ENSG00000183434; CTA
TEMAQGTF

SEQ ID NO: 87894 - protein, 8 aa, Homo sapiens
  misc_feature: Table A; Target 87894; HLA-B*44:03; TFDP3; ENSG00000183434; CTA
TEMAQGTF

SEQ ID NO: 87895 - protein, 8 aa, Homo sapiens
  misc_feature: Table A; Target 87895; HLA-C*16:04; TFDP3; ENSG00000183434; CTA
TEMAQGTF

SEQ ID NO: 87896 - protein, 9 aa, Homo sapiens
  misc_feature: Table A; Target 87896; HLA-B*49:01; TFDP3; ENSG00000183434; CTA
TEMAQGTFG

SEQ ID NO: 87897 - protein, 11 aa, Homo sapiens
  misc_feature: Table A; Target 87897; HLA-B*49:01; TFDP3; ENSG00000183434; CTA
TEMAQGTFGGV

SEQ ID NO: 87898 - protein, 9 aa, Homo sapiens
  misc_feature: Table A; Target 87898; HLA-A*23:01; TFDP3; ENSG00000183434; CTA
TFGGVFTTA

SEQ ID NO: 87899 - protein, 9 aa, Homo sapiens
  misc_feature: Table A; Target 87899; HLA-B*54:01; TFDP3; ENSG00000183434; CTA
TFGGVFTTA

SEQ ID NO: 87900 - protein, 9 aa, Homo sapiens
  misc_feature: Table A; Target 87900; HLA-C*14:02; TFDP3; ENSG00000183434; CTA
TFGGVFTTA

SEQ ID NO: 87901 - protein, 10 aa, Homo sapiens
  misc_feature: Table A; Target 87901; HLA-C*04:01; TFDP3; ENSG00000183434; CTA
TFGGVFTTAG

SEQ ID NO: 87902 - protein, 11 aa, Homo sapiens
  misc_feature: Table A; Target 87902; HLA-A*30:02; TFDP3; ENSG00000183434; CTA
THFASQNQHSY

SEQ ID NO: 87903 - protein, 11 aa, Homo sapiens
  misc_feature: Table A; Target 87903; HLA-A*32:01; TFDP3; ENSG00000183434; CTA
THFASQNQHSY

SEQ ID NO: 87904 - protein, 11 aa, Homo sapiens
  misc_feature: Table A; Target 87904; HLA-B*38:01; TFDP3; ENSG00000183434; CTA
THFASQNQHSY

SEQ ID NO: 87905 - protein, 9 aa, Homo sapiens
  misc_feature: Table A; Target 87905; HLA-C*06:02; TFDP3; ENSG00000183434; CTA
TSRPVAVHT

SEQ ID NO: 87906 - protein, 8 aa, Homo sapiens
  misc_feature: Table A; Target 87906; HLA-A*30:02; TFDP3; ENSG00000183434; CTA
TSSGGSQY

SEQ ID NO: 87907 - protein, 8 aa, Homo sapiens
  misc_feature: Table A; Target 87907; HLA-B*39:01; TFDP3; ENSG00000183434; CTA
TSSGGSQY

SEQ ID NO: 87908 - protein, 8 aa, Homo sapiens
  misc_feature: Table A; Target 87908; HLA-C*05:01; TFDP3; ENSG00000183434; CTA
TSSGGSQY

SEQ ID NO: 87909 - protein, 8 aa, Homo sapiens
  misc_feature: Table A; Target 87909; HLA-C*16:01; TFDP3; ENSG00000183434; CTA
TSSGGSQY

SEQ ID NO: 87910 - protein, 9 aa, Homo sapiens
  misc_feature: Table A; Target 87910; HLA-A*03:02; TFDP3; ENSG00000183434; CTA
TSTVNPLGK

SEQ ID NO: 87911 - protein, 9 aa, Homo sapiens
  misc_feature: Table A; Target 87911; HLA-A*11:01; TFDP3; ENSG00000183434; CTA
TSTVNPLGK

SEQ ID NO: 87912 - protein, 9 aa, Homo sapiens
  misc_feature: Table A; Target 87912; HLA-A*68:01; TFDP3; ENSG00000183434; CTA
TSTVNPLGK

SEQ ID NO: 87913 - protein, 9 aa, Homo sapiens
  misc_feature: Table A; Target 87913; HLA-C*07:06; TFDP3; ENSG00000183434; CTA
TSTVNPLGK

SEQ ID NO: 87914 - protein, 11 aa, Homo sapiens
  misc_feature: Table A; Target 87914; HLA-A*25:01; TFDP3; ENSG00000183434; CTA
TTAGSRSNGTW

SEQ ID NO: 87915 - protein, 11 aa, Homo sapiens
  misc_feature: Table A; Target 87915; HLA-A*32:01; TFDP3; ENSG00000183434; CTA
TTAGSRSNGTW

SEQ ID NO: 87916 - protein, 11 aa, Homo sapiens
  misc_feature: Table A; Target 87916; HLA-B*58:01; TFDP3; ENSG00000183434; CTA
TTAGSRSNGTW

SEQ ID NO: 87917 - protein, 9 aa, Homo sapiens
  misc_feature: Table A; Target 87917; HLA-A*31:01; TFDP3; ENSG00000183434; CTA
TVNPLGKQL

SEQ ID NO: 87918 - protein, 9 aa, Homo sapiens
  misc_feature: Table A; Target 87918; HLA-A*32:01; TFDP3; ENSG00000183434; CTA
TVNPLGKQL

SEQ ID NO: 87919 - protein, 9 aa, Homo sapiens
  misc_feature: Table A; Target 87919; HLA-B*07:02; TFDP3; ENSG00000183434; CTA
TVNPLGKQL

SEQ ID NO: 87920 - protein, 9 aa, Homo sapiens
  misc_feature: Table A; Target 87920; HLA-B*27:05; TFDP3; ENSG00000183434; CTA
TVNPLGKQL

SEQ ID NO: 87921 - protein, 9 aa, Homo sapiens
  misc_feature: Table A; Target 87921; HLA-C*01:02; TFDP3; ENSG00000183434; CTA
TVNPLGKQL

SEQ ID NO: 87922 - protein, 9 aa, Homo sapiens
  misc_feature: Table A; Target 87922; HLA-C*07:06; TFDP3; ENSG00000183434; CTA
TVNPLGKQL

SEQ ID NO: 87923 - protein, 9 aa, Homo sapiens
  misc_feature: Table A; Target 87923; HLA-C*16:02; TFDP3; ENSG00000183434; CTA
TVNPLGKQL

SEQ ID NO: 87924 - protein, 10 aa, Homo sapiens
  misc_feature: Table A; Target 87924; HLA-A*23:01; TFDP3; ENSG00000183434; CTA
TVNPLGKQLL

SEQ ID NO: 87925 - protein, 10 aa, Homo sapiens
  misc_feature: Table A; Target 87925; HLA-A*31:01; TFDP3; ENSG00000183434; CTA
TVNPLGKQLL

SEQ ID NO: 87926 - protein, 10 aa, Homo sapiens
  misc_feature: Table A; Target 87926; HLA-A*32:01; TFDP3; ENSG00000183434; CTA
TVNPLGKQLL

SEQ ID NO: 87927 - protein, 11 aa, Homo sapiens
  misc_feature: Table A; Target 87927; HLA-A*24:02; TFDP3; ENSG00000183434; CTA
TWLSASDLTNI

SEQ ID NO: 87928 - protein, 8 aa, Homo sapiens
  misc_feature: Table A; Target 87928; HLA-A*23:01; TFDP3; ENSG00000183434; CTA
TYDALNVL

SEQ ID NO: 87929 - protein, 8 aa, Homo sapiens
  misc_feature: Table A; Target 87929; HLA-B*35:03; TFDP3; ENSG00000183434; CTA
TYDALNVL

SEQ ID NO: 87930 - protein, 8 aa, Homo sapiens
  misc_feature: Table A; Target 87930; HLA-C*04:01; TFDP3; ENSG00000183434; CTA
TYDALNVL

SEQ ID NO: 87931 - protein, 8 aa, Homo sapiens
  misc_feature: Table A; Target 87931; HLA-C*05:01; TFDP3; ENSG00000183434; CTA
TYDALNVL

SEQ ID NO: 87932 - protein, 8 aa, Homo sapiens
  misc_feature: Table A; Target 87932; HLA-C*07:04; TFDP3; ENSG00000183434; CTA
TYDALNVL

SEQ ID NO: 87933 - protein, 8 aa, Homo sapiens
  misc_feature: Table A; Target 87933; HLA-C*14:02; TFDP3; ENSG00000183434; CTA
TYDALNVL

SEQ ID NO: 87934 - protein, 9 aa, Homo sapiens
  misc_feature: Table A; Target 87934; HLA-A*02:07; TFDP3; ENSG00000183434; CTA
TYDALNVLM

SEQ ID NO: 87935 - protein, 9 aa, Homo sapiens
  misc_feature: Table A; Target 87935; HLA-A*23:01; TFDP3; ENSG00000183434; CTA
TYDALNVLM

SEQ ID NO: 87936 - protein, 9 aa, Homo sapiens
  misc_feature: Table A; Target 87936; HLA-A*24:02; TFDP3; ENSG00000183434; CTA
TYDALNVLM

SEQ ID NO: 87937 - protein, 9 aa, Homo sapiens
  misc_feature: Table A; Target 87937; HLA-A*29:02; TFDP3; ENSG00000183434; CTA
TYDALNVLM

SEQ ID NO: 87938 - protein, 9 aa, Homo sapiens
  misc_feature: Table A; Target 87938; HLA-A*33:03; TFDP3; ENSG00000183434; CTA
TYDALNVLM

SEQ ID NO: 87939 - protein, 9 aa, Homo sapiens
  misc_feature: Table A; Target 87939; HLA-B*35:01; TFDP3; ENSG00000183434; CTA
TYDALNVLM

SEQ ID NO: 87940 - protein, 9 aa, Homo sapiens
  misc_feature: Table A; Target 87940; HLA-B*35:03; TFDP3; ENSG00000183434; CTA
TYDALNVLM

SEQ ID NO: 87941 - protein, 9 aa, Homo sapiens
  misc_feature: Table A; Target 87941; HLA-B*38:01; TFDP3; ENSG00000183434; CTA
TYDALNVLM

SEQ ID NO: 87942 - protein, 9 aa, Homo sapiens
  misc_feature: Table A; Target 87942; HLA-B*55:01; TFDP3; ENSG00000183434; CTA
TYDALNVLM

SEQ ID NO: 87943 - protein, 9 aa, Homo sapiens
  misc_feature: Table A; Target 87943; HLA-C*04:01; TFDP3; ENSG00000183434; CTA
TYDALNVLM

SEQ ID NO: 87944 - protein, 9 aa, Homo sapiens
  misc_feature: Table A; Target 87944; HLA-C*05:01; TFDP3; ENSG00000183434; CTA
TYDALNVLM

SEQ ID NO: 87945 - protein, 9 aa, Homo sapiens
  misc_feature: Table A; Target 87945; HLA-C*07:04; TFDP3; ENSG00000183434; CTA
TYDALNVLM

SEQ ID NO: 87946 - protein, 9 aa, Homo sapiens
  misc_feature: Table A; Target 87946; HLA-C*14:02; TFDP3; ENSG00000183434; CTA
TYDALNVLM

SEQ ID NO: 87947 - protein, 9 aa, Homo sapiens
  misc_feature: Table A; Target 87947; HLA-B*08:01; TFDP3; ENSG00000183434; CTA
VAKFRAASN

SEQ ID NO: 87948 - protein, 8 aa, Homo sapiens
  misc_feature: Table A; Target 87948; HLA-B*46:01; TFDP3; ENSG00000183434; CTA
VAVHTSTV

SEQ ID NO: 87949 - protein, 8 aa, Homo sapiens
  misc_feature: Table A; Target 87949; HLA-B*51:01; TFDP3; ENSG00000183434; CTA
VAVHTSTV

SEQ ID NO: 87950 - protein, 8 aa, Homo sapiens
  misc_feature: Table A; Target 87950; HLA-C*03:04; TFDP3; ENSG00000183434; CTA
VAVHTSTV

SEQ ID NO: 87951 - protein, 8 aa, Homo sapiens
  misc_feature: Table A; Target 87951; HLA-C*05:01; TFDP3; ENSG00000183434; CTA
VAVHTSTV

SEQ ID NO: 87952 - protein, 8 aa, Homo sapiens
  misc_feature: Table A; Target 87952; HLA-C*12:03; TFDP3; ENSG00000183434; CTA
VAVHTSTV

SEQ ID NO: 87953 - protein, 11 aa, Homo sapiens
  misc_feature: Table A; Target 87953; HLA-C*03:03; TFDP3; ENSG00000183434; CTA
VAVHTSTVNPL

SEQ ID NO: 87954 - protein, 11 aa, Homo sapiens
  misc_feature: Table A; Target 87954; HLA-C*03:04; TFDP3; ENSG00000183434; CTA
VAVHTSTVNPL

SEQ ID NO: 87955 - protein, 10 aa, Homo sapiens
  misc_feature: Table A; Target 87955; HLA-A*30:01; TFDP3; ENSG00000183434; CTA
VEEQVSQRPL

SEQ ID NO: 87956 - protein, 10 aa, Homo sapiens
  misc_feature: Table A; Target 87956; HLA-B*40:01; TFDP3; ENSG00000183434; CTA
VEEQVSQRPL

SEQ ID NO: 87957 - protein, 10 aa, Homo sapiens
  misc_feature: Table A; Target 87957; HLA-B*40:02; TFDP3; ENSG00000183434; CTA
VEEQVSQRPL

SEQ ID NO: 87958 - protein, 10 aa, Homo sapiens
  misc_feature: Table A; Target 87958; HLA-B*49:01; TFDP3; ENSG00000183434; CTA
VEEQVSQRPL

SEQ ID NO: 87959 - protein, 8 aa, Homo sapiens
  misc_feature: Table A; Target 87959; HLA-B*18:01; TFDP3; ENSG00000183434; CTA
VGELVAKF

SEQ ID NO: 87960 - protein, 8 aa, Homo sapiens
  misc_feature: Table A; Target 87960; HLA-B*37:01; TFDP3; ENSG00000183434; CTA
VGELVAKF

SEQ ID NO: 87961 - protein, 8 aa, Homo sapiens
  misc_feature: Table A; Target 87961; HLA-B*39:01; TFDP3; ENSG00000183434; CTA
VGELVAKF

SEQ ID NO: 87962 - protein, 8 aa, Homo sapiens
  misc_feature: Table A; Target 87962; HLA-C*05:01; TFDP3; ENSG00000183434; CTA
VGELVAKF

SEQ ID NO: 87963 - protein, 11 aa, Homo sapiens
  misc_feature: Table A; Target 87963; HLA-A*23:01; TFDP3; ENSG00000183434; CTA
VGSPNPPSTHF

SEQ ID NO: 87964 - protein, 11 aa, Homo sapiens
  misc_feature: Table A; Target 87964; HLA-A*24:02; TFDP3; ENSG00000183434; CTA
VGSPNPPSTHF

SEQ ID NO: 87965 - protein, 11 aa, Homo sapiens
  misc_feature: Table A; Target 87965; HLA-A*30:02; TFDP3; ENSG00000183434; CTA
VGSPNPPSTHF

SEQ ID NO: 87966 - protein, 9 aa, Homo sapiens
  misc_feature: Table A; Target 87966; HLA-B*38:01; TFDP3; ENSG00000183434; CTA
VHTSTVNPL

SEQ ID NO: 87967 - protein, 9 aa, Homo sapiens
  misc_feature: Table A; Target 87967; HLA-B*39:01; TFDP3; ENSG00000183434; CTA
VHTSTVNPL

SEQ ID NO: 87968 - protein, 9 aa, Homo sapiens
  misc_feature: Table A; Target 87968; HLA-C*07:04; TFDP3; ENSG00000183434; CTA
VHTSTVNPL

SEQ ID NO: 87969 - protein, 10 aa, Homo sapiens
  misc_feature: Table A; Target 87969; HLA-A*03:01; TFDP3; ENSG00000183434; CTA
VLMDENQTSR

SEQ ID NO: 87970 - protein, 10 aa, Homo sapiens
  misc_feature: Table A; Target 87970; HLA-A*03:02; TFDP3; ENSG00000183434; CTA
VLMDENQTSR

SEQ ID NO: 87971 - protein, 10 aa, Homo sapiens
  misc_feature: Table A; Target 87971; HLA-A*11:01; TFDP3; ENSG00000183434; CTA
VLMDENQTSR

SEQ ID NO: 87972 - protein, 10 aa, Homo sapiens
  misc_feature: Table A; Target 87972; HLA-A*68:01; TFDP3; ENSG00000183434; CTA
VLMDENQTSR

SEQ ID NO: 87973 - protein, 10 aa, Homo sapiens
  misc_feature: Table A; Target 87973; HLA-C*07:06; TFDP3; ENSG00000183434; CTA
VLMDENQTSR

SEQ ID NO: 87974 - protein, 9 aa, Homo sapiens
  misc_feature: Table A; Target 87974; HLA-A*23:01; TFDP3; ENSG00000183434; CTA
VNIDQQVVI

SEQ ID NO: 87975 - protein, 9 aa, Homo sapiens
  misc_feature: Table A; Target 87975; HLA-B*13:02; TFDP3; ENSG00000183434; CTA
VNIDQQVVI

SEQ ID NO: 87976 - protein, 8 aa, Homo sapiens
  misc_feature: Table A; Target 87976; HLA-C*01:02; TFDP3; ENSG00000183434; CTA
VNPLGKQL

SEQ ID NO: 87977 - protein, 8 aa, Homo sapiens
  misc_feature: Table A; Target 87977; HLA-B*54:01; TFDP3; ENSG00000183434; CTA
VPFIIISS

SEQ ID NO: 87978 - protein, 8 aa, Homo sapiens
  misc_feature: Table A; Target 87978; HLA-B*56:01; TFDP3; ENSG00000183434; CTA
VPFIIISS

SEQ ID NO: 87979 - protein, 9 aa, Homo sapiens
  misc_feature: Table A; Target 87979; HLA-B*54:01; TFDP3; ENSG00000183434; CTA
VPFIIISSS

SEQ ID NO: 87980 - protein, 9 aa, Homo sapiens
  misc_feature: Table A; Target 87980; HLA-B*56:01; TFDP3; ENSG00000183434; CTA
VPFIIISSS

SEQ ID NO: 87981 - protein, 9 aa, Homo sapiens
  misc_feature: Table A; Target 87981; HLA-B*51:01; TFDP3; ENSG00000183434; CTA
VPKALEPYV

SEQ ID NO: 87982 - protein, 9 aa, Homo sapiens
  misc_feature: Table A; Target 87982; HLA-B*54:01; TFDP3; ENSG00000183434; CTA
VPKALEPYV

SEQ ID NO: 87983 - protein, 9 aa, Homo sapiens
  misc_feature: Table A; Target 87983; HLA-B*55:01; TFDP3; ENSG00000183434; CTA
VPKALEPYV

SEQ ID NO: 87984 - protein, 9 aa, Homo sapiens
  misc_feature: Table A; Target 87984; HLA-B*56:01; TFDP3; ENSG00000183434; CTA
VPKALEPYV

SEQ ID NO: 87985 - protein, 11 aa, Homo sapiens
  misc_feature: Table A; Target 87985; HLA-A*03:02; TFDP3; ENSG00000183434; CTA
VSLTEANEELK

SEQ ID NO: 87986 - protein, 11 aa, Homo sapiens
  misc_feature: Table A; Target 87986; HLA-A*11:01; TFDP3; ENSG00000183434; CTA
VSLTEANEELK

SEQ ID NO: 87987 - protein, 11 aa, Homo sapiens
  misc_feature: Table A; Target 87987; HLA-B*27:02; TFDP3; ENSG00000183434; CTA
VSLTEANEELK

SEQ ID NO: 87988 - protein, 9 aa, Homo sapiens
  misc_feature: Table A; Target 87988; HLA-A*01:01; TFDP3; ENSG00000183434; CTA
VTEMAQGTF

SEQ ID NO: 87989 - protein, 9 aa, Homo sapiens
  misc_feature: Table A; Target 87989; HLA-C*05:01; TFDP3; ENSG00000183434; CTA
VTEMAQGTF

SEQ ID NO: 87990 - protein, 8 aa, Homo sapiens
  misc_feature: Table A; Target 87990; HLA-A*03:01; TFDP3; ENSG00000183434; CTA
VVGELVAK

SEQ ID NO: 87991 - protein, 8 aa, Homo sapiens
  misc_feature: Table A; Target 87991; HLA-A*03:02; TFDP3; ENSG00000183434; CTA
VVGELVAK

SEQ ID NO: 87992 - protein, 8 aa, Homo sapiens
  misc_feature: Table A; Target 87992; HLA-A*11:01; TFDP3; ENSG00000183434; CTA
VVGELVAK

SEQ ID NO: 87993 - protein, 8 aa, Homo sapiens
  misc_feature: Table A; Target 87993; HLA-B*27:02; TFDP3; ENSG00000183434; CTA
VVGELVAK

SEQ ID NO: 87994 - protein, 9 aa, Homo sapiens
  misc_feature: Table A; Target 87994; HLA-A*02:07; TFDP3; ENSG00000183434; CTA
VVGELVAKF

SEQ ID NO: 87995 - protein, 9 aa, Homo sapiens
  misc_feature: Table A; Target 87995; HLA-A*03:01; TFDP3; ENSG00000183434; CTA
VVGELVAKF

SEQ ID NO: 87996 - protein, 9 aa, Homo sapiens
  misc_feature: Table A; Target 87996; HLA-A*03:02; TFDP3; ENSG00000183434; CTA
VVGELVAKF

SEQ ID NO: 87997 - protein, 9 aa, Homo sapiens
  misc_feature: Table A; Target 87997; HLA-A*11:01; TFDP3; ENSG00000183434; CTA
VVGELVAKF

SEQ ID NO: 87998 - protein, 9 aa, Homo sapiens
  misc_feature: Table A; Target 87998; HLA-A*23:01; TFDP3; ENSG00000183434; CTA
VVGELVAKF

SEQ ID NO: 87999 - protein, 9 aa, Homo sapiens
  misc_feature: Table A; Target 87999; HLA-A*24:02; TFDP3; ENSG00000183434; CTA
VVGELVAKF

SEQ ID NO: 88000 - protein, 9 aa, Homo sapiens
  misc_feature: Table A; Target 88000; HLA-A*25:01; TFDP3; ENSG00000183434; CTA
VVGELVAKF

SEQ ID NO: 88001 - protein, 9 aa, Homo sapiens
  misc_feature: Table A; Target 88001; HLA-A*26:01; TFDP3; ENSG00000183434; CTA
VVGELVAKF

SEQ ID NO: 88002 - protein, 9 aa, Homo sapiens
  misc_feature: Table A; Target 88002; HLA-A*29:02; TFDP3; ENSG00000183434; CTA
VVGELVAKF

SEQ ID NO: 88003 - protein, 9 aa, Homo sapiens
  misc_feature: Table A; Target 88003; HLA-A*30:02; TFDP3; ENSG00000183434; CTA
VVGELVAKF

SEQ ID NO: 88004 - protein, 9 aa, Homo sapiens
  misc_feature: Table A; Target 88004; HLA-A*31:01; TFDP3; ENSG00000183434; CTA
VVGELVAKF

SEQ ID NO: 88005 - protein, 9 aa, Homo sapiens
  misc_feature: Table A; Target 88005; HLA-A*32:01; TFDP3; ENSG00000183434; CTA
VVGELVAKF

SEQ ID NO: 88006 - protein, 9 aa, Homo sapiens
  misc_feature: Table A; Target 88006; HLA-A*33:01; TFDP3; ENSG00000183434; CTA
VVGELVAKF

SEQ ID NO: 88007 - protein, 9 aa, Homo sapiens
  misc_feature: Table A; Target 88007; HLA-A*33:03; TFDP3; ENSG00000183434; CTA
VVGELVAKF

SEQ ID NO: 88008 - protein, 9 aa, Homo sapiens
  misc_feature: Table A; Target 88008; HLA-A*68:01; TFDP3; ENSG00000183434; CTA
VVGELVAKF

SEQ ID NO: 88009 - protein, 9 aa, Homo sapiens
  misc_feature: Table A; Target 88009; HLA-B*15:01; TFDP3; ENSG00000183434; CTA
VVGELVAKF

SEQ ID NO: 88010 - protein, 9 aa, Homo sapiens
  misc_feature: Table A; Target 88010; HLA-B*15:03; TFDP3; ENSG00000183434; CTA
VVGELVAKF

SEQ ID NO: 88011 - protein, 9 aa, Homo sapiens
  misc_feature: Table A; Target 88011; HLA-B*18:01; TFDP3; ENSG00000183434; CTA
VVGELVAKF

SEQ ID NO: 88012 - protein, 9 aa, Homo sapiens
  misc_feature: Table A; Target 88012; HLA-B*27:02; TFDP3; ENSG00000183434; CTA
VVGELVAKF

SEQ ID NO: 88013 - protein, 9 aa, Homo sapiens
  misc_feature: Table A; Target 88013; HLA-B*35:01; TFDP3; ENSG00000183434; CTA
VVGELVAKF

SEQ ID NO: 88014 - protein, 9 aa, Homo sapiens
  misc_feature: Table A; Target 88014; HLA-B*37:01; TFDP3; ENSG00000183434; CTA
VVGELVAKF

SEQ ID NO: 88015 - protein, 9 aa, Homo sapiens
  misc_feature: Table A; Target 88015; HLA-B*44:02; TFDP3; ENSG00000183434; CTA
VVGELVAKF

SEQ ID NO: 88016 - protein, 9 aa, Homo sapiens
  misc_feature: Table A; Target 88016; HLA-B*44:03; TFDP3; ENSG00000183434; CTA
VVGELVAKF

SEQ ID NO: 88017 - protein, 9 aa, Homo sapiens
  misc_feature: Table A; Target 88017; HLA-B*46:01; TFDP3; ENSG00000183434; CTA
VVGELVAKF

SEQ ID NO: 88018 - protein, 9 aa, Homo sapiens
  misc_feature: Table A; Target 88018; HLA-B*57:01; TFDP3; ENSG00000183434; CTA
VVGELVAKF

SEQ ID NO: 88019 - protein, 9 aa, Homo sapiens
  misc_feature: Table A; Target 88019; HLA-B*58:01; TFDP3; ENSG00000183434; CTA
VVGELVAKF

SEQ ID NO: 88020 - protein, 9 aa, Homo sapiens
  misc_feature: Table A; Target 88020; HLA-C*02:02; TFDP3; ENSG00000183434; CTA
VVGELVAKF

SEQ ID NO: 88021 - protein, 9 aa, Homo sapiens
  misc_feature: Table A; Target 88021; HLA-C*05:01; TFDP3; ENSG00000183434; CTA
VVGELVAKF

SEQ ID NO: 88022 - protein, 9 aa, Homo sapiens
  misc_feature: Table A; Target 88022; HLA-C*07:04; TFDP3; ENSG00000183434; CTA
VVGELVAKF

SEQ ID NO: 88023 - protein, 9 aa, Homo sapiens
  misc_feature: Table A; Target 88023; HLA-C*07:06; TFDP3; ENSG00000183434; CTA
VVGELVAKF

SEQ ID NO: 88024 - protein, 9 aa, Homo sapiens
  misc_feature: Table A; Target 88024; HLA-C*12:03; TFDP3; ENSG00000183434; CTA
VVGELVAKF

SEQ ID NO: 88025 - protein, 9 aa, Homo sapiens
  misc_feature: Table A; Target 88025; HLA-C*16:01; TFDP3; ENSG00000183434; CTA
VVGELVAKF

SEQ ID NO: 88026 - protein, 9 aa, Homo sapiens
  misc_feature: Table A; Target 88026; HLA-C*16:04; TFDP3; ENSG00000183434; CTA
VVGELVAKF

SEQ ID NO: 88027 - protein, 8 aa, Homo sapiens
  misc_feature: Table A; Target 88027; HLA-A*31:01; TFDP3; ENSG00000183434; CTA
VVIGMPQR

SEQ ID NO: 88028 - protein, 9 aa, Homo sapiens
  misc_feature: Table A; Target 88028; HLA-A*32:01; TFDP3; ENSG00000183434; CTA
VVIGMPQRP

SEQ ID NO: 88029 - protein, 9 aa, Homo sapiens
  misc_feature: Table A; Target 88029; HLA-C*06:02; TFDP3; ENSG00000183434; CTA
VVIGMPQRP

SEQ ID NO: 88030 - protein, 11 aa, Homo sapiens
  misc_feature: Table A; Target 88030; HLA-B*54:01; TFDP3; ENSG00000183434; CTA
VVIGMPQRPAA

SEQ ID NO: 88031 - protein, 8 aa, Homo sapiens
  misc_feature: Table A; Target 88031; HLA-A*30:01; TFDP3; ENSG00000183434; CTA
YDALNVLM

SEQ ID NO: 88032 - protein, 8 aa, Homo sapiens
  misc_feature: Table A; Target 88032; HLA-B*37:01; TFDP3; ENSG00000183434; CTA
YDALNVLM

SEQ ID NO: 88033 - protein, 8 aa, Homo sapiens
  misc_feature: Table A; Target 88033; HLA-C*07:04; TFDP3; ENSG00000183434; CTA
YDALNVLM

SEQ ID NO: 88034 - protein, 9 aa, Homo sapiens
  misc_feature: Table A; Target 88034; HLA-A*01:01; TFDP3; ENSG00000183434; CTA
YVEEQVSQR

SEQ ID NO: 88035 - protein, 9 aa, Homo sapiens
  misc_feature: Table A; Target 88035; HLA-A*03:02; TFDP3; ENSG00000183434; CTA
YVEEQVSQR

SEQ ID NO: 88036 - protein, 9 aa, Homo sapiens
  misc_feature: Table A; Target 88036; HLA-A*11:01; TFDP3; ENSG00000183434; CTA
YVEEQVSQR

SEQ ID NO: 88037 - protein, 9 aa, Homo sapiens
  misc_feature: Table A; Target 88037; HLA-A*26:01; TFDP3; ENSG00000183434; CTA
YVEEQVSQR

SEQ ID NO: 88038 - protein, 9 aa, Homo sapiens
  misc_feature: Table A; Target 88038; HLA-A*31:01; TFDP3; ENSG00000183434; CTA
YVEEQVSQR

SEQ ID NO: 88039 - protein, 9 aa, Homo sapiens
  misc_feature: Table A; Target 88039; HLA-A*33:01; TFDP3; ENSG00000183434; CTA
YVEEQVSQR

SEQ ID NO: 88040 - protein, 9 aa, Homo sapiens
  misc_feature: Table A; Target 88040; HLA-A*33:03; TFDP3; ENSG00000183434; CTA
YVEEQVSQR

SEQ ID NO: 88041 - protein, 9 aa, Homo sapiens
  misc_feature: Table A; Target 88041; HLA-A*68:01; TFDP3; ENSG00000183434; CTA
YVEEQVSQR

SEQ ID NO: 88042 - protein, 9 aa, Homo sapiens
  misc_feature: Table A; Target 88042; HLA-C*05:01; TFDP3; ENSG00000183434; CTA
YVEEQVSQR

SEQ ID NO: 88043 - protein, 9 aa, Homo sapiens
  misc_feature: Table A; Target 88043; HLA-C*07:06; TFDP3; ENSG00000183434; CTA
YVEEQVSQR

SEQ ID NO: 88044 - protein, 11 aa, Homo sapiens
  misc_feature: Table A; Target 88044; HLA-B*27:05; TFDP3; ENSG00000183434; CTA
YVEEQVSQRPL

SEQ ID NO: 88045 - protein, 11 aa, Homo sapiens
  misc_feature: Table A; Target 88045; HLA-C*01:02; TFDP3; ENSG00000183434; CTA
YVEEQVSQRPL

SEQ ID NO: 88046 - protein, 11 aa, Homo sapiens
  misc_feature: Table A; Target 88046; HLA-C*03:03; TFDP3; ENSG00000183434; CTA
YVEEQVSQRPL

SEQ ID NO: 88047 - protein, 11 aa, Homo sapiens
  misc_feature: Table A; Target 88047; HLA-C*03:04; TFDP3; ENSG00000183434; CTA
YVEEQVSQRPL

SEQ ID NO: 88048 - protein, 11 aa, Homo sapiens
  misc_feature: Table A; Target 88048; HLA-C*07:02; TFDP3; ENSG00000183434; CTA
YVEEQVSQRPL

SEQ ID NO: 88049 - protein, 10 aa, Homo sapiens
  misc_feature: Table A; Target 88049; HLA-A*25:01; TFDP3; ENSG00000183434; CTA
YVTEMAQGTF

SEQ ID NO: 88050 - protein, 10 aa, Homo sapiens
  misc_feature: Table A; Target 88050; HLA-A*26:01; TFDP3; ENSG00000183434; CTA
YVTEMAQGTF

SEQ ID NO: 88051 - protein, 9 aa, Homo sapiens
  misc_feature: Table A; Target 88051; HLA-B*07:02; TRIM51; ENSG00000124900; TAA
AAEERREEL

SEQ ID NO: 88052 - protein, 9 aa, Homo sapiens
  misc_feature: Table A; Target 88052; HLA-C*05:01; TRIM51; ENSG00000124900; TAA
AAEERREEL

SEQ ID NO: 88053 - protein, 9 aa, Homo sapiens
  misc_feature: Table A; Target 88053; HLA-C*07:02; TRIM51; ENSG00000124900; TAA
AAEERREEL

SEQ ID NO: 88054 - protein, 9 aa, Homo sapiens
  misc_feature: Table A; Target 88054; HLA-C*16:01; TRIM51; ENSG00000124900; TAA
AAEERREEL

SEQ ID NO: 88055 - protein, 9 aa, Homo sapiens
  misc_feature: Table A; Target 88055; HLA-A*25:01; TRIM51; ENSG00000124900; TAA
ADVELLQAF

SEQ ID NO: 88056 - protein, 9 aa, Homo sapiens
  misc_feature: Table A; Target 88056; HLA-A*30:01; TRIM51; ENSG00000124900; TAA
ADVELLQAF

SEQ ID NO: 88057 - protein, 9 aa, Homo sapiens
  misc_feature: Table A; Target 88057; HLA-B*15:03; TRIM51; ENSG00000124900; TAA
ADVELLQAF

SEQ ID NO: 88058 - protein, 9 aa, Homo sapiens
  misc_feature: Table A; Target 88058; HLA-B*18:01; TRIM51; ENSG00000124900; TAA
ADVELLQAF

SEQ ID NO: 88059 - protein, 9 aa, Homo sapiens
  misc_feature: Table A; Target 88059; HLA-B*27:02; TRIM51; ENSG00000124900; TAA
ADVELLQAF

SEQ ID NO: 88060 - protein, 9 aa, Homo sapiens
  misc_feature: Table A; Target 88060; HLA-B*37:01; TRIM51; ENSG00000124900; TAA
ADVELLQAF

SEQ ID NO: 88061 - protein, 9 aa, Homo sapiens
  misc_feature: Table A; Target 88061; HLA-B*40:02; TRIM51; ENSG00000124900; TAA
ADVELLQAF

SEQ ID NO: 88062 - protein, 9 aa, Homo sapiens
  misc_feature: Table A; Target 88062; HLA-B*44:02; TRIM51; ENSG00000124900; TAA
ADVELLQAF

SEQ ID NO: 88063 - protein, 9 aa, Homo sapiens
  misc_feature: Table A; Target 88063; HLA-B*44:03; TRIM51; ENSG00000124900; TAA
ADVELLQAF

SEQ ID NO: 88064 - protein, 9 aa, Homo sapiens
  misc_feature: Table A; Target 88064; HLA-C*16:04; TRIM51; ENSG00000124900; TAA
ADVELLQAF

SEQ ID NO: 88065 - protein, 9 aa, Homo sapiens
  misc_feature: Table A; Target 88065; HLA-B*37:01; TRIM51; ENSG00000124900; TAA
AEERREELL

SEQ ID NO: 88066 - protein, 9 aa, Homo sapiens
  misc_feature: Table A; Target 88066; HLA-B*40:01; TRIM51; ENSG00000124900; TAA
AEERREELL

SEQ ID NO: 88067 - protein, 9 aa, Homo sapiens
  misc_feature: Table A; Target 88067; HLA-B*40:02; TRIM51; ENSG00000124900; TAA
AEERREELL

SEQ ID NO: 88068 - protein, 9 aa, Homo sapiens
  misc_feature: Table A; Target 88068; HLA-B*44:02; TRIM51; ENSG00000124900; TAA
AEERREELL

SEQ ID NO: 88069 - protein, 9 aa, Homo sapiens
  misc_feature: Table A; Target 88069; HLA-B*44:03; TRIM51; ENSG00000124900; TAA
AEERREELL

SEQ ID NO: 88070 - protein, 8 aa, Homo sapiens
  misc_feature: Table A; Target 88070; HLA-B*37:01; TRIM51; ENSG00000124900; TAA
AEYQKMPA

SEQ ID NO: 88071 - protein, 9 aa, Homo sapiens
  misc_feature: Table A; Target 88071; HLA-A*25:01; TRIM51; ENSG00000124900; TAA
AEYQKMPAF

SEQ ID NO: 88072 - protein, 9 aa, Homo sapiens
  misc_feature: Table A; Target 88072; HLA-A*30:01; TRIM51; ENSG00000124900; TAA
AEYQKMPAF

SEQ ID NO: 88073 - protein, 9 aa, Homo sapiens
  misc_feature: Table A; Target 88073; HLA-A*32:01; TRIM51; ENSG00000124900; TAA
AEYQKMPAF

SEQ ID NO: 88074 - protein, 9 aa, Homo sapiens
  misc_feature: Table A; Target 88074; HLA-B*15:03; TRIM51; ENSG00000124900; TAA
AEYQKMPAF

SEQ ID NO: 88075 - protein, 9 aa, Homo sapiens
  misc_feature: Table A; Target 88075; HLA-B*18:01; TRIM51; ENSG00000124900; TAA
AEYQKMPAF

SEQ ID NO: 88076 - protein, 9 aa, Homo sapiens
  misc_feature: Table A; Target 88076; HLA-B*27:02; TRIM51; ENSG00000124900; TAA
AEYQKMPAF

SEQ ID NO: 88077 - protein, 9 aa, Homo sapiens
  misc_feature: Table A; Target 88077; HLA-B*37:01; TRIM51; ENSG00000124900; TAA
AEYQKMPAF

SEQ ID NO: 88078 - protein, 9 aa, Homo sapiens
  misc_feature: Table A; Target 88078; HLA-B*40:01; TRIM51; ENSG00000124900; TAA
AEYQKMPAF

SEQ ID NO: 88079 - protein, 9 aa, Homo sapiens
  misc_feature: Table A; Target 88079; HLA-B*40:02; TRIM51; ENSG00000124900; TAA
AEYQKMPAF

SEQ ID NO: 88080 - protein, 9 aa, Homo sapiens
  misc_feature: Table A; Target 88080; HLA-B*44:02; TRIM51; ENSG00000124900; TAA
AEYQKMPAF

SEQ ID NO: 88081 - protein, 9 aa, Homo sapiens
  misc_feature: Table A; Target 88081; HLA-B*44:03; TRIM51; ENSG00000124900; TAA
AEYQKMPAF

SEQ ID NO: 88082 - protein, 9 aa, Homo sapiens
  misc_feature: Table A; Target 88082; HLA-B*46:01; TRIM51; ENSG00000124900; TAA
AEYQKMPAF

SEQ ID NO: 88083 - protein, 9 aa, Homo sapiens
  misc_feature: Table A; Target 88083; HLA-B*49:01; TRIM51; ENSG00000124900; TAA
AEYQKMPAF

SEQ ID NO: 88084 - protein, 9 aa, Homo sapiens
  misc_feature: Table A; Target 88084; HLA-C*02:02; TRIM51; ENSG00000124900; TAA
AEYQKMPAF

SEQ ID NO: 88085 - protein, 9 aa, Homo sapiens
  misc_feature: Table A; Target 88085; HLA-C*16:04; TRIM51; ENSG00000124900; TAA
AEYQKMPAF

SEQ ID NO: 88086 - protein, 10 aa, Homo sapiens
  misc_feature: Table A; Target 88086; HLA-A*30:01; TRIM51; ENSG00000124900; TAA
AEYQKMPAFL

SEQ ID NO: 88087 - protein, 10 aa, Homo sapiens
  misc_feature: Table A; Target 88087; HLA-B*40:02; TRIM51; ENSG00000124900; TAA
AEYQKMPAFL

SEQ ID NO: 88088 - protein, 10 aa, Homo sapiens
  misc_feature: Table A; Target 88088; HLA-B*44:02; TRIM51; ENSG00000124900; TAA
AEYQKMPAFL

SEQ ID NO: 88089 - protein, 10 aa, Homo sapiens
  misc_feature: Table A; Target 88089; HLA-B*44:03; TRIM51; ENSG00000124900; TAA
AEYQKMPAFL

SEQ ID NO: 88090 - protein, 10 aa, Homo sapiens
  misc_feature: Table A; Target 88090; HLA-B*49:01; TRIM51; ENSG00000124900; TAA
AEYQKMPAFL

SEQ ID NO: 88091 - protein, 8 aa, Homo sapiens
  misc_feature: Table A; Target 88091; HLA-A*31:01; TRIM51; ENSG00000124900; TAA
AFGDILHR

SEQ ID NO: 88092 - protein, 8 aa, Homo sapiens
  misc_feature: Table A; Target 88092; HLA-A*33:03; TRIM51; ENSG00000124900; TAA
AFGDILHR

SEQ ID NO: 88093 - protein, 9 aa, Homo sapiens
  misc_feature: Table A; Target 88093; HLA-A*24:02; TRIM51; ENSG00000124900; TAA
AFGDILHRY

SEQ ID NO: 88094 - protein, 9 aa, Homo sapiens
  misc_feature: Table A; Target 88094; HLA-A*30:02; TRIM51; ENSG00000124900; TAA
AFGDILHRY

SEQ ID NO: 88095 - protein, 9 aa, Homo sapiens
  misc_feature: Table A; Target 88095; HLA-B*57:01; TRIM51; ENSG00000124900; TAA
AFGDILHRY

SEQ ID NO: 88096 - protein, 9 aa, Homo sapiens
  misc_feature: Table A; Target 88096; HLA-C*16:01; TRIM51; ENSG00000124900; TAA
AFGDILHRY

SEQ ID NO: 88097 - protein, 9 aa, Homo sapiens
  misc_feature: Table A; Target 88097; HLA-A*23:01; TRIM51; ENSG00000124900; TAA
AFIARKASL

SEQ ID NO: 88098 - protein, 9 aa, Homo sapiens
  misc_feature: Table A; Target 88098; HLA-A*24:02; TRIM51; ENSG00000124900; TAA
AFIARKASL

SEQ ID NO: 88099 - protein, 9 aa, Homo sapiens
  misc_feature: Table A; Target 88099; HLA-B*08:01; TRIM51; ENSG00000124900; TAA
AFIARKASL

SEQ ID NO: 88100 - protein, 9 aa, Homo sapiens
  misc_feature: Table A; Target 88100; HLA-B*37:01; TRIM51; ENSG00000124900; TAA
AFIARKASL

SEQ ID NO: 88101 - protein, 9 aa, Homo sapiens
  misc_feature: Table A; Target 88101; HLA-B*46:01; TRIM51; ENSG00000124900; TAA
AFIARKASL

SEQ ID NO: 88102 - protein, 9 aa, Homo sapiens
  misc_feature: Table A; Target 88102; HLA-C*01:02; TRIM51; ENSG00000124900; TAA
AFIARKASL

SEQ ID NO: 88103 - protein, 9 aa, Homo sapiens
  misc_feature: Table A; Target 88103; HLA-C*07:02; TRIM51; ENSG00000124900; TAA
AFIARKASL

SEQ ID NO: 88104 - protein, 9 aa, Homo sapiens
  misc_feature: Table A; Target 88104; HLA-C*14:02; TRIM51; ENSG00000124900; TAA
AFIARKASL

SEQ ID NO: 88105 - protein, 9 aa, Homo sapiens
  misc_feature: Table A; Target 88105; HLA-C*16:01; TRIM51; ENSG00000124900; TAA
AFIARKASL

SEQ ID NO: 88106 - protein, 9 aa, Homo sapiens
  misc_feature: Table A; Target 88106; HLA-A*24:02; TRIM51; ENSG00000124900; TAA
AFTSGKYYW

SEQ ID NO: 88107 - protein, 11 aa, Homo sapiens
  misc_feature: Table A; Target 88107; HLA-C*07:02; TRIM51; ENSG00000124900; TAA
AGPITGLLDSL

SEQ ID NO: 88108 - protein, 9 aa, Homo sapiens
  misc_feature: Table A; Target 88108; HLA-A*26:01; TRIM51; ENSG00000124900; TAA
AQAFTSGKY

SEQ ID NO: 88109 - protein, 9 aa, Homo sapiens
  misc_feature: Table A; Target 88109; HLA-A*29:02; TRIM51; ENSG00000124900; TAA
AQAFTSGKY

SEQ ID NO: 88110 - protein, 9 aa, Homo sapiens
  misc_feature: Table A; Target 88110; HLA-A*30:02; TRIM51; ENSG00000124900; TAA
AQAFTSGKY

SEQ ID NO: 88111 - protein, 9 aa, Homo sapiens
  misc_feature: Table A; Target 88111; HLA-A*32:01; TRIM51; ENSG00000124900; TAA
AQAFTSGKY

SEQ ID NO: 88112 - protein, 9 aa, Homo sapiens
  misc_feature: Table A; Target 88112; HLA-B*13:02; TRIM51; ENSG00000124900; TAA
AQAFTSGKY

SEQ ID NO: 88113 - protein, 9 aa, Homo sapiens
  misc_feature: Table A; Target 88113; HLA-B*15:03; TRIM51; ENSG00000124900; TAA
AQAFTSGKY

SEQ ID NO: 88114 - protein, 9 aa, Homo sapiens
  misc_feature: Table A; Target 88114; HLA-B*27:02; TRIM51; ENSG00000124900; TAA
AQAFTSGKY

SEQ ID NO: 88115 - protein, 9 aa, Homo sapiens
  misc_feature: Table A; Target 88115; HLA-B*27:05; TRIM51; ENSG00000124900; TAA
AQAFTSGKY

SEQ ID NO: 88116 - protein, 9 aa, Homo sapiens
  misc_feature: Table A; Target 88116; HLA-B*39:01; TRIM51; ENSG00000124900; TAA
AQAFTSGKY

SEQ ID NO: 88117 - protein, 9 aa, Homo sapiens
  misc_feature: Table A; Target 88117; HLA-B*44:03; TRIM51; ENSG00000124900; TAA
AQAFTSGKY

SEQ ID NO: 88118 - protein, 9 aa, Homo sapiens
  misc_feature: Table A; Target 88118; HLA-B*46:01; TRIM51; ENSG00000124900; TAA
AQAFTSGKY

SEQ ID NO: 88119 - protein, 9 aa, Homo sapiens
  misc_feature: Table A; Target 88119; HLA-B*58:01; TRIM51; ENSG00000124900; TAA
AQAFTSGKY

SEQ ID NO: 88120 - protein, 9 aa, Homo sapiens
  misc_feature: Table A; Target 88120; HLA-C*02:02; TRIM51; ENSG00000124900; TAA
AQAFTSGKY

SEQ ID NO: 88121 - protein, 9 aa, Homo sapiens
  misc_feature: Table A; Target 88121; HLA-C*07:01; TRIM51; ENSG00000124900; TAA
AQAFTSGKY

SEQ ID NO: 88122 - protein, 9 aa, Homo sapiens
  misc_feature: Table A; Target 88122; HLA-C*07:04; TRIM51; ENSG00000124900; TAA
AQAFTSGKY

SEQ ID NO: 88123 - protein, 9 aa, Homo sapiens
  misc_feature: Table A; Target 88123; HLA-C*16:01; TRIM51; ENSG00000124900; TAA
AQAFTSGKY

SEQ ID NO: 88124 - protein, 9 aa, Homo sapiens
  misc_feature: Table A; Target 88124; HLA-C*16:02; TRIM51; ENSG00000124900; TAA
AQAFTSGKY

SEQ ID NO: 88125 - protein, 9 aa, Homo sapiens
  misc_feature: Table A; Target 88125; HLA-C*16:04; TRIM51; ENSG00000124900; TAA
AQAFTSGKY

SEQ ID NO: 88126 - protein, 10 aa, Homo sapiens
  misc_feature: Table A; Target 88126; HLA-A*30:02; TRIM51; ENSG00000124900; TAA
AQAFTSGKYY

SEQ ID NO: 88127 - protein, 10 aa, Homo sapiens
  misc_feature: Table A; Target 88127; HLA-B*15:01; TRIM51; ENSG00000124900; TAA
AQAFTSGKYY

SEQ ID NO: 88128 - protein, 10 aa, Homo sapiens
  misc_feature: Table A; Target 88128; HLA-B*15:03; TRIM51; ENSG00000124900; TAA
AQAFTSGKYY

SEQ ID NO: 88129 - protein, 10 aa, Homo sapiens
  misc_feature: Table A; Target 88129; HLA-B*44:02; TRIM51; ENSG00000124900; TAA
AQAFTSGKYY

SEQ ID NO: 88130 - protein, 10 aa, Homo sapiens
  misc_feature: Table A; Target 88130; HLA-B*44:03; TRIM51; ENSG00000124900; TAA
AQAFTSGKYY

SEQ ID NO: 88131 - protein, 10 aa, Homo sapiens
  misc_feature: Table A; Target 88131; HLA-C*16:04; TRIM51; ENSG00000124900; TAA
AQAFTSGKYY

SEQ ID NO: 88132 - protein, 11 aa, Homo sapiens
  misc_feature: Table A; Target 88132; HLA-B*44:02; TRIM51; ENSG00000124900; TAA
AQAFTSGKYYW

SEQ ID NO: 88133 - protein, 9 aa, Homo sapiens
  misc_feature: Table A; Target 88133; HLA-B*27:05; TRIM51; ENSG00000124900; TAA
ARMEHSREL

SEQ ID NO: 88134 - protein, 9 aa, Homo sapiens
  misc_feature: Table A; Target 88134; HLA-B*37:01; TRIM51; ENSG00000124900; TAA
ARMEHSREL

SEQ ID NO: 88135 - protein, 9 aa, Homo sapiens
  misc_feature: Table A; Target 88135; HLA-C*06:02; TRIM51; ENSG00000124900; TAA
ARMEHSREL

SEQ ID NO: 88136 - protein, 9 aa, Homo sapiens
  misc_feature: Table A; Target 88136; HLA-C*16:04; TRIM51; ENSG00000124900; TAA
ARMEHSREL

SEQ ID NO: 88137 - protein, 10 aa, Homo sapiens
  misc_feature: Table A; Target 88137; HLA-A*03:01; TRIM51; ENSG00000124900; TAA
AVLAQCSECK

SEQ ID NO: 88138 - protein, 10 aa, Homo sapiens
  misc_feature: Table A; Target 88138; HLA-A*03:02; TRIM51; ENSG00000124900; TAA
AVLAQCSECK

SEQ ID NO: 88139 - protein, 10 aa, Homo sapiens
  misc_feature: Table A; Target 88139; HLA-A*11:01; TRIM51; ENSG00000124900; TAA
AVLAQCSECK

SEQ ID NO: 88140 - protein, 8 aa, Homo sapiens
  misc_feature: Table A; Target 88140; HLA-B*18:01; TRIM51; ENSG00000124900; TAA
CEGRTVSF

SEQ ID NO: 88141 - protein, 8 aa, Homo sapiens
  misc_feature: Table A; Target 88141; HLA-B*37:01; TRIM51; ENSG00000124900; TAA
CEGRTVSF

SEQ ID NO: 88142 - protein, 9 aa, Homo sapiens
  misc_feature: Table A; Target 88142; HLA-B*49:01; TRIM51; ENSG00000124900; TAA
CEGRTVSFV

SEQ ID NO: 88143 - protein, 9 aa, Homo sapiens
  misc_feature: Table A; Target 88143; HLA-A*30:01; TRIM51; ENSG00000124900; TAA
CENLRNLNM

SEQ ID NO: 88144 - protein, 9 aa, Homo sapiens
  misc_feature: Table A; Target 88144; HLA-B*37:01; TRIM51; ENSG00000124900; TAA
CENLRNLNM

SEQ ID NO: 88145 - protein, 9 aa, Homo sapiens
  misc_feature: Table A; Target 88145; HLA-B*44:03; TRIM51; ENSG00000124900; TAA
CENLRNLNM

SEQ ID NO: 88146 - protein, 9 aa, Homo sapiens
  misc_feature: Table A; Target 88146; HLA-B*49:01; TRIM51; ENSG00000124900; TAA
CENLRNLNM

SEQ ID NO: 88147 - protein, 9 aa, Homo sapiens
  misc_feature: Table A; Target 88147; HLA-C*16:04; TRIM51; ENSG00000124900; TAA
CENLRNLNM

SEQ ID NO: 88148 - protein, 8 aa, Homo sapiens
  misc_feature: Table A; Target 88148; HLA-B*18:01; TRIM51; ENSG00000124900; TAA
CEVDKSLL

SEQ ID NO: 88149 - protein, 8 aa, Homo sapiens
  misc_feature: Table A; Target 88149; HLA-B*37:01; TRIM51; ENSG00000124900; TAA
CEVDKSLL

SEQ ID NO: 88150 - protein, 8 aa, Homo sapiens
  misc_feature: Table A; Target 88150; HLA-B*40:01; TRIM51; ENSG00000124900; TAA
CEVDKSLL

SEQ ID NO: 88151 - protein, 8 aa, Homo sapiens
  misc_feature: Table A; Target 88151; HLA-B*49:01; TRIM51; ENSG00000124900; TAA
CEVDKSLL

SEQ ID NO: 88152 - protein, 9 aa, Homo sapiens
  misc_feature: Table A; Target 88152; HLA-B*49:01; TRIM51; ENSG00000124900; TAA
CEVDKSLLC

SEQ ID NO: 88153 - protein, 9 aa, Homo sapiens
  misc_feature: Table A; Target 88153; HLA-B*38:01; TRIM51; ENSG00000124900; TAA
CHKADVELL

SEQ ID NO: 88154 - protein, 10 aa, Homo sapiens
  misc_feature: Table A; Target 88154; HLA-A*31:01; TRIM51; ENSG00000124900; TAA
CLKNMAFIAR

SEQ ID NO: 88155 - protein, 9 aa, Homo sapiens
  misc_feature: Table A; Target 88155; HLA-B*08:01; TRIM51; ENSG00000124900; TAA
DCEGRTVSF

SEQ ID NO: 88156 - protein, 9 aa, Homo sapiens
  misc_feature: Table A; Target 88156; HLA-C*07:01; TRIM51; ENSG00000124900; TAA
DCEGRTVSF

SEQ ID NO: 88157 - protein, 8 aa, Homo sapiens
  misc_feature: Table A; Target 88157; HLA-A*33:01; TRIM51; ENSG00000124900; TAA
DFTLQPER

SEQ ID NO: 88158 - protein, 9 aa, Homo sapiens
  misc_feature: Table A; Target 88158; HLA-B*08:01; TRIM51; ENSG00000124900; TAA
DICLKNMAF

SEQ ID NO: 88159 - protein, 10 aa, Homo sapiens
  misc_feature: Table A; Target 88159; HLA-A*33:01; TRIM51; ENSG00000124900; TAA
DIFQQLNESK

SEQ ID NO: 88160 - protein, 10 aa, Homo sapiens
  misc_feature: Table A; Target 88160; HLA-A*33:03; TRIM51; ENSG00000124900; TAA
DIFQQLNESK

SEQ ID NO: 88161 - protein, 10 aa, Homo sapiens
  misc_feature: Table A; Target 88161; HLA-A*68:01; TRIM51; ENSG00000124900; TAA
DIFQQLNESK

SEQ ID NO: 88162 - protein, 10 aa, Homo sapiens
  misc_feature: Table A; Target 88162; HLA-B*27:02; TRIM51; ENSG00000124900; TAA
DIFQQLNESK

SEQ ID NO: 88163 - protein, 10 aa, Homo sapiens
  misc_feature: Table A; Target 88163; HLA-C*07:06; TRIM51; ENSG00000124900; TAA
DIFQQLNESK

SEQ ID NO: 88164 - protein, 9 aa, Homo sapiens
  misc_feature: Table A; Target 88164; HLA-B*08:01; TRIM51; ENSG00000124900; TAA
DILHRYESL

SEQ ID NO: 88165 - protein, 11 aa, Homo sapiens
  misc_feature: Table A; Target 88165; HLA-A*23:01; TRIM51; ENSG00000124900; TAA
DPVTIDCGHSF

SEQ ID NO: 88166 - protein, 11 aa, Homo sapiens
  misc_feature: Table A; Target 88166; HLA-A*25:01; TRIM51; ENSG00000124900; TAA
DPVTIDCGHSF

SEQ ID NO: 88167 - protein, 11 aa, Homo sapiens
  misc_feature: Table A; Target 88167; HLA-B*35:01; TRIM51; ENSG00000124900; TAA
DPVTIDCGHSF

SEQ ID NO: 88168 - protein, 9 aa, Homo sapiens
  misc_feature: Table A; Target 88168; HLA-A*68:02; TRIM51; ENSG00000124900; TAA
DQSSLIYTI

SEQ ID NO: 88169 - protein, 9 aa, Homo sapiens
  misc_feature: Table A; Target 88169; HLA-B*13:02; TRIM51; ENSG00000124900; TAA
DQSSLIYTI

SEQ ID NO: 88170 - protein, 9 aa, Homo sapiens
  misc_feature: Table A; Target 88170; HLA-B*38:01; TRIM51; ENSG00000124900; TAA
DQSSLIYTI

SEQ ID NO: 88171 - protein, 9 aa, Homo sapiens
  misc_feature: Table A; Target 88171; HLA-B*39:01; TRIM51; ENSG00000124900; TAA
DQSSLIYTI

SEQ ID NO: 88172 - protein, 8 aa, Homo sapiens
  misc_feature: Table A; Target 88172; HLA-C*05:01; TRIM51; ENSG00000124900; TAA
DVDQSSLI

SEQ ID NO: 88173 - protein, 9 aa, Homo sapiens
  misc_feature: Table A; Target 88173; HLA-A*01:01; TRIM51; ENSG00000124900; TAA
DVDQSSLIY

SEQ ID NO: 88174 - protein, 9 aa, Homo sapiens
  misc_feature: Table A; Target 88174; HLA-A*25:01; TRIM51; ENSG00000124900; TAA
DVDQSSLIY

SEQ ID NO: 88175 - protein, 9 aa, Homo sapiens
  misc_feature: Table A; Target 88175; HLA-A*26:01; TRIM51; ENSG00000124900; TAA
DVDQSSLIY

SEQ ID NO: 88176 - protein, 9 aa, Homo sapiens
  misc_feature: Table A; Target 88176; HLA-A*29:02; TRIM51; ENSG00000124900; TAA
DVDQSSLIY

SEQ ID NO: 88177 - protein, 9 aa, Homo sapiens
  misc_feature: Table A; Target 88177; HLA-B*18:01; TRIM51; ENSG00000124900; TAA
DVDQSSLIY

SEQ ID NO: 88178 - protein, 9 aa, Homo sapiens
  misc_feature: Table A; Target 88178; HLA-B*35:01; TRIM51; ENSG00000124900; TAA
DVDQSSLIY

SEQ ID NO: 88179 - protein, 9 aa, Homo sapiens
  misc_feature: Table A; Target 88179; HLA-B*55:01; TRIM51; ENSG00000124900; TAA
DVDQSSLIY

SEQ ID NO: 88180 - protein, 9 aa, Homo sapiens
  misc_feature: Table A; Target 88180; HLA-C*03:03; TRIM51; ENSG00000124900; TAA
DVDQSSLIY

SEQ ID NO: 88181 - protein, 11 aa, Homo sapiens
  misc_feature: Table A; Target 88181; HLA-B*38:01; TRIM51; ENSG00000124900; TAA
DVDQSSLIYTI

SEQ ID NO: 88182 - protein, 8 aa, Homo sapiens
  misc_feature: Table A; Target 88182; HLA-B*18:01; TRIM51; ENSG00000124900; TAA
DVELLQAF

SEQ ID NO: 88183 - protein, 9 aa, Homo sapiens
  misc_feature: Table A; Target 88183; HLA-B*54:01; TRIM51; ENSG00000124900; TAA
DYVSLRIEA

SEQ ID NO: 88184 - protein, 9 aa, Homo sapiens
  misc_feature: Table A; Target 88184; HLA-A*33:01; TRIM51; ENSG00000124900; TAA
EAIRAEYQK

SEQ ID NO: 88185 - protein, 9 aa, Homo sapiens
  misc_feature: Table A; Target 88185; HLA-A*33:03; TRIM51; ENSG00000124900; TAA
EAIRAEYQK

SEQ ID NO: 88186 - protein, 9 aa, Homo sapiens
  misc_feature: Table A; Target 88186; HLA-A*68:01; TRIM51; ENSG00000124900; TAA
EAIRAEYQK

SEQ ID NO: 88187 - protein, 9 aa, Homo sapiens
  misc_feature: Table A; Target 88187; HLA-C*07:06; TRIM51; ENSG00000124900; TAA
EAIRAEYQK

SEQ ID NO: 88188 - protein, 10 aa, Homo sapiens
  misc_feature: Table A; Target 88188; HLA-A*25:01; TRIM51; ENSG00000124900; TAA
EAIRAEYQKM

SEQ ID NO: 88189 - protein, 10 aa, Homo sapiens
  misc_feature: Table A; Target 88189; HLA-A*26:01; TRIM51; ENSG00000124900; TAA
EAIRAEYQKM

SEQ ID NO: 88190 - protein, 9 aa, Homo sapiens
  misc_feature: Table A; Target 88190; HLA-A*33:03; TRIM51; ENSG00000124900; TAA
ECKKTTRQR

SEQ ID NO: 88191 - protein, 11 aa, Homo sapiens
  misc_feature: Table A; Target 88191; HLA-B*27:02; TRIM51; ENSG00000124900; TAA
EDIFQQLNESK

SEQ ID NO: 88192 - protein, 10 aa, Homo sapiens
  misc_feature: Table A; Target 88192; HLA-B*40:02; TRIM51; ENSG00000124900; TAA
EELLKKMQSL

SEQ ID NO: 88193 - protein, 11 aa, Homo sapiens
  misc_feature: Table A; Target 88193; HLA-B*44:02; TRIM51; ENSG00000124900; TAA
EELLKKMQSLW

SEQ ID NO: 88194 - protein, 9 aa, Homo sapiens
  misc_feature: Table A; Target 88194; HLA-B*44:02; TRIM51; ENSG00000124900; TAA
EEQHHLERL

SEQ ID NO: 88195 - protein, 9 aa, Homo sapiens
  misc_feature: Table A; Target 88195; HLA-B*44:03; TRIM51; ENSG00000124900; TAA
EEQHHLERL

SEQ ID NO: 88196 - protein, 9 aa, Homo sapiens
  misc_feature: Table A; Target 88196; HLA-A*33:03; TRIM51; ENSG00000124900; TAA
EGEDIFQQL

SEQ ID NO: 88197 - protein, 9 aa, Homo sapiens
  misc_feature: Table A; Target 88197; HLA-A*68:01; TRIM51; ENSG00000124900; TAA
EGEDIFQQL

SEQ ID NO: 88198 - protein, 9 aa, Homo sapiens
  misc_feature: Table A; Target 88198; HLA-A*68:02; TRIM51; ENSG00000124900; TAA
EGEDIFQQL

SEQ ID NO: 88199 - protein, 9 aa, Homo sapiens
  misc_feature: Table A; Target 88199; HLA-B*27:05; TRIM51; ENSG00000124900; TAA
EGEDIFQQL

SEQ ID NO: 88200 - protein, 9 aa, Homo sapiens
  misc_feature: Table A; Target 88200; HLA-B*35:03; TRIM51; ENSG00000124900; TAA
EGEDIFQQL

SEQ ID NO: 88201 - protein, 9 aa, Homo sapiens
  misc_feature: Table A; Target 88201; HLA-B*38:01; TRIM51; ENSG00000124900; TAA
EGEDIFQQL

SEQ ID NO: 88202 - protein, 9 aa, Homo sapiens
  misc_feature: Table A; Target 88202; HLA-B*39:01; TRIM51; ENSG00000124900; TAA
EGEDIFQQL

SEQ ID NO: 88203 - protein, 9 aa, Homo sapiens
  misc_feature: Table A; Target 88203; HLA-C*05:01; TRIM51; ENSG00000124900; TAA
EGEDIFQQL

SEQ ID NO: 88204 - protein, 8 aa, Homo sapiens
  misc_feature: Table A; Target 88204; HLA-B*51:01; TRIM51; ENSG00000124900; TAA
EGRTVSFV

SEQ ID NO: 88205 - protein, 9 aa, Homo sapiens
  misc_feature: Table A; Target 88205; HLA-A*25:01; TRIM51; ENSG00000124900; TAA
ELLKKMQSL

SEQ ID NO: 88206 - protein, 10 aa, Homo sapiens
  misc_feature: Table A; Target 88206; HLA-A*25:01; TRIM51; ENSG00000124900; TAA
ELSAGPITGL

SEQ ID NO: 88207 - protein, 10 aa, Homo sapiens
  misc_feature: Table A; Target 88207; HLA-A*26:01; TRIM51; ENSG00000124900; TAA
ELSAGPITGL

SEQ ID NO: 88208 - protein, 9 aa, Homo sapiens
  misc_feature: Table A; Target 88208; HLA-B*35:03; TRIM51; ENSG00000124900; TAA
EPVNPELSA

SEQ ID NO: 88209 - protein, 9 aa, Homo sapiens
  misc_feature: Table A; Target 88209; HLA-B*54:01; TRIM51; ENSG00000124900; TAA
EPVNPELSA

SEQ ID NO: 88210 - protein, 9 aa, Homo sapiens
  misc_feature: Table A; Target 88210; HLA-B*55:01; TRIM51; ENSG00000124900; TAA
EPVNPELSA

SEQ ID NO: 88211 - protein, 9 aa, Homo sapiens
  misc_feature: Table A; Target 88211; HLA-B*56:01; TRIM51; ENSG00000124900; TAA
EPVNPELSA

SEQ ID NO: 88212 - protein, 9 aa, Homo sapiens
  misc_feature: Table A; Target 88212; HLA-A*68:02; TRIM51; ENSG00000124900; TAA
ERANSHIFL

SEQ ID NO: 88213 - protein, 10 aa, Homo sapiens
  misc_feature: Table A; Target 88213; HLA-A*33:03; TRIM51; ENSG00000124900; TAA
ESKARMEHSR

SEQ ID NO: 88214 - protein, 9 aa, Homo sapiens
  misc_feature: Table A; Target 88214; HLA-A*01:01; TRIM51; ENSG00000124900; TAA
EVDKSLLCL

SEQ ID NO: 88215 - protein, 8 aa, Homo sapiens
  misc_feature: Table A; Target 88215; HLA-A*25:01; TRIM51; ENSG00000124900; TAA
EVHMGDSW

SEQ ID NO: 88216 - protein, 10 aa, Homo sapiens
  misc_feature: Table A; Target 88216; HLA-A*25:01; TRIM51; ENSG00000124900; TAA
EVHMGDSWNW

SEQ ID NO: 88217 - protein, 8 aa, Homo sapiens
  misc_feature: Table A; Target 88217; HLA-A*23:01; TRIM51; ENSG00000124900; TAA
EYQKMPAF

SEQ ID NO: 88218 - protein, 8 aa, Homo sapiens
  misc_feature: Table A; Target 88218; HLA-A*24:02; TRIM51; ENSG00000124900; TAA
EYQKMPAF

SEQ ID NO: 88219 - protein, 9 aa, Homo sapiens
  misc_feature: Table A; Target 88219; HLA-A*23:01; TRIM51; ENSG00000124900; TAA
EYQKMPAFL

SEQ ID NO: 88220 - protein, 9 aa, Homo sapiens
  misc_feature: Table A; Target 88220; HLA-A*24:02; TRIM51; ENSG00000124900; TAA
EYQKMPAFL

SEQ ID NO: 88221 - protein, 9 aa, Homo sapiens
  misc_feature: Table A; Target 88221; HLA-A*33:03; TRIM51; ENSG00000124900; TAA
EYQKMPAFL

SEQ ID NO: 88222 - protein, 9 aa, Homo sapiens
  misc_feature: Table A; Target 88222; HLA-C*05:01; TRIM51; ENSG00000124900; TAA
FCEVDKSLL

SEQ ID NO: 88223 - protein, 8 aa, Homo sapiens
  misc_feature: Table A; Target 88223; HLA-A*01:01; TRIM51; ENSG00000124900; TAA
FGDILHRY

SEQ ID NO: 88224 - protein, 8 aa, Homo sapiens
  misc_feature: Table A; Target 88224; HLA-B*08:01; TRIM51; ENSG00000124900; TAA
FIARKASL

SEQ ID NO: 88225 - protein, 9 aa, Homo sapiens
  misc_feature: Table A; Target 88225; HLA-A*02:01; TRIM51; ENSG00000124900; TAA
FLDCEGRTV

SEQ ID NO: 88226 - protein, 9 aa, Homo sapiens
  misc_feature: Table A; Target 88226; HLA-A*02:03; TRIM51; ENSG00000124900; TAA
FLDCEGRTV

SEQ ID NO: 88227 - protein, 9 aa, Homo sapiens
  misc_feature: Table A; Target 88227; HLA-A*02:07; TRIM51; ENSG00000124900; TAA
FLDCEGRTV

SEQ ID NO: 88228 - protein, 9 aa, Homo sapiens
  misc_feature: Table A; Target 88228; HLA-B*51:01; TRIM51; ENSG00000124900; TAA
FLDCEGRTV

SEQ ID NO: 88229 - protein, 9 aa, Homo sapiens
  misc_feature: Table A; Target 88229; HLA-B*55:01; TRIM51; ENSG00000124900; TAA
FLDCEGRTV

SEQ ID NO: 88230 - protein, 9 aa, Homo sapiens
  misc_feature: Table A; Target 88230; HLA-C*03:03; TRIM51; ENSG00000124900; TAA
FLDCEGRTV

SEQ ID NO: 88231 - protein, 9 aa, Homo sapiens
  misc_feature: Table A; Target 88231; HLA-C*03:04; TRIM51; ENSG00000124900; TAA
FLDCEGRTV

SEQ ID NO: 88232 - protein, 11 aa, Homo sapiens
  misc_feature: Table A; Target 88232; HLA-A*01:01; TRIM51; ENSG00000124900; TAA
FLDCEGRTVSF

SEQ ID NO: 88233 - protein, 11 aa, Homo sapiens
  misc_feature: Table A; Target 88233; HLA-A*02:07; TRIM51; ENSG00000124900; TAA
FLDCEGRTVSF

SEQ ID NO: 88234 - protein, 9 aa, Homo sapiens
  misc_feature: Table A; Target 88234; HLA-A*01:01; TRIM51; ENSG00000124900; TAA
FLDPVTIDC

SEQ ID NO: 88235 - protein, 9 aa, Homo sapiens
  misc_feature: Table A; Target 88235; HLA-A*02:04; TRIM51; ENSG00000124900; TAA
FLDPVTIDC

SEQ ID NO: 88236 - protein, 9 aa, Homo sapiens
  misc_feature: Table A; Target 88236; HLA-A*02:07; TRIM51; ENSG00000124900; TAA
FLDPVTIDC

SEQ ID NO: 88237 - protein, 9 aa, Homo sapiens
  misc_feature: Table A; Target 88237; HLA-B*35:03; TRIM51; ENSG00000124900; TAA
FLDPVTIDC

SEQ ID NO: 88238 - protein, 9 aa, Homo sapiens
  misc_feature: Table A; Target 88238; HLA-B*55:01; TRIM51; ENSG00000124900; TAA
FLDPVTIDC

SEQ ID NO: 88239 - protein, 9 aa, Homo sapiens
  misc_feature: Table A; Target 88239; HLA-C*03:03; TRIM51; ENSG00000124900; TAA
FLDPVTIDC

SEQ ID NO: 88240 - protein, 9 aa, Homo sapiens
  misc_feature: Table A; Target 88240; HLA-C*03:04; TRIM51; ENSG00000124900; TAA
FLDPVTIDC

SEQ ID NO: 88241 - protein, 9 aa, Homo sapiens
  misc_feature: Table A; Target 88241; HLA-C*04:01; TRIM51; ENSG00000124900; TAA
FLDPVTIDC

SEQ ID NO: 88242 - protein, 9 aa, Homo sapiens
  misc_feature: Table A; Target 88242; HLA-C*05:01; TRIM51; ENSG00000124900; TAA
FLDPVTIDC

SEQ ID NO: 88243 - protein, 9 aa, Homo sapiens
  misc_feature: Table A; Target 88243; HLA-C*07:04; TRIM51; ENSG00000124900; TAA
FLDPVTIDC

SEQ ID NO: 88244 - protein, 10 aa, Homo sapiens
  misc_feature: Table A; Target 88244; HLA-A*01:01; TRIM51; ENSG00000124900; TAA
FLDPVTIDCG

SEQ ID NO: 88245 - protein, 10 aa, Homo sapiens
  misc_feature: Table A; Target 88245; HLA-A*02:01; TRIM51; ENSG00000124900; TAA
FLDPVTIDCG

SEQ ID NO: 88246 - protein, 10 aa, Homo sapiens
  misc_feature: Table A; Target 88246; HLA-A*02:07; TRIM51; ENSG00000124900; TAA
FLDPVTIDCG

SEQ ID NO: 88247 - protein, 10 aa, Homo sapiens
  misc_feature: Table A; Target 88247; HLA-C*04:01; TRIM51; ENSG00000124900; TAA
FLDPVTIDCG

SEQ ID NO: 88248 - protein, 10 aa, Homo sapiens
  misc_feature: Table A; Target 88248; HLA-A*02:01; TRIM51; ENSG00000124900; TAA
FLHEEEQHHL

SEQ ID NO: 88249 - protein, 10 aa, Homo sapiens
  misc_feature: Table A; Target 88249; HLA-A*02:03; TRIM51; ENSG00000124900; TAA
FLHEEEQHHL

SEQ ID NO: 88250 - protein, 10 aa, Homo sapiens
  misc_feature: Table A; Target 88250; HLA-A*02:04; TRIM51; ENSG00000124900; TAA
FLHEEEQHHL

SEQ ID NO: 88251 - protein, 10 aa, Homo sapiens
  misc_feature: Table A; Target 88251; HLA-A*02:07; TRIM51; ENSG00000124900; TAA
FLHEEEQHHL

SEQ ID NO: 88252 - protein, 11 aa, Homo sapiens
  misc_feature: Table A; Target 88252; HLA-A*02:01; TRIM51; ENSG00000124900; TAA
FLSSEEQICGM

SEQ ID NO: 88253 - protein, 11 aa, Homo sapiens
  misc_feature: Table A; Target 88253; HLA-A*02:04; TRIM51; ENSG00000124900; TAA
FLSSEEQICGM

SEQ ID NO: 88254 - protein, 9 aa, Homo sapiens
  misc_feature: Table A; Target 88254; HLA-B*46:01; TRIM51; ENSG00000124900; TAA
FLVWGAQAF

SEQ ID NO: 88255 - protein, 9 aa, Homo sapiens
  misc_feature: Table A; Target 88255; HLA-A*02:07; TRIM51; ENSG00000124900; TAA
FSPPLRPIF

SEQ ID NO: 88256 - protein, 9 aa, Homo sapiens
  misc_feature: Table A; Target 88256; HLA-A*24:02; TRIM51; ENSG00000124900; TAA
FSPPLRPIF

SEQ ID NO: 88257 - protein, 9 aa, Homo sapiens
  misc_feature: Table A; Target 88257; HLA-A*29:02; TRIM51; ENSG00000124900; TAA
FSPPLRPIF

SEQ ID NO: 88258 - protein, 9 aa, Homo sapiens
  misc_feature: Table A; Target 88258; HLA-B*57:01; TRIM51; ENSG00000124900; TAA
FSPPLRPIF

SEQ ID NO: 88259 - protein, 9 aa, Homo sapiens
  misc_feature: Table A; Target 88259; HLA-C*02:02; TRIM51; ENSG00000124900; TAA
FSPPLRPIF

SEQ ID NO: 88260 - protein, 9 aa, Homo sapiens
  misc_feature: Table A; Target 88260; HLA-C*16:01; TRIM51; ENSG00000124900; TAA
FSPPLRPIF

SEQ ID NO: 88261 - protein, 8 aa, Homo sapiens
  misc_feature: Table A; Target 88261; HLA-A*01:01; TRIM51; ENSG00000124900; TAA
FTTSPLVV

SEQ ID NO: 88262 - protein, 8 aa, Homo sapiens
  misc_feature: Table A; Target 88262; HLA-C*02:02; TRIM51; ENSG00000124900; TAA
FTTSPLVV

SEQ ID NO: 88263 - protein, 8 aa, Homo sapiens
  misc_feature: Table A; Target 88263; HLA-C*03:03; TRIM51; ENSG00000124900; TAA
FTTSPLVV

SEQ ID NO: 88264 - protein, 8 aa, Homo sapiens
  misc_feature: Table A; Target 88264; HLA-C*03:04; TRIM51; ENSG00000124900; TAA
FTTSPLVV

SEQ ID NO: 88265 - protein, 8 aa, Homo sapiens
  misc_feature: Table A; Target 88265; HLA-C*12:03; TRIM51; ENSG00000124900; TAA
FTTSPLVV

SEQ ID NO: 88266 - protein, 10 aa, Homo sapiens
  misc_feature: Table A; Target 88266; HLA-A*01:01; TRIM51; ENSG00000124900; TAA
FTTSPLVVQY

SEQ ID NO: 88267 - protein, 10 aa, Homo sapiens
  misc_feature: Table A; Target 88267; HLA-A*25:01; TRIM51; ENSG00000124900; TAA
FTTSPLVVQY

SEQ ID NO: 88268 - protein, 10 aa, Homo sapiens
  misc_feature: Table A; Target 88268; HLA-A*26:01; TRIM51; ENSG00000124900; TAA
FTTSPLVVQY

SEQ ID NO: 88269 - protein, 10 aa, Homo sapiens
  misc_feature: Table A; Target 88269; HLA-A*29:02; TRIM51; ENSG00000124900; TAA
FTTSPLVVQY

SEQ ID NO: 88270 - protein, 10 aa, Homo sapiens
  misc_feature: Table A; Target 88270; HLA-A*30:02; TRIM51; ENSG00000124900; TAA
FTTSPLVVQY

SEQ ID NO: 88271 - protein, 10 aa, Homo sapiens
  misc_feature: Table A; Target 88271; HLA-A*33:01; TRIM51; ENSG00000124900; TAA
FTTSPLVVQY

SEQ ID NO: 88272 - protein, 10 aa, Homo sapiens
  misc_feature: Table A; Target 88272; HLA-A*33:03; TRIM51; ENSG00000124900; TAA
FTTSPLVVQY

SEQ ID NO: 88273 - protein, 10 aa, Homo sapiens
  misc_feature: Table A; Target 88273; HLA-A*68:01; TRIM51; ENSG00000124900; TAA
FTTSPLVVQY

SEQ ID NO: 88274 - protein, 10 aa, Homo sapiens
  misc_feature: Table A; Target 88274; HLA-A*68:02; TRIM51; ENSG00000124900; TAA
FTTSPLVVQY

SEQ ID NO: 88275 - protein, 10 aa, Homo sapiens
  misc_feature: Table A; Target 88275; HLA-B*27:02; TRIM51; ENSG00000124900; TAA
FTTSPLVVQY

SEQ ID NO: 88276 - protein, 10 aa, Homo sapiens
  misc_feature: Table A; Target 88276; HLA-C*02:02; TRIM51; ENSG00000124900; TAA
FTTSPLVVQY

SEQ ID NO: 88277 - protein, 10 aa, Homo sapiens
  misc_feature: Table A; Target 88277; HLA-C*07:06; TRIM51; ENSG00000124900; TAA
FTTSPLVVQY

SEQ ID NO: 88278 - protein, 10 aa, Homo sapiens
  misc_feature: Table A; Target 88278; HLA-C*12:03; TRIM51; ENSG00000124900; TAA
FTTSPLVVQY

SEQ ID NO: 88279 - protein, 10 aa, Homo sapiens
  misc_feature: Table A; Target 88279; HLA-C*16:01; TRIM51; ENSG00000124900; TAA
FTTSPLVVQY

SEQ ID NO: 88280 - protein, 10 aa, Homo sapiens
  misc_feature: Table A; Target 88280; HLA-C*16:02; TRIM51; ENSG00000124900; TAA
FTTSPLVVQY

SEQ ID NO: 88281 - protein, 11 aa, Homo sapiens
  misc_feature: Table A; Target 88281; HLA-A*68:02; TRIM51; ENSG00000124900; TAA
FTTSPLVVQYV

SEQ ID NO: 88282 - protein, 9 aa, Homo sapiens
  misc_feature: Table A; Target 88282; HLA-A*01:01; TRIM51; ENSG00000124900; TAA
FVDVDQSSL

SEQ ID NO: 88283 - protein, 9 aa, Homo sapiens
  misc_feature: Table A; Target 88283; HLA-A*02:07; TRIM51; ENSG00000124900; TAA
FVDVDQSSL

SEQ ID NO: 88284 - protein, 9 aa, Homo sapiens
  misc_feature: Table A; Target 88284; HLA-A*32:01; TRIM51; ENSG00000124900; TAA
FVDVDQSSL

SEQ ID NO: 88285 - protein, 9 aa, Homo sapiens
  misc_feature: Table A; Target 88285; HLA-B*27:05; TRIM51; ENSG00000124900; TAA
FVDVDQSSL

SEQ ID NO: 88286 - protein, 9 aa, Homo sapiens
  misc_feature: Table A; Target 88286; HLA-B*35:01; TRIM51; ENSG00000124900; TAA
FVDVDQSSL

SEQ ID NO: 88287 - protein, 9 aa, Homo sapiens
  misc_feature: Table A; Target 88287; HLA-B*35:03; TRIM51; ENSG00000124900; TAA
FVDVDQSSL

SEQ ID NO: 88288 - protein, 9 aa, Homo sapiens
  misc_feature: Table A; Target 88288; HLA-B*38:01; TRIM51; ENSG00000124900; TAA
FVDVDQSSL

SEQ ID NO: 88289 - protein, 9 aa, Homo sapiens
  misc_feature: Table A; Target 88289; HLA-B*39:01; TRIM51; ENSG00000124900; TAA
FVDVDQSSL

SEQ ID NO: 88290 - protein, 9 aa, Homo sapiens
  misc_feature: Table A; Target 88290; HLA-B*40:01; TRIM51; ENSG00000124900; TAA
FVDVDQSSL

SEQ ID NO: 88291 - protein, 9 aa, Homo sapiens
  misc_feature: Table A; Target 88291; HLA-B*55:01; TRIM51; ENSG00000124900; TAA
FVDVDQSSL

SEQ ID NO: 88292 - protein, 9 aa, Homo sapiens
  misc_feature: Table A; Target 88292; HLA-C*01:02; TRIM51; ENSG00000124900; TAA
FVDVDQSSL

SEQ ID NO: 88293 - protein, 9 aa, Homo sapiens
  misc_feature: Table A; Target 88293; HLA-C*03:03; TRIM51; ENSG00000124900; TAA
FVDVDQSSL

SEQ ID NO: 88294 - protein, 9 aa, Homo sapiens
  misc_feature: Table A; Target 88294; HLA-C*03:04; TRIM51; ENSG00000124900; TAA
FVDVDQSSL

SEQ ID NO: 88295 - protein, 9 aa, Homo sapiens
  misc_feature: Table A; Target 88295; HLA-C*04:01; TRIM51; ENSG00000124900; TAA
FVDVDQSSL

SEQ ID NO: 88296 - protein, 9 aa, Homo sapiens
  misc_feature: Table A; Target 88296; HLA-C*05:01; TRIM51; ENSG00000124900; TAA
FVDVDQSSL

SEQ ID NO: 88297 - protein, 9 aa, Homo sapiens
  misc_feature: Table A; Target 88297; HLA-C*07:04; TRIM51; ENSG00000124900; TAA
FVDVDQSSL

SEQ ID NO: 88298 - protein, 10 aa, Homo sapiens
  misc_feature: Table A; Target 88298; HLA-A*01:01; TRIM51; ENSG00000124900; TAA
FVDVDQSSLI

SEQ ID NO: 88299 - protein, 10 aa, Homo sapiens
  misc_feature: Table A; Target 88299; HLA-C*05:01; TRIM51; ENSG00000124900; TAA
FVDVDQSSLI

SEQ ID NO: 88300 - protein, 11 aa, Homo sapiens
  misc_feature: Table A; Target 88300; HLA-A*01:01; TRIM51; ENSG00000124900; TAA
FVDVDQSSLIY

SEQ ID NO: 88301 - protein, 11 aa, Homo sapiens
  misc_feature: Table A; Target 88301; HLA-A*29:02; TRIM51; ENSG00000124900; TAA
FVDVDQSSLIY

SEQ ID NO: 88302 - protein, 9 aa, Homo sapiens
  misc_feature: Table A; Target 88302; HLA-A*03:02; TRIM51; ENSG00000124900; TAA
GAQAFTSGK

SEQ ID NO: 88303 - protein, 9 aa, Homo sapiens
  misc_feature: Table A; Target 88303; HLA-A*11:01; TRIM51; ENSG00000124900; TAA
GAQAFTSGK

SEQ ID NO: 88304 - protein, 10 aa, Homo sapiens
  misc_feature: Table A; Target 88304; HLA-A*26:01; TRIM51; ENSG00000124900; TAA
GAQAFTSGKY

SEQ ID NO: 88305 - protein, 10 aa, Homo sapiens
  misc_feature: Table A; Target 88305; HLA-A*29:02; TRIM51; ENSG00000124900; TAA
GAQAFTSGKY

SEQ ID NO: 88306 - protein, 10 aa, Homo sapiens
  misc_feature: Table A; Target 88306; HLA-A*30:02; TRIM51; ENSG00000124900; TAA
GAQAFTSGKY

SEQ ID NO: 88307 - protein, 10 aa, Homo sapiens
  misc_feature: Table A; Target 88307; HLA-B*15:01; TRIM51; ENSG00000124900; TAA
GAQAFTSGKY

SEQ ID NO: 88308 - protein, 10 aa, Homo sapiens
  misc_feature: Table A; Target 88308; HLA-B*15:03; TRIM51; ENSG00000124900; TAA
GAQAFTSGKY

SEQ ID NO: 88309 - protein, 10 aa, Homo sapiens
  misc_feature: Table A; Target 88309; HLA-B*39:01; TRIM51; ENSG00000124900; TAA
GAQAFTSGKY

SEQ ID NO: 88310 - protein, 10 aa, Homo sapiens
  misc_feature: Table A; Target 88310; HLA-B*46:01; TRIM51; ENSG00000124900; TAA
GAQAFTSGKY

SEQ ID NO: 88311 - protein, 10 aa, Homo sapiens
  misc_feature: Table A; Target 88311; HLA-B*58:01; TRIM51; ENSG00000124900; TAA
GAQAFTSGKY

SEQ ID NO: 88312 - protein, 10 aa, Homo sapiens
  misc_feature: Table A; Target 88312; HLA-C*02:02; TRIM51; ENSG00000124900; TAA
GAQAFTSGKY

SEQ ID NO: 88313 - protein, 10 aa, Homo sapiens
  misc_feature: Table A; Target 88313; HLA-C*16:02; TRIM51; ENSG00000124900; TAA
GAQAFTSGKY

SEQ ID NO: 88314 - protein, 10 aa, Homo sapiens
  misc_feature: Table A; Target 88314; HLA-C*16:04; TRIM51; ENSG00000124900; TAA
GAQAFTSGKY

SEQ ID NO: 88315 - protein, 11 aa, Homo sapiens
  misc_feature: Table A; Target 88315; HLA-A*30:02; TRIM51; ENSG00000124900; TAA
GAQAFTSGKYY

SEQ ID NO: 88316 - protein, 8 aa, Homo sapiens
  misc_feature: Table A; Target 88316; HLA-B*37:01; TRIM51; ENSG00000124900; TAA
GDLRSMNV

SEQ ID NO: 88317 - protein, 8 aa, Homo sapiens
  misc_feature: Table A; Target 88317; HLA-B*40:02; TRIM51; ENSG00000124900; TAA
GDLRSMNV

SEQ ID NO: 88318 - protein, 8 aa, Homo sapiens
  misc_feature: Table A; Target 88318; HLA-A*30:01; TRIM51; ENSG00000124900; TAA
GEDIFQQL

SEQ ID NO: 88319 - protein, 8 aa, Homo sapiens
  misc_feature: Table A; Target 88319; HLA-B*18:01; TRIM51; ENSG00000124900; TAA
GEDIFQQL

SEQ ID NO: 88320 - protein, 8 aa, Homo sapiens
  misc_feature: Table A; Target 88320; HLA-B*37:01; TRIM51; ENSG00000124900; TAA
GEDIFQQL

SEQ ID NO: 88321 - protein, 8 aa, Homo sapiens
  misc_feature: Table A; Target 88321; HLA-B*40:01; TRIM51; ENSG00000124900; TAA
GEDIFQQL

SEQ ID NO: 88322 - protein, 8 aa, Homo sapiens
  misc_feature: Table A; Target 88322; HLA-B*40:02; TRIM51; ENSG00000124900; TAA
GEDIFQQL

SEQ ID NO: 88323 - protein, 8 aa, Homo sapiens
  misc_feature: Table A; Target 88323; HLA-B*49:01; TRIM51; ENSG00000124900; TAA
GEDIFQQL

SEQ ID NO: 88324 - protein, 8 aa, Homo sapiens
  misc_feature: Table A; Target 88324; HLA-A*31:01; TRIM51; ENSG00000124900; TAA
GILQVFQR

SEQ ID NO: 88325 - protein, 9 aa, Homo sapiens
  misc_feature: Table A; Target 88325; HLA-A*02:04; TRIM51; ENSG00000124900; TAA
GLLDSLSGF

SEQ ID NO: 88326 - protein, 9 aa, Homo sapiens
  misc_feature: Table A; Target 88326; HLA-B*15:01; TRIM51; ENSG00000124900; TAA
GLLDSLSGF

SEQ ID NO: 88327 - protein, 9 aa, Homo sapiens
  misc_feature: Table A; Target 88327; HLA-B*46:01; TRIM51; ENSG00000124900; TAA
GLLDSLSGF

SEQ ID NO: 88328 - protein, 11 aa, Homo sapiens
  misc_feature: Table A; Target 88328; HLA-A*02:04; TRIM51; ENSG00000124900; TAA
GLLDSLSGFRV

SEQ ID NO: 88329 - protein, 9 aa, Homo sapiens
  misc_feature: Table A; Target 88329; HLA-A*02:01; TRIM51; ENSG00000124900; TAA
GMYEDLKQM

SEQ ID NO: 88330 - protein, 9 aa, Homo sapiens
  misc_feature: Table A; Target 88330; HLA-A*02:03; TRIM51; ENSG00000124900; TAA
GMYEDLKQM

SEQ ID NO: 88331 - protein, 9 aa, Homo sapiens
  misc_feature: Table A; Target 88331; HLA-A*02:07; TRIM51; ENSG00000124900; TAA
GMYEDLKQM

SEQ ID NO: 88332 - protein, 9 aa, Homo sapiens
  misc_feature: Table A; Target 88332; HLA-B*13:02; TRIM51; ENSG00000124900; TAA
GMYEDLKQM

SEQ ID NO: 88333 - protein, 9 aa, Homo sapiens
  misc_feature: Table A; Target 88333; HLA-B*15:01; TRIM51; ENSG00000124900; TAA
GMYEDLKQM

SEQ ID NO: 88334 - protein, 9 aa, Homo sapiens
  misc_feature: Table A; Target 88334; HLA-B*15:03; TRIM51; ENSG00000124900; TAA
GMYEDLKQM

SEQ ID NO: 88335 - protein, 9 aa, Homo sapiens
  misc_feature: Table A; Target 88335; HLA-B*40:01; TRIM51; ENSG00000124900; TAA
GMYEDLKQM

SEQ ID NO: 88336 - protein, 9 aa, Homo sapiens
  misc_feature: Table A; Target 88336; HLA-B*46:01; TRIM51; ENSG00000124900; TAA
GMYEDLKQM

SEQ ID NO: 88337 - protein, 9 aa, Homo sapiens
  misc_feature: Table A; Target 88337; HLA-B*55:01; TRIM51; ENSG00000124900; TAA
GMYEDLKQM

SEQ ID NO: 88338 - protein, 9 aa, Homo sapiens
  misc_feature: Table A; Target 88338; HLA-C*02:02; TRIM51; ENSG00000124900; TAA
GMYEDLKQM

SEQ ID NO: 88339 - protein, 9 aa, Homo sapiens
  misc_feature: Table A; Target 88339; HLA-C*12:03; TRIM51; ENSG00000124900; TAA
GMYEDLKQM

SEQ ID NO: 88340 - protein, 9 aa, Homo sapiens
  misc_feature: Table A; Target 88340; HLA-C*16:02; TRIM51; ENSG00000124900; TAA
GMYEDLKQM

SEQ ID NO: 88341 - protein, 10 aa, Homo sapiens
  misc_feature: Table A; Target 88341; HLA-A*02:01; TRIM51; ENSG00000124900; TAA
GMYEDLKQMC

SEQ ID NO: 88342 - protein, 10 aa, Homo sapiens
  misc_feature: Table A; Target 88342; HLA-B*07:02; TRIM51; ENSG00000124900; TAA
GPITGLLDSL

SEQ ID NO: 88343 - protein, 10 aa, Homo sapiens
  misc_feature: Table A; Target 88343; HLA-B*35:01; TRIM51; ENSG00000124900; TAA
GPITGLLDSL

SEQ ID NO: 88344 - protein, 10 aa, Homo sapiens
  misc_feature: Table A; Target 88344; HLA-B*35:03; TRIM51; ENSG00000124900; TAA
GPITGLLDSL

SEQ ID NO: 88345 - protein, 10 aa, Homo sapiens
  misc_feature: Table A; Target 88345; HLA-B*40:01; TRIM51; ENSG00000124900; TAA
GPITGLLDSL

SEQ ID NO: 88346 - protein, 10 aa, Homo sapiens
  misc_feature: Table A; Target 88346; HLA-B*55:01; TRIM51; ENSG00000124900; TAA
GPITGLLDSL

SEQ ID NO: 88347 - protein, 10 aa, Homo sapiens
  misc_feature: Table A; Target 88347; HLA-B*56:01; TRIM51; ENSG00000124900; TAA
GPITGLLDSL

SEQ ID NO: 88348 - protein, 10 aa, Homo sapiens
  misc_feature: Table A; Target 88348; HLA-C*07:02; TRIM51; ENSG00000124900; TAA
GPITGLLDSL

SEQ ID NO: 88349 - protein, 9 aa, Homo sapiens
  misc_feature: Table A; Target 88349; HLA-C*16:04; TRIM51; ENSG00000124900; TAA
GRTVSFVDV

SEQ ID NO: 88350 - protein, 8 aa, Homo sapiens
  misc_feature: Table A; Target 88350; HLA-A*30:01; TRIM51; ENSG00000124900; TAA
HEEEQHHL

SEQ ID NO: 88351 - protein, 8 aa, Homo sapiens
  misc_feature: Table A; Target 88351; HLA-B*37:01; TRIM51; ENSG00000124900; TAA
HEEEQHHL

SEQ ID NO: 88352 - protein, 8 aa, Homo sapiens
  misc_feature: Table A; Target 88352; HLA-B*40:01; TRIM51; ENSG00000124900; TAA
HEEEQHHL

SEQ ID NO: 88353 - protein, 8 aa, Homo sapiens
  misc_feature: Table A; Target 88353; HLA-A*32:01; TRIM51; ENSG00000124900; TAA
IEAIRAEY

SEQ ID NO: 88354 - protein, 8 aa, Homo sapiens
  misc_feature: Table A; Target 88354; HLA-B*15:01; TRIM51; ENSG00000124900; TAA
IEAIRAEY

SEQ ID NO: 88355 - protein, 8 aa, Homo sapiens
  misc_feature: Table A; Target 88355; HLA-B*15:03; TRIM51; ENSG00000124900; TAA
IEAIRAEY

SEQ ID NO: 88356 - protein, 8 aa, Homo sapiens
  misc_feature: Table A; Target 88356; HLA-B*18:01; TRIM51; ENSG00000124900; TAA
IEAIRAEY

SEQ ID NO: 88357 - protein, 8 aa, Homo sapiens
  misc_feature: Table A; Target 88357; HLA-B*37:01; TRIM51; ENSG00000124900; TAA
IEAIRAEY

SEQ ID NO: 88358 - protein, 8 aa, Homo sapiens
  misc_feature: Table A; Target 88358; HLA-B*44:02; TRIM51; ENSG00000124900; TAA
IEAIRAEY

SEQ ID NO: 88359 - protein, 8 aa, Homo sapiens
  misc_feature: Table A; Target 88359; HLA-B*44:03; TRIM51; ENSG00000124900; TAA
IEAIRAEY

SEQ ID NO: 88360 - protein, 8 aa, Homo sapiens
  misc_feature: Table A; Target 88360; HLA-C*02:02; TRIM51; ENSG00000124900; TAA
IEAIRAEY

SEQ ID NO: 88361 - protein, 8 aa, Homo sapiens
  misc_feature: Table A; Target 88361; HLA-C*07:01; TRIM51; ENSG00000124900; TAA
IEAIRAEY

SEQ ID NO: 88362 - protein, 8 aa, Homo sapiens
  misc_feature: Table A; Target 88362; HLA-C*16:01; TRIM51; ENSG00000124900; TAA
IEAIRAEY

SEQ ID NO: 88363 - protein, 8 aa, Homo sapiens
  misc_feature: Table A; Target 88363; HLA-C*16:02; TRIM51; ENSG00000124900; TAA
IEAIRAEY

SEQ ID NO: 88364 - protein, 8 aa, Homo sapiens
  misc_feature: Table A; Target 88364; HLA-C*16:04; TRIM51; ENSG00000124900; TAA
IEAIRAEY

SEQ ID NO: 88365 - protein, 8 aa, Homo sapiens
  misc_feature: Table A; Target 88365; HLA-B*18:01; TRIM51; ENSG00000124900; TAA
IEWAAEER

SEQ ID NO: 88366 - protein, 9 aa, Homo sapiens
  misc_feature: Table A; Target 88366; HLA-C*14:02; TRIM51; ENSG00000124900; TAA
IFQQLNESK

SEQ ID NO: 88367 - protein, 9 aa, Homo sapiens
  misc_feature: Table A; Target 88367; HLA-A*02:04; TRIM51; ENSG00000124900; TAA
ILQVFQRAL

SEQ ID NO: 88368 - protein, 9 aa, Homo sapiens
  misc_feature: Table A; Target 88368; HLA-A*23:01; TRIM51; ENSG00000124900; TAA
IYTIPNCSF

SEQ ID NO: 88369 - protein, 9 aa, Homo sapiens
  misc_feature: Table A; Target 88369; HLA-A*29:02; TRIM51; ENSG00000124900; TAA
IYTIPNCSF

SEQ ID NO: 88370 - protein, 9 aa, Homo sapiens
  misc_feature: Table A; Target 88370; HLA-A*32:01; TRIM51; ENSG00000124900; TAA
IYTIPNCSF

SEQ ID NO: 88371 - protein, 9 aa, Homo sapiens
  misc_feature: Table A; Target 88371; HLA-C*04:01; TRIM51; ENSG00000124900; TAA
IYTIPNCSF

SEQ ID NO: 88372 - protein, 9 aa, Homo sapiens
  misc_feature: Table A; Target 88372; HLA-C*14:02; TRIM51; ENSG00000124900; TAA
IYTIPNCSF

SEQ ID NO: 88373 - protein, 9 aa, Homo sapiens
  misc_feature: Table A; Target 88373; HLA-C*06:02; TRIM51; ENSG00000124900; TAA
KACENLRNL

SEQ ID NO: 88374 - protein, 9 aa, Homo sapiens
  misc_feature: Table A; Target 88374; HLA-C*16:01; TRIM51; ENSG00000124900; TAA
KACENLRNL

SEQ ID NO: 88375 - protein, 9 aa, Homo sapiens
  misc_feature: Table A; Target 88375; HLA-C*16:02; TRIM51; ENSG00000124900; TAA
KACENLRNL

SEQ ID NO: 88376 - protein, 10 aa, Homo sapiens
  misc_feature: Table A; Target 88376; HLA-B*57:01; TRIM51; ENSG00000124900; TAA
KADVELLQAF

SEQ ID NO: 88377 - protein, 8 aa, Homo sapiens
  misc_feature: Table A; Target 88377; HLA-C*16:01; TRIM51; ENSG00000124900; TAA
KASLRQFL

SEQ ID NO: 88378 - protein, 8 aa, Homo sapiens
  misc_feature: Table A; Target 88378; HLA-B*37:01; TRIM51; ENSG00000124900; TAA
KDYVSLRI

SEQ ID NO: 88379 - protein, 8 aa, Homo sapiens
  misc_feature: Table A; Target 88379; HLA-B*37:01; TRIM51; ENSG00000124900; TAA
KEDTHCSL

SEQ ID NO: 88380 - protein, 8 aa, Homo sapiens
  misc_feature: Table A; Target 88380; HLA-B*40:01; TRIM51; ENSG00000124900; TAA
KEDTHCSL

SEQ ID NO: 88381 - protein, 9 aa, Homo sapiens
  misc_feature: Table A; Target 88381; HLA-B*37:01; TRIM51; ENSG00000124900; TAA
KEDTHCSLF

SEQ ID NO: 88382 - protein, 10 aa, Homo sapiens
  misc_feature: Table A; Target 88382; HLA-B*27:02; TRIM51; ENSG00000124900; TAA
KEGEDIFQQL

SEQ ID NO: 88383 - protein, 10 aa, Homo sapiens
  misc_feature: Table A; Target 88383; HLA-B*37:01; TRIM51; ENSG00000124900; TAA
KEGEDIFQQL

SEQ ID NO: 88384 - protein, 10 aa, Homo sapiens
  misc_feature: Table A; Target 88384; HLA-B*40:02; TRIM51; ENSG00000124900; TAA
KEGEDIFQQL

SEQ ID NO: 88385 - protein, 10 aa, Homo sapiens
  misc_feature: Table A; Target 88385; HLA-B*44:02; TRIM51; ENSG00000124900; TAA
KEGEDIFQQL

SEQ ID NO: 88386 - protein, 10 aa, Homo sapiens
  misc_feature: Table A; Target 88386; HLA-B*44:03; TRIM51; ENSG00000124900; TAA
KEGEDIFQQL

SEQ ID NO: 88387 - protein, 10 aa, Homo sapiens
  misc_feature: Table A; Target 88387; HLA-B*49:01; TRIM51; ENSG00000124900; TAA
KEGEDIFQQL

SEQ ID NO: 88388 - protein, 10 aa, Homo sapiens
  misc_feature: Table A; Target 88388; HLA-C*16:04; TRIM51; ENSG00000124900; TAA
KEGEDIFQQL

SEQ ID NO: 88389 - protein, 8 aa, Homo sapiens
  misc_feature: Table A; Target 88389; HLA-C*05:01; TRIM51; ENSG00000124900; TAA
KIDGEEGL

SEQ ID NO: 88390 - protein, 9 aa, Homo sapiens
  misc_feature: Table A; Target 88390; HLA-C*05:01; TRIM51; ENSG00000124900; TAA
KIDGEEGLF

SEQ ID NO: 88391 - protein, 10 aa, Homo sapiens
  misc_feature: Table A; Target 88391; HLA-A*02:07; TRIM51; ENSG00000124900; TAA
KIDGEEGLFL

SEQ ID NO: 88392 - protein, 11 aa, Homo sapiens
  misc_feature: Table A; Target 88392; HLA-A*02:07; TRIM51; ENSG00000124900; TAA
KIDGEEGLFLL

SEQ ID NO: 88393 - protein, 10 aa, Homo sapiens
  misc_feature: Table A; Target 88393; HLA-B*37:01; TRIM51; ENSG00000124900; TAA
LDCEGRTVSF

SEQ ID NO: 88394 - protein, 11 aa, Homo sapiens
  misc_feature: Table A; Target 88394; HLA-A*29:02; TRIM51; ENSG00000124900; TAA
LFTTSPLVVQY

SEQ ID NO: 88395 - protein, 9 aa, Homo sapiens
  misc_feature: Table A; Target 88395; HLA-B*38:01; TRIM51; ENSG00000124900; TAA
LHEEEQHHL

SEQ ID NO: 88396 - protein, 8 aa, Homo sapiens
  misc_feature: Table A; Target 88396; HLA-A*01:01; TRIM51; ENSG00000124900; TAA
LLDSLSGF

SEQ ID NO: 88397 - protein, 8 aa, Homo sapiens
  misc_feature: Table A; Target 88397; HLA-C*05:01; TRIM51; ENSG00000124900; TAA
LLDSLSGF

SEQ ID NO: 88398 - protein, 10 aa, Homo sapiens
  misc_feature: Table A; Target 88398; HLA-A*02:01; TRIM51; ENSG00000124900; TAA
LLDSLSGFRV

SEQ ID NO: 88399 - protein, 10 aa, Homo sapiens
  misc_feature: Table A; Target 88399; HLA-A*02:04; TRIM51; ENSG00000124900; TAA
LLDSLSGFRV

SEQ ID NO: 88400 - protein, 10 aa, Homo sapiens
  misc_feature: Table A; Target 88400; HLA-A*02:07; TRIM51; ENSG00000124900; TAA
LLDSLSGFRV

SEQ ID NO: 88401 - protein, 8 aa, Homo sapiens
  misc_feature: Table A; Target 88401; HLA-B*08:01; TRIM51; ENSG00000124900; TAA
LLKKMQSL

SEQ ID NO: 88402 - protein, 9 aa, Homo sapiens
  misc_feature: Table A; Target 88402; HLA-A*02:01; TRIM51; ENSG00000124900; TAA
LLLQVSEPV

SEQ ID NO: 88403 - protein, 11 aa, Homo sapiens
  misc_feature: Table A; Target 88403; HLA-A*01:01; TRIM51; ENSG00000124900; TAA
LQAFGDILHRY

SEQ ID NO: 88404 - protein, 11 aa, Homo sapiens
  misc_feature: Table A; Target 88404; HLA-A*30:02; TRIM51; ENSG00000124900; TAA
LQAFGDILHRY

SEQ ID NO: 88405 - protein, 9 aa, Homo sapiens
  misc_feature: Table A; Target 88405; HLA-B*27:05; TRIM51; ENSG00000124900; TAA
LQVSEPVNP

SEQ ID NO: 88406 - protein, 11 aa, Homo sapiens
  misc_feature: Table A; Target 88406; HLA-A*02:04; TRIM51; ENSG00000124900; TAA
LQVSEPVNPEL

SEQ ID NO: 88407 - protein, 11 aa, Homo sapiens
  misc_feature: Table A; Target 88407; HLA-A*30:01; TRIM51; ENSG00000124900; TAA
LQVSEPVNPEL

SEQ ID NO: 88408 - protein, 11 aa, Homo sapiens
  misc_feature: Table A; Target 88408; HLA-B*27:05; TRIM51; ENSG00000124900; TAA
LQVSEPVNPEL

SEQ ID NO: 88409 - protein, 11 aa, Homo sapiens
  misc_feature: Table A; Target 88409; HLA-B*38:01; TRIM51; ENSG00000124900; TAA
LQVSEPVNPEL

SEQ ID NO: 88410 - protein, 10 aa, Homo sapiens
  misc_feature: Table A; Target 88410; HLA-C*16:04; TRIM51; ENSG00000124900; TAA
LRIEAIRAEY

SEQ ID NO: 88411 - protein, 9 aa, Homo sapiens
  misc_feature: Table A; Target 88411; HLA-B*58:01; TRIM51; ENSG00000124900; TAA
LSAGPITGL

SEQ ID NO: 88412 - protein, 9 aa, Homo sapiens
  misc_feature: Table A; Target 88412; HLA-C*02:02; TRIM51; ENSG00000124900; TAA
LSAGPITGL

SEQ ID NO: 88413 - protein, 9 aa, Homo sapiens
  misc_feature: Table A; Target 88413; HLA-C*03:03; TRIM51; ENSG00000124900; TAA
LSAGPITGL

SEQ ID NO: 88414 - protein, 9 aa, Homo sapiens
  misc_feature: Table A; Target 88414; HLA-C*03:04; TRIM51; ENSG00000124900; TAA
LSAGPITGL

SEQ ID NO: 88415 - protein, 9 aa, Homo sapiens
  misc_feature: Table A; Target 88415; HLA-C*05:01; TRIM51; ENSG00000124900; TAA
LSAGPITGL

SEQ ID NO: 88416 - protein, 9 aa, Homo sapiens
  misc_feature: Table A; Target 88416; HLA-C*16:01; TRIM51; ENSG00000124900; TAA
LSAGPITGL

SEQ ID NO: 88417 - protein, 9 aa, Homo sapiens
  misc_feature: Table A; Target 88417; HLA-A*01:01; TRIM51; ENSG00000124900; TAA
LTCPICMNY

SEQ ID NO: 88418 - protein, 9 aa, Homo sapiens
  misc_feature: Table A; Target 88418; HLA-A*29:02; TRIM51; ENSG00000124900; TAA
LTCPICMNY

SEQ ID NO: 88419 - protein, 9 aa, Homo sapiens
  misc_feature: Table A; Target 88419; HLA-A*30:02; TRIM51; ENSG00000124900; TAA
LTCPICMNY

SEQ ID NO: 88420 - protein, 9 aa, Homo sapiens
  misc_feature: Table A; Target 88420; HLA-B*57:01; TRIM51; ENSG00000124900; TAA
LTCPICMNY

SEQ ID NO: 88421 - protein, 9 aa, Homo sapiens
  misc_feature: Table A; Target 88421; HLA-C*07:01; TRIM51; ENSG00000124900; TAA
LTCPICMNY

SEQ ID NO: 88422 - protein, 9 aa, Homo sapiens
  misc_feature: Table A; Target 88422; HLA-C*12:03; TRIM51; ENSG00000124900; TAA
LTCPICMNY

SEQ ID NO: 88423 - protein, 11 aa, Homo sapiens
  misc_feature: Table A; Target 88423; HLA-A*24:02; TRIM51; ENSG00000124900; TAA
LYLNWQDTAVL

SEQ ID NO: 88424 - protein, 8 aa, Homo sapiens
  misc_feature: Table A; Target 88424; HLA-B*54:01; TRIM51; ENSG00000124900; TAA
MAFIARKA

SEQ ID NO: 88425 - protein, 8 aa, Homo sapiens
  misc_feature: Table A; Target 88425; HLA-C*06:02; TRIM51; ENSG00000124900; TAA
MAFIARKA

SEQ ID NO: 88426 - protein, 10 aa, Homo sapiens
  misc_feature: Table A; Target 88426; HLA-B*08:01; TRIM51; ENSG00000124900; TAA
MAFIARKASL

SEQ ID NO: 88427 - protein, 10 aa, Homo sapiens
  misc_feature: Table A; Target 88427; HLA-B*54:01; TRIM51; ENSG00000124900; TAA
MAFIARKASL

SEQ ID NO: 88428 - protein, 8 aa, Homo sapiens
  misc_feature: Table A; Target 88428; HLA-B*37:01; TRIM51; ENSG00000124900; TAA
MEHSRELL

SEQ ID NO: 88429 - protein, 8 aa, Homo sapiens
  misc_feature: Table A; Target 88429; HLA-B*40:02; TRIM51; ENSG00000124900; TAA
MEHSRELL

SEQ ID NO: 88430 - protein, 9 aa, Homo sapiens
  misc_feature: Table A; Target 88430; HLA-B*44:02; TRIM51; ENSG00000124900; TAA
METTRTRCW

SEQ ID NO: 88431 - protein, 9 aa, Homo sapiens
  misc_feature: Table A; Target 88431; HLA-B*44:03; TRIM51; ENSG00000124900; TAA
METTRTRCW

SEQ ID NO: 88432 - protein, 10 aa, Homo sapiens
  misc_feature: Table A; Target 88432; HLA-C*04:01; TRIM51; ENSG00000124900; TAA
MFCEVDKSLL

SEQ ID NO: 88433 - protein, 9 aa, Homo sapiens
  misc_feature: Table A; Target 88433; HLA-A*23:01; TRIM51; ENSG00000124900; TAA
MNSGILQVF

SEQ ID NO: 88434 - protein, 9 aa, Homo sapiens
  misc_feature: Table A; Target 88434; HLA-A*29:02; TRIM51; ENSG00000124900; TAA
MNSGILQVF

SEQ ID NO: 88435 - protein, 11 aa, Homo sapiens
  misc_feature: Table A; Target 88435; HLA-A*33:03; TRIM51; ENSG00000124900; TAA
MNSGILQVFQR

SEQ ID NO: 88436 - protein, 11 aa, Homo sapiens
  misc_feature: Table A; Target 88436; HLA-A*68:01; TRIM51; ENSG00000124900; TAA
MNSGILQVFQR

SEQ ID NO: 88437 - protein, 8 aa, Homo sapiens
  misc_feature: Table A; Target 88437; HLA-C*04:01; TRIM51; ENSG00000124900; TAA
MYEDLKQM

SEQ ID NO: 88438 - protein, 9 aa, Homo sapiens
  misc_feature: Table A; Target 88438; HLA-A*03:02; TRIM51; ENSG00000124900; TAA
NLNTDICLK

SEQ ID NO: 88439 - protein, 9 aa, Homo sapiens
  misc_feature: Table A; Target 88439; HLA-A*11:01; TRIM51; ENSG00000124900; TAA
NLNTDICLK

SEQ ID NO: 88440 - protein, 9 aa, Homo sapiens
  misc_feature: Table A; Target 88440; HLA-A*33:01; TRIM51; ENSG00000124900; TAA
NLNTDICLK

SEQ ID NO: 88441 - protein, 9 aa, Homo sapiens
  misc_feature: Table A; Target 88441; HLA-B*27:02; TRIM51; ENSG00000124900; TAA
NLNTDICLK

SEQ ID NO: 88442 - protein, 11 aa, Homo sapiens
  misc_feature: Table A; Target 88442; HLA-A*33:01; TRIM51; ENSG00000124900; TAA
NLRNLNMETTR

SEQ ID NO: 88443 - protein, 10 aa, Homo sapiens
  misc_feature: Table A; Target 88443; HLA-A*68:01; TRIM51; ENSG00000124900; TAA
NSGILQVFQR

SEQ ID NO: 88444 - protein, 9 aa, Homo sapiens
  misc_feature: Table A; Target 88444; HLA-C*04:01; TRIM51; ENSG00000124900; TAA
NTDICLKNM

SEQ ID NO: 88445 - protein, 8 aa, Homo sapiens
  misc_feature: Table A; Target 88445; HLA-C*14:02; TRIM51; ENSG00000124900; TAA
NWQDTAVL

SEQ ID NO: 88446 - protein, 9 aa, Homo sapiens
  misc_feature: Table A; Target 88446; HLA-A*23:01; TRIM51; ENSG00000124900; TAA
NYFLDPVTI

SEQ ID NO: 88447 - protein, 9 aa, Homo sapiens
  misc_feature: Table A; Target 88447; HLA-A*33:03; TRIM51; ENSG00000124900; TAA
NYFLDPVTI

SEQ ID NO: 88448 - protein, 9 aa, Homo sapiens
  misc_feature: Table A; Target 88448; HLA-B*15:03; TRIM51; ENSG00000124900; TAA
NYFLDPVTI

SEQ ID NO: 88449 - protein, 9 aa, Homo sapiens
  misc_feature: Table A; Target 88449; HLA-B*27:02; TRIM51; ENSG00000124900; TAA
NYFLDPVTI

SEQ ID NO: 88450 - protein, 9 aa, Homo sapiens
  misc_feature: Table A; Target 88450; HLA-B*35:01; TRIM51; ENSG00000124900; TAA
NYFLDPVTI

SEQ ID NO: 88451 - protein, 9 aa, Homo sapiens
  misc_feature: Table A; Target 88451; HLA-B*35:03; TRIM51; ENSG00000124900; TAA
NYFLDPVTI

SEQ ID NO: 88452 - protein, 9 aa, Homo sapiens
  misc_feature: Table A; Target 88452; HLA-B*38:01; TRIM51; ENSG00000124900; TAA
NYFLDPVTI

SEQ ID NO: 88453 - protein, 9 aa, Homo sapiens
  misc_feature: Table A; Target 88453; HLA-B*39:01; TRIM51; ENSG00000124900; TAA
NYFLDPVTI

SEQ ID NO: 88454 - protein, 9 aa, Homo sapiens
  misc_feature: Table A; Target 88454; HLA-B*51:01; TRIM51; ENSG00000124900; TAA
NYFLDPVTI

SEQ ID NO: 88455 - protein, 9 aa, Homo sapiens
  misc_feature: Table A; Target 88455; HLA-C*01:02; TRIM51; ENSG00000124900; TAA
NYFLDPVTI

SEQ ID NO: 88456 - protein, 9 aa, Homo sapiens
  misc_feature: Table A; Target 88456; HLA-C*04:01; TRIM51; ENSG00000124900; TAA
NYFLDPVTI

SEQ ID NO: 88457 - protein, 9 aa, Homo sapiens
  misc_feature: Table A; Target 88457; HLA-C*06:02; TRIM51; ENSG00000124900; TAA
NYFLDPVTI

SEQ ID NO: 88458 - protein, 9 aa, Homo sapiens
  misc_feature: Table A; Target 88458; HLA-C*07:04; TRIM51; ENSG00000124900; TAA
NYFLDPVTI

SEQ ID NO: 88459 - protein, 9 aa, Homo sapiens
  misc_feature: Table A; Target 88459; HLA-C*12:03; TRIM51; ENSG00000124900; TAA
NYFLDPVTI

SEQ ID NO: 88460 - protein, 9 aa, Homo sapiens
  misc_feature: Table A; Target 88460; HLA-C*14:02; TRIM51; ENSG00000124900; TAA
NYFLDPVTI

SEQ ID NO: 88461 - protein, 9 aa, Homo sapiens
  misc_feature: Table A; Target 88461; HLA-C*16:02; TRIM51; ENSG00000124900; TAA
NYFLDPVTI

SEQ ID NO: 88462 - protein, 9 aa, Homo sapiens
  misc_feature: Table A; Target 88462; HLA-C*07:02; TRIM51; ENSG00000124900; TAA
PITGLLDSL

SEQ ID NO: 88463 - protein, 9 aa, Homo sapiens
  misc_feature: Table A; Target 88463; HLA-B*07:02; TRIM51; ENSG00000124900; TAA
PRPTSTVGL

SEQ ID NO: 88464 - protein, 9 aa, Homo sapiens
  misc_feature: Table A; Target 88464; HLA-C*07:01; TRIM51; ENSG00000124900; TAA
PRPTSTVGL

SEQ ID NO: 88465 - protein, 9 aa, Homo sapiens
  misc_feature: Table A; Target 88465; HLA-C*07:02; TRIM51; ENSG00000124900; TAA
PRPTSTVGL

SEQ ID NO: 88466 - protein, 9 aa, Homo sapiens
  misc_feature: Table A; Target 88466; HLA-A*03:01; TRIM51; ENSG00000124900; TAA
QAFGDILHR

SEQ ID NO: 88467 - protein, 9 aa, Homo sapiens
  misc_feature: Table A; Target 88467; HLA-A*11:01; TRIM51; ENSG00000124900; TAA
QAFGDILHR

SEQ ID NO: 88468 - protein, 9 aa, Homo sapiens
  misc_feature: Table A; Target 88468; HLA-A*31:01; TRIM51; ENSG00000124900; TAA
QAFGDILHR

SEQ ID NO: 88469 - protein, 9 aa, Homo sapiens
  misc_feature: Table A; Target 88469; HLA-A*33:01; TRIM51; ENSG00000124900; TAA
QAFGDILHR

SEQ ID NO: 88470 - protein, 9 aa, Homo sapiens
  misc_feature: Table A; Target 88470; HLA-A*33:03; TRIM51; ENSG00000124900; TAA
QAFGDILHR

SEQ ID NO: 88471 - protein, 9 aa, Homo sapiens
  misc_feature: Table A; Target 88471; HLA-A*68:01; TRIM51; ENSG00000124900; TAA
QAFGDILHR

SEQ ID NO: 88472 - protein, 9 aa, Homo sapiens
  misc_feature: Table A; Target 88472; HLA-A*68:02; TRIM51; ENSG00000124900; TAA
QAFGDILHR

SEQ ID NO: 88473 - protein, 9 aa, Homo sapiens
  misc_feature: Table A; Target 88473; HLA-B*27:02; TRIM51; ENSG00000124900; TAA
QAFGDILHR

SEQ ID NO: 88474 - protein, 9 aa, Homo sapiens
  misc_feature: Table A; Target 88474; HLA-B*57:01; TRIM51; ENSG00000124900; TAA
QAFGDILHR

SEQ ID NO: 88475 - protein, 9 aa, Homo sapiens
  misc_feature: Table A; Target 88475; HLA-C*07:06; TRIM51; ENSG00000124900; TAA
QAFGDILHR

SEQ ID NO: 88476 - protein, 10 aa, Homo sapiens
  misc_feature: Table A; Target 88476; HLA-A*01:01; TRIM51; ENSG00000124900; TAA
QAFGDILHRY

SEQ ID NO: 88477 - protein, 10 aa, Homo sapiens
  misc_feature: Table A; Target 88477; HLA-A*26:01; TRIM51; ENSG00000124900; TAA
QAFGDILHRY

SEQ ID NO: 88478 - protein, 10 aa, Homo sapiens
  misc_feature: Table A; Target 88478; HLA-A*29:02; TRIM51; ENSG00000124900; TAA
QAFGDILHRY

SEQ ID NO: 88479 - protein, 10 aa, Homo sapiens
  misc_feature: Table A; Target 88479; HLA-A*30:02; TRIM51; ENSG00000124900; TAA
QAFGDILHRY

SEQ ID NO: 88480 - protein, 10 aa, Homo sapiens
  misc_feature: Table A; Target 88480; HLA-A*68:02; TRIM51; ENSG00000124900; TAA
QAFGDILHRY

SEQ ID NO: 88481 - protein, 10 aa, Homo sapiens
  misc_feature: Table A; Target 88481; HLA-B*35:01; TRIM51; ENSG00000124900; TAA
QAFGDILHRY

SEQ ID NO: 88482 - protein, 10 aa, Homo sapiens
  misc_feature: Table A; Target 88482; HLA-B*44:02; TRIM51; ENSG00000124900; TAA
QAFGDILHRY

SEQ ID NO: 88483 - protein, 10 aa, Homo sapiens
  misc_feature: Table A; Target 88483; HLA-B*44:03; TRIM51; ENSG00000124900; TAA
QAFGDILHRY

SEQ ID NO: 88484 - protein, 10 aa, Homo sapiens
  misc_feature: Table A; Target 88484; HLA-B*57:01; TRIM51; ENSG00000124900; TAA
QAFGDILHRY

SEQ ID NO: 88485 - protein, 10 aa, Homo sapiens
  misc_feature: Table A; Target 88485; HLA-C*02:02; TRIM51; ENSG00000124900; TAA
QAFGDILHRY

SEQ ID NO: 88486 - protein, 8 aa, Homo sapiens
  misc_feature: Table A; Target 88486; HLA-A*30:02; TRIM51; ENSG00000124900; TAA
QAFTSGKY

SEQ ID NO: 88487 - protein, 8 aa, Homo sapiens
  misc_feature: Table A; Target 88487; HLA-B*15:01; TRIM51; ENSG00000124900; TAA
QAFTSGKY

SEQ ID NO: 88488 - protein, 8 aa, Homo sapiens
  misc_feature: Table A; Target 88488; HLA-B*15:03; TRIM51; ENSG00000124900; TAA
QAFTSGKY

SEQ ID NO: 88489 - protein, 8 aa, Homo sapiens
  misc_feature: Table A; Target 88489; HLA-B*35:01; TRIM51; ENSG00000124900; TAA
QAFTSGKY

SEQ ID NO: 88490 - protein, 8 aa, Homo sapiens
  misc_feature: Table A; Target 88490; HLA-B*46:01; TRIM51; ENSG00000124900; TAA
QAFTSGKY

SEQ ID NO: 88491 - protein, 8 aa, Homo sapiens
  misc_feature: Table A; Target 88491; HLA-B*58:01; TRIM51; ENSG00000124900; TAA
QAFTSGKY

SEQ ID NO: 88492 - protein, 8 aa, Homo sapiens
  misc_feature: Table A; Target 88492; HLA-C*02:02; TRIM51; ENSG00000124900; TAA
QAFTSGKY

SEQ ID NO: 88493 - protein, 8 aa, Homo sapiens
  misc_feature: Table A; Target 88493; HLA-C*07:01; TRIM51; ENSG00000124900; TAA
QAFTSGKY

SEQ ID NO: 88494 - protein, 8 aa, Homo sapiens
  misc_feature: Table A; Target 88494; HLA-C*12:03; TRIM51; ENSG00000124900; TAA
QAFTSGKY

SEQ ID NO: 88495 - protein, 8 aa, Homo sapiens
  misc_feature: Table A; Target 88495; HLA-C*16:01; TRIM51; ENSG00000124900; TAA
QAFTSGKY

SEQ ID NO: 88496 - protein, 8 aa, Homo sapiens
  misc_feature: Table A; Target 88496; HLA-C*16:02; TRIM51; ENSG00000124900; TAA
QAFTSGKY

SEQ ID NO: 88497 - protein, 9 aa, Homo sapiens
  misc_feature: Table A; Target 88497; HLA-A*26:01; TRIM51; ENSG00000124900; TAA
QAFTSGKYY

SEQ ID NO: 88498 - protein, 9 aa, Homo sapiens
  misc_feature: Table A; Target 88498; HLA-A*29:02; TRIM51; ENSG00000124900; TAA
QAFTSGKYY

SEQ ID NO: 88499 - protein, 9 aa, Homo sapiens
  misc_feature: Table A; Target 88499; HLA-A*30:02; TRIM51; ENSG00000124900; TAA
QAFTSGKYY

SEQ ID NO: 88500 - protein, 9 aa, Homo sapiens
  misc_feature: Table A; Target 88500; HLA-B*15:03; TRIM51; ENSG00000124900; TAA
QAFTSGKYY

SEQ ID NO: 88501 - protein, 9 aa, Homo sapiens
  misc_feature: Table A; Target 88501; HLA-B*35:01; TRIM51; ENSG00000124900; TAA
QAFTSGKYY

SEQ ID NO: 88502 - protein, 9 aa, Homo sapiens
  misc_feature: Table A; Target 88502; HLA-B*46:01; TRIM51; ENSG00000124900; TAA
QAFTSGKYY

SEQ ID NO: 88503 - protein, 9 aa, Homo sapiens
  misc_feature: Table A; Target 88503; HLA-C*02:02; TRIM51; ENSG00000124900; TAA
QAFTSGKYY

SEQ ID NO: 88504 - protein, 9 aa, Homo sapiens
  misc_feature: Table A; Target 88504; HLA-C*12:03; TRIM51; ENSG00000124900; TAA
QAFTSGKYY

SEQ ID NO: 88505 - protein, 9 aa, Homo sapiens
  misc_feature: Table A; Target 88505; HLA-C*16:01; TRIM51; ENSG00000124900; TAA
QAFTSGKYY

SEQ ID NO: 88506 - protein, 9 aa, Homo sapiens
  misc_feature: Table A; Target 88506; HLA-C*16:02; TRIM51; ENSG00000124900; TAA
QAFTSGKYY

SEQ ID NO: 88507 - protein, 9 aa, Homo sapiens
  misc_feature: Table A; Target 88507; HLA-C*16:04; TRIM51; ENSG00000124900; TAA
QAFTSGKYY

SEQ ID NO: 88508 - protein, 10 aa, Homo sapiens
  misc_feature: Table A; Target 88508; HLA-B*57:01; TRIM51; ENSG00000124900; TAA
QAFTSGKYYW

SEQ ID NO: 88509 - protein, 9 aa, Homo sapiens
  misc_feature: Table A; Target 88509; HLA-A*30:01; TRIM51; ENSG00000124900; TAA
QDTAVLAQC

SEQ ID NO: 88510 - protein, 9 aa, Homo sapiens
  misc_feature: Table A; Target 88510; HLA-C*16:02; TRIM51; ENSG00000124900; TAA
QDTAVLAQC

SEQ ID NO: 88511 - protein, 8 aa, Homo sapiens
  misc_feature: Table A; Target 88511; HLA-B*37:01; TRIM51; ENSG00000124900; TAA
QSSLIYTI

SEQ ID NO: 88512 - protein, 9 aa, Homo sapiens
  misc_feature: Table A; Target 88512; HLA-B*08:01; TRIM51; ENSG00000124900; TAA
QVFQRALTC

SEQ ID NO: 88513 - protein, 10 aa, Homo sapiens
  misc_feature: Table A; Target 88513; HLA-A*02:01; TRIM51; ENSG00000124900; TAA
QVSEPVNPEL

SEQ ID NO: 88514 - protein, 10 aa, Homo sapiens
  misc_feature: Table A; Target 88514; HLA-A*02:04; TRIM51; ENSG00000124900; TAA
QVSEPVNPEL

SEQ ID NO: 88515 - protein, 10 aa, Homo sapiens
  misc_feature: Table A; Target 88515; HLA-A*02:07; TRIM51; ENSG00000124900; TAA
QVSEPVNPEL

SEQ ID NO: 88516 - protein, 10 aa, Homo sapiens
  misc_feature: Table A; Target 88516; HLA-A*03:02; TRIM51; ENSG00000124900; TAA
QVSEPVNPEL

SEQ ID NO: 88517 - protein, 10 aa, Homo sapiens
  misc_feature: Table A; Target 88517; HLA-A*11:01; TRIM51; ENSG00000124900; TAA
QVSEPVNPEL

SEQ ID NO: 88518 - protein, 10 aa, Homo sapiens
  misc_feature: Table A; Target 88518; HLA-A*23:01; TRIM51; ENSG00000124900; TAA
QVSEPVNPEL

SEQ ID NO: 88519 - protein, 10 aa, Homo sapiens
  misc_feature: Table A; Target 88519; HLA-A*25:01; TRIM51; ENSG00000124900; TAA
QVSEPVNPEL

SEQ ID NO: 88520 - protein, 10 aa, Homo sapiens
  misc_feature: Table A; Target 88520; HLA-A*26:01; TRIM51; ENSG00000124900; TAA
QVSEPVNPEL

SEQ ID NO: 88521 - protein, 10 aa, Homo sapiens
  misc_feature: Table A; Target 88521; HLA-A*30:01; TRIM51; ENSG00000124900; TAA
QVSEPVNPEL

SEQ ID NO: 88522 - protein, 10 aa, Homo sapiens
  misc_feature: Table A; Target 88522; HLA-A*68:01; TRIM51; ENSG00000124900; TAA
QVSEPVNPEL

SEQ ID NO: 88523 - protein, 10 aa, Homo sapiens
  misc_feature: Table A; Target 88523; HLA-A*68:02; TRIM51; ENSG00000124900; TAA
QVSEPVNPEL

SEQ ID NO: 88524 - protein, 10 aa, Homo sapiens
  misc_feature: Table A; Target 88524; HLA-B*07:02; TRIM51; ENSG00000124900; TAA
QVSEPVNPEL

SEQ ID NO: 88525 - protein, 10 aa, Homo sapiens
  misc_feature: Table A; Target 88525; HLA-B*13:02; TRIM51; ENSG00000124900; TAA
QVSEPVNPEL

SEQ ID NO: 88526 - protein, 10 aa, Homo sapiens
  misc_feature: Table A; Target 88526; HLA-B*27:02; TRIM51; ENSG00000124900; TAA
QVSEPVNPEL

SEQ ID NO: 88527 - protein, 10 aa, Homo sapiens
  misc_feature: Table A; Target 88527; HLA-B*27:05; TRIM51; ENSG00000124900; TAA
QVSEPVNPEL

SEQ ID NO: 88528 - protein, 10 aa, Homo sapiens
  misc_feature: Table A; Target 88528; HLA-B*35:01; TRIM51; ENSG00000124900; TAA
QVSEPVNPEL

SEQ ID NO: 88529 - protein, 10 aa, Homo sapiens
  misc_feature: Table A; Target 88529; HLA-B*35:03; TRIM51; ENSG00000124900; TAA
QVSEPVNPEL

SEQ ID NO: 88530 - protein, 10 aa, Homo sapiens
  misc_feature: Table A; Target 88530; HLA-B*38:01; TRIM51; ENSG00000124900; TAA
QVSEPVNPEL

SEQ ID NO: 88531 - protein, 10 aa, Homo sapiens
  misc_feature: Table A; Target 88531; HLA-B*39:01; TRIM51; ENSG00000124900; TAA
QVSEPVNPEL

SEQ ID NO: 88532 - protein, 10 aa, Homo sapiens
  misc_feature: Table A; Target 88532; HLA-B*40:01; TRIM51; ENSG00000124900; TAA
QVSEPVNPEL

SEQ ID NO: 88533 - protein, 10 aa, Homo sapiens
  misc_feature: Table A; Target 88533; HLA-B*58:01; TRIM51; ENSG00000124900; TAA
QVSEPVNPEL

SEQ ID NO: 88534 - protein, 10 aa, Homo sapiens
  misc_feature: Table A; Target 88534; HLA-C*01:02; TRIM51; ENSG00000124900; TAA
QVSEPVNPEL

SEQ ID NO: 88535 - protein, 10 aa, Homo sapiens
  misc_feature: Table A; Target 88535; HLA-C*02:02; TRIM51; ENSG00000124900; TAA
QVSEPVNPEL

SEQ ID NO: 88536 - protein, 10 aa, Homo sapiens
  misc_feature: Table A; Target 88536; HLA-C*03:03; TRIM51; ENSG00000124900; TAA
QVSEPVNPEL

SEQ ID NO: 88537 - protein, 10 aa, Homo sapiens
  misc_feature: Table A; Target 88537; HLA-C*03:04; TRIM51; ENSG00000124900; TAA
QVSEPVNPEL

SEQ ID NO: 88538 - protein, 10 aa, Homo sapiens
  misc_feature: Table A; Target 88538; HLA-C*05:01; TRIM51; ENSG00000124900; TAA
QVSEPVNPEL

SEQ ID NO: 88539 - protein, 10 aa, Homo sapiens
  misc_feature: Table A; Target 88539; HLA-C*06:02; TRIM51; ENSG00000124900; TAA
QVSEPVNPEL

SEQ ID NO: 88540 - protein, 10 aa, Homo sapiens
  misc_feature: Table A; Target 88540; HLA-C*07:02; TRIM51; ENSG00000124900; TAA
QVSEPVNPEL

SEQ ID NO: 88541 - protein, 10 aa, Homo sapiens
  misc_feature: Table A; Target 88541; HLA-C*07:06; TRIM51; ENSG00000124900; TAA
QVSEPVNPEL

SEQ ID NO: 88542 - protein, 10 aa, Homo sapiens
  misc_feature: Table A; Target 88542; HLA-C*16:01; TRIM51; ENSG00000124900; TAA
QVSEPVNPEL

SEQ ID NO: 88543 - protein, 10 aa, Homo sapiens
  misc_feature: Table A; Target 88543; HLA-C*16:02; TRIM51; ENSG00000124900; TAA
QVSEPVNPEL

SEQ ID NO: 88544 - protein, 10 aa, Homo sapiens
  misc_feature: Table A; Target 88544; HLA-C*16:04; TRIM51; ENSG00000124900; TAA
QVSEPVNPEL

SEQ ID NO: 88545 - protein, 10 aa, Homo sapiens
  misc_feature: Table A; Target 88545; HLA-A*24:02; TRIM51; ENSG00000124900; TAA
QYVPRPTSTV

SEQ ID NO: 88546 - protein, 9 aa, Homo sapiens
  misc_feature: Table A; Target 88546; HLA-A*01:01; TRIM51; ENSG00000124900; TAA
RIEAIRAEY

SEQ ID NO: 88547 - protein, 9 aa, Homo sapiens
  misc_feature: Table A; Target 88547; HLA-A*03:01; TRIM51; ENSG00000124900; TAA
RIEAIRAEY

SEQ ID NO: 88548 - protein, 9 aa, Homo sapiens
  misc_feature: Table A; Target 88548; HLA-A*29:02; TRIM51; ENSG00000124900; TAA
RIEAIRAEY

SEQ ID NO: 88549 - protein, 9 aa, Homo sapiens
  misc_feature: Table A; Target 88549; HLA-A*30:02; TRIM51; ENSG00000124900; TAA
RIEAIRAEY

SEQ ID NO: 88550 - protein, 9 aa, Homo sapiens
  misc_feature: Table A; Target 88550; HLA-A*32:01; TRIM51; ENSG00000124900; TAA
RIEAIRAEY

SEQ ID NO: 88551 - protein, 9 aa, Homo sapiens
  misc_feature: Table A; Target 88551; HLA-B*15:01; TRIM51; ENSG00000124900; TAA
RIEAIRAEY

SEQ ID NO: 88552 - protein, 9 aa, Homo sapiens
  misc_feature: Table A; Target 88552; HLA-B*15:03; TRIM51; ENSG00000124900; TAA
RIEAIRAEY

SEQ ID NO: 88553 - protein, 9 aa, Homo sapiens
  misc_feature: Table A; Target 88553; HLA-B*44:02; TRIM51; ENSG00000124900; TAA
RIEAIRAEY

SEQ ID NO: 88554 - protein, 9 aa, Homo sapiens
  misc_feature: Table A; Target 88554; HLA-B*44:03; TRIM51; ENSG00000124900; TAA
RIEAIRAEY

SEQ ID NO: 88555 - protein, 9 aa, Homo sapiens
  misc_feature: Table A; Target 88555; HLA-B*46:01; TRIM51; ENSG00000124900; TAA
RIEAIRAEY

SEQ ID NO: 88556 - protein, 9 aa, Homo sapiens
  misc_feature: Table A; Target 88556; HLA-B*57:01; TRIM51; ENSG00000124900; TAA
RIEAIRAEY

SEQ ID NO: 88557 - protein, 9 aa, Homo sapiens
  misc_feature: Table A; Target 88557; HLA-B*58:01; TRIM51; ENSG00000124900; TAA
RIEAIRAEY

SEQ ID NO: 88558 - protein, 9 aa, Homo sapiens
  misc_feature: Table A; Target 88558; HLA-C*07:04; TRIM51; ENSG00000124900; TAA
RIEAIRAEY

SEQ ID NO: 88559 - protein, 9 aa, Homo sapiens
  misc_feature: Table A; Target 88559; HLA-C*16:01; TRIM51; ENSG00000124900; TAA
RIEAIRAEY

SEQ ID NO: 88560 - protein, 9 aa, Homo sapiens
  misc_feature: Table A; Target 88560; HLA-C*16:02; TRIM51; ENSG00000124900; TAA
RIEAIRAEY

SEQ ID NO: 88561 - protein, 9 aa, Homo sapiens
  misc_feature: Table A; Target 88561; HLA-C*16:04; TRIM51; ENSG00000124900; TAA
RIEAIRAEY

SEQ ID NO: 88562 - protein, 9 aa, Homo sapiens
  misc_feature: Table A; Target 88562; HLA-A*31:01; TRIM51; ENSG00000124900; TAA
RNLNMETTR

SEQ ID NO: 88563 - protein, 9 aa, Homo sapiens
  misc_feature: Table A; Target 88563; HLA-A*33:03; TRIM51; ENSG00000124900; TAA
RNLNMETTR

SEQ ID NO: 88564 - protein, 8 aa, Homo sapiens
  misc_feature: Table A; Target 88564; HLA-B*07:02; TRIM51; ENSG00000124900; TAA
RPTSTVGL

SEQ ID NO: 88565 - protein, 8 aa, Homo sapiens
  misc_feature: Table A; Target 88565; HLA-C*07:02; TRIM51; ENSG00000124900; TAA
RPTSTVGL

SEQ ID NO: 88566 - protein, 9 aa, Homo sapiens
  misc_feature: Table A; Target 88566; HLA-B*07:02; TRIM51; ENSG00000124900; TAA
RPTSTVGLF

SEQ ID NO: 88567 - protein, 10 aa, Homo sapiens
  misc_feature: Table A; Target 88567; HLA-B*07:02; TRIM51; ENSG00000124900; TAA
RPTSTVGLFL

SEQ ID NO: 88568 - protein, 10 aa, Homo sapiens
  misc_feature: Table A; Target 88568; HLA-A*30:01; TRIM51; ENSG00000124900; TAA
RQFLSSEEQI

SEQ ID NO: 88569 - protein, 10 aa, Homo sapiens
  misc_feature: Table A; Target 88569; HLA-B*13:02; TRIM51; ENSG00000124900; TAA
RQFLSSEEQI

SEQ ID NO: 88570 - protein, 10 aa, Homo sapiens
  misc_feature: Table A; Target 88570; HLA-B*38:01; TRIM51; ENSG00000124900; TAA
RQFLSSEEQI

SEQ ID NO: 88571 - protein, 10 aa, Homo sapiens
  misc_feature: Table A; Target 88571; HLA-A*31:01; TRIM51; ENSG00000124900; TAA
RVDFTLQPER

SEQ ID NO: 88572 - protein, 9 aa, Homo sapiens
  misc_feature: Table A; Target 88572; HLA-A*23:01; TRIM51; ENSG00000124900; TAA
SAGPITGLL

SEQ ID NO: 88573 - protein, 9 aa, Homo sapiens
  misc_feature: Table A; Target 88573; HLA-A*25:01; TRIM51; ENSG00000124900; TAA
SAGPITGLL

SEQ ID NO: 88574 - protein, 9 aa, Homo sapiens
  misc_feature: Table A; Target 88574; HLA-A*26:01; TRIM51; ENSG00000124900; TAA
SAGPITGLL

SEQ ID NO: 88575 - protein, 9 aa, Homo sapiens
  misc_feature: Table A; Target 88575; HLA-A*30:02; TRIM51; ENSG00000124900; TAA
SAGPITGLL

SEQ ID NO: 88576 - protein, 9 aa, Homo sapiens
  misc_feature: Table A; Target 88576; HLA-A*68:02; TRIM51; ENSG00000124900; TAA
SAGPITGLL

SEQ ID NO: 88577 - protein, 9 aa, Homo sapiens
  misc_feature: Table A; Target 88577; HLA-B*27:05; TRIM51; ENSG00000124900; TAA
SAGPITGLL

SEQ ID NO: 88578 - protein, 9 aa, Homo sapiens
  misc_feature: Table A; Target 88578; HLA-B*35:01; TRIM51; ENSG00000124900; TAA
SAGPITGLL

SEQ ID NO: 88579 - protein, 9 aa, Homo sapiens
  misc_feature: Table A; Target 88579; HLA-B*35:03; TRIM51; ENSG00000124900; TAA
SAGPITGLL

SEQ ID NO: 88580 - protein, 9 aa, Homo sapiens
  misc_feature: Table A; Target 88580; HLA-B*38:01; TRIM51; ENSG00000124900; TAA
SAGPITGLL

SEQ ID NO: 88581 - protein, 9 aa, Homo sapiens
  misc_feature: Table A; Target 88581; HLA-B*40:01; TRIM51; ENSG00000124900; TAA
SAGPITGLL

SEQ ID NO: 88582 - protein, 9 aa, Homo sapiens
  misc_feature: Table A; Target 88582; HLA-B*46:01; TRIM51; ENSG00000124900; TAA
SAGPITGLL

SEQ ID NO: 88583 - protein, 9 aa, Homo sapiens
  misc_feature: Table A; Target 88583; HLA-B*57:01; TRIM51; ENSG00000124900; TAA
SAGPITGLL

SEQ ID NO: 88584 - protein, 9 aa, Homo sapiens
  misc_feature: Table A; Target 88584; HLA-B*58:01; TRIM51; ENSG00000124900; TAA
SAGPITGLL

SEQ ID NO: 88585 - protein, 9 aa, Homo sapiens
  misc_feature: Table A; Target 88585; HLA-C*02:02; TRIM51; ENSG00000124900; TAA
SAGPITGLL

SEQ ID NO: 88586 - protein, 9 aa, Homo sapiens
  misc_feature: Table A; Target 88586; HLA-C*03:03; TRIM51; ENSG00000124900; TAA
SAGPITGLL

SEQ ID NO: 88587 - protein, 9 aa, Homo sapiens
  misc_feature: Table A; Target 88587; HLA-C*03:04; TRIM51; ENSG00000124900; TAA
SAGPITGLL

SEQ ID NO: 88588 - protein, 9 aa, Homo sapiens
  misc_feature: Table A; Target 88588; HLA-C*05:01; TRIM51; ENSG00000124900; TAA
SAGPITGLL

SEQ ID NO: 88589 - protein, 9 aa, Homo sapiens
  misc_feature: Table A; Target 88589; HLA-C*07:06; TRIM51; ENSG00000124900; TAA
SAGPITGLL

SEQ ID NO: 88590 - protein, 9 aa, Homo sapiens
  misc_feature: Table A; Target 88590; HLA-C*12:03; TRIM51; ENSG00000124900; TAA
SAGPITGLL

SEQ ID NO: 88591 - protein, 9 aa, Homo sapiens
  misc_feature: Table A; Target 88591; HLA-C*16:02; TRIM51; ENSG00000124900; TAA
SAGPITGLL

SEQ ID NO: 88592 - protein, 9 aa, Homo sapiens
  misc_feature: Table A; Target 88592; HLA-C*16:04; TRIM51; ENSG00000124900; TAA
SAGPITGLL

SEQ ID NO: 88593 - protein, 8 aa, Homo sapiens
  misc_feature: Table A; Target 88593; HLA-B*18:01; TRIM51; ENSG00000124900; TAA
SEEQICGM

SEQ ID NO: 88594 - protein, 8 aa, Homo sapiens
  misc_feature: Table A; Target 88594; HLA-B*37:01; TRIM51; ENSG00000124900; TAA
SEEQICGM

SEQ ID NO: 88595 - protein, 8 aa, Homo sapiens
  misc_feature: Table A; Target 88595; HLA-A*30:01; TRIM51; ENSG00000124900; TAA
SEPVNPEL

SEQ ID NO: 88596 - protein, 8 aa, Homo sapiens
  misc_feature: Table A; Target 88596; HLA-B*18:01; TRIM51; ENSG00000124900; TAA
SEPVNPEL

SEQ ID NO: 88597 - protein, 8 aa, Homo sapiens
  misc_feature: Table A; Target 88597; HLA-B*37:01; TRIM51; ENSG00000124900; TAA
SEPVNPEL

SEQ ID NO: 88598 - protein, 8 aa, Homo sapiens
  misc_feature: Table A; Target 88598; HLA-B*40:01; TRIM51; ENSG00000124900; TAA
SEPVNPEL

SEQ ID NO: 88599 - protein, 8 aa, Homo sapiens
  misc_feature: Table A; Target 88599; HLA-B*40:02; TRIM51; ENSG00000124900; TAA
SEPVNPEL

SEQ ID NO: 88600 - protein, 8 aa, Homo sapiens
  misc_feature: Table A; Target 88600; HLA-B*44:03; TRIM51; ENSG00000124900; TAA
SEPVNPEL

SEQ ID NO: 88601 - protein, 8 aa, Homo sapiens
  misc_feature: Table A; Target 88601; HLA-B*49:01; TRIM51; ENSG00000124900; TAA
SEPVNPEL

SEQ ID NO: 88602 - protein, 8 aa, Homo sapiens
  misc_feature: Table A; Target 88602; HLA-C*01:02; TRIM51; ENSG00000124900; TAA
SEPVNPEL

SEQ ID NO: 88603 - protein, 8 aa, Homo sapiens
  misc_feature: Table A; Target 88603; HLA-C*16:01; TRIM51; ENSG00000124900; TAA
SEPVNPEL

SEQ ID NO: 88604 - protein, 10 aa, Homo sapiens
  misc_feature: Table A; Target 88604; HLA-A*23:01; TRIM51; ENSG00000124900; TAA
SFSPPLRPIF

SEQ ID NO: 88605 - protein, 10 aa, Homo sapiens
  misc_feature: Table A; Target 88605; HLA-A*24:02; TRIM51; ENSG00000124900; TAA
SFSPPLRPIF

SEQ ID NO: 88606 - protein, 10 aa, Homo sapiens
  misc_feature: Table A; Target 88606; HLA-A*29:02; TRIM51; ENSG00000124900; TAA
SFSPPLRPIF

SEQ ID NO: 88607 - protein, 10 aa, Homo sapiens
  misc_feature: Table A; Target 88607; HLA-A*23:01; TRIM51; ENSG00000124900; TAA
SFVDVDQSSL

SEQ ID NO: 88608 - protein, 10 aa, Homo sapiens
  misc_feature: Table A; Target 88608; HLA-C*14:02; TRIM51; ENSG00000124900; TAA
SFVDVDQSSL

SEQ ID NO: 88609 - protein, 11 aa, Homo sapiens
  misc_feature: Table A; Target 88609; HLA-A*23:01; TRIM51; ENSG00000124900; TAA
SFVDVDQSSLI

SEQ ID NO: 88610 - protein, 9 aa, Homo sapiens
  misc_feature: Table A; Target 88610; HLA-A*02:04; TRIM51; ENSG00000124900; TAA
SGFRVDFTL

SEQ ID NO: 88611 - protein, 9 aa, Homo sapiens
  misc_feature: Table A; Target 88611; HLA-B*35:03; TRIM51; ENSG00000124900; TAA
SGFRVDFTL

SEQ ID NO: 88612 - protein, 9 aa, Homo sapiens
  misc_feature: Table A; Target 88612; HLA-A*11:01; TRIM51; ENSG00000124900; TAA
SGILQVFQR

SEQ ID NO: 88613 - protein, 9 aa, Homo sapiens
  misc_feature: Table A; Target 88613; HLA-A*31:01; TRIM51; ENSG00000124900; TAA
SGILQVFQR

SEQ ID NO: 88614 - protein, 9 aa, Homo sapiens
  misc_feature: Table A; Target 88614; HLA-A*33:01; TRIM51; ENSG00000124900; TAA
SGILQVFQR

SEQ ID NO: 88615 - protein, 9 aa, Homo sapiens
  misc_feature: Table A; Target 88615; HLA-A*33:03; TRIM51; ENSG00000124900; TAA
SGILQVFQR

SEQ ID NO: 88616 - protein, 9 aa, Homo sapiens
  misc_feature: Table A; Target 88616; HLA-A*68:01; TRIM51; ENSG00000124900; TAA
SGILQVFQR

SEQ ID NO: 88617 - protein, 9 aa, Homo sapiens
  misc_feature: Table A; Target 88617; HLA-C*07:06; TRIM51; ENSG00000124900; TAA
SGILQVFQR

SEQ ID NO: 88618 - protein, 8 aa, Homo sapiens
  misc_feature: Table A; Target 88618; HLA-B*37:01; TRIM51; ENSG00000124900; TAA
SLFTTSPL

SEQ ID NO: 88619 - protein, 9 aa, Homo sapiens
  misc_feature: Table A; Target 88619; HLA-A*02:01; TRIM51; ENSG00000124900; TAA
SLFTTSPLV

SEQ ID NO: 88620 - protein, 9 aa, Homo sapiens
  misc_feature: Table A; Target 88620; HLA-A*02:03; TRIM51; ENSG00000124900; TAA
SLFTTSPLV

SEQ ID NO: 88621 - protein, 9 aa, Homo sapiens
  misc_feature: Table A; Target 88621; HLA-A*02:04; TRIM51; ENSG00000124900; TAA
SLFTTSPLV

SEQ ID NO: 88622 - protein, 9 aa, Homo sapiens
  misc_feature: Table A; Target 88622; HLA-A*02:07; TRIM51; ENSG00000124900; TAA
SLFTTSPLV

SEQ ID NO: 88623 - protein, 9 aa, Homo sapiens
  misc_feature: Table A; Target 88623; HLA-B*13:02; TRIM51; ENSG00000124900; TAA
SLFTTSPLV

SEQ ID NO: 88624 - protein, 9 aa, Homo sapiens
  misc_feature: Table A; Target 88624; HLA-B*55:01; TRIM51; ENSG00000124900; TAA
SLFTTSPLV

SEQ ID NO: 88625 - protein, 9 aa, Homo sapiens
  misc_feature: Table A; Target 88625; HLA-C*02:02; TRIM51; ENSG00000124900; TAA
SLFTTSPLV

SEQ ID NO: 88626 - protein, 10 aa, Homo sapiens
  misc_feature: Table A; Target 88626; HLA-A*02:01; TRIM51; ENSG00000124900; TAA
SLFTTSPLVV

SEQ ID NO: 88627 - protein, 10 aa, Homo sapiens
  misc_feature: Table A; Target 88627; HLA-A*02:03; TRIM51; ENSG00000124900; TAA
SLFTTSPLVV

SEQ ID NO: 88628 - protein, 10 aa, Homo sapiens
  misc_feature: Table A; Target 88628; HLA-A*02:04; TRIM51; ENSG00000124900; TAA
SLFTTSPLVV

SEQ ID NO: 88629 - protein, 10 aa, Homo sapiens
  misc_feature: Table A; Target 88629; HLA-A*02:07; TRIM51; ENSG00000124900; TAA
SLFTTSPLVV

SEQ ID NO: 88630 - protein, 10 aa, Homo sapiens
  misc_feature: Table A; Target 88630; HLA-A*30:01; TRIM51; ENSG00000124900; TAA
SLFTTSPLVV

SEQ ID NO: 88631 - protein, 10 aa, Homo sapiens
  misc_feature: Table A; Target 88631; HLA-A*68:02; TRIM51; ENSG00000124900; TAA
SLFTTSPLVV

SEQ ID NO: 88632 - protein, 10 aa, Homo sapiens
  misc_feature: Table A; Target 88632; HLA-B*13:02; TRIM51; ENSG00000124900; TAA
SLFTTSPLVV

SEQ ID NO: 88633 - protein, 10 aa, Homo sapiens
  misc_feature: Table A; Target 88633; HLA-B*55:01; TRIM51; ENSG00000124900; TAA
SLFTTSPLVV

SEQ ID NO: 88634 - protein, 10 aa, Homo sapiens
  misc_feature: Table A; Target 88634; HLA-C*06:02; TRIM51; ENSG00000124900; TAA
SLFTTSPLVV

SEQ ID NO: 88635 - protein, 10 aa, Homo sapiens
  misc_feature: Table A; Target 88635; HLA-C*12:03; TRIM51; ENSG00000124900; TAA
SLFTTSPLVV

SEQ ID NO: 88636 - protein, 9 aa, Homo sapiens
  misc_feature: Table A; Target 88636; HLA-A*02:01; TRIM51; ENSG00000124900; TAA
SLIYTIPNC

SEQ ID NO: 88637 - protein, 9 aa, Homo sapiens
  misc_feature: Table A; Target 88637; HLA-A*02:03; TRIM51; ENSG00000124900; TAA
SLIYTIPNC

SEQ ID NO: 88638 - protein, 9 aa, Homo sapiens
  misc_feature: Table A; Target 88638; HLA-A*02:04; TRIM51; ENSG00000124900; TAA
SLIYTIPNC

SEQ ID NO: 88639 - protein, 9 aa, Homo sapiens
  misc_feature: Table A; Target 88639; HLA-B*55:01; TRIM51; ENSG00000124900; TAA
SLIYTIPNC

SEQ ID NO: 88640 - protein, 11 aa, Homo sapiens
  misc_feature: Table A; Target 88640; HLA-A*30:02; TRIM51; ENSG00000124900; TAA
SLRIEAIRAEY

SEQ ID NO: 88641 - protein, 9 aa, Homo sapiens
  misc_feature: Table A; Target 88641; HLA-A*32:01; TRIM51; ENSG00000124900; TAA
SLSGFRVDF

SEQ ID NO: 88642 - protein, 9 aa, Homo sapiens
  misc_feature: Table A; Target 88642; HLA-C*16:01; TRIM51; ENSG00000124900; TAA
SLSGFRVDF

SEQ ID NO: 88643 - protein, 11 aa, Homo sapiens
  misc_feature: Table A; Target 88643; HLA-A*02:01; TRIM51; ENSG00000124900; TAA
SLSGFRVDFTL

SEQ ID NO: 88644 - protein, 11 aa, Homo sapiens
  misc_feature: Table A; Target 88644; HLA-A*02:04; TRIM51; ENSG00000124900; TAA
SLSGFRVDFTL

SEQ ID NO: 88645 - protein, 8 aa, Homo sapiens
  misc_feature: Table A; Target 88645; HLA-B*51:01; TRIM51; ENSG00000124900; TAA
SPLVVQYV

SEQ ID NO: 88646 - protein, 8 aa, Homo sapiens
  misc_feature: Table A; Target 88646; HLA-B*56:01; TRIM51; ENSG00000124900; TAA
SPLVVQYV

SEQ ID NO: 88647 - protein, 9 aa, Homo sapiens
  misc_feature: Table A; Target 88647; HLA-B*54:01; TRIM51; ENSG00000124900; TAA
SPLVVQYVP

SEQ ID NO: 88648 - protein, 8 aa, Homo sapiens
  misc_feature: Table A; Target 88648; HLA-B*07:02; TRIM51; ENSG00000124900; TAA
SPPLRPIF

SEQ ID NO: 88649 - protein, 8 aa, Homo sapiens
  misc_feature: Table A; Target 88649; HLA-B*08:01; TRIM51; ENSG00000124900; TAA
SPPLRPIF

SEQ ID NO: 88650 - protein, 8 aa, Homo sapiens
  misc_feature: Table A; Target 88650; HLA-B*37:01; TRIM51; ENSG00000124900; TAA
TDICLKNM

SEQ ID NO: 88651 - protein, 8 aa, Homo sapiens
  misc_feature: Table A; Target 88651; HLA-C*05:01; TRIM51; ENSG00000124900; TAA
TIDCGHSF

SEQ ID NO: 88652 - protein, 8 aa, Homo sapiens
  misc_feature: Table A; Target 88652; HLA-B*15:01; TRIM51; ENSG00000124900; TAA
TSPLVVQY

SEQ ID NO: 88653 - protein, 8 aa, Homo sapiens
  misc_feature: Table A; Target 88653; HLA-B*18:01; TRIM51; ENSG00000124900; TAA
TSPLVVQY

SEQ ID NO: 88654 - protein, 9 aa, Homo sapiens
  misc_feature: Table A; Target 88654; HLA-A*02:07; TRIM51; ENSG00000124900; TAA
TSPLVVQYV

SEQ ID NO: 88655 - protein, 9 aa, Homo sapiens
  misc_feature: Table A; Target 88655; HLA-A*68:02; TRIM51; ENSG00000124900; TAA
TSPLVVQYV

SEQ ID NO: 88656 - protein, 9 aa, Homo sapiens
  misc_feature: Table A; Target 88656; HLA-A*01:01; TRIM51; ENSG00000124900; TAA
TTSPLVVQY

SEQ ID NO: 88657 - protein, 9 aa, Homo sapiens
  misc_feature: Table A; Target 88657; HLA-A*03:01; TRIM51; ENSG00000124900; TAA
TTSPLVVQY

SEQ ID NO: 88658 - protein, 9 aa, Homo sapiens
  misc_feature: Table A; Target 88658; HLA-A*03:02; TRIM51; ENSG00000124900; TAA
TTSPLVVQY

SEQ ID NO: 88659 - protein, 9 aa, Homo sapiens
  misc_feature: Table A; Target 88659; HLA-A*11:01; TRIM51; ENSG00000124900; TAA
TTSPLVVQY

SEQ ID NO: 88660 - protein, 9 aa, Homo sapiens
  misc_feature: Table A; Target 88660; HLA-A*23:01; TRIM51; ENSG00000124900; TAA
TTSPLVVQY

SEQ ID NO: 88661 - protein, 9 aa, Homo sapiens
  misc_feature: Table A; Target 88661; HLA-A*25:01; TRIM51; ENSG00000124900; TAA
TTSPLVVQY

SEQ ID NO: 88662 - protein, 9 aa, Homo sapiens
  misc_feature: Table A; Target 88662; HLA-A*26:01; TRIM51; ENSG00000124900; TAA
TTSPLVVQY

SEQ ID NO: 88663 - protein, 9 aa, Homo sapiens
  misc_feature: Table A; Target 88663; HLA-A*30:02; TRIM51; ENSG00000124900; TAA
TTSPLVVQY

SEQ ID NO: 88664 - protein, 9 aa, Homo sapiens
  misc_feature: Table A; Target 88664; HLA-A*31:01; TRIM51; ENSG00000124900; TAA
TTSPLVVQY

SEQ ID NO: 88665 - protein, 9 aa, Homo sapiens
  misc_feature: Table A; Target 88665; HLA-A*32:01; TRIM51; ENSG00000124900; TAA
TTSPLVVQY

SEQ ID NO: 88666 - protein, 9 aa, Homo sapiens
  misc_feature: Table A; Target 88666; HLA-A*33:01; TRIM51; ENSG00000124900; TAA
TTSPLVVQY

SEQ ID NO: 88667 - protein, 9 aa, Homo sapiens
  misc_feature: Table A; Target 88667; HLA-A*33:03; TRIM51; ENSG00000124900; TAA
TTSPLVVQY

SEQ ID NO: 88668 - protein, 9 aa, Homo sapiens
  misc_feature: Table A; Target 88668; HLA-A*68:01; TRIM51; ENSG00000124900; TAA
TTSPLVVQY

SEQ ID NO: 88669 - protein, 9 aa, Homo sapiens
  misc_feature: Table A; Target 88669; HLA-A*68:02; TRIM51; ENSG00000124900; TAA
TTSPLVVQY

SEQ ID NO: 88670 - protein, 9 aa, Homo sapiens
  misc_feature: Table A; Target 88670; HLA-B*15:01; TRIM51; ENSG00000124900; TAA
TTSPLVVQY

SEQ ID NO: 88671 - protein, 9 aa, Homo sapiens
  misc_feature: Table A; Target 88671; HLA-B*15:03; TRIM51; ENSG00000124900; TAA
TTSPLVVQY

SEQ ID NO: 88672 - protein, 9 aa, Homo sapiens
  misc_feature: Table A; Target 88672; HLA-B*18:01; TRIM51; ENSG00000124900; TAA
TTSPLVVQY

SEQ ID NO: 88673 - protein, 9 aa, Homo sapiens
  misc_feature: Table A; Target 88673; HLA-B*27:02; TRIM51; ENSG00000124900; TAA
TTSPLVVQY

SEQ ID NO: 88674 - protein, 9 aa, Homo sapiens
  misc_feature: Table A; Target 88674; HLA-B*27:05; TRIM51; ENSG00000124900; TAA
TTSPLVVQY

SEQ ID NO: 88675 - protein, 9 aa, Homo sapiens
  misc_feature: Table A; Target 88675; HLA-B*35:01; TRIM51; ENSG00000124900; TAA
TTSPLVVQY

SEQ ID NO: 88676 - protein, 9 aa, Homo sapiens
  misc_feature: Table A; Target 88676; HLA-B*44:02; TRIM51; ENSG00000124900; TAA
TTSPLVVQY

SEQ ID NO: 88677 - protein, 9 aa, Homo sapiens
  misc_feature: Table A; Target 88677; HLA-B*44:03; TRIM51; ENSG00000124900; TAA
TTSPLVVQY

SEQ ID NO: 88678 - protein, 9 aa, Homo sapiens
  misc_feature: Table A; Target 88678; HLA-B*46:01; TRIM51; ENSG00000124900; TAA
TTSPLVVQY

SEQ ID NO: 88679 - protein, 9 aa, Homo sapiens
  misc_feature: Table A; Target 88679; HLA-B*57:01; TRIM51; ENSG00000124900; TAA
TTSPLVVQY

SEQ ID NO: 88680 - protein, 9 aa, Homo sapiens
  misc_feature: Table A; Target 88680; HLA-B*58:01; TRIM51; ENSG00000124900; TAA
TTSPLVVQY

SEQ ID NO: 88681 - protein, 9 aa, Homo sapiens
  misc_feature: Table A; Target 88681; HLA-C*01:02; TRIM51; ENSG00000124900; TAA
TTSPLVVQY

SEQ ID NO: 88682 - protein, 9 aa, Homo sapiens
  misc_feature: Table A; Target 88682; HLA-C*02:02; TRIM51; ENSG00000124900; TAA
TTSPLVVQY

SEQ ID NO: 88683 - protein, 9 aa, Homo sapiens
  misc_feature: Table A; Target 88683; HLA-C*04:01; TRIM51; ENSG00000124900; TAA
TTSPLVVQY

SEQ ID NO: 88684 - protein, 9 aa, Homo sapiens
  misc_feature: Table A; Target 88684; HLA-C*07:04; TRIM51; ENSG00000124900; TAA
TTSPLVVQY

SEQ ID NO: 88685 - protein, 9 aa, Homo sapiens
  misc_feature: Table A; Target 88685; HLA-C*07:06; TRIM51; ENSG00000124900; TAA
TTSPLVVQY

SEQ ID NO: 88686 - protein, 9 aa, Homo sapiens
  misc_feature: Table A; Target 88686; HLA-C*12:03; TRIM51; ENSG00000124900; TAA
TTSPLVVQY

SEQ ID NO: 88687 - protein, 9 aa, Homo sapiens
  misc_feature: Table A; Target 88687; HLA-C*16:01; TRIM51; ENSG00000124900; TAA
TTSPLVVQY

SEQ ID NO: 88688 - protein, 9 aa, Homo sapiens
  misc_feature: Table A; Target 88688; HLA-C*16:02; TRIM51; ENSG00000124900; TAA
TTSPLVVQY

SEQ ID NO: 88689 - protein, 9 aa, Homo sapiens
  misc_feature: Table A; Target 88689; HLA-C*16:04; TRIM51; ENSG00000124900; TAA
TTSPLVVQY

SEQ ID NO: 88690 - protein, 10 aa, Homo sapiens
  misc_feature: Table A; Target 88690; HLA-A*68:01; TRIM51; ENSG00000124900; TAA
TTSPLVVQYV

SEQ ID NO: 88691 - protein, 10 aa, Homo sapiens
  misc_feature: Table A; Target 88691; HLA-A*68:02; TRIM51; ENSG00000124900; TAA
TTSPLVVQYV

SEQ ID NO: 88692 - protein, 9 aa, Homo sapiens
  misc_feature: Table A; Target 88692; HLA-A*68:01; TRIM51; ENSG00000124900; TAA
VDFTLQPER

SEQ ID NO: 88693 - protein, 9 aa, Homo sapiens
  misc_feature: Table A; Target 88693; HLA-B*27:02; TRIM51; ENSG00000124900; TAA
VDFTLQPER

SEQ ID NO: 88694 - protein, 9 aa, Homo sapiens
  misc_feature: Table A; Target 88694; HLA-B*57:01; TRIM51; ENSG00000124900; TAA
VDFTLQPER

SEQ ID NO: 88695 - protein, 8 aa, Homo sapiens
  misc_feature: Table A; Target 88695; HLA-A*30:01; TRIM51; ENSG00000124900; TAA
VDVDQSSL

SEQ ID NO: 88696 - protein, 8 aa, Homo sapiens
  misc_feature: Table A; Target 88696; HLA-B*37:01; TRIM51; ENSG00000124900; TAA
VDVDQSSL

SEQ ID NO: 88697 - protein, 9 aa, Homo sapiens
  misc_feature: Table A; Target 88697; HLA-B*49:01; TRIM51; ENSG00000124900; TAA
VDVDQSSLI

SEQ ID NO: 88698 - protein, 10 aa, Homo sapiens
  misc_feature: Table A; Target 88698; HLA-A*29:02; TRIM51; ENSG00000124900; TAA
VDVDQSSLIY

SEQ ID NO: 88699 - protein, 10 aa, Homo sapiens
  misc_feature: Table A; Target 88699; HLA-B*15:03; TRIM51; ENSG00000124900; TAA
VDVDQSSLIY

SEQ ID NO: 88700 - protein, 10 aa, Homo sapiens
  misc_feature: Table A; Target 88700; HLA-B*27:02; TRIM51; ENSG00000124900; TAA
VDVDQSSLIY

SEQ ID NO: 88701 - protein, 10 aa, Homo sapiens
  misc_feature: Table A; Target 88701; HLA-C*04:01; TRIM51; ENSG00000124900; TAA
VDVDQSSLIY

SEQ ID NO: 88702 - protein, 10 aa, Homo sapiens
  misc_feature: Table A; Target 88702; HLA-C*06:02; TRIM51; ENSG00000124900; TAA
VDVDQSSLIY

SEQ ID NO: 88703 - protein, 10 aa, Homo sapiens
  misc_feature: Table A; Target 88703; HLA-C*07:01; TRIM51; ENSG00000124900; TAA
VDVDQSSLIY

SEQ ID NO: 88704 - protein, 10 aa, Homo sapiens
  misc_feature: Table A; Target 88704; HLA-C*07:04; TRIM51; ENSG00000124900; TAA
VDVDQSSLIY

SEQ ID NO: 88705 - protein, 10 aa, Homo sapiens
  misc_feature: Table A; Target 88705; HLA-C*12:03; TRIM51; ENSG00000124900; TAA
VDVDQSSLIY

SEQ ID NO: 88706 - protein, 11 aa, Homo sapiens
  misc_feature: Table A; Target 88706; HLA-B*40:01; TRIM51; ENSG00000124900; TAA
VELLQAFGDIL

SEQ ID NO: 88707 - protein, 9 aa, Homo sapiens
  misc_feature: Table A; Target 88707; HLA-B*38:01; TRIM51; ENSG00000124900; TAA
VHMGDSWNW

SEQ ID NO: 88708 - protein, 9 aa, Homo sapiens
  misc_feature: Table A; Target 88708; HLA-B*15:03; TRIM51; ENSG00000124900; TAA
VKEDTHCSL

SEQ ID NO: 88709 - protein, 9 aa, Homo sapiens
  misc_feature: Table A; Target 88709; HLA-A*03:02; TRIM51; ENSG00000124900; TAA
VLAQCSECK

SEQ ID NO: 88710 - protein, 8 aa, Homo sapiens
  misc_feature: Table A; Target 88710; HLA-B*07:02; TRIM51; ENSG00000124900; TAA
VPRPTSTV

SEQ ID NO: 88711 - protein, 8 aa, Homo sapiens
  misc_feature: Table A; Target 88711; HLA-B*08:01; TRIM51; ENSG00000124900; TAA
VPRPTSTV

SEQ ID NO: 88712 - protein, 8 aa, Homo sapiens
  misc_feature: Table A; Target 88712; HLA-B*54:01; TRIM51; ENSG00000124900; TAA
VPRPTSTV

SEQ ID NO: 88713 - protein, 8 aa, Homo sapiens
  misc_feature: Table A; Target 88713; HLA-B*55:01; TRIM51; ENSG00000124900; TAA
VPRPTSTV

SEQ ID NO: 88714 - protein, 8 aa, Homo sapiens
  misc_feature: Table A; Target 88714; HLA-B*56:01; TRIM51; ENSG00000124900; TAA
VPRPTSTV

SEQ ID NO: 88715 - protein, 8 aa, Homo sapiens
  misc_feature: Table A; Target 88715; HLA-C*07:02; TRIM51; ENSG00000124900; TAA
VPRPTSTV

SEQ ID NO: 88716 - protein, 9 aa, Homo sapiens
  misc_feature: Table A; Target 88716; HLA-B*07:02; TRIM51; ENSG00000124900; TAA
VPRPTSTVG

SEQ ID NO: 88717 - protein, 9 aa, Homo sapiens
  misc_feature: Table A; Target 88717; HLA-B*56:01; TRIM51; ENSG00000124900; TAA
VPRPTSTVG

SEQ ID NO: 88718 - protein, 9 aa, Homo sapiens
  misc_feature: Table A; Target 88718; HLA-C*07:02; TRIM51; ENSG00000124900; TAA
VPRPTSTVG

SEQ ID NO: 88719 - protein, 10 aa, Homo sapiens
  misc_feature: Table A; Target 88719; HLA-B*51:01; TRIM51; ENSG00000124900; TAA
VPRPTSTVGL

SEQ ID NO: 88720 - protein, 10 aa, Homo sapiens
  misc_feature: Table A; Target 88720; HLA-B*56:01; TRIM51; ENSG00000124900; TAA
VPRPTSTVGL

SEQ ID NO: 88721 - protein, 11 aa, Homo sapiens
  misc_feature: Table A; Target 88721; HLA-B*07:02; TRIM51; ENSG00000124900; TAA
VPRPTSTVGLF

SEQ ID NO: 88722 - protein, 11 aa, Homo sapiens
  misc_feature: Table A; Target 88722; HLA-B*57:01; TRIM51; ENSG00000124900; TAA
VPRPTSTVGLF

SEQ ID NO: 88723 - protein, 11 aa, Homo sapiens
  misc_feature: Table A; Target 88723; HLA-C*07:02; TRIM51; ENSG00000124900; TAA
VPRPTSTVGLF

SEQ ID NO: 88724 - protein, 10 aa, Homo sapiens
  misc_feature: Table A; Target 88724; HLA-A*02:03; TRIM51; ENSG00000124900; TAA
VQYVPRPTST

SEQ ID NO: 88725 - protein, 11 aa, Homo sapiens
  misc_feature: Table A; Target 88725; HLA-A*02:03; TRIM51; ENSG00000124900; TAA
VQYVPRPTSTV

SEQ ID NO: 88726 - protein, 9 aa, Homo sapiens
  misc_feature: Table A; Target 88726; HLA-A*01:01; TRIM51; ENSG00000124900; TAA
VSEPVNPEL

SEQ ID NO: 88727 - protein, 9 aa, Homo sapiens
  misc_feature: Table A; Target 88727; HLA-A*02:01; TRIM51; ENSG00000124900; TAA
VSEPVNPEL

SEQ ID NO: 88728 - protein, 9 aa, Homo sapiens
  misc_feature: Table A; Target 88728; HLA-A*02:07; TRIM51; ENSG00000124900; TAA
VSEPVNPEL

SEQ ID NO: 88729 - protein, 9 aa, Homo sapiens
  misc_feature: Table A; Target 88729; HLA-A*23:01; TRIM51; ENSG00000124900; TAA
VSEPVNPEL

SEQ ID NO: 88730 - protein, 9 aa, Homo sapiens
  misc_feature: Table A; Target 88730; HLA-A*24:02; TRIM51; ENSG00000124900; TAA
VSEPVNPEL

SEQ ID NO: 88731 - protein, 9 aa, Homo sapiens
  misc_feature: Table A; Target 88731; HLA-A*30:01; TRIM51; ENSG00000124900; TAA
VSEPVNPEL

SEQ ID NO: 88732 - protein, 9 aa, Homo sapiens
  misc_feature: Table A; Target 88732; HLA-A*32:01; TRIM51; ENSG00000124900; TAA
VSEPVNPEL

SEQ ID NO: 88733 - protein, 9 aa, Homo sapiens
  misc_feature: Table A; Target 88733; HLA-A*68:02; TRIM51; ENSG00000124900; TAA
VSEPVNPEL

SEQ ID NO: 88734 - protein, 9 aa, Homo sapiens
  misc_feature: Table A; Target 88734; HLA-B*13:02; TRIM51; ENSG00000124900; TAA
VSEPVNPEL

SEQ ID NO: 88735 - protein, 9 aa, Homo sapiens
  misc_feature: Table A; Target 88735; HLA-B*27:02; TRIM51; ENSG00000124900; TAA
VSEPVNPEL

SEQ ID NO: 88736 - protein, 9 aa, Homo sapiens
  misc_feature: Table A; Target 88736; HLA-B*27:05; TRIM51; ENSG00000124900; TAA
VSEPVNPEL

SEQ ID NO: 88737 - protein, 9 aa, Homo sapiens
  misc_feature: Table A; Target 88737; HLA-B*35:01; TRIM51; ENSG00000124900; TAA
VSEPVNPEL

SEQ ID NO: 88738 - protein, 9 aa, Homo sapiens
  misc_feature: Table A; Target 88738; HLA-B*35:03; TRIM51; ENSG00000124900; TAA
VSEPVNPEL

SEQ ID NO: 88739 - protein, 9 aa, Homo sapiens
  misc_feature: Table A; Target 88739; HLA-B*38:01; TRIM51; ENSG00000124900; TAA
VSEPVNPEL

SEQ ID NO: 88740 - protein, 9 aa, Homo sapiens
  misc_feature: Table A; Target 88740; HLA-B*39:01; TRIM51; ENSG00000124900; TAA
VSEPVNPEL

SEQ ID NO: 88741 - protein, 9 aa, Homo sapiens
  misc_feature: Table A; Target 88741; HLA-B*40:01; TRIM51; ENSG00000124900; TAA
VSEPVNPEL

SEQ ID NO: 88742 - protein, 9 aa, Homo sapiens
  misc_feature: Table A; Target 88742; HLA-B*40:02; TRIM51; ENSG00000124900; TAA
VSEPVNPEL

SEQ ID NO: 88743 - protein, 9 aa, Homo sapiens
  misc_feature: Table A; Target 88743; HLA-B*46:01; TRIM51; ENSG00000124900; TAA
VSEPVNPEL

SEQ ID NO: 88744 - protein, 9 aa, Homo sapiens
  misc_feature: Table A; Target 88744; HLA-B*55:01; TRIM51; ENSG00000124900; TAA
VSEPVNPEL

SEQ ID NO: 88745 - protein, 9 aa, Homo sapiens
  misc_feature: Table A; Target 88745; HLA-B*57:01; TRIM51; ENSG00000124900; TAA
VSEPVNPEL

SEQ ID NO: 88746 - protein, 9 aa, Homo sapiens
  misc_feature: Table A; Target 88746; HLA-B*58:01; TRIM51; ENSG00000124900; TAA
VSEPVNPEL

SEQ ID NO: 88747 - protein, 9 aa, Homo sapiens
  misc_feature: Table A; Target 88747; HLA-C*01:02; TRIM51; ENSG00000124900; TAA
VSEPVNPEL

SEQ ID NO: 88748 - protein, 9 aa, Homo sapiens
  misc_feature: Table A; Target 88748; HLA-C*02:02; TRIM51; ENSG00000124900; TAA
VSEPVNPEL

SEQ ID NO: 88749 - protein, 9 aa, Homo sapiens
  misc_feature: Table A; Target 88749; HLA-C*03:03; TRIM51; ENSG00000124900; TAA
VSEPVNPEL

SEQ ID NO: 88750 - protein, 9 aa, Homo sapiens
  misc_feature: Table A; Target 88750; HLA-C*04:01; TRIM51; ENSG00000124900; TAA
VSEPVNPEL

SEQ ID NO: 88751 - protein, 9 aa, Homo sapiens
  misc_feature: Table A; Target 88751; HLA-C*05:01; TRIM51; ENSG00000124900; TAA
VSEPVNPEL

SEQ ID NO: 88752 - protein, 9 aa, Homo sapiens
  misc_feature: Table A; Target 88752; HLA-C*06:02; TRIM51; ENSG00000124900; TAA
VSEPVNPEL

SEQ ID NO: 88753 - protein, 9 aa, Homo sapiens
  misc_feature: Table A; Target 88753; HLA-C*07:02; TRIM51; ENSG00000124900; TAA
VSEPVNPEL

SEQ ID NO: 88754 - protein, 9 aa, Homo sapiens
  misc_feature: Table A; Target 88754; HLA-C*07:04; TRIM51; ENSG00000124900; TAA
VSEPVNPEL

SEQ ID NO: 88755 - protein, 9 aa, Homo sapiens
  misc_feature: Table A; Target 88755; HLA-C*12:03; TRIM51; ENSG00000124900; TAA
VSEPVNPEL

SEQ ID NO: 88756 - protein, 9 aa, Homo sapiens
  misc_feature: Table A; Target 88756; HLA-C*16:01; TRIM51; ENSG00000124900; TAA
VSEPVNPEL

SEQ ID NO: 88757 - protein, 9 aa, Homo sapiens
  misc_feature: Table A; Target 88757; HLA-C*16:02; TRIM51; ENSG00000124900; TAA
VSEPVNPEL

SEQ ID NO: 88758 - protein, 9 aa, Homo sapiens
  misc_feature: Table A; Target 88758; HLA-C*16:04; TRIM51; ENSG00000124900; TAA
VSEPVNPEL

SEQ ID NO: 88759 - protein, 8 aa, Homo sapiens
  misc_feature: Table A; Target 88759; HLA-B*40:02; TRIM51; ENSG00000124900; TAA
VSLRIEAI

SEQ ID NO: 88760 - protein, 8 aa, Homo sapiens
  misc_feature: Table A; Target 88760; HLA-B*58:01; TRIM51; ENSG00000124900; TAA
VSLRIEAI

SEQ ID NO: 88761 - protein, 9 aa, Homo sapiens
  misc_feature: Table A; Target 88761; HLA-A*31:01; TRIM51; ENSG00000124900; TAA
VSLRIEAIR

SEQ ID NO: 88762 - protein, 9 aa, Homo sapiens
  misc_feature: Table A; Target 88762; HLA-B*57:01; TRIM51; ENSG00000124900; TAA
VSLRIEAIR

SEQ ID NO: 88763 - protein, 9 aa, Homo sapiens
  misc_feature: Table A; Target 88763; HLA-A*23:01; TRIM51; ENSG00000124900; TAA
VTIDCGHSF

SEQ ID NO: 88764 - protein, 9 aa, Homo sapiens
  misc_feature: Table A; Target 88764; HLA-A*24:02; TRIM51; ENSG00000124900; TAA
VTIDCGHSF

SEQ ID NO: 88765 - protein, 9 aa, Homo sapiens
  misc_feature: Table A; Target 88765; HLA-A*25:01; TRIM51; ENSG00000124900; TAA
VTIDCGHSF

SEQ ID NO: 88766 - protein, 9 aa, Homo sapiens
  misc_feature: Table A; Target 88766; HLA-A*26:01; TRIM51; ENSG00000124900; TAA
VTIDCGHSF

SEQ ID NO: 88767 - protein, 9 aa, Homo sapiens
  misc_feature: Table A; Target 88767; HLA-A*32:01; TRIM51; ENSG00000124900; TAA
VTIDCGHSF

SEQ ID NO: 88768 - protein, 9 aa, Homo sapiens
  misc_feature: Table A; Target 88768; HLA-B*15:01; TRIM51; ENSG00000124900; TAA
VTIDCGHSF

SEQ ID NO: 88769 - protein, 9 aa, Homo sapiens
  misc_feature: Table A; Target 88769; HLA-B*15:03; TRIM51; ENSG00000124900; TAA
VTIDCGHSF

SEQ ID NO: 88770 - protein, 9 aa, Homo sapiens
  misc_feature: Table A; Target 88770; HLA-B*46:01; TRIM51; ENSG00000124900; TAA
VTIDCGHSF

SEQ ID NO: 88771 - protein, 9 aa, Homo sapiens
  misc_feature: Table A; Target 88771; HLA-B*57:01; TRIM51; ENSG00000124900; TAA
VTIDCGHSF

SEQ ID NO: 88772 - protein, 9 aa, Homo sapiens
  misc_feature: Table A; Target 88772; HLA-B*58:01; TRIM51; ENSG00000124900; TAA
VTIDCGHSF

SEQ ID NO: 88773 - protein, 9 aa, Homo sapiens
  misc_feature: Table A; Target 88773; HLA-C*01:02; TRIM51; ENSG00000124900; TAA
VTIDCGHSF

SEQ ID NO: 88774 - protein, 9 aa, Homo sapiens
  misc_feature: Table A; Target 88774; HLA-C*02:02; TRIM51; ENSG00000124900; TAA
VTIDCGHSF

SEQ ID NO: 88775 - protein, 9 aa, Homo sapiens
  misc_feature: Table A; Target 88775; HLA-C*03:03; TRIM51; ENSG00000124900; TAA
VTIDCGHSF

SEQ ID NO: 88776 - protein, 9 aa, Homo sapiens
  misc_feature: Table A; Target 88776; HLA-C*03:04; TRIM51; ENSG00000124900; TAA
VTIDCGHSF

SEQ ID NO: 88777 - protein, 9 aa, Homo sapiens
  misc_feature: Table A; Target 88777; HLA-C*14:02; TRIM51; ENSG00000124900; TAA
VTIDCGHSF

SEQ ID NO: 88778 - protein, 9 aa, Homo sapiens
  misc_feature: Table A; Target 88778; HLA-C*16:01; TRIM51; ENSG00000124900; TAA
VTIDCGHSF

SEQ ID NO: 88779 - protein, 9 aa, Homo sapiens
  misc_feature: Table A; Target 88779; HLA-C*16:04; TRIM51; ENSG00000124900; TAA
VTIDCGHSF

SEQ ID NO: 88780 - protein, 9 aa, Homo sapiens
  misc_feature: Table A; Target 88780; HLA-A*29:02; TRIM51; ENSG00000124900; TAA
WAFGVCNNY

SEQ ID NO: 88781 - protein, 9 aa, Homo sapiens
  misc_feature: Table A; Target 88781; HLA-B*44:02; TRIM51; ENSG00000124900; TAA
WEVHMGDSW

SEQ ID NO: 88782 - protein, 9 aa, Homo sapiens
  misc_feature: Table A; Target 88782; HLA-B*44:03; TRIM51; ENSG00000124900; TAA
WEVHMGDSW

SEQ ID NO: 88783 - protein, 8 aa, Homo sapiens
  misc_feature: Table A; Target 88783; HLA-B*49:01; TRIM51; ENSG00000124900; TAA
YEDLKQMC

SEQ ID NO: 88784 - protein, 8 aa, Homo sapiens
  misc_feature: Table A; Target 88784; HLA-A*30:01; TRIM51; ENSG00000124900; TAA
YESLLLQV

SEQ ID NO: 88785 - protein, 8 aa, Homo sapiens
  misc_feature: Table A; Target 88785; HLA-B*18:01; TRIM51; ENSG00000124900; TAA
YESLLLQV

SEQ ID NO: 88786 - protein, 8 aa, Homo sapiens
  misc_feature: Table A; Target 88786; HLA-B*37:01; TRIM51; ENSG00000124900; TAA
YESLLLQV

SEQ ID NO: 88787 - protein, 8 aa, Homo sapiens
  misc_feature: Table A; Target 88787; HLA-B*49:01; TRIM51; ENSG00000124900; TAA
YESLLLQV

SEQ ID NO: 88788 - protein, 9 aa, Homo sapiens
  misc_feature: Table A; Target 88788; HLA-B*49:01; TRIM51; ENSG00000124900; TAA
YESLLLQVS

SEQ ID NO: 88789 - protein, 8 aa, Homo sapiens
  misc_feature: Table A; Target 88789; HLA-A*23:01; TRIM51; ENSG00000124900; TAA
YFLDPVTI

SEQ ID NO: 88790 - protein, 8 aa, Homo sapiens
  misc_feature: Table A; Target 88790; HLA-A*24:02; TRIM51; ENSG00000124900; TAA
YFLDPVTI

SEQ ID NO: 88791 - protein, 8 aa, Homo sapiens
  misc_feature: Table A; Target 88791; HLA-B*51:01; TRIM51; ENSG00000124900; TAA
YFLDPVTI

SEQ ID NO: 88792 - protein, 8 aa, Homo sapiens
  misc_feature: Table A; Target 88792; HLA-C*04:01; TRIM51; ENSG00000124900; TAA
YFLDPVTI

SEQ ID NO: 88793 - protein, 9 aa, Homo sapiens
  misc_feature: Table A; Target 88793; HLA-A*02:01; TRIM51; ENSG00000124900; TAA
YLNWQDTAV

SEQ ID NO: 88794 - protein, 9 aa, Homo sapiens
  misc_feature: Table A; Target 88794; HLA-A*02:03; TRIM51; ENSG00000124900; TAA
YLNWQDTAV

SEQ ID NO: 88795 - protein, 9 aa, Homo sapiens
  misc_feature: Table A; Target 88795; HLA-A*02:04; TRIM51; ENSG00000124900; TAA
YLNWQDTAV

SEQ ID NO: 88796 - protein, 9 aa, Homo sapiens
  misc_feature: Table A; Target 88796; HLA-A*02:07; TRIM51; ENSG00000124900; TAA
YLNWQDTAV

SEQ ID NO: 88797 - protein, 9 aa, Homo sapiens
  misc_feature: Table A; Target 88797; HLA-B*13:02; TRIM51; ENSG00000124900; TAA
YLNWQDTAV

SEQ ID NO: 88798 - protein, 9 aa, Homo sapiens
  misc_feature: Table A; Target 88798; HLA-B*55:01; TRIM51; ENSG00000124900; TAA
YLNWQDTAV

SEQ ID NO: 88799 - protein, 9 aa, Homo sapiens
  misc_feature: Table A; Target 88799; HLA-A*02:01; TRIM51; ENSG00000124900; TAA
YVPRPTSTV

SEQ ID NO: 88800 - protein, 9 aa, Homo sapiens
  misc_feature: Table A; Target 88800; HLA-A*02:03; TRIM51; ENSG00000124900; TAA
YVPRPTSTV

SEQ ID NO: 88801 - protein, 9 aa, Homo sapiens
  misc_feature: Table A; Target 88801; HLA-A*02:04; TRIM51; ENSG00000124900; TAA
YVPRPTSTV

SEQ ID NO: 88802 - protein, 9 aa, Homo sapiens
  misc_feature: Table A; Target 88802; HLA-A*02:07; TRIM51; ENSG00000124900; TAA
YVPRPTSTV

SEQ ID NO: 88803 - protein, 9 aa, Homo sapiens
  misc_feature: Table A; Target 88803; HLA-A*24:02; TRIM51; ENSG00000124900; TAA
YVPRPTSTV

SEQ ID NO: 88804 - protein, 9 aa, Homo sapiens
  misc_feature: Table A; Target 88804; HLA-A*25:01; TRIM51; ENSG00000124900; TAA
YVPRPTSTV

SEQ ID NO: 88805 - protein, 9 aa, Homo sapiens
  misc_feature: Table A; Target 88805; HLA-A*26:01; TRIM51; ENSG00000124900; TAA
YVPRPTSTV

SEQ ID NO: 88806 - protein, 9 aa, Homo sapiens
  misc_feature: Table A; Target 88806; HLA-A*32:01; TRIM51; ENSG00000124900; TAA
YVPRPTSTV

SEQ ID NO: 88807 - protein, 9 aa, Homo sapiens
  misc_feature: Table A; Target 88807; HLA-A*68:02; TRIM51; ENSG00000124900; TAA
YVPRPTSTV

SEQ ID NO: 88808 - protein, 9 aa, Homo sapiens
  misc_feature: Table A; Target 88808; HLA-B*13:02; TRIM51; ENSG00000124900; TAA
YVPRPTSTV

SEQ ID NO: 88809 - protein, 9 aa, Homo sapiens
  misc_feature: Table A; Target 88809; HLA-B*46:01; TRIM51; ENSG00000124900; TAA
YVPRPTSTV

SEQ ID NO: 88810 - protein, 9 aa, Homo sapiens
  misc_feature: Table A; Target 88810; HLA-B*51:01; TRIM51; ENSG00000124900; TAA
YVPRPTSTV

SEQ ID NO: 88811 - protein, 9 aa, Homo sapiens
  misc_feature: Table A; Target 88811; HLA-B*54:01; TRIM51; ENSG00000124900; TAA
YVPRPTSTV

SEQ ID NO: 88812 - protein, 9 aa, Homo sapiens
  misc_feature: Table A; Target 88812; HLA-C*01:02; TRIM51; ENSG00000124900; TAA
YVPRPTSTV

SEQ ID NO: 88813 - protein, 9 aa, Homo sapiens
  misc_feature: Table A; Target 88813; HLA-C*02:02; TRIM51; ENSG00000124900; TAA
YVPRPTSTV

SEQ ID NO: 88814 - protein, 9 aa, Homo sapiens
  misc_feature: Table A; Target 88814; HLA-C*03:04; TRIM51; ENSG00000124900; TAA
YVPRPTSTV

SEQ ID NO: 88815 - protein, 9 aa, Homo sapiens
  misc_feature: Table A; Target 88815; HLA-C*05:01; TRIM51; ENSG00000124900; TAA
YVPRPTSTV

SEQ ID NO: 88816 - protein, 11 aa, Homo sapiens
  misc_feature: Table A; Target 88816; HLA-A*02:07; TRIM51; ENSG00000124900; TAA
YVPRPTSTVGL

SEQ ID NO: 88817 - protein, 11 aa, Homo sapiens
  misc_feature: Table A; Target 88817; HLA-C*01:02; TRIM51; ENSG00000124900; TAA
YVPRPTSTVGL

SEQ ID NO: 88818 - protein, 8 aa, Homo sapiens
  misc_feature: Table A; Target 88818; HLA-B*54:01; TRIM51; ENSG00000124900; TAA
YVSLRIEA

SEQ ID NO: 88819 - protein, 9 aa, Homo sapiens
  misc_feature: Table A; Target 88819; HLA-A*02:01; TRIM51; ENSG00000124900; TAA
YVSLRIEAI

SEQ ID NO: 88820 - protein, 9 aa, Homo sapiens
  misc_feature: Table A; Target 88820; HLA-A*02:03; TRIM51; ENSG00000124900; TAA
YVSLRIEAI

SEQ ID NO: 88821 - protein, 9 aa, Homo sapiens
  misc_feature: Table A; Target 88821; HLA-A*02:04; TRIM51; ENSG00000124900; TAA
YVSLRIEAI

SEQ ID NO: 88822 - protein, 9 aa, Homo sapiens
  misc_feature: Table A; Target 88822; HLA-A*02:07; TRIM51; ENSG00000124900; TAA
YVSLRIEAI

SEQ ID NO: 88823 - protein, 9 aa, Homo sapiens
  misc_feature: Table A; Target 88823; HLA-A*25:01; TRIM51; ENSG00000124900; TAA
YVSLRIEAI

SEQ ID NO: 88824 - protein, 9 aa, Homo sapiens
  misc_feature: Table A; Target 88824; HLA-A*30:01; TRIM51; ENSG00000124900; TAA
YVSLRIEAI

SEQ ID NO: 88825 - protein, 9 aa, Homo sapiens
  misc_feature: Table A; Target 88825; HLA-A*68:02; TRIM51; ENSG00000124900; TAA
YVSLRIEAI

SEQ ID NO: 88826 - protein, 9 aa, Homo sapiens
  misc_feature: Table A; Target 88826; HLA-B*08:01; TRIM51; ENSG00000124900; TAA
YVSLRIEAI

SEQ ID NO: 88827 - protein, 9 aa, Homo sapiens
  misc_feature: Table A; Target 88827; HLA-B*13:02; TRIM51; ENSG00000124900; TAA
YVSLRIEAI

SEQ ID NO: 88828 - protein, 9 aa, Homo sapiens
  misc_feature: Table A; Target 88828; HLA-B*37:01; TRIM51; ENSG00000124900; TAA
YVSLRIEAI

SEQ ID NO: 88829 - protein, 9 aa, Homo sapiens
  misc_feature: Table A; Target 88829; HLA-B*54:01; TRIM51; ENSG00000124900; TAA
YVSLRIEAI

SEQ ID NO: 88830 - protein, 11 aa, Homo sapiens
  misc_feature: Table A; Target 88830; HLA-A*24:02; TRIM51; ENSG00000124900; TAA
YYWEVHMGDSW

SEQ ID NO: 88831 - protein, 8 aa, Homo sapiens
  misc_feature: Table A; Target 88831; HLA-B*58:01; TRPM1; ENSG00000134160; TAA
AAMTTGAW

SEQ ID NO: 88832 - protein, 9 aa, Homo sapiens
  misc_feature: Table A; Target 88832; HLA-B*44:02; TRPM1; ENSG00000134160; TAA
ADGYSLYRY

SEQ ID NO: 88833 - protein, 9 aa, Homo sapiens
  misc_feature: Table A; Target 88833; HLA-B*37:01; TRPM1; ENSG00000134160; TAA
ADMQDEHHV

SEQ ID NO: 88834 - protein, 9 aa, Homo sapiens
  misc_feature: Table A; Target 88834; HLA-A*30:02; TRPM1; ENSG00000134160; TAA
ADNGTLGKY

SEQ ID NO: 88835 - protein, 9 aa, Homo sapiens
  misc_feature: Table A; Target 88835; HLA-B*15:03; TRPM1; ENSG00000134160; TAA
ADNGTLGKY

SEQ ID NO: 88836 - protein, 9 aa, Homo sapiens
  misc_feature: Table A; Target 88836; HLA-B*44:02; TRPM1; ENSG00000134160; TAA
ADNGTLGKY

SEQ ID NO: 88837 - protein, 9 aa, Homo sapiens
  misc_feature: Table A; Target 88837; HLA-B*44:03; TRPM1; ENSG00000134160; TAA
ADNGTLGKY

SEQ ID NO: 88838 - protein, 9 aa, Homo sapiens
  misc_feature: Table A; Target 88838; HLA-C*16:04; TRPM1; ENSG00000134160; TAA
ADNGTLGKY

SEQ ID NO: 88839 - protein, 9 aa, Homo sapiens
  misc_feature: Table A; Target 88839; HLA-A*30:01; TRPM1; ENSG00000134160; TAA
ADQIDLYAM

SEQ ID NO: 88840 - protein, 9 aa, Homo sapiens
  misc_feature: Table A; Target 88840; HLA-B*37:01; TRPM1; ENSG00000134160; TAA
ADQIDLYAM

SEQ ID NO: 88841 - protein, 10 aa, Homo sapiens
  misc_feature: Table A; Target 88841; HLA-B*44:02; TRPM1; ENSG00000134160; TAA
AEAIPRIPRL

SEQ ID NO: 88842 - protein, 10 aa, Homo sapiens
  misc_feature: Table A; Target 88842; HLA-A*30:01; TRPM1; ENSG00000134160; TAA
AEHKEQFADM

SEQ ID NO: 88843 - protein, 10 aa, Homo sapiens
  misc_feature: Table A; Target 88843; HLA-B*40:01; TRPM1; ENSG00000134160; TAA
AEHKEQFADM

SEQ ID NO: 88844 - protein, 10 aa, Homo sapiens
  misc_feature: Table A; Target 88844; HLA-B*44:03; TRPM1; ENSG00000134160; TAA
AEHKEQFADM

SEQ ID NO: 88845 - protein, 8 aa, Homo sapiens
  misc_feature: Table A; Target 88845; HLA-C*16:01; TRPM1; ENSG00000134160; TAA
AGIDRSDL

SEQ ID NO: 88846 - protein, 9 aa, Homo sapiens
  misc_feature: Table A; Target 88846; HLA-B*49:01; TRPM1; ENSG00000134160; TAA
AGIDRSDLI

SEQ ID NO: 88847 - protein, 9 aa, Homo sapiens
  misc_feature: Table A; Target 88847; HLA-C*16:02; TRPM1; ENSG00000134160; TAA
AGIDRSDLI

SEQ ID NO: 88848 - protein, 9 aa, Homo sapiens
  misc_feature: Table A; Target 88848; HLA-B*38:01; TRPM1; ENSG00000134160; TAA
AHESSESDL

SEQ ID NO: 88849 - protein, 9 aa, Homo sapiens
  misc_feature: Table A; Target 88849; HLA-B*39:01; TRPM1; ENSG00000134160; TAA
AHESSESDL

SEQ ID NO: 88850 - protein, 10 aa, Homo sapiens
  misc_feature: Table A; Target 88850; HLA-A*29:02; TRPM1; ENSG00000134160; TAA
AILRLQNQPY

SEQ ID NO: 88851 - protein, 10 aa, Homo sapiens
  misc_feature: Table A; Target 88851; HLA-A*30:02; TRPM1; ENSG00000134160; TAA
AILRLQNQPY

SEQ ID NO: 88852 - protein, 8 aa, Homo sapiens
  misc_feature: Table A; Target 88852; HLA-A*11:01; TRPM1; ENSG00000134160; TAA
AILTALLK

SEQ ID NO: 88853 - protein, 9 aa, Homo sapiens
  misc_feature: Table A; Target 88853; HLA-B*15:03; TRPM1; ENSG00000134160; TAA
AKALVACKL

SEQ ID NO: 88854 - protein, 10 aa, Homo sapiens
  misc_feature: Table A; Target 88854; HLA-B*15:03; TRPM1; ENSG00000134160; TAA
AKALVACKLY

SEQ ID NO: 88855 - protein, 9 aa, Homo sapiens
  misc_feature: Table A; Target 88855; HLA-A*01:01; TRPM1; ENSG00000134160; TAA
ALELLDQSY

SEQ ID NO: 88856 - protein, 9 aa, Homo sapiens
  misc_feature: Table A; Target 88856; HLA-B*15:01; TRPM1; ENSG00000134160; TAA
ALELLDQSY

SEQ ID NO: 88857 - protein, 10 aa, Homo sapiens
  misc_feature: Table A; Target 88857; HLA-A*03:02; TRPM1; ENSG00000134160; TAA
ALELLDQSYK

SEQ ID NO: 88858 - protein, 10 aa, Homo sapiens
  misc_feature: Table A; Target 88858; HLA-A*11:01; TRPM1; ENSG00000134160; TAA
ALELLDQSYK

SEQ ID NO: 88859 - protein, 10 aa, Homo sapiens
  misc_feature: Table A; Target 88859; HLA-B*27:02; TRPM1; ENSG00000134160; TAA
ALELLDQSYK

SEQ ID NO: 88860 - protein, 10 aa, Homo sapiens
  misc_feature: Table A; Target 88860; HLA-A*02:01; TRPM1; ENSG00000134160; TAA
ALLKGTNVSA

SEQ ID NO: 88861 - protein, 10 aa, Homo sapiens
  misc_feature: Table A; Target 88861; HLA-B*55:01; TRPM1; ENSG00000134160; TAA
ALLKGTNVSA

SEQ ID NO: 88862 - protein, 9 aa, Homo sapiens
  misc_feature: Table A; Target 88862; HLA-A*03:01; TRPM1; ENSG00000134160; TAA
ALVACKLYK

SEQ ID NO: 88863 - protein, 9 aa, Homo sapiens
  misc_feature: Table A; Target 88863; HLA-B*15:03; TRPM1; ENSG00000134160; TAA
ALVLDRVDF

SEQ ID NO: 88864 - protein, 9 aa, Homo sapiens
  misc_feature: Table A; Target 88864; HLA-A*02:03; TRPM1; ENSG00000134160; TAA
AMKLLTYEL

SEQ ID NO: 88865 - protein, 9 aa, Homo sapiens
  misc_feature: Table A; Target 88865; HLA-A*02:04; TRPM1; ENSG00000134160; TAA
AMKLLTYEL

SEQ ID NO: 88866 - protein, 9 aa, Homo sapiens
  misc_feature: Table A; Target 88866; HLA-B*08:01; TRPM1; ENSG00000134160; TAA
AMKLLTYEL

SEQ ID NO: 88867 - protein, 10 aa, Homo sapiens
  misc_feature: Table A; Target 88867; HLA-B*27:02; TRPM1; ENSG00000134160; TAA
AMLDALVLDR

SEQ ID NO: 88868 - protein, 11 aa, Homo sapiens
  misc_feature: Table A; Target 88868; HLA-A*02:01; TRPM1; ENSG00000134160; TAA
AMLDALVLDRV

SEQ ID NO: 88869 - protein, 11 aa, Homo sapiens
  misc_feature: Table A; Target 88869; HLA-A*02:04; TRPM1; ENSG00000134160; TAA
AMLDALVLDRV

SEQ ID NO: 88870 - protein, 9 aa, Homo sapiens
  misc_feature: Table A; Target 88870; HLA-A*24:02; TRPM1; ENSG00000134160; TAA
AMTTGAWIF

SEQ ID NO: 88871 - protein, 8 aa, Homo sapiens
  misc_feature: Table A; Target 88871; HLA-A*32:01; TRPM1; ENSG00000134160; TAA
AMYIRVSY

SEQ ID NO: 88872 - protein, 8 aa, Homo sapiens
  misc_feature: Table A; Target 88872; HLA-B*08:01; TRPM1; ENSG00000134160; TAA
AMYIRVSY

SEQ ID NO: 88873 - protein, 8 aa, Homo sapiens
  misc_feature: Table A; Target 88873; HLA-B*15:01; TRPM1; ENSG00000134160; TAA
AMYIRVSY

SEQ ID NO: 88874 - protein, 8 aa, Homo sapiens
  misc_feature: Table A; Target 88874; HLA-B*15:03; TRPM1; ENSG00000134160; TAA
AMYIRVSY

SEQ ID NO: 88875 - protein, 8 aa, Homo sapiens
  misc_feature: Table A; Target 88875; HLA-C*16:01; TRPM1; ENSG00000134160; TAA
AMYIRVSY

SEQ ID NO: 88876 - protein, 9 aa, Homo sapiens
  misc_feature: Table A; Target 88876; HLA-B*07:02; TRPM1; ENSG00000134160; TAA
APDQLSLAL

SEQ ID NO: 88877 - protein, 9 aa, Homo sapiens
  misc_feature: Table A; Target 88877; HLA-B*35:01; TRPM1; ENSG00000134160; TAA
APDQLSLAL

SEQ ID NO: 88878 - protein, 9 aa, Homo sapiens
  misc_feature: Table A; Target 88878; HLA-B*35:03; TRPM1; ENSG00000134160; TAA
APDQLSLAL

SEQ ID NO: 88879 - protein, 9 aa, Homo sapiens
  misc_feature: Table A; Target 88879; HLA-B*55:01; TRPM1; ENSG00000134160; TAA
APDQLSLAL

SEQ ID NO: 88880 - protein, 9 aa, Homo sapiens
  misc_feature: Table A; Target 88880; HLA-C*07:02; TRPM1; ENSG00000134160; TAA
APDQLSLAL

SEQ ID NO: 88881 - protein, 10 aa, Homo sapiens
  misc_feature: Table A; Target 88881; HLA-B*56:01; TRPM1; ENSG00000134160; TAA
APDQLSLALA

SEQ ID NO: 88882 - protein, 9 aa, Homo sapiens
  misc_feature: Table A; Target 88882; HLA-A*29:02; TRPM1; ENSG00000134160; TAA
APIVKFWFY

SEQ ID NO: 88883 - protein, 9 aa, Homo sapiens
  misc_feature: Table A; Target 88883; HLA-A*31:01; TRPM1; ENSG00000134160; TAA
AQLEELSNR

SEQ ID NO: 88884 - protein, 10 aa, Homo sapiens
  misc_feature: Table A; Target 88884; HLA-B*15:01; TRPM1; ENSG00000134160; TAA
AQLEELSNRM

SEQ ID NO: 88885 - protein, 10 aa, Homo sapiens
  misc_feature: Table A; Target 88885; HLA-B*27:05; TRPM1; ENSG00000134160; TAA
AQLEELSNRM

SEQ ID NO: 88886 - protein, 10 aa, Homo sapiens
  misc_feature: Table A; Target 88886; HLA-B*38:01; TRPM1; ENSG00000134160; TAA
AQLEELSNRM

SEQ ID NO: 88887 - protein, 9 aa, Homo sapiens
  misc_feature: Table A; Target 88887; HLA-A*02:04; TRPM1; ENSG00000134160; TAA
AQSHQLFAI

SEQ ID NO: 88888 - protein, 9 aa, Homo sapiens
  misc_feature: Table A; Target 88888; HLA-B*13:02; TRPM1; ENSG00000134160; TAA
AQSHQLFAI

SEQ ID NO: 88889 - protein, 10 aa, Homo sapiens
  misc_feature: Table A; Target 88889; HLA-A*01:01; TRPM1; ENSG00000134160; TAA
ASDILSFAHK

SEQ ID NO: 88890 - protein, 10 aa, Homo sapiens
  misc_feature: Table A; Target 88890; HLA-A*03:01; TRPM1; ENSG00000134160; TAA
ASDILSFAHK

SEQ ID NO: 88891 - protein, 10 aa, Homo sapiens
  misc_feature: Table A; Target 88891; HLA-A*03:02; TRPM1; ENSG00000134160; TAA
ASDILSFAHK

SEQ ID NO: 88892 - protein, 10 aa, Homo sapiens
  misc_feature: Table A; Target 88892; HLA-A*11:01; TRPM1; ENSG00000134160; TAA
ASDILSFAHK

SEQ ID NO: 88893 - protein, 11 aa, Homo sapiens
  misc_feature: Table A; Target 88893; HLA-A*01:01; TRPM1; ENSG00000134160; TAA
ASDILSFAHKY

SEQ ID NO: 88894 - protein, 11 aa, Homo sapiens
  misc_feature: Table A; Target 88894; HLA-A*30:02; TRPM1; ENSG00000134160; TAA
ASDILSFAHKY

SEQ ID NO: 88895 - protein, 9 aa, Homo sapiens
  misc_feature: Table A; Target 88895; HLA-A*30:02; TRPM1; ENSG00000134160; TAA
ASSECEATY

SEQ ID NO: 88896 - protein, 9 aa, Homo sapiens
  misc_feature: Table A; Target 88896; HLA-A*32:01; TRPM1; ENSG00000134160; TAA
ASSECEATY

SEQ ID NO: 88897 - protein, 9 aa, Homo sapiens
  misc_feature: Table A; Target 88897; HLA-B*15:01; TRPM1; ENSG00000134160; TAA
ASSECEATY

SEQ ID NO: 88898 - protein, 9 aa, Homo sapiens
  misc_feature: Table A; Target 88898; HLA-B*58:01; TRPM1; ENSG00000134160; TAA
ASSECEATY

SEQ ID NO: 88899 - protein, 9 aa, Homo sapiens
  misc_feature: Table A; Target 88899; HLA-C*16:01; TRPM1; ENSG00000134160; TAA
ASSECEATY

SEQ ID NO: 88900 - protein, 9 aa, Homo sapiens
  misc_feature: Table A; Target 88900; HLA-C*16:02; TRPM1; ENSG00000134160; TAA
ASSECEATY

SEQ ID NO: 88901 - protein, 9 aa, Homo sapiens
  misc_feature: Table A; Target 88901; HLA-B*13:02; TRPM1; ENSG00000134160; TAA
ASSVSSLVI

SEQ ID NO: 88902 - protein, 8 aa, Homo sapiens
  misc_feature: Table A; Target 88902; HLA-C*01:02; TRPM1; ENSG00000134160; TAA
ATPDGSHL

SEQ ID NO: 88903 - protein, 10 aa, Homo sapiens
  misc_feature: Table A; Target 88903; HLA-A*26:01; TRPM1; ENSG00000134160; TAA
ATPDGSHLAV

SEQ ID NO: 88904 - protein, 10 aa, Homo sapiens
  misc_feature: Table A; Target 88904; HLA-C*01:02; TRPM1; ENSG00000134160; TAA
ATPDGSHLAV

SEQ ID NO: 88905 - protein, 10 aa, Homo sapiens
  misc_feature: Table A; Target 88905; HLA-A*02:04; TRPM1; ENSG00000134160; TAA
AVFNNTFFEV

SEQ ID NO: 88906 - protein, 10 aa, Homo sapiens
  misc_feature: Table A; Target 88906; HLA-A*02:07; TRPM1; ENSG00000134160; TAA
AVFNNTFFEV

SEQ ID NO: 88907 - protein, 10 aa, Homo sapiens
  misc_feature: Table A; Target 88907; HLA-A*68:02; TRPM1; ENSG00000134160; TAA
AVFNNTFFEV

SEQ ID NO: 88908 - protein, 11 aa, Homo sapiens
  misc_feature: Table A; Target 88908; HLA-A*03:01; TRPM1; ENSG00000134160; TAA
AVFNNTFFEVK

SEQ ID NO: 88909 - protein, 11 aa, Homo sapiens
  misc_feature: Table A; Target 88909; HLA-A*03:02; TRPM1; ENSG00000134160; TAA
AVFNNTFFEVK

SEQ ID NO: 88910 - protein, 11 aa, Homo sapiens
  misc_feature: Table A; Target 88910; HLA-A*11:01; TRPM1; ENSG00000134160; TAA
AVFNNTFFEVK

SEQ ID NO: 88911 - protein, 10 aa, Homo sapiens
  misc_feature: Table A; Target 88911; HLA-A*03:02; TRPM1; ENSG00000134160; TAA
AVQAEHKEQF

SEQ ID NO: 88912 - protein, 10 aa, Homo sapiens
  misc_feature: Table A; Target 88912; HLA-A*30:02; TRPM1; ENSG00000134160; TAA
AVQAEHKEQF

SEQ ID NO: 88913 - protein, 10 aa, Homo sapiens
  misc_feature: Table A; Target 88913; HLA-A*32:01; TRPM1; ENSG00000134160; TAA
AVQAEHKEQF

SEQ ID NO: 88914 - protein, 10 aa, Homo sapiens
  misc_feature: Table A; Target 88914; HLA-B*15:01; TRPM1; ENSG00000134160; TAA
AVQAEHKEQF

SEQ ID NO: 88915 - protein, 11 aa, Homo sapiens
  misc_feature: Table A; Target 88915; HLA-A*30:01; TRPM1; ENSG00000134160; TAA
CEEGGIINESL

SEQ ID NO: 88916 - protein, 11 aa, Homo sapiens
  misc_feature: Table A; Target 88916; HLA-B*40:01; TRPM1; ENSG00000134160; TAA
CEEGGIINESL

SEQ ID NO: 88917 - protein, 9 aa, Homo sapiens
  misc_feature: Table A; Target 88917; HLA-B*49:01; TRPM1; ENSG00000134160; TAA
CEFYNAPIV

SEQ ID NO: 88918 - protein, 9 aa, Homo sapiens
  misc_feature: Table A; Target 88918; HLA-A*03:01; TRPM1; ENSG00000134160; TAA
CLKLAVAAK

SEQ ID NO: 88919 - protein, 9 aa, Homo sapiens
  misc_feature: Table A; Target 88919; HLA-A*03:02; TRPM1; ENSG00000134160; TAA
CVQEHFREK

SEQ ID NO: 88920 - protein, 9 aa, Homo sapiens
  misc_feature: Table A; Target 88920; HLA-A*11:01; TRPM1; ENSG00000134160; TAA
CVQEHFREK

SEQ ID NO: 88921 - protein, 9 aa, Homo sapiens
  misc_feature: Table A; Target 88921; HLA-A*23:01; TRPM1; ENSG00000134160; TAA
CYLLVANIL

SEQ ID NO: 88922 - protein, 9 aa, Homo sapiens
  misc_feature: Table A; Target 88922; HLA-A*24:02; TRPM1; ENSG00000134160; TAA
CYLLVANIL

SEQ ID NO: 88923 - protein, 9 aa, Homo sapiens
  misc_feature: Table A; Target 88923; HLA-A*33:01; TRPM1; ENSG00000134160; TAA
DALKDHSSK

SEQ ID NO: 88924 - protein, 9 aa, Homo sapiens
  misc_feature: Table A; Target 88924; HLA-B*51:01; TRPM1; ENSG00000134160; TAA
DALKDHSSK

SEQ ID NO: 88925 - protein, 11 aa, Homo sapiens
  misc_feature: Table A; Target 88925; HLA-A*33:01; TRPM1; ENSG00000134160; TAA
DALKDHSSKSR

SEQ ID NO: 88926 - protein, 8 aa, Homo sapiens
  misc_feature: Table A; Target 88926; HLA-B*51:01; TRPM1; ENSG00000134160; TAA
DALVLDRV

SEQ ID NO: 88927 - protein, 9 aa, Homo sapiens
  misc_feature: Table A; Target 88927; HLA-A*33:01; TRPM1; ENSG00000134160; TAA
DANADAGSR

SEQ ID NO: 88928 - protein, 9 aa, Homo sapiens
  misc_feature: Table A; Target 88928; HLA-A*33:03; TRPM1; ENSG00000134160; TAA
DANADAGSR

SEQ ID NO: 88929 - protein, 9 aa, Homo sapiens
  misc_feature: Table A; Target 88929; HLA-A*68:01; TRPM1; ENSG00000134160; TAA
DANADAGSR

SEQ ID NO: 88930 - protein, 9 aa, Homo sapiens
  misc_feature: Table A; Target 88930; HLA-C*07:06; TRPM1; ENSG00000134160; TAA
DANADAGSR

SEQ ID NO: 88931 - protein, 9 aa, Homo sapiens
  misc_feature: Table A; Target 88931; HLA-A*33:01; TRPM1; ENSG00000134160; TAA
DDFSYQTSK

SEQ ID NO: 88932 - protein, 9 aa, Homo sapiens
  misc_feature: Table A; Target 88932; HLA-B*18:01; TRPM1; ENSG00000134160; TAA
DDFSYQTSK

SEQ ID NO: 88933 - protein, 9 aa, Homo sapiens
  misc_feature: Table A; Target 88933; HLA-B*27:02; TRPM1; ENSG00000134160; TAA
DDFSYQTSK

SEQ ID NO: 88934 - protein, 8 aa, Homo sapiens
  misc_feature: Table A; Target 88934; HLA-B*18:01; TRPM1; ENSG00000134160; TAA
DDPAVSRF

SEQ ID NO: 88935 - protein, 8 aa, Homo sapiens
  misc_feature: Table A; Target 88935; HLA-B*18:01; TRPM1; ENSG00000134160; TAA
DEHHVAEA

SEQ ID NO: 88936 - protein, 9 aa, Homo sapiens
  misc_feature: Table A; Target 88936; HLA-B*18:01; TRPM1; ENSG00000134160; TAA
DEHHVAEAI

SEQ ID NO: 88937 - protein, 11 aa, Homo sapiens
  misc_feature: Table A; Target 88937; HLA-A*33:01; TRPM1; ENSG00000134160; TAA
DEHHVAEAIPR

SEQ ID NO: 88938 - protein, 8 aa, Homo sapiens
  misc_feature: Table A; Target 88938; HLA-B*18:01; TRPM1; ENSG00000134160; TAA
DEQIAMKL

SEQ ID NO: 88939 - protein, 8 aa, Homo sapiens
  misc_feature: Table A; Target 88939; HLA-B*40:02; TRPM1; ENSG00000134160; TAA
DEQIAMKL

SEQ ID NO: 88940 - protein, 9 aa, Homo sapiens
  misc_feature: Table A; Target 88940; HLA-B*18:01; TRPM1; ENSG00000134160; TAA
DEQIAMKLL

SEQ ID NO: 88941 - protein, 9 aa, Homo sapiens
  misc_feature: Table A; Target 88941; HLA-B*40:02; TRPM1; ENSG00000134160; TAA
DEQIAMKLL

SEQ ID NO: 88942 - protein, 9 aa, Homo sapiens
  misc_feature: Table A; Target 88942; HLA-B*44:02; TRPM1; ENSG00000134160; TAA
DEQIAMKLL

SEQ ID NO: 88943 - protein, 9 aa, Homo sapiens
  misc_feature: Table A; Target 88943; HLA-B*44:03; TRPM1; ENSG00000134160; TAA
DEQIAMKLL

SEQ ID NO: 88944 - protein, 11 aa, Homo sapiens
  misc_feature: Table A; Target 88944; HLA-B*18:01; TRPM1; ENSG00000134160; TAA
DEQIAMKLLTY

SEQ ID NO: 88945 - protein, 11 aa, Homo sapiens
  misc_feature: Table A; Target 88945; HLA-B*44:02; TRPM1; ENSG00000134160; TAA
DEQIAMKLLTY

SEQ ID NO: 88946 - protein, 10 aa, Homo sapiens
  misc_feature: Table A; Target 88946; HLA-A*33:01; TRPM1; ENSG00000134160; TAA
DERIRVTSER

SEQ ID NO: 88947 - protein, 8 aa, Homo sapiens
  misc_feature: Table A; Target 88947; HLA-B*08:01; TRPM1; ENSG00000134160; TAA
DGYSLYRY

SEQ ID NO: 88948 - protein, 8 aa, Homo sapiens
  misc_feature: Table A; Target 88948; HLA-B*18:01; TRPM1; ENSG00000134160; TAA
DGYSLYRY

SEQ ID NO: 88949 - protein, 8 aa, Homo sapiens
  misc_feature: Table A; Target 88949; HLA-B*51:01; TRPM1; ENSG00000134160; TAA
DGYSLYRY

SEQ ID NO: 88950 - protein, 9 aa, Homo sapiens
  misc_feature: Table A; Target 88950; HLA-A*68:02; TRPM1; ENSG00000134160; TAA
DIARSQIFV

SEQ ID NO: 88951 - protein, 10 aa, Homo sapiens
  misc_feature: Table A; Target 88951; HLA-A*25:01; TRPM1; ENSG00000134160; TAA
DIARSQIFVF

SEQ ID NO: 88952 - protein, 9 aa, Homo sapiens
  misc_feature: Table A; Target 88952; HLA-B*35:03; TRPM1; ENSG00000134160; TAA
DIDVDDPAV

SEQ ID NO: 88953 - protein, 9 aa, Homo sapiens
  misc_feature: Table A; Target 88953; HLA-C*05:01; TRPM1; ENSG00000134160; TAA
DIDVDDPAV

SEQ ID NO: 88954 - protein, 11 aa, Homo sapiens
  misc_feature: Table A; Target 88954; HLA-A*33:01; TRPM1; ENSG00000134160; TAA
DIDVDDPAVSR

SEQ ID NO: 88955 - protein, 11 aa, Homo sapiens
  misc_feature: Table A; Target 88955; HLA-A*68:01; TRPM1; ENSG00000134160; TAA
DIDVDDPAVSR

SEQ ID NO: 88956 - protein, 8 aa, Homo sapiens
  misc_feature: Table A; Target 88956; HLA-A*25:01; TRPM1; ENSG00000134160; TAA
DIFGVNKY

SEQ ID NO: 88957 - protein, 8 aa, Homo sapiens
  misc_feature: Table A; Target 88957; HLA-A*26:01; TRPM1; ENSG00000134160; TAA
DIFGVNKY

SEQ ID NO: 88958 - protein, 8 aa, Homo sapiens
  misc_feature: Table A; Target 88958; HLA-B*18:01; TRPM1; ENSG00000134160; TAA
DIFGVNKY

SEQ ID NO: 88959 - protein, 8 aa, Homo sapiens
  misc_feature: Table A; Target 88959; HLA-B*35:01; TRPM1; ENSG00000134160; TAA
DIFGVNKY

SEQ ID NO: 88960 - protein, 8 aa, Homo sapiens
  misc_feature: Table A; Target 88960; HLA-A*01:01; TRPM1; ENSG00000134160; TAA
DIGLVLEY

SEQ ID NO: 88961 - protein, 8 aa, Homo sapiens
  misc_feature: Table A; Target 88961; HLA-A*26:01; TRPM1; ENSG00000134160; TAA
DIGLVLEY

SEQ ID NO: 88962 - protein, 8 aa, Homo sapiens
  misc_feature: Table A; Target 88962; HLA-B*18:01; TRPM1; ENSG00000134160; TAA
DIGLVLEY

SEQ ID NO: 88963 - protein, 8 aa, Homo sapiens
  misc_feature: Table A; Target 88963; HLA-B*35:01; TRPM1; ENSG00000134160; TAA
DIGLVLEY

SEQ ID NO: 88964 - protein, 8 aa, Homo sapiens
  misc_feature: Table A; Target 88964; HLA-C*07:01; TRPM1; ENSG00000134160; TAA
DIGLVLEY

SEQ ID NO: 88965 - protein, 8 aa, Homo sapiens
  misc_feature: Table A; Target 88965; HLA-A*33:01; TRPM1; ENSG00000134160; TAA
DILSFAHK

SEQ ID NO: 88966 - protein, 9 aa, Homo sapiens
  misc_feature: Table A; Target 88966; HLA-A*25:01; TRPM1; ENSG00000134160; TAA
DILSFAHKY

SEQ ID NO: 88967 - protein, 9 aa, Homo sapiens
  misc_feature: Table A; Target 88967; HLA-A*26:01; TRPM1; ENSG00000134160; TAA
DILSFAHKY

SEQ ID NO: 88968 - protein, 9 aa, Homo sapiens
  misc_feature: Table A; Target 88968; HLA-A*29:02; TRPM1; ENSG00000134160; TAA
DILSFAHKY

SEQ ID NO: 88969 - protein, 9 aa, Homo sapiens
  misc_feature: Table A; Target 88969; HLA-A*30:02; TRPM1; ENSG00000134160; TAA
DILSFAHKY

SEQ ID NO: 88970 - protein, 9 aa, Homo sapiens
  misc_feature: Table A; Target 88970; HLA-A*33:01; TRPM1; ENSG00000134160; TAA
DILSFAHKY

SEQ ID NO: 88971 - protein, 9 aa, Homo sapiens
  misc_feature: Table A; Target 88971; HLA-B*18:01; TRPM1; ENSG00000134160; TAA
DILSFAHKY

SEQ ID NO: 88972 - protein, 9 aa, Homo sapiens
  misc_feature: Table A; Target 88972; HLA-B*35:01; TRPM1; ENSG00000134160; TAA
DILSFAHKY

SEQ ID NO: 88973 - protein, 9 aa, Homo sapiens
  misc_feature: Table A; Target 88973; HLA-B*44:02; TRPM1; ENSG00000134160; TAA
DILSFAHKY

SEQ ID NO: 88974 - protein, 9 aa, Homo sapiens
  misc_feature: Table A; Target 88974; HLA-B*44:03; TRPM1; ENSG00000134160; TAA
DILSFAHKY

SEQ ID NO: 88975 - protein, 9 aa, Homo sapiens
  misc_feature: Table A; Target 88975; HLA-A*25:01; TRPM1; ENSG00000134160; TAA
DIPYIVSEA

SEQ ID NO: 88976 - protein, 9 aa, Homo sapiens
  misc_feature: Table A; Target 88976; HLA-A*26:01; TRPM1; ENSG00000134160; TAA
DIPYIVSEA

SEQ ID NO: 88977 - protein, 9 aa, Homo sapiens
  misc_feature: Table A; Target 88977; HLA-A*68:02; TRPM1; ENSG00000134160; TAA
DIPYIVSEA

SEQ ID NO: 88978 - protein, 11 aa, Homo sapiens
  misc_feature: Table A; Target 88978; HLA-A*68:02; TRPM1; ENSG00000134160; TAA
DIPYIVSEAAV

SEQ ID NO: 88979 - protein, 10 aa, Homo sapiens
  misc_feature: Table A; Target 88979; HLA-B*38:01; TRPM1; ENSG00000134160; TAA
DKSDVQNTQL

SEQ ID NO: 88980 - protein, 8 aa, Homo sapiens
  misc_feature: Table A; Target 88980; HLA-A*25:01; TRPM1; ENSG00000134160; TAA
DLVAISTF

SEQ ID NO: 88981 - protein, 8 aa, Homo sapiens
  misc_feature: Table A; Target 88981; HLA-A*26:01; TRPM1; ENSG00000134160; TAA
DLVAISTF

SEQ ID NO: 88982 - protein, 8 aa, Homo sapiens
  misc_feature: Table A; Target 88982; HLA-B*08:01; TRPM1; ENSG00000134160; TAA
DLVAISTF

SEQ ID NO: 88983 - protein, 8 aa, Homo sapiens
  misc_feature: Table A; Target 88983; HLA-B*18:01; TRPM1; ENSG00000134160; TAA
DLVAISTF

SEQ ID NO: 88984 - protein, 9 aa, Homo sapiens
  misc_feature: Table A; Target 88984; HLA-A*26:01; TRPM1; ENSG00000134160; TAA
DLVAISTFM

SEQ ID NO: 88985 - protein, 9 aa, Homo sapiens
  misc_feature: Table A; Target 88985; HLA-A*33:01; TRPM1; ENSG00000134160; TAA
DLVGKDVTR

SEQ ID NO: 88986 - protein, 9 aa, Homo sapiens
  misc_feature: Table A; Target 88986; HLA-A*33:03; TRPM1; ENSG00000134160; TAA
DLVGKDVTR

SEQ ID NO: 88987 - protein, 9 aa, Homo sapiens
  misc_feature: Table A; Target 88987; HLA-A*68:01; TRPM1; ENSG00000134160; TAA
DLVGKDVTR

SEQ ID NO: 88988 - protein, 9 aa, Homo sapiens
  misc_feature: Table A; Target 88988; HLA-C*07:06; TRPM1; ENSG00000134160; TAA
DLVGKDVTR

SEQ ID NO: 88989 - protein, 11 aa, Homo sapiens
  misc_feature: Table A; Target 88989; HLA-A*25:01; TRPM1; ENSG00000134160; TAA
DLVGKDVTRVY

SEQ ID NO: 88990 - protein, 11 aa, Homo sapiens
  misc_feature: Table A; Target 88990; HLA-A*26:01; TRPM1; ENSG00000134160; TAA
DLVGKDVTRVY

SEQ ID NO: 88991 - protein, 8 aa, Homo sapiens
  misc_feature: Table A; Target 88991; HLA-B*51:01; TRPM1; ENSG00000134160; TAA
DMLYFVVI

SEQ ID NO: 88992 - protein, 9 aa, Homo sapiens
  misc_feature: Table A; Target 88992; HLA-A*33:01; TRPM1; ENSG00000134160; TAA
DMQDEHHVA

SEQ ID NO: 88993 - protein, 10 aa, Homo sapiens
  misc_feature: Table A; Target 88993; HLA-A*33:01; TRPM1; ENSG00000134160; TAA
DNNSKDFGQL

SEQ ID NO: 88994 - protein, 9 aa, Homo sapiens
  misc_feature: Table A; Target 88994; HLA-B*35:01; TRPM1; ENSG00000134160; TAA
DPAVSRFQY

SEQ ID NO: 88995 - protein, 8 aa, Homo sapiens
  misc_feature: Table A; Target 88995; HLA-B*18:01; TRPM1; ENSG00000134160; TAA
DQIDLYAM

SEQ ID NO: 88996 - protein, 8 aa, Homo sapiens
  misc_feature: Table A; Target 88996; HLA-B*39:01; TRPM1; ENSG00000134160; TAA
DQIDLYAM

SEQ ID NO: 88997 - protein, 10 aa, Homo sapiens
  misc_feature: Table A; Target 88997; HLA-B*38:01; TRPM1; ENSG00000134160; TAA
DQIDLYAMEI

SEQ ID NO: 88998 - protein, 9 aa, Homo sapiens
  misc_feature: Table A; Target 88998; HLA-A*25:01; TRPM1; ENSG00000134160; TAA
DQLSLALAW

SEQ ID NO: 88999 - protein, 9 aa, Homo sapiens
  misc_feature: Table A; Target 88999; HLA-B*44:02; TRPM1; ENSG00000134160; TAA
DQLSLALAW

SEQ ID NO: 89000 - protein, 9 aa, Homo sapiens
  misc_feature: Table A; Target 89000; HLA-B*38:01; TRPM1; ENSG00000134160; TAA
DQTLGFPSL

SEQ ID NO: 89001 - protein, 9 aa, Homo sapiens
  misc_feature: Table A; Target 89001; HLA-B*39:01; TRPM1; ENSG00000134160; TAA
DQTLGFPSL

SEQ ID NO: 89002 - protein, 9 aa, Homo sapiens
  misc_feature: Table A; Target 89002; HLA-B*38:01; TRPM1; ENSG00000134160; TAA
DRNGMENLL

SEQ ID NO: 89003 - protein, 9 aa, Homo sapiens
  misc_feature: Table A; Target 89003; HLA-B*39:01; TRPM1; ENSG00000134160; TAA
DRNGMENLL

SEQ ID NO: 89004 - protein, 9 aa, Homo sapiens
  misc_feature: Table A; Target 89004; HLA-A*33:01; TRPM1; ENSG00000134160; TAA
DRSDLIQAR

SEQ ID NO: 89005 - protein, 9 aa, Homo sapiens
  misc_feature: Table A; Target 89005; HLA-A*68:01; TRPM1; ENSG00000134160; TAA
DRSDLIQAR

SEQ ID NO: 89006 - protein, 9 aa, Homo sapiens
  misc_feature: Table A; Target 89006; HLA-B*27:02; TRPM1; ENSG00000134160; TAA
DRSDLIQAR

SEQ ID NO: 89007 - protein, 9 aa, Homo sapiens
  misc_feature: Table A; Target 89007; HLA-B*27:05; TRPM1; ENSG00000134160; TAA
DRSDLIQAR

SEQ ID NO: 89008 - protein, 8 aa, Homo sapiens
  misc_feature: Table A; Target 89008; HLA-B*51:01; TRPM1; ENSG00000134160; TAA
DSLLHLMV

SEQ ID NO: 89009 - protein, 8 aa, Homo sapiens
  misc_feature: Table A; Target 89009; HLA-A*25:01; TRPM1; ENSG00000134160; TAA
DSYGVLEF

SEQ ID NO: 89010 - protein, 8 aa, Homo sapiens
  misc_feature: Table A; Target 89010; HLA-A*33:01; TRPM1; ENSG00000134160; TAA
DSYGVLEF

SEQ ID NO: 89011 - protein, 8 aa, Homo sapiens
  misc_feature: Table A; Target 89011; HLA-B*18:01; TRPM1; ENSG00000134160; TAA
DSYGVLEF

SEQ ID NO: 89012 - protein, 8 aa, Homo sapiens
  misc_feature: Table A; Target 89012; HLA-B*51:01; TRPM1; ENSG00000134160; TAA
DSYGVLEF

SEQ ID NO: 89013 - protein, 9 aa, Homo sapiens
  misc_feature: Table A; Target 89013; HLA-A*26:01; TRPM1; ENSG00000134160; TAA
DTKPDSLLH

SEQ ID NO: 89014 - protein, 9 aa, Homo sapiens
  misc_feature: Table A; Target 89014; HLA-A*33:01; TRPM1; ENSG00000134160; TAA
DTKPDSLLH

SEQ ID NO: 89015 - protein, 10 aa, Homo sapiens
  misc_feature: Table A; Target 89015; HLA-A*25:01; TRPM1; ENSG00000134160; TAA
DTKPDSLLHL

SEQ ID NO: 89016 - protein, 11 aa, Homo sapiens
  misc_feature: Table A; Target 89016; HLA-A*33:01; TRPM1; ENSG00000134160; TAA
DTKPDSLLHLM

SEQ ID NO: 89017 - protein, 9 aa, Homo sapiens
  misc_feature: Table A; Target 89017; HLA-A*11:01; TRPM1; ENSG00000134160; TAA
DVDDPAVSR

SEQ ID NO: 89018 - protein, 9 aa, Homo sapiens
  misc_feature: Table A; Target 89018; HLA-A*33:01; TRPM1; ENSG00000134160; TAA
DVDDPAVSR

SEQ ID NO: 89019 - protein, 9 aa, Homo sapiens
  misc_feature: Table A; Target 89019; HLA-A*33:03; TRPM1; ENSG00000134160; TAA
DVDDPAVSR

SEQ ID NO: 89020 - protein, 9 aa, Homo sapiens
  misc_feature: Table A; Target 89020; HLA-A*68:01; TRPM1; ENSG00000134160; TAA
DVDDPAVSR

SEQ ID NO: 89021 - protein, 9 aa, Homo sapiens
  misc_feature: Table A; Target 89021; HLA-C*05:01; TRPM1; ENSG00000134160; TAA
DVDDPAVSR

SEQ ID NO: 89022 - protein, 9 aa, Homo sapiens
  misc_feature: Table A; Target 89022; HLA-C*07:06; TRPM1; ENSG00000134160; TAA
DVDDPAVSR

SEQ ID NO: 89023 - protein, 10 aa, Homo sapiens
  misc_feature: Table A; Target 89023; HLA-A*01:01; TRPM1; ENSG00000134160; TAA
DVDDPAVSRF

SEQ ID NO: 89024 - protein, 10 aa, Homo sapiens
  misc_feature: Table A; Target 89024; HLA-A*02:07; TRPM1; ENSG00000134160; TAA
DVDDPAVSRF

SEQ ID NO: 89025 - protein, 10 aa, Homo sapiens
  misc_feature: Table A; Target 89025; HLA-A*25:01; TRPM1; ENSG00000134160; TAA
DVDDPAVSRF

SEQ ID NO: 89026 - protein, 10 aa, Homo sapiens
  misc_feature: Table A; Target 89026; HLA-A*26:01; TRPM1; ENSG00000134160; TAA
DVDDPAVSRF

SEQ ID NO: 89027 - protein, 10 aa, Homo sapiens
  misc_feature: Table A; Target 89027; HLA-A*33:01; TRPM1; ENSG00000134160; TAA
DVDDPAVSRF

SEQ ID NO: 89028 - protein, 10 aa, Homo sapiens
  misc_feature: Table A; Target 89028; HLA-A*68:01; TRPM1; ENSG00000134160; TAA
DVDDPAVSRF

SEQ ID NO: 89029 - protein, 10 aa, Homo sapiens
  misc_feature: Table A; Target 89029; HLA-B*38:01; TRPM1; ENSG00000134160; TAA
DVDDPAVSRF

SEQ ID NO: 89030 - protein, 10 aa, Homo sapiens
  misc_feature: Table A; Target 89030; HLA-C*05:01; TRPM1; ENSG00000134160; TAA
DVDDPAVSRF

SEQ ID NO: 89031 - protein, 10 aa, Homo sapiens
  misc_feature: Table A; Target 89031; HLA-C*07:06; TRPM1; ENSG00000134160; TAA
DVDDPAVSRF

SEQ ID NO: 89032 - protein, 9 aa, Homo sapiens
  misc_feature: Table A; Target 89032; HLA-B*13:02; TRPM1; ENSG00000134160; TAA
DVQNTQLTV

SEQ ID NO: 89033 - protein, 9 aa, Homo sapiens
  misc_feature: Table A; Target 89033; HLA-B*51:01; TRPM1; ENSG00000134160; TAA
DVQNTQLTV

SEQ ID NO: 89034 - protein, 9 aa, Homo sapiens
  misc_feature: Table A; Target 89034; HLA-A*25:01; TRPM1; ENSG00000134160; TAA
DVTRVYQTM

SEQ ID NO: 89035 - protein, 9 aa, Homo sapiens
  misc_feature: Table A; Target 89035; HLA-A*26:01; TRPM1; ENSG00000134160; TAA
DVTRVYQTM

SEQ ID NO: 89036 - protein, 9 aa, Homo sapiens
  misc_feature: Table A; Target 89036; HLA-A*33:01; TRPM1; ENSG00000134160; TAA
DVTRVYQTM

SEQ ID NO: 89037 - protein, 9 aa, Homo sapiens
  misc_feature: Table A; Target 89037; HLA-A*33:03; TRPM1; ENSG00000134160; TAA
DVTRVYQTM

SEQ ID NO: 89038 - protein, 9 aa, Homo sapiens
  misc_feature: Table A; Target 89038; HLA-A*68:01; TRPM1; ENSG00000134160; TAA
DVTRVYQTM

SEQ ID NO: 89039 - protein, 9 aa, Homo sapiens
  misc_feature: Table A; Target 89039; HLA-A*68:02; TRPM1; ENSG00000134160; TAA
DVTRVYQTM

SEQ ID NO: 89040 - protein, 9 aa, Homo sapiens
  misc_feature: Table A; Target 89040; HLA-B*18:01; TRPM1; ENSG00000134160; TAA
DVTRVYQTM

SEQ ID NO: 89041 - protein, 9 aa, Homo sapiens
  misc_feature: Table A; Target 89041; HLA-B*35:01; TRPM1; ENSG00000134160; TAA
DVTRVYQTM

SEQ ID NO: 89042 - protein, 9 aa, Homo sapiens
  misc_feature: Table A; Target 89042; HLA-B*35:03; TRPM1; ENSG00000134160; TAA
DVTRVYQTM

SEQ ID NO: 89043 - protein, 9 aa, Homo sapiens
  misc_feature: Table A; Target 89043; HLA-B*51:01; TRPM1; ENSG00000134160; TAA
DVTRVYQTM

SEQ ID NO: 89044 - protein, 9 aa, Homo sapiens
  misc_feature: Table A; Target 89044; HLA-C*07:06; TRPM1; ENSG00000134160; TAA
DVTRVYQTM

SEQ ID NO: 89045 - protein, 9 aa, Homo sapiens
  misc_feature: Table A; Target 89045; HLA-A*33:03; TRPM1; ENSG00000134160; TAA
EAAVQAEHK

SEQ ID NO: 89046 - protein, 9 aa, Homo sapiens
  misc_feature: Table A; Target 89046; HLA-A*68:01; TRPM1; ENSG00000134160; TAA
EAAVQAEHK

SEQ ID NO: 89047 - protein, 9 aa, Homo sapiens
  misc_feature: Table A; Target 89047; HLA-C*07:06; TRPM1; ENSG00000134160; TAA
EAAVQAEHK

SEQ ID NO: 89048 - protein, 9 aa, Homo sapiens
  misc_feature: Table A; Target 89048; HLA-A*02:04; TRPM1; ENSG00000134160; TAA
EAIPRIPRL

SEQ ID NO: 89049 - protein, 9 aa, Homo sapiens
  misc_feature: Table A; Target 89049; HLA-A*02:07; TRPM1; ENSG00000134160; TAA
EAIPRIPRL

SEQ ID NO: 89050 - protein, 9 aa, Homo sapiens
  misc_feature: Table A; Target 89050; HLA-A*23:01; TRPM1; ENSG00000134160; TAA
EAIPRIPRL

SEQ ID NO: 89051 - protein, 9 aa, Homo sapiens
  misc_feature: Table A; Target 89051; HLA-A*24:02; TRPM1; ENSG00000134160; TAA
EAIPRIPRL

SEQ ID NO: 89052 - protein, 9 aa, Homo sapiens
  misc_feature: Table A; Target 89052; HLA-A*25:01; TRPM1; ENSG00000134160; TAA
EAIPRIPRL

SEQ ID NO: 89053 - protein, 9 aa, Homo sapiens
  misc_feature: Table A; Target 89053; HLA-A*26:01; TRPM1; ENSG00000134160; TAA
EAIPRIPRL

SEQ ID NO: 89054 - protein, 9 aa, Homo sapiens
  misc_feature: Table A; Target 89054; HLA-A*33:03; TRPM1; ENSG00000134160; TAA
EAIPRIPRL

SEQ ID NO: 89055 - protein, 9 aa, Homo sapiens
  misc_feature: Table A; Target 89055; HLA-A*68:01; TRPM1; ENSG00000134160; TAA
EAIPRIPRL

SEQ ID NO: 89056 - protein, 9 aa, Homo sapiens
  misc_feature: Table A; Target 89056; HLA-A*68:02; TRPM1; ENSG00000134160; TAA
EAIPRIPRL

SEQ ID NO: 89057 - protein, 9 aa, Homo sapiens
  misc_feature: Table A; Target 89057; HLA-B*08:01; TRPM1; ENSG00000134160; TAA
EAIPRIPRL

SEQ ID NO: 89058 - protein, 9 aa, Homo sapiens
  misc_feature: Table A; Target 89058; HLA-B*35:03; TRPM1; ENSG00000134160; TAA
EAIPRIPRL

SEQ ID NO: 89059 - protein, 9 aa, Homo sapiens
  misc_feature: Table A; Target 89059; HLA-B*51:01; TRPM1; ENSG00000134160; TAA
EAIPRIPRL

SEQ ID NO: 89060 - protein, 9 aa, Homo sapiens
  misc_feature: Table A; Target 89060; HLA-B*57:01; TRPM1; ENSG00000134160; TAA
EAIPRIPRL

SEQ ID NO: 89061 - protein, 9 aa, Homo sapiens
  misc_feature: Table A; Target 89061; HLA-B*58:01; TRPM1; ENSG00000134160; TAA
EAIPRIPRL

SEQ ID NO: 89062 - protein, 9 aa, Homo sapiens
  misc_feature: Table A; Target 89062; HLA-C*12:03; TRPM1; ENSG00000134160; TAA
EAIPRIPRL

SEQ ID NO: 89063 - protein, 9 aa, Homo sapiens
  misc_feature: Table A; Target 89063; HLA-A*33:03; TRPM1; ENSG00000134160; TAA
ECEATYLLR

SEQ ID NO: 89064 - protein, 8 aa, Homo sapiens
  misc_feature: Table A; Target 89064; HLA-B*08:01; TRPM1; ENSG00000134160; TAA
ECMKKKEL

SEQ ID NO: 89065 - protein, 10 aa, Homo sapiens
  misc_feature: Table A; Target 89065; HLA-A*33:01; TRPM1; ENSG00000134160; TAA
EDLVGKDVTR

SEQ ID NO: 89066 - protein, 10 aa, Homo sapiens
  misc_feature: Table A; Target 89066; HLA-A*33:03; TRPM1; ENSG00000134160; TAA
EDLVGKDVTR

SEQ ID NO: 89067 - protein, 10 aa, Homo sapiens
  misc_feature: Table A; Target 89067; HLA-A*68:01; TRPM1; ENSG00000134160; TAA
EDLVGKDVTR

SEQ ID NO: 89068 - protein, 9 aa, Homo sapiens
  misc_feature: Table A; Target 89068; HLA-B*44:02; TRPM1; ENSG00000134160; TAA
EEETDPRKI

SEQ ID NO: 89069 - protein, 9 aa, Homo sapiens
  misc_feature: Table A; Target 89069; HLA-B*44:03; TRPM1; ENSG00000134160; TAA
EEETDPRKI

SEQ ID NO: 89070 - protein, 11 aa, Homo sapiens
  misc_feature: Table A; Target 89070; HLA-B*40:01; TRPM1; ENSG00000134160; TAA
EEETDPRKIEL

SEQ ID NO: 89071 - protein, 10 aa, Homo sapiens
  misc_feature: Table A; Target 89071; HLA-A*30:01; TRPM1; ENSG00000134160; TAA
EEGGIINESL

SEQ ID NO: 89072 - protein, 10 aa, Homo sapiens
  misc_feature: Table A; Target 89072; HLA-B*18:01; TRPM1; ENSG00000134160; TAA
EEGGIINESL

SEQ ID NO: 89073 - protein, 10 aa, Homo sapiens
  misc_feature: Table A; Target 89073; HLA-B*40:01; TRPM1; ENSG00000134160; TAA
EEGGIINESL

SEQ ID NO: 89074 - protein, 10 aa, Homo sapiens
  misc_feature: Table A; Target 89074; HLA-B*40:02; TRPM1; ENSG00000134160; TAA
EEGGIINESL

SEQ ID NO: 89075 - protein, 10 aa, Homo sapiens
  misc_feature: Table A; Target 89075; HLA-B*44:02; TRPM1; ENSG00000134160; TAA
EEGGIINESL

SEQ ID NO: 89076 - protein, 10 aa, Homo sapiens
  misc_feature: Table A; Target 89076; HLA-B*44:03; TRPM1; ENSG00000134160; TAA
EEGGIINESL

SEQ ID NO: 89077 - protein, 9 aa, Homo sapiens
  misc_feature: Table A; Target 89077; HLA-A*23:01; TRPM1; ENSG00000134160; TAA
EEINERETF

SEQ ID NO: 89078 - protein, 9 aa, Homo sapiens
  misc_feature: Table A; Target 89078; HLA-A*25:01; TRPM1; ENSG00000134160; TAA
EEINERETF

SEQ ID NO: 89079 - protein, 9 aa, Homo sapiens
  misc_feature: Table A; Target 89079; HLA-A*26:01; TRPM1; ENSG00000134160; TAA
EEINERETF

SEQ ID NO: 89080 - protein, 9 aa, Homo sapiens
  misc_feature: Table A; Target 89080; HLA-A*30:01; TRPM1; ENSG00000134160; TAA
EEINERETF

SEQ ID NO: 89081 - protein, 9 aa, Homo sapiens
  misc_feature: Table A; Target 89081; HLA-B*15:03; TRPM1; ENSG00000134160; TAA
EEINERETF

SEQ ID NO: 89082 - protein, 9 aa, Homo sapiens
  misc_feature: Table A; Target 89082; HLA-B*18:01; TRPM1; ENSG00000134160; TAA
EEINERETF

SEQ ID NO: 89083 - protein, 9 aa, Homo sapiens
  misc_feature: Table A; Target 89083; HLA-B*27:02; TRPM1; ENSG00000134160; TAA
EEINERETF

SEQ ID NO: 89084 - protein, 9 aa, Homo sapiens
  misc_feature: Table A; Target 89084; HLA-B*37:01; TRPM1; ENSG00000134160; TAA
EEINERETF

SEQ ID NO: 89085 - protein, 9 aa, Homo sapiens
  misc_feature: Table A; Target 89085; HLA-B*38:01; TRPM1; ENSG00000134160; TAA
EEINERETF

SEQ ID NO: 89086 - protein, 9 aa, Homo sapiens
  misc_feature: Table A; Target 89086; HLA-B*39:01; TRPM1; ENSG00000134160; TAA
EEINERETF

SEQ ID NO: 89087 - protein, 9 aa, Homo sapiens
  misc_feature: Table A; Target 89087; HLA-B*40:01; TRPM1; ENSG00000134160; TAA
EEINERETF

SEQ ID NO: 89088 - protein, 9 aa, Homo sapiens
  misc_feature: Table A; Target 89088; HLA-B*40:02; TRPM1; ENSG00000134160; TAA
EEINERETF

SEQ ID NO: 89089 - protein, 9 aa, Homo sapiens
  misc_feature: Table A; Target 89089; HLA-B*44:02; TRPM1; ENSG00000134160; TAA
EEINERETF

SEQ ID NO: 89090 - protein, 9 aa, Homo sapiens
  misc_feature: Table A; Target 89090; HLA-B*44:03; TRPM1; ENSG00000134160; TAA
EEINERETF

SEQ ID NO: 89091 - protein, 9 aa, Homo sapiens
  misc_feature: Table A; Target 89091; HLA-C*16:01; TRPM1; ENSG00000134160; TAA
EEINERETF

SEQ ID NO: 89092 - protein, 9 aa, Homo sapiens
  misc_feature: Table A; Target 89092; HLA-C*16:04; TRPM1; ENSG00000134160; TAA
EEINERETF

SEQ ID NO: 89093 - protein, 10 aa, Homo sapiens
  misc_feature: Table A; Target 89093; HLA-A*30:01; TRPM1; ENSG00000134160; TAA
EEINERETFM

SEQ ID NO: 89094 - protein, 10 aa, Homo sapiens
  misc_feature: Table A; Target 89094; HLA-B*40:01; TRPM1; ENSG00000134160; TAA
EEINERETFM

SEQ ID NO: 89095 - protein, 10 aa, Homo sapiens
  misc_feature: Table A; Target 89095; HLA-B*40:02; TRPM1; ENSG00000134160; TAA
EEINERETFM

SEQ ID NO: 89096 - protein, 10 aa, Homo sapiens
  misc_feature: Table A; Target 89096; HLA-B*44:02; TRPM1; ENSG00000134160; TAA
EEINERETFM

SEQ ID NO: 89097 - protein, 10 aa, Homo sapiens
  misc_feature: Table A; Target 89097; HLA-B*44:03; TRPM1; ENSG00000134160; TAA
EEINERETFM

SEQ ID NO: 89098 - protein, 10 aa, Homo sapiens
  misc_feature: Table A; Target 89098; HLA-B*49:01; TRPM1; ENSG00000134160; TAA
EEINERETFM

SEQ ID NO: 89099 - protein, 10 aa, Homo sapiens
  misc_feature: Table A; Target 89099; HLA-C*16:04; TRPM1; ENSG00000134160; TAA
EEINERETFM

SEQ ID NO: 89100 - protein, 9 aa, Homo sapiens
  misc_feature: Table A; Target 89100; HLA-B*40:01; TRPM1; ENSG00000134160; TAA
EEKDVKTHL

SEQ ID NO: 89101 - protein, 9 aa, Homo sapiens
  misc_feature: Table A; Target 89101; HLA-B*40:02; TRPM1; ENSG00000134160; TAA
EEKDVKTHL

SEQ ID NO: 89102 - protein, 9 aa, Homo sapiens
  misc_feature: Table A; Target 89102; HLA-B*44:02; TRPM1; ENSG00000134160; TAA
EEKDVKTHL

SEQ ID NO: 89103 - protein, 9 aa, Homo sapiens
  misc_feature: Table A; Target 89103; HLA-B*44:03; TRPM1; ENSG00000134160; TAA
EEKDVKTHL

SEQ ID NO: 89104 - protein, 9 aa, Homo sapiens
  misc_feature: Table A; Target 89104; HLA-B*44:02; TRPM1; ENSG00000134160; TAA
EELKRLHEF

SEQ ID NO: 89105 - protein, 9 aa, Homo sapiens
  misc_feature: Table A; Target 89105; HLA-B*44:03; TRPM1; ENSG00000134160; TAA
EELKRLHEF

SEQ ID NO: 89106 - protein, 10 aa, Homo sapiens
  misc_feature: Table A; Target 89106; HLA-A*30:01; TRPM1; ENSG00000134160; TAA
EELLFEDTSL

SEQ ID NO: 89107 - protein, 10 aa, Homo sapiens
  misc_feature: Table A; Target 89107; HLA-B*18:01; TRPM1; ENSG00000134160; TAA
EELLFEDTSL

SEQ ID NO: 89108 - protein, 10 aa, Homo sapiens
  misc_feature: Table A; Target 89108; HLA-B*40:01; TRPM1; ENSG00000134160; TAA
EELLFEDTSL

SEQ ID NO: 89109 - protein, 10 aa, Homo sapiens
  misc_feature: Table A; Target 89109; HLA-B*40:02; TRPM1; ENSG00000134160; TAA
EELLFEDTSL

SEQ ID NO: 89110 - protein, 10 aa, Homo sapiens
  misc_feature: Table A; Target 89110; HLA-B*40:02; TRPM1; ENSG00000134160; TAA
EELSNRMVNA

SEQ ID NO: 89111 - protein, 10 aa, Homo sapiens
  misc_feature: Table A; Target 89111; HLA-B*49:01; TRPM1; ENSG00000134160; TAA
EELSNRMVNA

SEQ ID NO: 89112 - protein, 11 aa, Homo sapiens
  misc_feature: Table A; Target 89112; HLA-A*30:01; TRPM1; ENSG00000134160; TAA
EELSNRMVNAL

SEQ ID NO: 89113 - protein, 11 aa, Homo sapiens
  misc_feature: Table A; Target 89113; HLA-B*18:01; TRPM1; ENSG00000134160; TAA
EELSNRMVNAL

SEQ ID NO: 89114 - protein, 11 aa, Homo sapiens
  misc_feature: Table A; Target 89114; HLA-B*40:01; TRPM1; ENSG00000134160; TAA
EELSNRMVNAL

SEQ ID NO: 89115 - protein, 11 aa, Homo sapiens
  misc_feature: Table A; Target 89115; HLA-B*40:02; TRPM1; ENSG00000134160; TAA
EELSNRMVNAL

SEQ ID NO: 89116 - protein, 11 aa, Homo sapiens
  misc_feature: Table A; Target 89116; HLA-B*44:02; TRPM1; ENSG00000134160; TAA
EELSNRMVNAL

SEQ ID NO: 89117 - protein, 11 aa, Homo sapiens
  misc_feature: Table A; Target 89117; HLA-B*44:03; TRPM1; ENSG00000134160; TAA
EELSNRMVNAL

SEQ ID NO: 89118 - protein, 8 aa, Homo sapiens
  misc_feature: Table A; Target 89118; HLA-B*18:01; TRPM1; ENSG00000134160; TAA
EEPPIPVV

SEQ ID NO: 89119 - protein, 8 aa, Homo sapiens
  misc_feature: Table A; Target 89119; HLA-B*49:01; TRPM1; ENSG00000134160; TAA
EEPPIPVV

SEQ ID NO: 89120 - protein, 9 aa, Homo sapiens
  misc_feature: Table A; Target 89120; HLA-A*30:01; TRPM1; ENSG00000134160; TAA
EEPPIPVVI

SEQ ID NO: 89121 - protein, 9 aa, Homo sapiens
  misc_feature: Table A; Target 89121; HLA-A*68:02; TRPM1; ENSG00000134160; TAA
EEPPIPVVI

SEQ ID NO: 89122 - protein, 9 aa, Homo sapiens
  misc_feature: Table A; Target 89122; HLA-B*13:02; TRPM1; ENSG00000134160; TAA
EEPPIPVVI

SEQ ID NO: 89123 - protein, 9 aa, Homo sapiens
  misc_feature: Table A; Target 89123; HLA-B*18:01; TRPM1; ENSG00000134160; TAA
EEPPIPVVI

SEQ ID NO: 89124 - protein, 9 aa, Homo sapiens
  misc_feature: Table A; Target 89124; HLA-B*37:01; TRPM1; ENSG00000134160; TAA
EEPPIPVVI

SEQ ID NO: 89125 - protein, 9 aa, Homo sapiens
  misc_feature: Table A; Target 89125; HLA-B*38:01; TRPM1; ENSG00000134160; TAA
EEPPIPVVI

SEQ ID NO: 89126 - protein, 9 aa, Homo sapiens
  misc_feature: Table A; Target 89126; HLA-B*39:01; TRPM1; ENSG00000134160; TAA
EEPPIPVVI

SEQ ID NO: 89127 - protein, 9 aa, Homo sapiens
  misc_feature: Table A; Target 89127; HLA-B*40:01; TRPM1; ENSG00000134160; TAA
EEPPIPVVI

SEQ ID NO: 89128 - protein, 9 aa, Homo sapiens
  misc_feature: Table A; Target 89128; HLA-B*44:02; TRPM1; ENSG00000134160; TAA
EEPPIPVVI

SEQ ID NO: 89129 - protein, 9 aa, Homo sapiens
  misc_feature: Table A; Target 89129; HLA-B*44:03; TRPM1; ENSG00000134160; TAA
EEPPIPVVI

SEQ ID NO: 89130 - protein, 9 aa, Homo sapiens
  misc_feature: Table A; Target 89130; HLA-B*49:01; TRPM1; ENSG00000134160; TAA
EEPPIPVVI

SEQ ID NO: 89131 - protein, 9 aa, Homo sapiens
  misc_feature: Table A; Target 89131; HLA-C*02:02; TRPM1; ENSG00000134160; TAA
EEPPIPVVI

SEQ ID NO: 89132 - protein, 9 aa, Homo sapiens
  misc_feature: Table A; Target 89132; HLA-C*12:03; TRPM1; ENSG00000134160; TAA
EEPPIPVVI

SEQ ID NO: 89133 - protein, 9 aa, Homo sapiens
  misc_feature: Table A; Target 89133; HLA-C*16:04; TRPM1; ENSG00000134160; TAA
EEPPIPVVI

SEQ ID NO: 89134 - protein, 9 aa, Homo sapiens
  misc_feature: Table A; Target 89134; HLA-B*18:01; TRPM1; ENSG00000134160; TAA
EEQCVQEHF

SEQ ID NO: 89135 - protein, 9 aa, Homo sapiens
  misc_feature: Table A; Target 89135; HLA-B*27:02; TRPM1; ENSG00000134160; TAA
EEQCVQEHF

SEQ ID NO: 89136 - protein, 9 aa, Homo sapiens
  misc_feature: Table A; Target 89136; HLA-B*44:02; TRPM1; ENSG00000134160; TAA
EEQCVQEHF

SEQ ID NO: 89137 - protein, 9 aa, Homo sapiens
  misc_feature: Table A; Target 89137; HLA-B*44:03; TRPM1; ENSG00000134160; TAA
EEQCVQEHF

SEQ ID NO: 89138 - protein, 9 aa, Homo sapiens
  misc_feature: Table A; Target 89138; HLA-C*16:04; TRPM1; ENSG00000134160; TAA
EEQCVQEHF

SEQ ID NO: 89139 - protein, 9 aa, Homo sapiens
  misc_feature: Table A; Target 89139; HLA-B*44:02; TRPM1; ENSG00000134160; TAA
EESKLGPDI

SEQ ID NO: 89140 - protein, 9 aa, Homo sapiens
  misc_feature: Table A; Target 89140; HLA-B*44:03; TRPM1; ENSG00000134160; TAA
EESKLGPDI

SEQ ID NO: 89141 - protein, 9 aa, Homo sapiens
  misc_feature: Table A; Target 89141; HLA-B*49:01; TRPM1; ENSG00000134160; TAA
EESKLGPDI

SEQ ID NO: 89142 - protein, 11 aa, Homo sapiens
  misc_feature: Table A; Target 89142; HLA-B*44:02; TRPM1; ENSG00000134160; TAA
EESKLGPDIGI

SEQ ID NO: 89143 - protein, 11 aa, Homo sapiens
  misc_feature: Table A; Target 89143; HLA-B*44:03; TRPM1; ENSG00000134160; TAA
EESKLGPDIGI

SEQ ID NO: 89144 - protein, 8 aa, Homo sapiens
  misc_feature: Table A; Target 89144; HLA-B*18:01; TRPM1; ENSG00000134160; TAA
EESMAKAL

SEQ ID NO: 89145 - protein, 8 aa, Homo sapiens
  misc_feature: Table A; Target 89145; HLA-B*37:01; TRPM1; ENSG00000134160; TAA
EESMAKAL

SEQ ID NO: 89146 - protein, 8 aa, Homo sapiens
  misc_feature: Table A; Target 89146; HLA-B*40:01; TRPM1; ENSG00000134160; TAA
EESMAKAL

SEQ ID NO: 89147 - protein, 8 aa, Homo sapiens
  misc_feature: Table A; Target 89147; HLA-B*44:02; TRPM1; ENSG00000134160; TAA
EESMAKAL

SEQ ID NO: 89148 - protein, 8 aa, Homo sapiens
  misc_feature: Table A; Target 89148; HLA-B*44:03; TRPM1; ENSG00000134160; TAA
EESMAKAL

SEQ ID NO: 89149 - protein, 9 aa, Homo sapiens
  misc_feature: Table A; Target 89149; HLA-B*44:02; TRPM1; ENSG00000134160; TAA
EESMAKALV

SEQ ID NO: 89150 - protein, 9 aa, Homo sapiens
  misc_feature: Table A; Target 89150; HLA-B*44:03; TRPM1; ENSG00000134160; TAA
EESMAKALV

SEQ ID NO: 89151 - protein, 9 aa, Homo sapiens
  misc_feature: Table A; Target 89151; HLA-B*49:01; TRPM1; ENSG00000134160; TAA
EESMAKALV

SEQ ID NO: 89152 - protein, 8 aa, Homo sapiens
  misc_feature: Table A; Target 89152; HLA-B*44:03; TRPM1; ENSG00000134160; TAA
EETDPRKI

SEQ ID NO: 89153 - protein, 10 aa, Homo sapiens
  misc_feature: Table A; Target 89153; HLA-B*40:01; TRPM1; ENSG00000134160; TAA
EETDPRKIEL

SEQ ID NO: 89154 - protein, 10 aa, Homo sapiens
  misc_feature: Table A; Target 89154; HLA-B*44:02; TRPM1; ENSG00000134160; TAA
EETDPRKIEL

SEQ ID NO: 89155 - protein, 10 aa, Homo sapiens
  misc_feature: Table A; Target 89155; HLA-B*44:03; TRPM1; ENSG00000134160; TAA
EETDPRKIEL

SEQ ID NO: 89156 - protein, 8 aa, Homo sapiens
  misc_feature: Table A; Target 89156; HLA-A*30:01; TRPM1; ENSG00000134160; TAA
EETISPSL

SEQ ID NO: 89157 - protein, 8 aa, Homo sapiens
  misc_feature: Table A; Target 89157; HLA-B*18:01; TRPM1; ENSG00000134160; TAA
EETISPSL

SEQ ID NO: 89158 - protein, 8 aa, Homo sapiens
  misc_feature: Table A; Target 89158; HLA-B*37:01; TRPM1; ENSG00000134160; TAA
EETISPSL

SEQ ID NO: 89159 - protein, 8 aa, Homo sapiens
  misc_feature: Table A; Target 89159; HLA-B*40:01; TRPM1; ENSG00000134160; TAA
EETISPSL

SEQ ID NO: 89160 - protein, 8 aa, Homo sapiens
  misc_feature: Table A; Target 89160; HLA-B*40:02; TRPM1; ENSG00000134160; TAA
EETISPSL

SEQ ID NO: 89161 - protein, 8 aa, Homo sapiens
  misc_feature: Table A; Target 89161; HLA-B*44:02; TRPM1; ENSG00000134160; TAA
EETISPSL

SEQ ID NO: 89162 - protein, 8 aa, Homo sapiens
  misc_feature: Table A; Target 89162; HLA-B*44:03; TRPM1; ENSG00000134160; TAA
EETISPSL

SEQ ID NO: 89163 - protein, 8 aa, Homo sapiens
  misc_feature: Table A; Target 89163; HLA-B*49:01; TRPM1; ENSG00000134160; TAA
EETISPSL

SEQ ID NO: 89164 - protein, 8 aa, Homo sapiens
  misc_feature: Table A; Target 89164; HLA-B*18:01; TRPM1; ENSG00000134160; TAA
EETKITRY

SEQ ID NO: 89165 - protein, 8 aa, Homo sapiens
  misc_feature: Table A; Target 89165; HLA-B*44:02; TRPM1; ENSG00000134160; TAA
EETKITRY

SEQ ID NO: 89166 - protein, 8 aa, Homo sapiens
  misc_feature: Table A; Target 89166; HLA-B*44:03; TRPM1; ENSG00000134160; TAA
EETKITRY

SEQ ID NO: 89167 - protein, 9 aa, Homo sapiens
  misc_feature: Table A; Target 89167; HLA-B*44:02; TRPM1; ENSG00000134160; TAA
EETKITRYF

SEQ ID NO: 89168 - protein, 9 aa, Homo sapiens
  misc_feature: Table A; Target 89168; HLA-B*44:03; TRPM1; ENSG00000134160; TAA
EETKITRYF

SEQ ID NO: 89169 - protein, 10 aa, Homo sapiens
  misc_feature: Table A; Target 89169; HLA-A*33:01; TRPM1; ENSG00000134160; TAA
EFQGGGYSNK

SEQ ID NO: 89170 - protein, 10 aa, Homo sapiens
  misc_feature: Table A; Target 89170; HLA-A*33:03; TRPM1; ENSG00000134160; TAA
EFQGGGYSNK

SEQ ID NO: 89171 - protein, 8 aa, Homo sapiens
  misc_feature: Table A; Target 89171; HLA-B*51:01; TRPM1; ENSG00000134160; TAA
EFYNAPIV

SEQ ID NO: 89172 - protein, 9 aa, Homo sapiens
  misc_feature: Table A; Target 89172; HLA-A*33:01; TRPM1; ENSG00000134160; TAA
EFYNAPIVK

SEQ ID NO: 89173 - protein, 9 aa, Homo sapiens
  misc_feature: Table A; Target 89173; HLA-A*33:03; TRPM1; ENSG00000134160; TAA
EFYNAPIVK

SEQ ID NO: 89174 - protein, 10 aa, Homo sapiens
  misc_feature: Table A; Target 89174; HLA-A*23:01; TRPM1; ENSG00000134160; TAA
EFYNAPIVKF

SEQ ID NO: 89175 - protein, 10 aa, Homo sapiens
  misc_feature: Table A; Target 89175; HLA-A*33:03; TRPM1; ENSG00000134160; TAA
EFYNAPIVKF

SEQ ID NO: 89176 - protein, 9 aa, Homo sapiens
  misc_feature: Table A; Target 89176; HLA-B*39:01; TRPM1; ENSG00000134160; TAA
EGGPNVVSI

SEQ ID NO: 89177 - protein, 9 aa, Homo sapiens
  misc_feature: Table A; Target 89177; HLA-B*51:01; TRPM1; ENSG00000134160; TAA
EGGPNVVSI

SEQ ID NO: 89178 - protein, 9 aa, Homo sapiens
  misc_feature: Table A; Target 89178; HLA-A*26:01; TRPM1; ENSG00000134160; TAA
EINERETFM

SEQ ID NO: 89179 - protein, 9 aa, Homo sapiens
  misc_feature: Table A; Target 89179; HLA-B*08:01; TRPM1; ENSG00000134160; TAA
EINERETFM

SEQ ID NO: 89180 - protein, 9 aa, Homo sapiens
  misc_feature: Table A; Target 89180; HLA-B*35:03; TRPM1; ENSG00000134160; TAA
ELLFEDTSL

SEQ ID NO: 89181 - protein, 9 aa, Homo sapiens
  misc_feature: Table A; Target 89181; HLA-A*02:04; TRPM1; ENSG00000134160; TAA
ELLNWVNAL

SEQ ID NO: 89182 - protein, 9 aa, Homo sapiens
  misc_feature: Table A; Target 89182; HLA-A*02:03; TRPM1; ENSG00000134160; TAA
ELPKLLISV

SEQ ID NO: 89183 - protein, 9 aa, Homo sapiens
  misc_feature: Table A; Target 89183; HLA-A*02:04; TRPM1; ENSG00000134160; TAA
ELPKLLISV

SEQ ID NO: 89184 - protein, 9 aa, Homo sapiens
  misc_feature: Table A; Target 89184; HLA-A*02:07; TRPM1; ENSG00000134160; TAA
ELPKLLISV

SEQ ID NO: 89185 - protein, 9 aa, Homo sapiens
  misc_feature: Table A; Target 89185; HLA-A*68:02; TRPM1; ENSG00000134160; TAA
ELPKLLISV

SEQ ID NO: 89186 - protein, 9 aa, Homo sapiens
  misc_feature: Table A; Target 89186; HLA-B*08:01; TRPM1; ENSG00000134160; TAA
ELPKLLISV

SEQ ID NO: 89187 - protein, 10 aa, Homo sapiens
  misc_feature: Table A; Target 89187; HLA-A*25:01; TRPM1; ENSG00000134160; TAA
ELSNRMVNAL

SEQ ID NO: 89188 - protein, 8 aa, Homo sapiens
  misc_feature: Table A; Target 89188; HLA-B*08:01; TRPM1; ENSG00000134160; TAA
EMAILTAL

SEQ ID NO: 89189 - protein, 9 aa, Homo sapiens
  misc_feature: Table A; Target 89189; HLA-A*68:02; TRPM1; ENSG00000134160; TAA
EMAILTALL

SEQ ID NO: 89190 - protein, 9 aa, Homo sapiens
  misc_feature: Table A; Target 89190; HLA-A*02:03; TRPM1; ENSG00000134160; TAA
EMQPKLKQV

SEQ ID NO: 89191 - protein, 9 aa, Homo sapiens
  misc_feature: Table A; Target 89191; HLA-B*08:01; TRPM1; ENSG00000134160; TAA
EMQPKLKQV

SEQ ID NO: 89192 - protein, 9 aa, Homo sapiens
  misc_feature: Table A; Target 89192; HLA-A*33:01; TRPM1; ENSG00000134160; TAA
ENKEDLVGK

SEQ ID NO: 89193 - protein, 9 aa, Homo sapiens
  misc_feature: Table A; Target 89193; HLA-A*33:03; TRPM1; ENSG00000134160; TAA
ENKEDLVGK

SEQ ID NO: 89194 - protein, 8 aa, Homo sapiens
  misc_feature: Table A; Target 89194; HLA-A*33:03; TRPM1; ENSG00000134160; TAA
ENLAGIDR

SEQ ID NO: 89195 - protein, 8 aa, Homo sapiens
  misc_feature: Table A; Target 89195; HLA-B*51:01; TRPM1; ENSG00000134160; TAA
EPPIPVVI

SEQ ID NO: 89196 - protein, 8 aa, Homo sapiens
  misc_feature: Table A; Target 89196; HLA-B*39:01; TRPM1; ENSG00000134160; TAA
EQAMLDAL

SEQ ID NO: 89197 - protein, 9 aa, Homo sapiens
  misc_feature: Table A; Target 89197; HLA-B*13:02; TRPM1; ENSG00000134160; TAA
EQAMLDALV

SEQ ID NO: 89198 - protein, 10 aa, Homo sapiens
  misc_feature: Table A; Target 89198; HLA-A*25:01; TRPM1; ENSG00000134160; TAA
EQIAMKLLTY

SEQ ID NO: 89199 - protein, 10 aa, Homo sapiens
  misc_feature: Table A; Target 89199; HLA-A*26:01; TRPM1; ENSG00000134160; TAA
EQIAMKLLTY

SEQ ID NO: 89200 - protein, 10 aa, Homo sapiens
  misc_feature: Table A; Target 89200; HLA-A*30:02; TRPM1; ENSG00000134160; TAA
EQIAMKLLTY

SEQ ID NO: 89201 - protein, 10 aa, Homo sapiens
  misc_feature: Table A; Target 89201; HLA-B*15:01; TRPM1; ENSG00000134160; TAA
EQIAMKLLTY

SEQ ID NO: 89202 - protein, 10 aa, Homo sapiens
  misc_feature: Table A; Target 89202; HLA-B*15:03; TRPM1; ENSG00000134160; TAA
EQIAMKLLTY

SEQ ID NO: 89203 - protein, 10 aa, Homo sapiens
  misc_feature: Table A; Target 89203; HLA-B*18:01; TRPM1; ENSG00000134160; TAA
EQIAMKLLTY

SEQ ID NO: 89204 - protein, 10 aa, Homo sapiens
  misc_feature: Table A; Target 89204; HLA-B*44:02; TRPM1; ENSG00000134160; TAA
EQIAMKLLTY

SEQ ID NO: 89205 - protein, 10 aa, Homo sapiens
  misc_feature: Table A; Target 89205; HLA-B*44:03; TRPM1; ENSG00000134160; TAA
EQIAMKLLTY

SEQ ID NO: 89206 - protein, 10 aa, Homo sapiens
  misc_feature: Table A; Target 89206; HLA-C*16:04; TRPM1; ENSG00000134160; TAA
EQIAMKLLTY

SEQ ID NO: 89207 - protein, 9 aa, Homo sapiens
  misc_feature: Table A; Target 89207; HLA-A*33:03; TRPM1; ENSG00000134160; TAA
EQLLVTIQK

SEQ ID NO: 89208 - protein, 9 aa, Homo sapiens
  misc_feature: Table A; Target 89208; HLA-C*07:06; TRPM1; ENSG00000134160; TAA
EQLLVTIQK

SEQ ID NO: 89209 - protein, 11 aa, Homo sapiens
  misc_feature: Table A; Target 89209; HLA-B*44:02; TRPM1; ENSG00000134160; TAA
EQLLVTIQKTF

SEQ ID NO: 89210 - protein, 11 aa, Homo sapiens
  misc_feature: Table A; Target 89210; HLA-B*44:03; TRPM1; ENSG00000134160; TAA
EQLLVTIQKTF

SEQ ID NO: 89211 - protein, 10 aa, Homo sapiens
  misc_feature: Table A; Target 89211; HLA-B*38:01; TRPM1; ENSG00000134160; TAA
EQQSSSDERI

SEQ ID NO: 89212 - protein, 8 aa, Homo sapiens
  misc_feature: Table A; Target 89212; HLA-C*05:01; TRPM1; ENSG00000134160; TAA
ESDLVDDI

SEQ ID NO: 89213 - protein, 8 aa, Homo sapiens
  misc_feature: Table A; Target 89213; HLA-B*08:01; TRPM1; ENSG00000134160; TAA
ESMAKALV

SEQ ID NO: 89214 - protein, 9 aa, Homo sapiens
  misc_feature: Table A; Target 89214; HLA-B*54:01; TRPM1; ENSG00000134160; TAA
ESMAKALVA

SEQ ID NO: 89215 - protein, 9 aa, Homo sapiens
  misc_feature: Table A; Target 89215; HLA-A*01:01; TRPM1; ENSG00000134160; TAA
ETDPRKIEL

SEQ ID NO: 89216 - protein, 9 aa, Homo sapiens
  misc_feature: Table A; Target 89216; HLA-A*25:01; TRPM1; ENSG00000134160; TAA
ETDPRKIEL

SEQ ID NO: 89217 - protein, 9 aa, Homo sapiens
  misc_feature: Table A; Target 89217; HLA-A*68:01; TRPM1; ENSG00000134160; TAA
ETDPRKIEL

SEQ ID NO: 89218 - protein, 9 aa, Homo sapiens
  misc_feature: Table A; Target 89218; HLA-C*05:01; TRPM1; ENSG00000134160; TAA
ETDPRKIEL

SEQ ID NO: 89219 - protein, 9 aa, Homo sapiens
  misc_feature: Table A; Target 89219; HLA-C*16:01; TRPM1; ENSG00000134160; TAA
ETDPRKIEL

SEQ ID NO: 89220 - protein, 8 aa, Homo sapiens
  misc_feature: Table A; Target 89220; HLA-B*08:01; TRPM1; ENSG00000134160; TAA
ETFMKTSL

SEQ ID NO: 89221 - protein, 11 aa, Homo sapiens
  misc_feature: Table A; Target 89221; HLA-A*26:01; TRPM1; ENSG00000134160; TAA
ETFMKTSLQTV

SEQ ID NO: 89222 - protein, 11 aa, Homo sapiens
  misc_feature: Table A; Target 89222; HLA-A*68:02; TRPM1; ENSG00000134160; TAA
ETFMKTSLQTV

SEQ ID NO: 89223 - protein, 9 aa, Homo sapiens
  misc_feature: Table A; Target 89223; HLA-A*25:01; TRPM1; ENSG00000134160; TAA
ETINACKTM

SEQ ID NO: 89224 - protein, 9 aa, Homo sapiens
  misc_feature: Table A; Target 89224; HLA-A*26:01; TRPM1; ENSG00000134160; TAA
ETINACKTM

SEQ ID NO: 89225 - protein, 10 aa, Homo sapiens
  misc_feature: Table A; Target 89225; HLA-A*68:01; TRPM1; ENSG00000134160; TAA
ETINACKTMK

SEQ ID NO: 89226 - protein, 9 aa, Homo sapiens
  misc_feature: Table A; Target 89226; HLA-A*03:01; TRPM1; ENSG00000134160; TAA
ETISPSLNK

SEQ ID NO: 89227 - protein, 9 aa, Homo sapiens
  misc_feature: Table A; Target 89227; HLA-A*03:02; TRPM1; ENSG00000134160; TAA
ETISPSLNK

SEQ ID NO: 89228 - protein, 9 aa, Homo sapiens
  misc_feature: Table A; Target 89228; HLA-A*11:01; TRPM1; ENSG00000134160; TAA
ETISPSLNK

SEQ ID NO: 89229 - protein, 9 aa, Homo sapiens
  misc_feature: Table A; Target 89229; HLA-A*26:01; TRPM1; ENSG00000134160; TAA
ETISPSLNK

SEQ ID NO: 89230 - protein, 9 aa, Homo sapiens
  misc_feature: Table A; Target 89230; HLA-A*33:01; TRPM1; ENSG00000134160; TAA
ETISPSLNK

SEQ ID NO: 89231 - protein, 9 aa, Homo sapiens
  misc_feature: Table A; Target 89231; HLA-A*33:03; TRPM1; ENSG00000134160; TAA
ETISPSLNK

SEQ ID NO: 89232 - protein, 9 aa, Homo sapiens
  misc_feature: Table A; Target 89232; HLA-A*68:01; TRPM1; ENSG00000134160; TAA
ETISPSLNK

SEQ ID NO: 89233 - protein, 9 aa, Homo sapiens
  misc_feature: Table A; Target 89233; HLA-C*07:06; TRPM1; ENSG00000134160; TAA
ETISPSLNK

SEQ ID NO: 89234 - protein, 10 aa, Homo sapiens
  misc_feature: Table A; Target 89234; HLA-A*26:01; TRPM1; ENSG00000134160; TAA
ETISPSLNKT

SEQ ID NO: 89235 - protein, 10 aa, Homo sapiens
  misc_feature: Table A; Target 89235; HLA-A*68:01; TRPM1; ENSG00000134160; TAA
ETISPSLNKT

SEQ ID NO: 89236 - protein, 11 aa, Homo sapiens
  misc_feature: Table A; Target 89236; HLA-A*03:02; TRPM1; ENSG00000134160; TAA
ETQPEKWSVAK

SEQ ID NO: 89237 - protein, 11 aa, Homo sapiens
  misc_feature: Table A; Target 89237; HLA-A*33:03; TRPM1; ENSG00000134160; TAA
ETQPEKWSVAK

SEQ ID NO: 89238 - protein, 9 aa, Homo sapiens
  misc_feature: Table A; Target 89238; HLA-A*25:01; TRPM1; ENSG00000134160; TAA
ETTNIEGTI

SEQ ID NO: 89239 - protein, 9 aa, Homo sapiens
  misc_feature: Table A; Target 89239; HLA-A*26:01; TRPM1; ENSG00000134160; TAA
ETTNIEGTI

SEQ ID NO: 89240 - protein, 9 aa, Homo sapiens
  misc_feature: Table A; Target 89240; HLA-A*68:02; TRPM1; ENSG00000134160; TAA
ETTNIEGTI

SEQ ID NO: 89241 - protein, 11 aa, Homo sapiens
  misc_feature: Table A; Target 89241; HLA-A*01:01; TRPM1; ENSG00000134160; TAA
ETTNIEGTISY

SEQ ID NO: 89242 - protein, 11 aa, Homo sapiens
  misc_feature: Table A; Target 89242; HLA-A*25:01; TRPM1; ENSG00000134160; TAA
ETTNIEGTISY

SEQ ID NO: 89243 - protein, 11 aa, Homo sapiens
  misc_feature: Table A; Target 89243; HLA-A*26:01; TRPM1; ENSG00000134160; TAA
ETTNIEGTISY

SEQ ID NO: 89244 - protein, 11 aa, Homo sapiens
  misc_feature: Table A; Target 89244; HLA-A*68:01; TRPM1; ENSG00000134160; TAA
ETTNIEGTISY

SEQ ID NO: 89245 - protein, 9 aa, Homo sapiens
  misc_feature: Table A; Target 89245; HLA-A*68:01; TRPM1; ENSG00000134160; TAA
EVEEETDPR

SEQ ID NO: 89246 - protein, 9 aa, Homo sapiens
  misc_feature: Table A; Target 89246; HLA-A*26:01; TRPM1; ENSG00000134160; TAA
EVFADQIDL

SEQ ID NO: 89247 - protein, 9 aa, Homo sapiens
  misc_feature: Table A; Target 89247; HLA-A*68:01; TRPM1; ENSG00000134160; TAA
EVFADQIDL

SEQ ID NO: 89248 - protein, 9 aa, Homo sapiens
  misc_feature: Table A; Target 89248; HLA-A*68:02; TRPM1; ENSG00000134160; TAA
EVFADQIDL

SEQ ID NO: 89249 - protein, 9 aa, Homo sapiens
  misc_feature: Table A; Target 89249; HLA-B*35:03; TRPM1; ENSG00000134160; TAA
EVFADQIDL

SEQ ID NO: 89250 - protein, 10 aa, Homo sapiens
  misc_feature: Table A; Target 89250; HLA-A*01:01; TRPM1; ENSG00000134160; TAA
EVFADQIDLY

SEQ ID NO: 89251 - protein, 10 aa, Homo sapiens
  misc_feature: Table A; Target 89251; HLA-A*25:01; TRPM1; ENSG00000134160; TAA
EVFADQIDLY

SEQ ID NO: 89252 - protein, 10 aa, Homo sapiens
  misc_feature: Table A; Target 89252; HLA-A*26:01; TRPM1; ENSG00000134160; TAA
EVFADQIDLY

SEQ ID NO: 89253 - protein, 10 aa, Homo sapiens
  misc_feature: Table A; Target 89253; HLA-A*29:02; TRPM1; ENSG00000134160; TAA
EVFADQIDLY

SEQ ID NO: 89254 - protein, 10 aa, Homo sapiens
  misc_feature: Table A; Target 89254; HLA-A*68:01; TRPM1; ENSG00000134160; TAA
EVFADQIDLY

SEQ ID NO: 89255 - protein, 10 aa, Homo sapiens
  misc_feature: Table A; Target 89255; HLA-B*35:01; TRPM1; ENSG00000134160; TAA
EVFADQIDLY

SEQ ID NO: 89256 - protein, 11 aa, Homo sapiens
  misc_feature: Table A; Target 89256; HLA-A*68:02; TRPM1; ENSG00000134160; TAA
EVFADQIDLYA

SEQ ID NO: 89257 - protein, 9 aa, Homo sapiens
  misc_feature: Table A; Target 89257; HLA-A*25:01; TRPM1; ENSG00000134160; TAA
EVKSISNQV

SEQ ID NO: 89258 - protein, 9 aa, Homo sapiens
  misc_feature: Table A; Target 89258; HLA-A*26:01; TRPM1; ENSG00000134160; TAA
EVKSISNQV

SEQ ID NO: 89259 - protein, 9 aa, Homo sapiens
  misc_feature: Table A; Target 89259; HLA-A*33:03; TRPM1; ENSG00000134160; TAA
EVKSISNQV

SEQ ID NO: 89260 - protein, 9 aa, Homo sapiens
  misc_feature: Table A; Target 89260; HLA-A*68:02; TRPM1; ENSG00000134160; TAA
EVKSISNQV

SEQ ID NO: 89261 - protein, 10 aa, Homo sapiens
  misc_feature: Table A; Target 89261; HLA-A*25:01; TRPM1; ENSG00000134160; TAA
EVKSISNQVW

SEQ ID NO: 89262 - protein, 10 aa, Homo sapiens
  misc_feature: Table A; Target 89262; HLA-A*26:01; TRPM1; ENSG00000134160; TAA
EVKSISNQVW

SEQ ID NO: 89263 - protein, 10 aa, Homo sapiens
  misc_feature: Table A; Target 89263; HLA-A*33:03; TRPM1; ENSG00000134160; TAA
EVKSISNQVW

SEQ ID NO: 89264 - protein, 10 aa, Homo sapiens
  misc_feature: Table A; Target 89264; HLA-B*44:02; TRPM1; ENSG00000134160; TAA
EVKSISNQVW

SEQ ID NO: 89265 - protein, 10 aa, Homo sapiens
  misc_feature: Table A; Target 89265; HLA-B*57:01; TRPM1; ENSG00000134160; TAA
EVKSISNQVW

SEQ ID NO: 89266 - protein, 11 aa, Homo sapiens
  misc_feature: Table A; Target 89266; HLA-A*33:03; TRPM1; ENSG00000134160; TAA
EVKSISNQVWK

SEQ ID NO: 89267 - protein, 8 aa, Homo sapiens
  misc_feature: Table A; Target 89267; HLA-C*14:02; TRPM1; ENSG00000134160; TAA
EYLMGGAY

SEQ ID NO: 89268 - protein, 9 aa, Homo sapiens
  misc_feature: Table A; Target 89268; HLA-A*33:01; TRPM1; ENSG00000134160; TAA
EYLMGGAYR

SEQ ID NO: 89269 - protein, 9 aa, Homo sapiens
  misc_feature: Table A; Target 89269; HLA-A*33:03; TRPM1; ENSG00000134160; TAA
EYLMGGAYR

SEQ ID NO: 89270 - protein, 10 aa, Homo sapiens
  misc_feature: Table A; Target 89270; HLA-A*24:02; TRPM1; ENSG00000134160; TAA
EYSSITDQQL

SEQ ID NO: 89271 - protein, 10 aa, Homo sapiens
  misc_feature: Table A; Target 89271; HLA-A*33:03; TRPM1; ENSG00000134160; TAA
EYSSITDQQL

SEQ ID NO: 89272 - protein, 8 aa, Homo sapiens
  misc_feature: Table A; Target 89272; HLA-A*01:01; TRPM1; ENSG00000134160; TAA
FADQIDLY

SEQ ID NO: 89273 - protein, 8 aa, Homo sapiens
  misc_feature: Table A; Target 89273; HLA-B*35:01; TRPM1; ENSG00000134160; TAA
FADQIDLY

SEQ ID NO: 89274 - protein, 8 aa, Homo sapiens
  misc_feature: Table A; Target 89274; HLA-B*55:01; TRPM1; ENSG00000134160; TAA
FADQIDLY

SEQ ID NO: 89275 - protein, 8 aa, Homo sapiens
  misc_feature: Table A; Target 89275; HLA-C*05:01; TRPM1; ENSG00000134160; TAA
FADQIDLY

SEQ ID NO: 89276 - protein, 10 aa, Homo sapiens
  misc_feature: Table A; Target 89276; HLA-B*35:01; TRPM1; ENSG00000134160; TAA
FADQIDLYAM

SEQ ID NO: 89277 - protein, 10 aa, Homo sapiens
  misc_feature: Table A; Target 89277; HLA-B*35:03; TRPM1; ENSG00000134160; TAA
FADQIDLYAM

SEQ ID NO: 89278 - protein, 10 aa, Homo sapiens
  misc_feature: Table A; Target 89278; HLA-C*05:01; TRPM1; ENSG00000134160; TAA
FADQIDLYAM

SEQ ID NO: 89279 - protein, 8 aa, Homo sapiens
  misc_feature: Table A; Target 89279; HLA-B*46:01; TRPM1; ENSG00000134160; TAA
FAIIMECM

SEQ ID NO: 89280 - protein, 8 aa, Homo sapiens
  misc_feature: Table A; Target 89280; HLA-B*51:01; TRPM1; ENSG00000134160; TAA
FAIIMECM

SEQ ID NO: 89281 - protein, 10 aa, Homo sapiens
  misc_feature: Table A; Target 89281; HLA-B*49:01; TRPM1; ENSG00000134160; TAA
FEMQPKLKQV

SEQ ID NO: 89282 - protein, 11 aa, Homo sapiens
  misc_feature: Table A; Target 89282; HLA-B*44:02; TRPM1; ENSG00000134160; TAA
FEMQPKLKQVF

SEQ ID NO: 89283 - protein, 10 aa, Homo sapiens
  misc_feature: Table A; Target 89283; HLA-A*30:01; TRPM1; ENSG00000134160; TAA
FEVKSISNQV

SEQ ID NO: 89284 - protein, 10 aa, Homo sapiens
  misc_feature: Table A; Target 89284; HLA-B*49:01; TRPM1; ENSG00000134160; TAA
FEVKSISNQV

SEQ ID NO: 89285 - protein, 11 aa, Homo sapiens
  misc_feature: Table A; Target 89285; HLA-B*44:02; TRPM1; ENSG00000134160; TAA
FEVKSISNQVW

SEQ ID NO: 89286 - protein, 11 aa, Homo sapiens
  misc_feature: Table A; Target 89286; HLA-B*44:03; TRPM1; ENSG00000134160; TAA
FEVKSISNQVW

SEQ ID NO: 89287 - protein, 11 aa, Homo sapiens
  misc_feature: Table A; Target 89287; HLA-B*57:01; TRPM1; ENSG00000134160; TAA
FEVKSISNQVW

SEQ ID NO: 89288 - protein, 11 aa, Homo sapiens
  misc_feature: Table A; Target 89288; HLA-C*16:04; TRPM1; ENSG00000134160; TAA
FEVKSISNQVW

SEQ ID NO: 89289 - protein, 9 aa, Homo sapiens
  misc_feature: Table A; Target 89289; HLA-B*08:01; TRPM1; ENSG00000134160; TAA
FGPKRPKAL

SEQ ID NO: 89290 - protein, 8 aa, Homo sapiens
  misc_feature: Table A; Target 89290; HLA-C*03:03; TRPM1; ENSG00000134160; TAA
FGQLALEL

SEQ ID NO: 89291 - protein, 8 aa, Homo sapiens
  misc_feature: Table A; Target 89291; HLA-C*03:04; TRPM1; ENSG00000134160; TAA
FGQLALEL

SEQ ID NO: 89292 - protein, 8 aa, Homo sapiens
  misc_feature: Table A; Target 89292; HLA-C*14:02; TRPM1; ENSG00000134160; TAA
FGQLALEL

SEQ ID NO: 89293 - protein, 8 aa, Homo sapiens
  misc_feature: Table A; Target 89293; HLA-B*08:01; TRPM1; ENSG00000134160; TAA
FGVARQAI

SEQ ID NO: 89294 - protein, 9 aa, Homo sapiens
  misc_feature: Table A; Target 89294; HLA-B*08:01; TRPM1; ENSG00000134160; TAA
FGVARQAIL

SEQ ID NO: 89295 - protein, 9 aa, Homo sapiens
  misc_feature: Table A; Target 89295; HLA-B*46:01; TRPM1; ENSG00000134160; TAA
FGVARQAIL

SEQ ID NO: 89296 - protein, 9 aa, Homo sapiens
  misc_feature: Table A; Target 89296; HLA-C*02:02; TRPM1; ENSG00000134160; TAA
FGVARQAIL

SEQ ID NO: 89297 - protein, 9 aa, Homo sapiens
  misc_feature: Table A; Target 89297; HLA-C*03:03; TRPM1; ENSG00000134160; TAA
FGVARQAIL

SEQ ID NO: 89298 - protein, 9 aa, Homo sapiens
  misc_feature: Table A; Target 89298; HLA-C*03:04; TRPM1; ENSG00000134160; TAA
FGVARQAIL

SEQ ID NO: 89299 - protein, 9 aa, Homo sapiens
  misc_feature: Table A; Target 89299; HLA-C*12:03; TRPM1; ENSG00000134160; TAA
FGVARQAIL

SEQ ID NO: 89300 - protein, 9 aa, Homo sapiens
  misc_feature: Table A; Target 89300; HLA-C*16:01; TRPM1; ENSG00000134160; TAA
FGVARQAIL

SEQ ID NO: 89301 - protein, 9 aa, Homo sapiens
  misc_feature: Table A; Target 89301; HLA-B*27:05; TRPM1; ENSG00000134160; TAA
FILADNGTL

SEQ ID NO: 89302 - protein, 9 aa, Homo sapiens
  misc_feature: Table A; Target 89302; HLA-B*35:03; TRPM1; ENSG00000134160; TAA
FILADNGTL

SEQ ID NO: 89303 - protein, 9 aa, Homo sapiens
  misc_feature: Table A; Target 89303; HLA-B*39:01; TRPM1; ENSG00000134160; TAA
FILADNGTL

SEQ ID NO: 89304 - protein, 9 aa, Homo sapiens
  misc_feature: Table A; Target 89304; HLA-C*03:03; TRPM1; ENSG00000134160; TAA
FILADNGTL

SEQ ID NO: 89305 - protein, 9 aa, Homo sapiens
  misc_feature: Table A; Target 89305; HLA-C*03:04; TRPM1; ENSG00000134160; TAA
FILADNGTL

SEQ ID NO: 89306 - protein, 9 aa, Homo sapiens
  misc_feature: Table A; Target 89306; HLA-C*05:01; TRPM1; ENSG00000134160; TAA
FILADNGTL

SEQ ID NO: 89307 - protein, 9 aa, Homo sapiens
  misc_feature: Table A; Target 89307; HLA-C*14:02; TRPM1; ENSG00000134160; TAA
FILADNGTL

SEQ ID NO: 89308 - protein, 10 aa, Homo sapiens
  misc_feature: Table A; Target 89308; HLA-A*02:01; TRPM1; ENSG00000134160; TAA
FLSDEELKRL

SEQ ID NO: 89309 - protein, 10 aa, Homo sapiens
  misc_feature: Table A; Target 89309; HLA-A*02:03; TRPM1; ENSG00000134160; TAA
FLSDEELKRL

SEQ ID NO: 89310 - protein, 10 aa, Homo sapiens
  misc_feature: Table A; Target 89310; HLA-A*02:04; TRPM1; ENSG00000134160; TAA
FLSDEELKRL

SEQ ID NO: 89311 - protein, 10 aa, Homo sapiens
  misc_feature: Table A; Target 89311; HLA-A*02:03; TRPM1; ENSG00000134160; TAA
FLTIPRLEEL

SEQ ID NO: 89312 - protein, 10 aa, Homo sapiens
  misc_feature: Table A; Target 89312; HLA-A*02:04; TRPM1; ENSG00000134160; TAA
FLTIPRLEEL

SEQ ID NO: 89313 - protein, 11 aa, Homo sapiens
  misc_feature: Table A; Target 89313; HLA-A*01:01; TRPM1; ENSG00000134160; TAA
FLTIPRLEELY

SEQ ID NO: 89314 - protein, 11 aa, Homo sapiens
  misc_feature: Table A; Target 89314; HLA-A*29:02; TRPM1; ENSG00000134160; TAA
FLTIPRLEELY

SEQ ID NO: 89315 - protein, 10 aa, Homo sapiens
  misc_feature: Table A; Target 89315; HLA-A*02:01; TRPM1; ENSG00000134160; TAA
FLWQRGEESM

SEQ ID NO: 89316 - protein, 9 aa, Homo sapiens
  misc_feature: Table A; Target 89316; HLA-A*02:01; TRPM1; ENSG00000134160; TAA
FMIGAILRL

SEQ ID NO: 89317 - protein, 9 aa, Homo sapiens
  misc_feature: Table A; Target 89317; HLA-A*02:03; TRPM1; ENSG00000134160; TAA
FMIGAILRL

SEQ ID NO: 89318 - protein, 9 aa, Homo sapiens
  misc_feature: Table A; Target 89318; HLA-A*02:04; TRPM1; ENSG00000134160; TAA
FMIGAILRL

SEQ ID NO: 89319 - protein, 9 aa, Homo sapiens
  misc_feature: Table A; Target 89319; HLA-A*02:07; TRPM1; ENSG00000134160; TAA
FMIGAILRL

SEQ ID NO: 89320 - protein, 9 aa, Homo sapiens
  misc_feature: Table A; Target 89320; HLA-A*23:01; TRPM1; ENSG00000134160; TAA
FMIGAILRL

SEQ ID NO: 89321 - protein, 9 aa, Homo sapiens
  misc_feature: Table A; Target 89321; HLA-A*29:02; TRPM1; ENSG00000134160; TAA
FMIGAILRL

SEQ ID NO: 89322 - protein, 9 aa, Homo sapiens
  misc_feature: Table A; Target 89322; HLA-C*02:02; TRPM1; ENSG00000134160; TAA
FMIGAILRL

SEQ ID NO: 89323 - protein, 9 aa, Homo sapiens
  misc_feature: Table A; Target 89323; HLA-A*02:01; TRPM1; ENSG00000134160; TAA
FMKTSLQTV

SEQ ID NO: 89324 - protein, 9 aa, Homo sapiens
  misc_feature: Table A; Target 89324; HLA-A*02:03; TRPM1; ENSG00000134160; TAA
FMKTSLQTV

SEQ ID NO: 89325 - protein, 9 aa, Homo sapiens
  misc_feature: Table A; Target 89325; HLA-B*08:01; TRPM1; ENSG00000134160; TAA
FMKTSLQTV

SEQ ID NO: 89326 - protein, 9 aa, Homo sapiens
  misc_feature: Table A; Target 89326; HLA-B*46:01; TRPM1; ENSG00000134160; TAA
FMKTSLQTV

SEQ ID NO: 89327 - protein, 9 aa, Homo sapiens
  misc_feature: Table A; Target 89327; HLA-B*55:01; TRPM1; ENSG00000134160; TAA
FMKTSLQTV

SEQ ID NO: 89328 - protein, 8 aa, Homo sapiens
  misc_feature: Table A; Target 89328; HLA-B*35:03; TRPM1; ENSG00000134160; TAA
FPDETINA

SEQ ID NO: 89329 - protein, 8 aa, Homo sapiens
  misc_feature: Table A; Target 89329; HLA-B*54:01; TRPM1; ENSG00000134160; TAA
FPDETINA

SEQ ID NO: 89330 - protein, 8 aa, Homo sapiens
  misc_feature: Table A; Target 89330; HLA-B*55:01; TRPM1; ENSG00000134160; TAA
FPDETINA

SEQ ID NO: 89331 - protein, 8 aa, Homo sapiens
  misc_feature: Table A; Target 89331; HLA-B*56:01; TRPM1; ENSG00000134160; TAA
FPDETINA

SEQ ID NO: 89332 - protein, 8 aa, Homo sapiens
  misc_feature: Table A; Target 89332; HLA-C*05:01; TRPM1; ENSG00000134160; TAA
FPDETINA

SEQ ID NO: 89333 - protein, 9 aa, Homo sapiens
  misc_feature: Table A; Target 89333; HLA-B*07:02; TRPM1; ENSG00000134160; TAA
FPDETINAC

SEQ ID NO: 89334 - protein, 9 aa, Homo sapiens
  misc_feature: Table A; Target 89334; HLA-B*35:01; TRPM1; ENSG00000134160; TAA
FPDETINAC

SEQ ID NO: 89335 - protein, 9 aa, Homo sapiens
  misc_feature: Table A; Target 89335; HLA-B*35:03; TRPM1; ENSG00000134160; TAA
FPDETINAC

SEQ ID NO: 89336 - protein, 9 aa, Homo sapiens
  misc_feature: Table A; Target 89336; HLA-B*39:01; TRPM1; ENSG00000134160; TAA
FPDETINAC

SEQ ID NO: 89337 - protein, 9 aa, Homo sapiens
  misc_feature: Table A; Target 89337; HLA-B*54:01; TRPM1; ENSG00000134160; TAA
FPDETINAC

SEQ ID NO: 89338 - protein, 9 aa, Homo sapiens
  misc_feature: Table A; Target 89338; HLA-B*55:01; TRPM1; ENSG00000134160; TAA
FPDETINAC

SEQ ID NO: 89339 - protein, 9 aa, Homo sapiens
  misc_feature: Table A; Target 89339; HLA-B*56:01; TRPM1; ENSG00000134160; TAA
FPDETINAC

SEQ ID NO: 89340 - protein, 9 aa, Homo sapiens
  misc_feature: Table A; Target 89340; HLA-C*03:03; TRPM1; ENSG00000134160; TAA
FPDETINAC

SEQ ID NO: 89341 - protein, 9 aa, Homo sapiens
  misc_feature: Table A; Target 89341; HLA-C*05:01; TRPM1; ENSG00000134160; TAA
FPDETINAC

SEQ ID NO: 89342 - protein, 10 aa, Homo sapiens
  misc_feature: Table A; Target 89342; HLA-A*01:01; TRPM1; ENSG00000134160; TAA
FPDETINACK

SEQ ID NO: 89343 - protein, 10 aa, Homo sapiens
  misc_feature: Table A; Target 89343; HLA-B*27:02; TRPM1; ENSG00000134160; TAA
FPDETINACK

SEQ ID NO: 89344 - protein, 10 aa, Homo sapiens
  misc_feature: Table A; Target 89344; HLA-B*35:01; TRPM1; ENSG00000134160; TAA
FPDETINACK

SEQ ID NO: 89345 - protein, 10 aa, Homo sapiens
  misc_feature: Table A; Target 89345; HLA-B*35:03; TRPM1; ENSG00000134160; TAA
FPDETINACK

SEQ ID NO: 89346 - protein, 10 aa, Homo sapiens
  misc_feature: Table A; Target 89346; HLA-B*54:01; TRPM1; ENSG00000134160; TAA
FPDETINACK

SEQ ID NO: 89347 - protein, 10 aa, Homo sapiens
  misc_feature: Table A; Target 89347; HLA-B*55:01; TRPM1; ENSG00000134160; TAA
FPDETINACK

SEQ ID NO: 89348 - protein, 10 aa, Homo sapiens
  misc_feature: Table A; Target 89348; HLA-B*56:01; TRPM1; ENSG00000134160; TAA
FPDETINACK

SEQ ID NO: 89349 - protein, 9 aa, Homo sapiens
  misc_feature: Table A; Target 89349; HLA-B*07:02; TRPM1; ENSG00000134160; TAA
FPSLRSKSL

SEQ ID NO: 89350 - protein, 9 aa, Homo sapiens
  misc_feature: Table A; Target 89350; HLA-B*08:01; TRPM1; ENSG00000134160; TAA
FPSLRSKSL

SEQ ID NO: 89351 - protein, 9 aa, Homo sapiens
  misc_feature: Table A; Target 89351; HLA-C*07:02; TRPM1; ENSG00000134160; TAA
FPSLRSKSL

SEQ ID NO: 89352 - protein, 9 aa, Homo sapiens
  misc_feature: Table A; Target 89352; HLA-C*07:04; TRPM1; ENSG00000134160; TAA
FQGGGYSNK

SEQ ID NO: 89353 - protein, 8 aa, Homo sapiens
  misc_feature: Table A; Target 89353; HLA-A*02:04; TRPM1; ENSG00000134160; TAA
FQYPFHEL

SEQ ID NO: 89354 - protein, 8 aa, Homo sapiens
  misc_feature: Table A; Target 89354; HLA-A*30:01; TRPM1; ENSG00000134160; TAA
FQYPFHEL

SEQ ID NO: 89355 - protein, 8 aa, Homo sapiens
  misc_feature: Table A; Target 89355; HLA-B*13:02; TRPM1; ENSG00000134160; TAA
FQYPFHEL

SEQ ID NO: 89356 - protein, 8 aa, Homo sapiens
  misc_feature: Table A; Target 89356; HLA-B*15:03; TRPM1; ENSG00000134160; TAA
FQYPFHEL

SEQ ID NO: 89357 - protein, 8 aa, Homo sapiens
  misc_feature: Table A; Target 89357; HLA-B*37:01; TRPM1; ENSG00000134160; TAA
FQYPFHEL

SEQ ID NO: 89358 - protein, 8 aa, Homo sapiens
  misc_feature: Table A; Target 89358; HLA-C*02:02; TRPM1; ENSG00000134160; TAA
FQYPFHEL

SEQ ID NO: 89359 - protein, 8 aa, Homo sapiens
  misc_feature: Table A; Target 89359; HLA-C*03:03; TRPM1; ENSG00000134160; TAA
FQYPFHEL

SEQ ID NO: 89360 - protein, 8 aa, Homo sapiens
  misc_feature: Table A; Target 89360; HLA-C*03:04; TRPM1; ENSG00000134160; TAA
FQYPFHEL

SEQ ID NO: 89361 - protein, 9 aa, Homo sapiens
  misc_feature: Table A; Target 89361; HLA-B*15:03; TRPM1; ENSG00000134160; TAA
FQYPFHELM

SEQ ID NO: 89362 - protein, 9 aa, Homo sapiens
  misc_feature: Table A; Target 89362; HLA-C*02:02; TRPM1; ENSG00000134160; TAA
FQYPFHELM

SEQ ID NO: 89363 - protein, 10 aa, Homo sapiens
  misc_feature: Table A; Target 89363; HLA-A*02:03; TRPM1; ENSG00000134160; TAA
FQYPFHELMV

SEQ ID NO: 89364 - protein, 9 aa, Homo sapiens
  misc_feature: Table A; Target 89364; HLA-A*02:03; TRPM1; ENSG00000134160; TAA
FTGGVSTGV

SEQ ID NO: 89365 - protein, 9 aa, Homo sapiens
  misc_feature: Table A; Target 89365; HLA-A*26:01; TRPM1; ENSG00000134160; TAA
FTGGVSTGV

SEQ ID NO: 89366 - protein, 9 aa, Homo sapiens
  misc_feature: Table A; Target 89366; HLA-A*68:02; TRPM1; ENSG00000134160; TAA
FTGGVSTGV

SEQ ID NO: 89367 - protein, 9 aa, Homo sapiens
  misc_feature: Table A; Target 89367; HLA-B*13:02; TRPM1; ENSG00000134160; TAA
FTGGVSTGV

SEQ ID NO: 89368 - protein, 9 aa, Homo sapiens
  misc_feature: Table A; Target 89368; HLA-A*02:04; TRPM1; ENSG00000134160; TAA
FTNQHIPPL

SEQ ID NO: 89369 - protein, 9 aa, Homo sapiens
  misc_feature: Table A; Target 89369; HLA-A*25:01; TRPM1; ENSG00000134160; TAA
FTNQHIPPL

SEQ ID NO: 89370 - protein, 9 aa, Homo sapiens
  misc_feature: Table A; Target 89370; HLA-A*26:01; TRPM1; ENSG00000134160; TAA
FTNQHIPPL

SEQ ID NO: 89371 - protein, 9 aa, Homo sapiens
  misc_feature: Table A; Target 89371; HLA-A*68:02; TRPM1; ENSG00000134160; TAA
FTNQHIPPL

SEQ ID NO: 89372 - protein, 9 aa, Homo sapiens
  misc_feature: Table A; Target 89372; HLA-B*46:01; TRPM1; ENSG00000134160; TAA
FTNQHIPPL

SEQ ID NO: 89373 - protein, 9 aa, Homo sapiens
  misc_feature: Table A; Target 89373; HLA-C*03:03; TRPM1; ENSG00000134160; TAA
FTNQHIPPL

SEQ ID NO: 89374 - protein, 9 aa, Homo sapiens
  misc_feature: Table A; Target 89374; HLA-C*03:04; TRPM1; ENSG00000134160; TAA
FTNQHIPPL

SEQ ID NO: 89375 - protein, 9 aa, Homo sapiens
  misc_feature: Table A; Target 89375; HLA-C*07:04; TRPM1; ENSG00000134160; TAA
FTNQHIPPL

SEQ ID NO: 89376 - protein, 9 aa, Homo sapiens
  misc_feature: Table A; Target 89376; HLA-C*16:01; TRPM1; ENSG00000134160; TAA
FTNQHIPPL

SEQ ID NO: 89377 - protein, 9 aa, Homo sapiens
  misc_feature: Table A; Target 89377; HLA-A*29:02; TRPM1; ENSG00000134160; TAA
FYMPYWMIY

SEQ ID NO: 89378 - protein, 9 aa, Homo sapiens
  misc_feature: Table A; Target 89378; HLA-A*23:01; TRPM1; ENSG00000134160; TAA
FYNAPIVKF

SEQ ID NO: 89379 - protein, 9 aa, Homo sapiens
  misc_feature: Table A; Target 89379; HLA-A*24:02; TRPM1; ENSG00000134160; TAA
FYNAPIVKF

SEQ ID NO: 89380 - protein, 9 aa, Homo sapiens
  misc_feature: Table A; Target 89380; HLA-A*29:02; TRPM1; ENSG00000134160; TAA
FYNAPIVKF

SEQ ID NO: 89381 - protein, 9 aa, Homo sapiens
  misc_feature: Table A; Target 89381; HLA-A*29:02; TRPM1; ENSG00000134160; TAA
FYTISYLGY

SEQ ID NO: 89382 - protein, 11 aa, Homo sapiens
  misc_feature: Table A; Target 89382; HLA-A*30:01; TRPM1; ENSG00000134160; TAA
GEELLFEDTSL

SEQ ID NO: 89383 - protein, 11 aa, Homo sapiens
  misc_feature: Table A; Target 89383; HLA-B*40:01; TRPM1; ENSG00000134160; TAA
GEELLFEDTSL

SEQ ID NO: 89384 - protein, 9 aa, Homo sapiens
  misc_feature: Table A; Target 89384; HLA-A*30:01; TRPM1; ENSG00000134160; TAA
GEESMAKAL

SEQ ID NO: 89385 - protein, 9 aa, Homo sapiens
  misc_feature: Table A; Target 89385; HLA-B*18:01; TRPM1; ENSG00000134160; TAA
GEESMAKAL

SEQ ID NO: 89386 - protein, 9 aa, Homo sapiens
  misc_feature: Table A; Target 89386; HLA-B*40:01; TRPM1; ENSG00000134160; TAA
GEESMAKAL

SEQ ID NO: 89387 - protein, 9 aa, Homo sapiens
  misc_feature: Table A; Target 89387; HLA-B*40:02; TRPM1; ENSG00000134160; TAA
GEESMAKAL

SEQ ID NO: 89388 - protein, 9 aa, Homo sapiens
  misc_feature: Table A; Target 89388; HLA-B*44:02; TRPM1; ENSG00000134160; TAA
GEESMAKAL

SEQ ID NO: 89389 - protein, 9 aa, Homo sapiens
  misc_feature: Table A; Target 89389; HLA-B*44:03; TRPM1; ENSG00000134160; TAA
GEESMAKAL

SEQ ID NO: 89390 - protein, 9 aa, Homo sapiens
  misc_feature: Table A; Target 89390; HLA-B*49:01; TRPM1; ENSG00000134160; TAA
GEESMAKAL

SEQ ID NO: 89391 - protein, 10 aa, Homo sapiens
  misc_feature: Table A; Target 89391; HLA-B*40:01; TRPM1; ENSG00000134160; TAA
GEESMAKALV

SEQ ID NO: 89392 - protein, 10 aa, Homo sapiens
  misc_feature: Table A; Target 89392; HLA-B*49:01; TRPM1; ENSG00000134160; TAA
GEESMAKALV

SEQ ID NO: 89393 - protein, 11 aa, Homo sapiens
  misc_feature: Table A; Target 89393; HLA-A*30:01; TRPM1; ENSG00000134160; TAA
GEESMAKALVA

SEQ ID NO: 89394 - protein, 11 aa, Homo sapiens
  misc_feature: Table A; Target 89394; HLA-B*40:01; TRPM1; ENSG00000134160; TAA
GEESMAKALVA

SEQ ID NO: 89395 - protein, 11 aa, Homo sapiens
  misc_feature: Table A; Target 89395; HLA-B*49:01; TRPM1; ENSG00000134160; TAA
GEESMAKALVA

SEQ ID NO: 89396 - protein, 10 aa, Homo sapiens
  misc_feature: Table A; Target 89396; HLA-B*27:02; TRPM1; ENSG00000134160; TAA
GENLYDEEGK

SEQ ID NO: 89397 - protein, 8 aa, Homo sapiens
  misc_feature: Table A; Target 89397; HLA-A*30:01; TRPM1; ENSG00000134160; TAA
GEVFADQI

SEQ ID NO: 89398 - protein, 8 aa, Homo sapiens
  misc_feature: Table A; Target 89398; HLA-B*40:01; TRPM1; ENSG00000134160; TAA
GEVFADQI

SEQ ID NO: 89399 - protein, 8 aa, Homo sapiens
  misc_feature: Table A; Target 89399; HLA-B*49:01; TRPM1; ENSG00000134160; TAA
GEVFADQI

SEQ ID NO: 89400 - protein, 10 aa, Homo sapiens
  misc_feature: Table A; Target 89400; HLA-A*30:01; TRPM1; ENSG00000134160; TAA
GEVFADQIDL

SEQ ID NO: 89401 - protein, 10 aa, Homo sapiens
  misc_feature: Table A; Target 89401; HLA-B*40:01; TRPM1; ENSG00000134160; TAA
GEVFADQIDL

SEQ ID NO: 89402 - protein, 11 aa, Homo sapiens
  misc_feature: Table A; Target 89402; HLA-B*44:02; TRPM1; ENSG00000134160; TAA
GEVFADQIDLY

SEQ ID NO: 89403 - protein, 11 aa, Homo sapiens
  misc_feature: Table A; Target 89403; HLA-B*44:03; TRPM1; ENSG00000134160; TAA
GEVFADQIDLY

SEQ ID NO: 89404 - protein, 9 aa, Homo sapiens
  misc_feature: Table A; Target 89404; HLA-B*15:01; TRPM1; ENSG00000134160; TAA
GGVNQDVEY

SEQ ID NO: 89405 - protein, 9 aa, Homo sapiens
  misc_feature: Table A; Target 89405; HLA-B*15:03; TRPM1; ENSG00000134160; TAA
GGVNQDVEY

SEQ ID NO: 89406 - protein, 9 aa, Homo sapiens
  misc_feature: Table A; Target 89406; HLA-B*35:01; TRPM1; ENSG00000134160; TAA
GGVNQDVEY

SEQ ID NO: 89407 - protein, 9 aa, Homo sapiens
  misc_feature: Table A; Target 89407; HLA-B*46:01; TRPM1; ENSG00000134160; TAA
GGVNQDVEY

SEQ ID NO: 89408 - protein, 9 aa, Homo sapiens
  misc_feature: Table A; Target 89408; HLA-A*30:02; TRPM1; ENSG00000134160; TAA
GGYSNKAMY

SEQ ID NO: 89409 - protein, 9 aa, Homo sapiens
  misc_feature: Table A; Target 89409; HLA-B*15:01; TRPM1; ENSG00000134160; TAA
GGYSNKAMY

SEQ ID NO: 89410 - protein, 9 aa, Homo sapiens
  misc_feature: Table A; Target 89410; HLA-B*15:03; TRPM1; ENSG00000134160; TAA
GGYSNKAMY

SEQ ID NO: 89411 - protein, 9 aa, Homo sapiens
  misc_feature: Table A; Target 89411; HLA-B*46:01; TRPM1; ENSG00000134160; TAA
GGYSNKAMY

SEQ ID NO: 89412 - protein, 9 aa, Homo sapiens
  misc_feature: Table A; Target 89412; HLA-C*02:02; TRPM1; ENSG00000134160; TAA
GGYSNKAMY

SEQ ID NO: 89413 - protein, 9 aa, Homo sapiens
  misc_feature: Table A; Target 89413; HLA-B*27:05; TRPM1; ENSG00000134160; TAA
GHASSVSSL

SEQ ID NO: 89414 - protein, 9 aa, Homo sapiens
  misc_feature: Table A; Target 89414; HLA-B*38:01; TRPM1; ENSG00000134160; TAA
GHASSVSSL

SEQ ID NO: 89415 - protein, 9 aa, Homo sapiens
  misc_feature: Table A; Target 89415; HLA-B*39:01; TRPM1; ENSG00000134160; TAA
GHASSVSSL

SEQ ID NO: 89416 - protein, 11 aa, Homo sapiens
  misc_feature: Table A; Target 89416; HLA-B*38:01; TRPM1; ENSG00000134160; TAA
GHASSVSSLVI

SEQ ID NO: 89417 - protein, 11 aa, Homo sapiens
  misc_feature: Table A; Target 89417; HLA-A*03:02; TRPM1; ENSG00000134160; TAA
GIAPWGIVENK

SEQ ID NO: 89418 - protein, 11 aa, Homo sapiens
  misc_feature: Table A; Target 89418; HLA-A*31:01; TRPM1; ENSG00000134160; TAA
GIDRSDLIQAR

SEQ ID NO: 89419 - protein, 11 aa, Homo sapiens
  misc_feature: Table A; Target 89419; HLA-A*02:04; TRPM1; ENSG00000134160; TAA
GILLPPTILFL

SEQ ID NO: 89420 - protein, 8 aa, Homo sapiens
  misc_feature: Table A; Target 89420; HLA-B*15:03; TRPM1; ENSG00000134160; TAA
GKDVTRVY

SEQ ID NO: 89421 - protein, 8 aa, Homo sapiens
  misc_feature: Table A; Target 89421; HLA-C*04:01; TRPM1; ENSG00000134160; TAA
GKKKKKKK

SEQ ID NO: 89422 - protein, 9 aa, Homo sapiens
  misc_feature: Table A; Target 89422; HLA-B*15:03; TRPM1; ENSG00000134160; TAA
GKYGAEVKL

SEQ ID NO: 89423 - protein, 10 aa, Homo sapiens
  misc_feature: Table A; Target 89423; HLA-A*03:01; TRPM1; ENSG00000134160; TAA
GLQNFEMQPK

SEQ ID NO: 89424 - protein, 10 aa, Homo sapiens
  misc_feature: Table A; Target 89424; HLA-A*03:02; TRPM1; ENSG00000134160; TAA
GLQNFEMQPK

SEQ ID NO: 89425 - protein, 10 aa, Homo sapiens
  misc_feature: Table A; Target 89425; HLA-A*11:01; TRPM1; ENSG00000134160; TAA
GLQNFEMQPK

SEQ ID NO: 89426 - protein, 11 aa, Homo sapiens
  misc_feature: Table A; Target 89426; HLA-A*02:04; TRPM1; ENSG00000134160; TAA
GLQNFEMQPKL

SEQ ID NO: 89427 - protein, 11 aa, Homo sapiens
  misc_feature: Table A; Target 89427; HLA-A*02:03; TRPM1; ENSG00000134160; TAA
GLVVEGGPNVV

SEQ ID NO: 89428 - protein, 9 aa, Homo sapiens
  misc_feature: Table A; Target 89428; HLA-B*55:01; TRPM1; ENSG00000134160; TAA
GMTAEEKKV

SEQ ID NO: 89429 - protein, 10 aa, Homo sapiens
  misc_feature: Table A; Target 89429; HLA-B*07:02; TRPM1; ENSG00000134160; TAA
GPHWPPLGSL

SEQ ID NO: 89430 - protein, 9 aa, Homo sapiens
  misc_feature: Table A; Target 89430; HLA-B*07:02; TRPM1; ENSG00000134160; TAA
GPNVVSIVL

SEQ ID NO: 89431 - protein, 9 aa, Homo sapiens
  misc_feature: Table A; Target 89431; HLA-B*35:01; TRPM1; ENSG00000134160; TAA
GPNVVSIVL

SEQ ID NO: 89432 - protein, 9 aa, Homo sapiens
  misc_feature: Table A; Target 89432; HLA-B*35:03; TRPM1; ENSG00000134160; TAA
GPNVVSIVL

SEQ ID NO: 89433 - protein, 9 aa, Homo sapiens
  misc_feature: Table A; Target 89433; HLA-B*56:01; TRPM1; ENSG00000134160; TAA
GPNVVSIVL

SEQ ID NO: 89434 - protein, 9 aa, Homo sapiens
  misc_feature: Table A; Target 89434; HLA-C*07:02; TRPM1; ENSG00000134160; TAA
GPNVVSIVL

SEQ ID NO: 89435 - protein, 11 aa, Homo sapiens
  misc_feature: Table A; Target 89435; HLA-A*29:02; TRPM1; ENSG00000134160; TAA
GPNVVSIVLEY

SEQ ID NO: 89436 - protein, 11 aa, Homo sapiens
  misc_feature: Table A; Target 89436; HLA-A*30:02; TRPM1; ENSG00000134160; TAA
GPNVVSIVLEY

SEQ ID NO: 89437 - protein, 11 aa, Homo sapiens
  misc_feature: Table A; Target 89437; HLA-B*35:01; TRPM1; ENSG00000134160; TAA
GPNVVSIVLEY

SEQ ID NO: 89438 - protein, 8 aa, Homo sapiens
  misc_feature: Table A; Target 89438; HLA-B*13:02; TRPM1; ENSG00000134160; TAA
GQFTNQHI

SEQ ID NO: 89439 - protein, 9 aa, Homo sapiens
  misc_feature: Table A; Target 89439; HLA-B*13:02; TRPM1; ENSG00000134160; TAA
GQGVPLVGL

SEQ ID NO: 89440 - protein, 9 aa, Homo sapiens
  misc_feature: Table A; Target 89440; HLA-B*15:01; TRPM1; ENSG00000134160; TAA
GQGVPLVGL

SEQ ID NO: 89441 - protein, 9 aa, Homo sapiens
  misc_feature: Table A; Target 89441; HLA-B*15:03; TRPM1; ENSG00000134160; TAA
GQGVPLVGL

SEQ ID NO: 89442 - protein, 9 aa, Homo sapiens
  misc_feature: Table A; Target 89442; HLA-B*27:05; TRPM1; ENSG00000134160; TAA
GQGVPLVGL

SEQ ID NO: 89443 - protein, 9 aa, Homo sapiens
  misc_feature: Table A; Target 89443; HLA-B*39:01; TRPM1; ENSG00000134160; TAA
GQGVPLVGL

SEQ ID NO: 89444 - protein, 11 aa, Homo sapiens
  misc_feature: Table A; Target 89444; HLA-B*13:02; TRPM1; ENSG00000134160; TAA
GQGVPLVGLVV

SEQ ID NO: 89445 - protein, 9 aa, Homo sapiens
  misc_feature: Table A; Target 89445; HLA-A*30:01; TRPM1; ENSG00000134160; TAA
GQQDIEMAI

SEQ ID NO: 89446 - protein, 9 aa, Homo sapiens
  misc_feature: Table A; Target 89446; HLA-B*13:02; TRPM1; ENSG00000134160; TAA
GQQDIEMAI

SEQ ID NO: 89447 - protein, 9 aa, Homo sapiens
  misc_feature: Table A; Target 89447; HLA-B*27:05; TRPM1; ENSG00000134160; TAA
GQQDIEMAI

SEQ ID NO: 89448 - protein, 9 aa, Homo sapiens
  misc_feature: Table A; Target 89448; HLA-B*39:01; TRPM1; ENSG00000134160; TAA
GQQDIEMAI

SEQ ID NO: 89449 - protein, 9 aa, Homo sapiens
  misc_feature: Table A; Target 89449; HLA-C*06:02; TRPM1; ENSG00000134160; TAA
GQQDIEMAI

SEQ ID NO: 89450 - protein, 9 aa, Homo sapiens
  misc_feature: Table A; Target 89450; HLA-B*27:02; TRPM1; ENSG00000134160; TAA
GRASDILSF

SEQ ID NO: 89451 - protein, 9 aa, Homo sapiens
  misc_feature: Table A; Target 89451; HLA-B*27:05; TRPM1; ENSG00000134160; TAA
GRASDILSF

SEQ ID NO: 89452 - protein, 9 aa, Homo sapiens
  misc_feature: Table A; Target 89452; HLA-B*38:01; TRPM1; ENSG00000134160; TAA
GRASDILSF

SEQ ID NO: 89453 - protein, 9 aa, Homo sapiens
  misc_feature: Table A; Target 89453; HLA-C*16:04; TRPM1; ENSG00000134160; TAA
GRASDILSF

SEQ ID NO: 89454 - protein, 10 aa, Homo sapiens
  misc_feature: Table A; Target 89454; HLA-A*03:02; TRPM1; ENSG00000134160; TAA
GSLAPPTDSK

SEQ ID NO: 89455 - protein, 10 aa, Homo sapiens
  misc_feature: Table A; Target 89455; HLA-A*11:01; TRPM1; ENSG00000134160; TAA
GSLAPPTDSK

SEQ ID NO: 89456 - protein, 11 aa, Homo sapiens
  misc_feature: Table A; Target 89456; HLA-A*11:01; TRPM1; ENSG00000134160; TAA
GTISYPLEETK

SEQ ID NO: 89457 - protein, 11 aa, Homo sapiens
  misc_feature: Table A; Target 89457; HLA-B*27:02; TRPM1; ENSG00000134160; TAA
GTISYPLEETK

SEQ ID NO: 89458 - protein, 11 aa, Homo sapiens
  misc_feature: Table A; Target 89458; HLA-A*03:02; TRPM1; ENSG00000134160; TAA
GTLGKYGAEVK

SEQ ID NO: 89459 - protein, 11 aa, Homo sapiens
  misc_feature: Table A; Target 89459; HLA-A*11:01; TRPM1; ENSG00000134160; TAA
GTLGKYGAEVK

SEQ ID NO: 89460 - protein, 10 aa, Homo sapiens
  misc_feature: Table A; Target 89460; HLA-B*39:01; TRPM1; ENSG00000134160; TAA
GTNVSAPDQL

SEQ ID NO: 89461 - protein, 9 aa, Homo sapiens
  misc_feature: Table A; Target 89461; HLA-A*03:01; TRPM1; ENSG00000134160; TAA
GVARQAILH

SEQ ID NO: 89462 - protein, 9 aa, Homo sapiens
  misc_feature: Table A; Target 89462; HLA-A*03:02; TRPM1; ENSG00000134160; TAA
GVARQAILH

SEQ ID NO: 89463 - protein, 10 aa, Homo sapiens
  misc_feature: Table A; Target 89463; HLA-A*25:01; TRPM1; ENSG00000134160; TAA
GVISHVGDAL

SEQ ID NO: 89464 - protein, 10 aa, Homo sapiens
  misc_feature: Table A; Target 89464; HLA-A*26:01; TRPM1; ENSG00000134160; TAA
GVISHVGDAL

SEQ ID NO: 89465 - protein, 10 aa, Homo sapiens
  misc_feature: Table A; Target 89465; HLA-A*30:01; TRPM1; ENSG00000134160; TAA
GVISHVGDAL

SEQ ID NO: 89466 - protein, 10 aa, Homo sapiens
  misc_feature: Table A; Target 89466; HLA-B*07:02; TRPM1; ENSG00000134160; TAA
GVISHVGDAL

SEQ ID NO: 89467 - protein, 10 aa, Homo sapiens
  misc_feature: Table A; Target 89467; HLA-B*15:01; TRPM1; ENSG00000134160; TAA
GVISHVGDAL

SEQ ID NO: 89468 - protein, 10 aa, Homo sapiens
  misc_feature: Table A; Target 89468; HLA-B*27:05; TRPM1; ENSG00000134160; TAA
GVISHVGDAL

SEQ ID NO: 89469 - protein, 10 aa, Homo sapiens
  misc_feature: Table A; Target 89469; HLA-B*40:01; TRPM1; ENSG00000134160; TAA
GVISHVGDAL

SEQ ID NO: 89470 - protein, 11 aa, Homo sapiens
  misc_feature: Table A; Target 89470; HLA-A*03:02; TRPM1; ENSG00000134160; TAA
GVISHVGDALK

SEQ ID NO: 89471 - protein, 11 aa, Homo sapiens
  misc_feature: Table A; Target 89471; HLA-A*11:01; TRPM1; ENSG00000134160; TAA
GVISHVGDALK

SEQ ID NO: 89472 - protein, 10 aa, Homo sapiens
  misc_feature: Table A; Target 89472; HLA-A*25:01; TRPM1; ENSG00000134160; TAA
GVLEFQGGGY

SEQ ID NO: 89473 - protein, 10 aa, Homo sapiens
  misc_feature: Table A; Target 89473; HLA-A*26:01; TRPM1; ENSG00000134160; TAA
GVLEFQGGGY

SEQ ID NO: 89474 - protein, 10 aa, Homo sapiens
  misc_feature: Table A; Target 89474; HLA-A*29:02; TRPM1; ENSG00000134160; TAA
GVLEFQGGGY

SEQ ID NO: 89475 - protein, 10 aa, Homo sapiens
  misc_feature: Table A; Target 89475; HLA-A*30:02; TRPM1; ENSG00000134160; TAA
GVLEFQGGGY

SEQ ID NO: 89476 - protein, 10 aa, Homo sapiens
  misc_feature: Table A; Target 89476; HLA-B*15:01; TRPM1; ENSG00000134160; TAA
GVLEFQGGGY

SEQ ID NO: 89477 - protein, 10 aa, Homo sapiens
  misc_feature: Table A; Target 89477; HLA-B*15:03; TRPM1; ENSG00000134160; TAA
GVLEFQGGGY

SEQ ID NO: 89478 - protein, 10 aa, Homo sapiens
  misc_feature: Table A; Target 89478; HLA-B*39:01; TRPM1; ENSG00000134160; TAA
GVLEFQGGGY

SEQ ID NO: 89479 - protein, 10 aa, Homo sapiens
  misc_feature: Table A; Target 89479; HLA-C*07:04; TRPM1; ENSG00000134160; TAA
GVLEFQGGGY

SEQ ID NO: 89480 - protein, 10 aa, Homo sapiens
  misc_feature: Table A; Target 89480; HLA-C*16:04; TRPM1; ENSG00000134160; TAA
GVLEFQGGGY

SEQ ID NO: 89481 - protein, 9 aa, Homo sapiens
  misc_feature: Table A; Target 89481; HLA-A*29:02; TRPM1; ENSG00000134160; TAA
GVNKYLGPY

SEQ ID NO: 89482 - protein, 9 aa, Homo sapiens
  misc_feature: Table A; Target 89482; HLA-A*30:02; TRPM1; ENSG00000134160; TAA
GVNKYLGPY

SEQ ID NO: 89483 - protein, 8 aa, Homo sapiens
  misc_feature: Table A; Target 89483; HLA-A*30:02; TRPM1; ENSG00000134160; TAA
GVNQDVEY

SEQ ID NO: 89484 - protein, 8 aa, Homo sapiens
  misc_feature: Table A; Target 89484; HLA-B*15:01; TRPM1; ENSG00000134160; TAA
GVNQDVEY

SEQ ID NO: 89485 - protein, 9 aa, Homo sapiens
  misc_feature: Table A; Target 89485; HLA-A*02:07; TRPM1; ENSG00000134160; TAA
GVPLVGLVV

SEQ ID NO: 89486 - protein, 9 aa, Homo sapiens
  misc_feature: Table A; Target 89486; HLA-B*13:02; TRPM1; ENSG00000134160; TAA
GVPLVGLVV

SEQ ID NO: 89487 - protein, 9 aa, Homo sapiens
  misc_feature: Table A; Target 89487; HLA-A*03:01; TRPM1; ENSG00000134160; TAA
GVSTGVISH

SEQ ID NO: 89488 - protein, 9 aa, Homo sapiens
  misc_feature: Table A; Target 89488; HLA-A*03:02; TRPM1; ENSG00000134160; TAA
GVSTGVISH

SEQ ID NO: 89489 - protein, 9 aa, Homo sapiens
  misc_feature: Table A; Target 89489; HLA-A*11:01; TRPM1; ENSG00000134160; TAA
GVSTGVISH

SEQ ID NO: 89490 - protein, 9 aa, Homo sapiens
  misc_feature: Table A; Target 89490; HLA-A*32:01; TRPM1; ENSG00000134160; TAA
GVSTGVISH

SEQ ID NO: 89491 - protein, 9 aa, Homo sapiens
  misc_feature: Table A; Target 89491; HLA-B*15:01; TRPM1; ENSG00000134160; TAA
GVSTGVISH

SEQ ID NO: 89492 - protein, 9 aa, Homo sapiens
  misc_feature: Table A; Target 89492; HLA-C*07:04; TRPM1; ENSG00000134160; TAA
GVSTGVISH

SEQ ID NO: 89493 - protein, 9 aa, Homo sapiens
  misc_feature: Table A; Target 89493; HLA-C*07:06; TRPM1; ENSG00000134160; TAA
GVSTGVISH

SEQ ID NO: 89494 - protein, 10 aa, Homo sapiens
  misc_feature: Table A; Target 89494; HLA-A*02:01; TRPM1; ENSG00000134160; TAA
GVSTGVISHV

SEQ ID NO: 89495 - protein, 10 aa, Homo sapiens
  misc_feature: Table A; Target 89495; HLA-A*02:03; TRPM1; ENSG00000134160; TAA
GVSTGVISHV

SEQ ID NO: 89496 - protein, 10 aa, Homo sapiens
  misc_feature: Table A; Target 89496; HLA-A*03:01; TRPM1; ENSG00000134160; TAA
GVSTGVISHV

SEQ ID NO: 89497 - protein, 10 aa, Homo sapiens
  misc_feature: Table A; Target 89497; HLA-A*26:01; TRPM1; ENSG00000134160; TAA
GVSTGVISHV

SEQ ID NO: 89498 - protein, 10 aa, Homo sapiens
  misc_feature: Table A; Target 89498; HLA-A*68:02; TRPM1; ENSG00000134160; TAA
GVSTGVISHV

SEQ ID NO: 89499 - protein, 10 aa, Homo sapiens
  misc_feature: Table A; Target 89499; HLA-B*13:02; TRPM1; ENSG00000134160; TAA
GVSTGVISHV

SEQ ID NO: 89500 - protein, 10 aa, Homo sapiens
  misc_feature: Table A; Target 89500; HLA-C*02:02; TRPM1; ENSG00000134160; TAA
GVSTGVISHV

SEQ ID NO: 89501 - protein, 10 aa, Homo sapiens
  misc_feature: Table A; Target 89501; HLA-C*16:02; TRPM1; ENSG00000134160; TAA
GVSTGVISHV

SEQ ID NO: 89502 - protein, 8 aa, Homo sapiens
  misc_feature: Table A; Target 89502; HLA-A*29:02; TRPM1; ENSG00000134160; TAA
GYLLLFNY

SEQ ID NO: 89503 - protein, 9 aa, Homo sapiens
  misc_feature: Table A; Target 89503; HLA-A*24:02; TRPM1; ENSG00000134160; TAA
GYSLYRYHF

SEQ ID NO: 89504 - protein, 9 aa, Homo sapiens
  misc_feature: Table A; Target 89504; HLA-A*24:02; TRPM1; ENSG00000134160; TAA
GYSNKAMYI

SEQ ID NO: 89505 - protein, 8 aa, Homo sapiens
  misc_feature: Table A; Target 89505; HLA-B*08:01; TRPM1; ENSG00000134160; TAA
HASSVSSL

SEQ ID NO: 89506 - protein, 8 aa, Homo sapiens
  misc_feature: Table A; Target 89506; HLA-B*35:01; TRPM1; ENSG00000134160; TAA
HASSVSSL

SEQ ID NO: 89507 - protein, 8 aa, Homo sapiens
  misc_feature: Table A; Target 89507; HLA-B*35:03; TRPM1; ENSG00000134160; TAA
HASSVSSL

SEQ ID NO: 89508 - protein, 8 aa, Homo sapiens
  misc_feature: Table A; Target 89508; HLA-B*37:01; TRPM1; ENSG00000134160; TAA
HASSVSSL

SEQ ID NO: 89509 - protein, 8 aa, Homo sapiens
  misc_feature: Table A; Target 89509; HLA-B*51:01; TRPM1; ENSG00000134160; TAA
HASSVSSL

SEQ ID NO: 89510 - protein, 8 aa, Homo sapiens
  misc_feature: Table A; Target 89510; HLA-C*01:02; TRPM1; ENSG00000134160; TAA
HASSVSSL

SEQ ID NO: 89511 - protein, 8 aa, Homo sapiens
  misc_feature: Table A; Target 89511; HLA-C*03:03; TRPM1; ENSG00000134160; TAA
HASSVSSL

SEQ ID NO: 89512 - protein, 8 aa, Homo sapiens
  misc_feature: Table A; Target 89512; HLA-C*03:04; TRPM1; ENSG00000134160; TAA
HASSVSSL

SEQ ID NO: 89513 - protein, 8 aa, Homo sapiens
  misc_feature: Table A; Target 89513; HLA-C*05:01; TRPM1; ENSG00000134160; TAA
HASSVSSL

SEQ ID NO: 89514 - protein, 8 aa, Homo sapiens
  misc_feature: Table A; Target 89514; HLA-C*12:03; TRPM1; ENSG00000134160; TAA
HASSVSSL

SEQ ID NO: 89515 - protein, 8 aa, Homo sapiens
  misc_feature: Table A; Target 89515; HLA-C*16:02; TRPM1; ENSG00000134160; TAA
HASSVSSL

SEQ ID NO: 89516 - protein, 9 aa, Homo sapiens
  misc_feature: Table A; Target 89516; HLA-A*68:01; TRPM1; ENSG00000134160; TAA
HASSVSSLV

SEQ ID NO: 89517 - protein, 9 aa, Homo sapiens
  misc_feature: Table A; Target 89517; HLA-A*68:02; TRPM1; ENSG00000134160; TAA
HASSVSSLV

SEQ ID NO: 89518 - protein, 9 aa, Homo sapiens
  misc_feature: Table A; Target 89518; HLA-B*13:02; TRPM1; ENSG00000134160; TAA
HASSVSSLV

SEQ ID NO: 89519 - protein, 9 aa, Homo sapiens
  misc_feature: Table A; Target 89519; HLA-B*39:01; TRPM1; ENSG00000134160; TAA
HASSVSSLV

SEQ ID NO: 89520 - protein, 9 aa, Homo sapiens
  misc_feature: Table A; Target 89520; HLA-B*51:01; TRPM1; ENSG00000134160; TAA
HASSVSSLV

SEQ ID NO: 89521 - protein, 9 aa, Homo sapiens
  misc_feature: Table A; Target 89521; HLA-C*02:02; TRPM1; ENSG00000134160; TAA
HASSVSSLV

SEQ ID NO: 89522 - protein, 9 aa, Homo sapiens
  misc_feature: Table A; Target 89522; HLA-C*03:03; TRPM1; ENSG00000134160; TAA
HASSVSSLV

SEQ ID NO: 89523 - protein, 9 aa, Homo sapiens
  misc_feature: Table A; Target 89523; HLA-C*03:04; TRPM1; ENSG00000134160; TAA
HASSVSSLV

SEQ ID NO: 89524 - protein, 9 aa, Homo sapiens
  misc_feature: Table A; Target 89524; HLA-C*05:01; TRPM1; ENSG00000134160; TAA
HASSVSSLV

SEQ ID NO: 89525 - protein, 9 aa, Homo sapiens
  misc_feature: Table A; Target 89525; HLA-C*07:06; TRPM1; ENSG00000134160; TAA
HASSVSSLV

SEQ ID NO: 89526 - protein, 9 aa, Homo sapiens
  misc_feature: Table A; Target 89526; HLA-C*12:03; TRPM1; ENSG00000134160; TAA
HASSVSSLV

SEQ ID NO: 89527 - protein, 9 aa, Homo sapiens
  misc_feature: Table A; Target 89527; HLA-C*16:01; TRPM1; ENSG00000134160; TAA
HASSVSSLV

SEQ ID NO: 89528 - protein, 9 aa, Homo sapiens
  misc_feature: Table A; Target 89528; HLA-C*16:02; TRPM1; ENSG00000134160; TAA
HASSVSSLV

SEQ ID NO: 89529 - protein, 9 aa, Homo sapiens
  misc_feature: Table A; Target 89529; HLA-C*16:04; TRPM1; ENSG00000134160; TAA
HASSVSSLV

SEQ ID NO: 89530 - protein, 10 aa, Homo sapiens
  misc_feature: Table A; Target 89530; HLA-B*38:01; TRPM1; ENSG00000134160; TAA
HASSVSSLVI

SEQ ID NO: 89531 - protein, 10 aa, Homo sapiens
  misc_feature: Table A; Target 89531; HLA-B*39:01; TRPM1; ENSG00000134160; TAA
HASSVSSLVI

SEQ ID NO: 89532 - protein, 9 aa, Homo sapiens
  misc_feature: Table A; Target 89532; HLA-B*40:01; TRPM1; ENSG00000134160; TAA
HDEQIAMKL

SEQ ID NO: 89533 - protein, 8 aa, Homo sapiens
  misc_feature: Table A; Target 89533; HLA-A*30:01; TRPM1; ENSG00000134160; TAA
HEFEEQCV

SEQ ID NO: 89534 - protein, 8 aa, Homo sapiens
  misc_feature: Table A; Target 89534; HLA-B*13:02; TRPM1; ENSG00000134160; TAA
HEFEEQCV

SEQ ID NO: 89535 - protein, 8 aa, Homo sapiens
  misc_feature: Table A; Target 89535; HLA-B*18:01; TRPM1; ENSG00000134160; TAA
HEFEEQCV

SEQ ID NO: 89536 - protein, 8 aa, Homo sapiens
  misc_feature: Table A; Target 89536; HLA-B*40:02; TRPM1; ENSG00000134160; TAA
HEFEEQCV

SEQ ID NO: 89537 - protein, 8 aa, Homo sapiens
  misc_feature: Table A; Target 89537; HLA-B*49:01; TRPM1; ENSG00000134160; TAA
HEFEEQCV

SEQ ID NO: 89538 - protein, 9 aa, Homo sapiens
  misc_feature: Table A; Target 89538; HLA-B*40:01; TRPM1; ENSG00000134160; TAA
HESSESDLV

SEQ ID NO: 89539 - protein, 9 aa, Homo sapiens
  misc_feature: Table A; Target 89539; HLA-B*49:01; TRPM1; ENSG00000134160; TAA
HESSESDLV

SEQ ID NO: 89540 - protein, 9 aa, Homo sapiens
  misc_feature: Table A; Target 89540; HLA-A*23:01; TRPM1; ENSG00000134160; TAA
HFNGEELLF

SEQ ID NO: 89541 - protein, 9 aa, Homo sapiens
  misc_feature: Table A; Target 89541; HLA-A*24:02; TRPM1; ENSG00000134160; TAA
HFNGEELLF

SEQ ID NO: 89542 - protein, 9 aa, Homo sapiens
  misc_feature: Table A; Target 89542; HLA-A*29:02; TRPM1; ENSG00000134160; TAA
HFNGEELLF

SEQ ID NO: 89543 - protein, 10 aa, Homo sapiens
  misc_feature: Table A; Target 89543; HLA-B*38:01; TRPM1; ENSG00000134160; TAA
HHVAEAIPRI

SEQ ID NO: 89544 - protein, 9 aa, Homo sapiens
  misc_feature: Table A; Target 89544; HLA-A*68:02; TRPM1; ENSG00000134160; TAA
HISLIDIGL

SEQ ID NO: 89545 - protein, 9 aa, Homo sapiens
  misc_feature: Table A; Target 89545; HLA-A*02:03; TRPM1; ENSG00000134160; TAA
HIYIIIMRL

SEQ ID NO: 89546 - protein, 9 aa, Homo sapiens
  misc_feature: Table A; Target 89546; HLA-A*02:04; TRPM1; ENSG00000134160; TAA
HIYIIIMRL

SEQ ID NO: 89547 - protein, 9 aa, Homo sapiens
  misc_feature: Table A; Target 89547; HLA-A*02:07; TRPM1; ENSG00000134160; TAA
HIYIIIMRL

SEQ ID NO: 89548 - protein, 9 aa, Homo sapiens
  misc_feature: Table A; Target 89548; HLA-A*68:02; TRPM1; ENSG00000134160; TAA
HIYIIIMRL

SEQ ID NO: 89549 - protein, 9 aa, Homo sapiens
  misc_feature: Table A; Target 89549; HLA-A*02:04; TRPM1; ENSG00000134160; TAA
HLMVKDWQL

SEQ ID NO: 89550 - protein, 8 aa, Homo sapiens
  misc_feature: Table A; Target 89550; HLA-B*08:01; TRPM1; ENSG00000134160; TAA
HPRNVKSI

SEQ ID NO: 89551 - protein, 8 aa, Homo sapiens
  misc_feature: Table A; Target 89551; HLA-B*51:01; TRPM1; ENSG00000134160; TAA
HPRNVKSI

SEQ ID NO: 89552 - protein, 8 aa, Homo sapiens
  misc_feature: Table A; Target 89552; HLA-B*13:02; TRPM1; ENSG00000134160; TAA
HSTDIPYI

SEQ ID NO: 89553 - protein, 8 aa, Homo sapiens
  misc_feature: Table A; Target 89553; HLA-B*51:01; TRPM1; ENSG00000134160; TAA
HSTDIPYI

SEQ ID NO: 89554 - protein, 9 aa, Homo sapiens
  misc_feature: Table A; Target 89554; HLA-A*68:02; TRPM1; ENSG00000134160; TAA
HSTDIPYIV

SEQ ID NO: 89555 - protein, 9 aa, Homo sapiens
  misc_feature: Table A; Target 89555; HLA-B*13:02; TRPM1; ENSG00000134160; TAA
HSTDIPYIV

SEQ ID NO: 89556 - protein, 9 aa, Homo sapiens
  misc_feature: Table A; Target 89556; HLA-B*35:03; TRPM1; ENSG00000134160; TAA
HSTDIPYIV

SEQ ID NO: 89557 - protein, 9 aa, Homo sapiens
  misc_feature: Table A; Target 89557; HLA-B*54:01; TRPM1; ENSG00000134160; TAA
HSTDIPYIV

SEQ ID NO: 89558 - protein, 9 aa, Homo sapiens
  misc_feature: Table A; Target 89558; HLA-C*02:02; TRPM1; ENSG00000134160; TAA
HSTDIPYIV

SEQ ID NO: 89559 - protein, 9 aa, Homo sapiens
  misc_feature: Table A; Target 89559; HLA-C*12:03; TRPM1; ENSG00000134160; TAA
HSTDIPYIV

SEQ ID NO: 89560 - protein, 10 aa, Homo sapiens
  misc_feature: Table A; Target 89560; HLA-A*01:01; TRPM1; ENSG00000134160; TAA
HTQSYPTDSY

SEQ ID NO: 89561 - protein, 10 aa, Homo sapiens
  misc_feature: Table A; Target 89561; HLA-A*25:01; TRPM1; ENSG00000134160; TAA
HTQSYPTDSY

SEQ ID NO: 89562 - protein, 10 aa, Homo sapiens
  misc_feature: Table A; Target 89562; HLA-A*26:01; TRPM1; ENSG00000134160; TAA
HTQSYPTDSY

SEQ ID NO: 89563 - protein, 10 aa, Homo sapiens
  misc_feature: Table A; Target 89563; HLA-A*30:02; TRPM1; ENSG00000134160; TAA
HTQSYPTDSY

SEQ ID NO: 89564 - protein, 10 aa, Homo sapiens
  misc_feature: Table A; Target 89564; HLA-A*32:01; TRPM1; ENSG00000134160; TAA
HTQSYPTDSY

SEQ ID NO: 89565 - protein, 10 aa, Homo sapiens
  misc_feature: Table A; Target 89565; HLA-B*15:01; TRPM1; ENSG00000134160; TAA
HTQSYPTDSY

SEQ ID NO: 89566 - protein, 10 aa, Homo sapiens
  misc_feature: Table A; Target 89566; HLA-B*39:01; TRPM1; ENSG00000134160; TAA
HTQSYPTDSY

SEQ ID NO: 89567 - protein, 10 aa, Homo sapiens
  misc_feature: Table A; Target 89567; HLA-C*07:01; TRPM1; ENSG00000134160; TAA
HTQSYPTDSY

SEQ ID NO: 89568 - protein, 8 aa, Homo sapiens
  misc_feature: Table A; Target 89568; HLA-A*68:01; TRPM1; ENSG00000134160; TAA
HVAEAIPR

SEQ ID NO: 89569 - protein, 8 aa, Homo sapiens
  misc_feature: Table A; Target 89569; HLA-C*07:06; TRPM1; ENSG00000134160; TAA
HVAEAIPR

SEQ ID NO: 89570 - protein, 9 aa, Homo sapiens
  misc_feature: Table A; Target 89570; HLA-A*02:01; TRPM1; ENSG00000134160; TAA
HVAEAIPRI

SEQ ID NO: 89571 - protein, 9 aa, Homo sapiens
  misc_feature: Table A; Target 89571; HLA-A*02:03; TRPM1; ENSG00000134160; TAA
HVAEAIPRI

SEQ ID NO: 89572 - protein, 9 aa, Homo sapiens
  misc_feature: Table A; Target 89572; HLA-A*02:04; TRPM1; ENSG00000134160; TAA
HVAEAIPRI

SEQ ID NO: 89573 - protein, 9 aa, Homo sapiens
  misc_feature: Table A; Target 89573; HLA-A*02:07; TRPM1; ENSG00000134160; TAA
HVAEAIPRI

SEQ ID NO: 89574 - protein, 9 aa, Homo sapiens
  misc_feature: Table A; Target 89574; HLA-A*25:01; TRPM1; ENSG00000134160; TAA
HVAEAIPRI

SEQ ID NO: 89575 - protein, 9 aa, Homo sapiens
  misc_feature: Table A; Target 89575; HLA-A*26:01; TRPM1; ENSG00000134160; TAA
HVAEAIPRI

SEQ ID NO: 89576 - protein, 9 aa, Homo sapiens
  misc_feature: Table A; Target 89576; HLA-A*68:02; TRPM1; ENSG00000134160; TAA
HVAEAIPRI

SEQ ID NO: 89577 - protein, 9 aa, Homo sapiens
  misc_feature: Table A; Target 89577; HLA-B*13:02; TRPM1; ENSG00000134160; TAA
HVAEAIPRI

SEQ ID NO: 89578 - protein, 9 aa, Homo sapiens
  misc_feature: Table A; Target 89578; HLA-B*35:03; TRPM1; ENSG00000134160; TAA
HVAEAIPRI

SEQ ID NO: 89579 - protein, 9 aa, Homo sapiens
  misc_feature: Table A; Target 89579; HLA-B*38:01; TRPM1; ENSG00000134160; TAA
HVAEAIPRI

SEQ ID NO: 89580 - protein, 9 aa, Homo sapiens
  misc_feature: Table A; Target 89580; HLA-B*51:01; TRPM1; ENSG00000134160; TAA
HVAEAIPRI

SEQ ID NO: 89581 - protein, 9 aa, Homo sapiens
  misc_feature: Table A; Target 89581; HLA-B*58:01; TRPM1; ENSG00000134160; TAA
HVAEAIPRI

SEQ ID NO: 89582 - protein, 9 aa, Homo sapiens
  misc_feature: Table A; Target 89582; HLA-C*02:02; TRPM1; ENSG00000134160; TAA
HVAEAIPRI

SEQ ID NO: 89583 - protein, 9 aa, Homo sapiens
  misc_feature: Table A; Target 89583; HLA-C*07:06; TRPM1; ENSG00000134160; TAA
HVAEAIPRI

SEQ ID NO: 89584 - protein, 11 aa, Homo sapiens
  misc_feature: Table A; Target 89584; HLA-A*31:01; TRPM1; ENSG00000134160; TAA
HVAEAIPRIPR

SEQ ID NO: 89585 - protein, 8 aa, Homo sapiens
  misc_feature: Table A; Target 89585; HLA-B*15:01; TRPM1; ENSG00000134160; TAA
IAMKLLTY

SEQ ID NO: 89586 - protein, 8 aa, Homo sapiens
  misc_feature: Table A; Target 89586; HLA-B*15:03; TRPM1; ENSG00000134160; TAA
IAMKLLTY

SEQ ID NO: 89587 - protein, 8 aa, Homo sapiens
  misc_feature: Table A; Target 89587; HLA-B*35:01; TRPM1; ENSG00000134160; TAA
IAMKLLTY

SEQ ID NO: 89588 - protein, 8 aa, Homo sapiens
  misc_feature: Table A; Target 89588; HLA-B*46:01; TRPM1; ENSG00000134160; TAA
IAMKLLTY

SEQ ID NO: 89589 - protein, 8 aa, Homo sapiens
  misc_feature: Table A; Target 89589; HLA-C*02:02; TRPM1; ENSG00000134160; TAA
IAMKLLTY

SEQ ID NO: 89590 - protein, 9 aa, Homo sapiens
  misc_feature: Table A; Target 89590; HLA-B*57:01; TRPM1; ENSG00000134160; TAA
IARSQIFVF

SEQ ID NO: 89591 - protein, 9 aa, Homo sapiens
  misc_feature: Table A; Target 89591; HLA-C*02:02; TRPM1; ENSG00000134160; TAA
IARSQIFVF

SEQ ID NO: 89592 - protein, 8 aa, Homo sapiens
  misc_feature: Table A; Target 89592; HLA-B*58:01; TRPM1; ENSG00000134160; TAA
IAVFNNTF

SEQ ID NO: 89593 - protein, 9 aa, Homo sapiens
  misc_feature: Table A; Target 89593; HLA-C*02:02; TRPM1; ENSG00000134160; TAA
IAVFNNTFF

SEQ ID NO: 89594 - protein, 9 aa, Homo sapiens
  misc_feature: Table A; Target 89594; HLA-A*26:01; TRPM1; ENSG00000134160; TAA
IDIGLVLEY

SEQ ID NO: 89595 - protein, 9 aa, Homo sapiens
  misc_feature: Table A; Target 89595; HLA-A*29:02; TRPM1; ENSG00000134160; TAA
IDIGLVLEY

SEQ ID NO: 89596 - protein, 9 aa, Homo sapiens
  misc_feature: Table A; Target 89596; HLA-B*18:01; TRPM1; ENSG00000134160; TAA
IDIGLVLEY

SEQ ID NO: 89597 - protein, 9 aa, Homo sapiens
  misc_feature: Table A; Target 89597; HLA-B*27:02; TRPM1; ENSG00000134160; TAA
IDIGLVLEY

SEQ ID NO: 89598 - protein, 9 aa, Homo sapiens
  misc_feature: Table A; Target 89598; HLA-B*35:01; TRPM1; ENSG00000134160; TAA
IDIGLVLEY

SEQ ID NO: 89599 - protein, 9 aa, Homo sapiens
  misc_feature: Table A; Target 89599; HLA-B*44:02; TRPM1; ENSG00000134160; TAA
IDIGLVLEY

SEQ ID NO: 89600 - protein, 9 aa, Homo sapiens
  misc_feature: Table A; Target 89600; HLA-B*44:03; TRPM1; ENSG00000134160; TAA
IDIGLVLEY

SEQ ID NO: 89601 - protein, 9 aa, Homo sapiens
  misc_feature: Table A; Target 89601; HLA-C*02:02; TRPM1; ENSG00000134160; TAA
IDIGLVLEY

SEQ ID NO: 89602 - protein, 9 aa, Homo sapiens
  misc_feature: Table A; Target 89602; HLA-C*12:03; TRPM1; ENSG00000134160; TAA
IDIGLVLEY

SEQ ID NO: 89603 - protein, 9 aa, Homo sapiens
  misc_feature: Table A; Target 89603; HLA-C*16:04; TRPM1; ENSG00000134160; TAA
IDIGLVLEY

SEQ ID NO: 89604 - protein, 8 aa, Homo sapiens
  misc_feature: Table A; Target 89604; HLA-B*40:02; TRPM1; ENSG00000134160; TAA
IDVDDPAV

SEQ ID NO: 89605 - protein, 10 aa, Homo sapiens
  misc_feature: Table A; Target 89605; HLA-A*33:01; TRPM1; ENSG00000134160; TAA
IDVDDPAVSR

SEQ ID NO: 89606 - protein, 10 aa, Homo sapiens
  misc_feature: Table A; Target 89606; HLA-A*33:03; TRPM1; ENSG00000134160; TAA
IDVDDPAVSR

SEQ ID NO: 89607 - protein, 10 aa, Homo sapiens
  misc_feature: Table A; Target 89607; HLA-A*68:01; TRPM1; ENSG00000134160; TAA
IDVDDPAVSR

SEQ ID NO: 89608 - protein, 10 aa, Homo sapiens
  misc_feature: Table A; Target 89608; HLA-B*27:02; TRPM1; ENSG00000134160; TAA
IDVDDPAVSR

SEQ ID NO: 89609 - protein, 10 aa, Homo sapiens
  misc_feature: Table A; Target 89609; HLA-C*07:06; TRPM1; ENSG00000134160; TAA
IDVDDPAVSR

SEQ ID NO: 89610 - protein, 9 aa, Homo sapiens
  misc_feature: Table A; Target 89610; HLA-A*30:01; TRPM1; ENSG00000134160; TAA
IEGTISYPL

SEQ ID NO: 89611 - protein, 9 aa, Homo sapiens
  misc_feature: Table A; Target 89611; HLA-B*18:01; TRPM1; ENSG00000134160; TAA
IEGTISYPL

SEQ ID NO: 89612 - protein, 9 aa, Homo sapiens
  misc_feature: Table A; Target 89612; HLA-B*40:01; TRPM1; ENSG00000134160; TAA
IEGTISYPL

SEQ ID NO: 89613 - protein, 8 aa, Homo sapiens
  misc_feature: Table A; Target 89613; HLA-B*18:01; TRPM1; ENSG00000134160; TAA
IEMAILTA

SEQ ID NO: 89614 - protein, 8 aa, Homo sapiens
  misc_feature: Table A; Target 89614; HLA-B*49:01; TRPM1; ENSG00000134160; TAA
IEMAILTA

SEQ ID NO: 89615 - protein, 9 aa, Homo sapiens
  misc_feature: Table A; Target 89615; HLA-A*23:01; TRPM1; ENSG00000134160; TAA
IEMAILTAL

SEQ ID NO: 89616 - protein, 9 aa, Homo sapiens
  misc_feature: Table A; Target 89616; HLA-A*30:01; TRPM1; ENSG00000134160; TAA
IEMAILTAL

SEQ ID NO: 89617 - protein, 9 aa, Homo sapiens
  misc_feature: Table A; Target 89617; HLA-B*15:01; TRPM1; ENSG00000134160; TAA
IEMAILTAL

SEQ ID NO: 89618 - protein, 9 aa, Homo sapiens
  misc_feature: Table A; Target 89618; HLA-B*15:03; TRPM1; ENSG00000134160; TAA
IEMAILTAL

SEQ ID NO: 89619 - protein, 9 aa, Homo sapiens
  misc_feature: Table A; Target 89619; HLA-B*18:01; TRPM1; ENSG00000134160; TAA
IEMAILTAL

SEQ ID NO: 89620 - protein, 9 aa, Homo sapiens
  misc_feature: Table A; Target 89620; HLA-B*37:01; TRPM1; ENSG00000134160; TAA
IEMAILTAL

SEQ ID NO: 89621 - protein, 9 aa, Homo sapiens
  misc_feature: Table A; Target 89621; HLA-B*40:01; TRPM1; ENSG00000134160; TAA
IEMAILTAL

SEQ ID NO: 89622 - protein, 9 aa, Homo sapiens
  misc_feature: Table A; Target 89622; HLA-B*40:02; TRPM1; ENSG00000134160; TAA
IEMAILTAL

SEQ ID NO: 89623 - protein, 9 aa, Homo sapiens
  misc_feature: Table A; Target 89623; HLA-B*44:02; TRPM1; ENSG00000134160; TAA
IEMAILTAL

SEQ ID NO: 89624 - protein, 9 aa, Homo sapiens
  misc_feature: Table A; Target 89624; HLA-B*44:03; TRPM1; ENSG00000134160; TAA
IEMAILTAL

SEQ ID NO: 89625 - protein, 9 aa, Homo sapiens
  misc_feature: Table A; Target 89625; HLA-B*46:01; TRPM1; ENSG00000134160; TAA
IEMAILTAL

SEQ ID NO: 89626 - protein, 9 aa, Homo sapiens
  misc_feature: Table A; Target 89626; HLA-B*49:01; TRPM1; ENSG00000134160; TAA
IEMAILTAL

SEQ ID NO: 89627 - protein, 9 aa, Homo sapiens
  misc_feature: Table A; Target 89627; HLA-C*02:02; TRPM1; ENSG00000134160; TAA
IEMAILTAL

SEQ ID NO: 89628 - protein, 9 aa, Homo sapiens
  misc_feature: Table A; Target 89628; HLA-C*03:03; TRPM1; ENSG00000134160; TAA
IEMAILTAL

SEQ ID NO: 89629 - protein, 9 aa, Homo sapiens
  misc_feature: Table A; Target 89629; HLA-C*03:04; TRPM1; ENSG00000134160; TAA
IEMAILTAL

SEQ ID NO: 89630 - protein, 9 aa, Homo sapiens
  misc_feature: Table A; Target 89630; HLA-C*14:02; TRPM1; ENSG00000134160; TAA
IEMAILTAL

SEQ ID NO: 89631 - protein, 9 aa, Homo sapiens
  misc_feature: Table A; Target 89631; HLA-C*16:04; TRPM1; ENSG00000134160; TAA
IEMAILTAL

SEQ ID NO: 89632 - protein, 10 aa, Homo sapiens
  misc_feature: Table A; Target 89632; HLA-B*44:02; TRPM1; ENSG00000134160; TAA
IEMAILTALL

SEQ ID NO: 89633 - protein, 10 aa, Homo sapiens
  misc_feature: Table A; Target 89633; HLA-B*49:01; TRPM1; ENSG00000134160; TAA
IEMAILTALL

SEQ ID NO: 89634 - protein, 9 aa, Homo sapiens
  misc_feature: Table A; Target 89634; HLA-B*18:01; TRPM1; ENSG00000134160; TAA
IENGVNMQH

SEQ ID NO: 89635 - protein, 9 aa, Homo sapiens
  misc_feature: Table A; Target 89635; HLA-B*44:03; TRPM1; ENSG00000134160; TAA
IENGVNMQH

SEQ ID NO: 89636 - protein, 9 aa, Homo sapiens
  misc_feature: Table A; Target 89636; HLA-B*49:01; TRPM1; ENSG00000134160; TAA
IENGVNMQH

SEQ ID NO: 89637 - protein, 9 aa, Homo sapiens
  misc_feature: Table A; Target 89637; HLA-C*16:04; TRPM1; ENSG00000134160; TAA
IENGVNMQH

SEQ ID NO: 89638 - protein, 10 aa, Homo sapiens
  misc_feature: Table A; Target 89638; HLA-A*23:01; TRPM1; ENSG00000134160; TAA
IENGVNMQHF

SEQ ID NO: 89639 - protein, 10 aa, Homo sapiens
  misc_feature: Table A; Target 89639; HLA-A*24:02; TRPM1; ENSG00000134160; TAA
IENGVNMQHF

SEQ ID NO: 89640 - protein, 10 aa, Homo sapiens
  misc_feature: Table A; Target 89640; HLA-A*30:01; TRPM1; ENSG00000134160; TAA
IENGVNMQHF

SEQ ID NO: 89641 - protein, 10 aa, Homo sapiens
  misc_feature: Table A; Target 89641; HLA-B*18:01; TRPM1; ENSG00000134160; TAA
IENGVNMQHF

SEQ ID NO: 89642 - protein, 10 aa, Homo sapiens
  misc_feature: Table A; Target 89642; HLA-B*27:02; TRPM1; ENSG00000134160; TAA
IENGVNMQHF

SEQ ID NO: 89643 - protein, 10 aa, Homo sapiens
  misc_feature: Table A; Target 89643; HLA-B*37:01; TRPM1; ENSG00000134160; TAA
IENGVNMQHF

SEQ ID NO: 89644 - protein, 10 aa, Homo sapiens
  misc_feature: Table A; Target 89644; HLA-B*40:01; TRPM1; ENSG00000134160; TAA
IENGVNMQHF

SEQ ID NO: 89645 - protein, 10 aa, Homo sapiens
  misc_feature: Table A; Target 89645; HLA-B*40:02; TRPM1; ENSG00000134160; TAA
IENGVNMQHF

SEQ ID NO: 89646 - protein, 10 aa, Homo sapiens
  misc_feature: Table A; Target 89646; HLA-B*44:02; TRPM1; ENSG00000134160; TAA
IENGVNMQHF

SEQ ID NO: 89647 - protein, 10 aa, Homo sapiens
  misc_feature: Table A; Target 89647; HLA-B*44:03; TRPM1; ENSG00000134160; TAA
IENGVNMQHF

SEQ ID NO: 89648 - protein, 10 aa, Homo sapiens
  misc_feature: Table A; Target 89648; HLA-B*49:01; TRPM1; ENSG00000134160; TAA
IENGVNMQHF

SEQ ID NO: 89649 - protein, 10 aa, Homo sapiens
  misc_feature: Table A; Target 89649; HLA-C*16:04; TRPM1; ENSG00000134160; TAA
IENGVNMQHF

SEQ ID NO: 89650 - protein, 9 aa, Homo sapiens
  misc_feature: Table A; Target 89650; HLA-A*02:04; TRPM1; ENSG00000134160; TAA
IIFWYIRVL

SEQ ID NO: 89651 - protein, 8 aa, Homo sapiens
  misc_feature: Table A; Target 89651; HLA-B*39:01; TRPM1; ENSG00000134160; TAA
ILADNGTL

SEQ ID NO: 89652 - protein, 10 aa, Homo sapiens
  misc_feature: Table A; Target 89652; HLA-A*03:01; TRPM1; ENSG00000134160; TAA
ILADNGTLGK

SEQ ID NO: 89653 - protein, 10 aa, Homo sapiens
  misc_feature: Table A; Target 89653; HLA-A*03:02; TRPM1; ENSG00000134160; TAA
ILADNGTLGK

SEQ ID NO: 89654 - protein, 10 aa, Homo sapiens
  misc_feature: Table A; Target 89654; HLA-A*11:01; TRPM1; ENSG00000134160; TAA
ILADNGTLGK

SEQ ID NO: 89655 - protein, 10 aa, Homo sapiens
  misc_feature: Table A; Target 89655; HLA-A*68:01; TRPM1; ENSG00000134160; TAA
ILADNGTLGK

SEQ ID NO: 89656 - protein, 11 aa, Homo sapiens
  misc_feature: Table A; Target 89656; HLA-A*01:01; TRPM1; ENSG00000134160; TAA
ILADNGTLGKY

SEQ ID NO: 89657 - protein, 11 aa, Homo sapiens
  misc_feature: Table A; Target 89657; HLA-A*03:01; TRPM1; ENSG00000134160; TAA
ILADNGTLGKY

SEQ ID NO: 89658 - protein, 11 aa, Homo sapiens
  misc_feature: Table A; Target 89658; HLA-A*25:01; TRPM1; ENSG00000134160; TAA
ILADNGTLGKY

SEQ ID NO: 89659 - protein, 11 aa, Homo sapiens
  misc_feature: Table A; Target 89659; HLA-A*26:01; TRPM1; ENSG00000134160; TAA
ILADNGTLGKY

SEQ ID NO: 89660 - protein, 11 aa, Homo sapiens
  misc_feature: Table A; Target 89660; HLA-A*29:02; TRPM1; ENSG00000134160; TAA
ILADNGTLGKY

SEQ ID NO: 89661 - protein, 11 aa, Homo sapiens
  misc_feature: Table A; Target 89661; HLA-A*30:02; TRPM1; ENSG00000134160; TAA
ILADNGTLGKY

SEQ ID NO: 89662 - protein, 11 aa, Homo sapiens
  misc_feature: Table A; Target 89662; HLA-A*32:01; TRPM1; ENSG00000134160; TAA
ILADNGTLGKY

SEQ ID NO: 89663 - protein, 11 aa, Homo sapiens
  misc_feature: Table A; Target 89663; HLA-B*15:01; TRPM1; ENSG00000134160; TAA
ILADNGTLGKY

SEQ ID NO: 89664 - protein, 11 aa, Homo sapiens
  misc_feature: Table A; Target 89664; HLA-B*15:03; TRPM1; ENSG00000134160; TAA
ILADNGTLGKY

SEQ ID NO: 89665 - protein, 11 aa, Homo sapiens
  misc_feature: Table A; Target 89665; HLA-B*46:01; TRPM1; ENSG00000134160; TAA
ILADNGTLGKY

SEQ ID NO: 89666 - protein, 11 aa, Homo sapiens
  misc_feature: Table A; Target 89666; HLA-B*58:01; TRPM1; ENSG00000134160; TAA
ILADNGTLGKY

SEQ ID NO: 89667 - protein, 11 aa, Homo sapiens
  misc_feature: Table A; Target 89667; HLA-C*02:02; TRPM1; ENSG00000134160; TAA
ILADNGTLGKY

SEQ ID NO: 89668 - protein, 11 aa, Homo sapiens
  misc_feature: Table A; Target 89668; HLA-C*07:04; TRPM1; ENSG00000134160; TAA
ILADNGTLGKY

SEQ ID NO: 89669 - protein, 11 aa, Homo sapiens
  misc_feature: Table A; Target 89669; HLA-C*16:02; TRPM1; ENSG00000134160; TAA
ILADNGTLGKY

SEQ ID NO: 89670 - protein, 9 aa, Homo sapiens
  misc_feature: Table A; Target 89670; HLA-A*29:02; TRPM1; ENSG00000134160; TAA
ILFLEFRTY

SEQ ID NO: 89671 - protein, 10 aa, Homo sapiens
  misc_feature: Table A; Target 89671; HLA-A*24:02; TRPM1; ENSG00000134160; TAA
ILHPEEKPSW

SEQ ID NO: 89672 - protein, 10 aa, Homo sapiens
  misc_feature: Table A; Target 89672; HLA-A*25:01; TRPM1; ENSG00000134160; TAA
ILHPEEKPSW

SEQ ID NO: 89673 - protein, 10 aa, Homo sapiens
  misc_feature: Table A; Target 89673; HLA-A*32:01; TRPM1; ENSG00000134160; TAA
ILHPEEKPSW

SEQ ID NO: 89674 - protein, 10 aa, Homo sapiens
  misc_feature: Table A; Target 89674; HLA-B*57:01; TRPM1; ENSG00000134160; TAA
ILHPEEKPSW

SEQ ID NO: 89675 - protein, 10 aa, Homo sapiens
  misc_feature: Table A; Target 89675; HLA-B*58:01; TRPM1; ENSG00000134160; TAA
ILHPEEKPSW

SEQ ID NO: 89676 - protein, 9 aa, Homo sapiens
  misc_feature: Table A; Target 89676; HLA-A*02:07; TRPM1; ENSG00000134160; TAA
ILLPPTILF

SEQ ID NO: 89677 - protein, 9 aa, Homo sapiens
  misc_feature: Table A; Target 89677; HLA-A*23:01; TRPM1; ENSG00000134160; TAA
ILLPPTILF

SEQ ID NO: 89678 - protein, 9 aa, Homo sapiens
  misc_feature: Table A; Target 89678; HLA-A*24:02; TRPM1; ENSG00000134160; TAA
ILLPPTILF

SEQ ID NO: 89679 - protein, 9 aa, Homo sapiens
  misc_feature: Table A; Target 89679; HLA-A*29:02; TRPM1; ENSG00000134160; TAA
ILLPPTILF

SEQ ID NO: 89680 - protein, 9 aa, Homo sapiens
  misc_feature: Table A; Target 89680; HLA-B*57:01; TRPM1; ENSG00000134160; TAA
ILLPPTILF

SEQ ID NO: 89681 - protein, 10 aa, Homo sapiens
  misc_feature: Table A; Target 89681; HLA-A*02:01; TRPM1; ENSG00000134160; TAA
ILLPPTILFL

SEQ ID NO: 89682 - protein, 10 aa, Homo sapiens
  misc_feature: Table A; Target 89682; HLA-A*02:04; TRPM1; ENSG00000134160; TAA
ILLPPTILFL

SEQ ID NO: 89683 - protein, 10 aa, Homo sapiens
  misc_feature: Table A; Target 89683; HLA-A*02:07; TRPM1; ENSG00000134160; TAA
ILLPPTILFL

SEQ ID NO: 89684 - protein, 9 aa, Homo sapiens
  misc_feature: Table A; Target 89684; HLA-A*02:01; TRPM1; ENSG00000134160; TAA
ILMSEPGKL

SEQ ID NO: 89685 - protein, 9 aa, Homo sapiens
  misc_feature: Table A; Target 89685; HLA-A*02:03; TRPM1; ENSG00000134160; TAA
ILMSEPGKL

SEQ ID NO: 89686 - protein, 9 aa, Homo sapiens
  misc_feature: Table A; Target 89686; HLA-A*02:04; TRPM1; ENSG00000134160; TAA
ILMSEPGKL

SEQ ID NO: 89687 - protein, 9 aa, Homo sapiens
  misc_feature: Table A; Target 89687; HLA-A*03:01; TRPM1; ENSG00000134160; TAA
ILMSEPGKL

SEQ ID NO: 89688 - protein, 9 aa, Homo sapiens
  misc_feature: Table A; Target 89688; HLA-C*14:02; TRPM1; ENSG00000134160; TAA
ILMSEPGKL

SEQ ID NO: 89689 - protein, 9 aa, Homo sapiens
  misc_feature: Table A; Target 89689; HLA-A*29:02; TRPM1; ENSG00000134160; TAA
ILRLQNQPY

SEQ ID NO: 89690 - protein, 9 aa, Homo sapiens
  misc_feature: Table A; Target 89690; HLA-A*30:02; TRPM1; ENSG00000134160; TAA
ILRLQNQPY

SEQ ID NO: 89691 - protein, 9 aa, Homo sapiens
  misc_feature: Table A; Target 89691; HLA-B*46:01; TRPM1; ENSG00000134160; TAA
ILRLQNQPY

SEQ ID NO: 89692 - protein, 9 aa, Homo sapiens
  misc_feature: Table A; Target 89692; HLA-A*02:04; TRPM1; ENSG00000134160; TAA
ILSHIYIII

SEQ ID NO: 89693 - protein, 9 aa, Homo sapiens
  misc_feature: Table A; Target 89693; HLA-A*23:01; TRPM1; ENSG00000134160; TAA
IMLVVLMSF

SEQ ID NO: 89694 - protein, 9 aa, Homo sapiens
  misc_feature: Table A; Target 89694; HLA-B*35:03; TRPM1; ENSG00000134160; TAA
INSADGYSL

SEQ ID NO: 89695 - protein, 9 aa, Homo sapiens
  misc_feature: Table A; Target 89695; HLA-B*38:01; TRPM1; ENSG00000134160; TAA
INSADGYSL

SEQ ID NO: 89696 - protein, 9 aa, Homo sapiens
  misc_feature: Table A; Target 89696; HLA-B*39:01; TRPM1; ENSG00000134160; TAA
INSADGYSL

SEQ ID NO: 89697 - protein, 9 aa, Homo sapiens
  misc_feature: Table A; Target 89697; HLA-C*03:04; TRPM1; ENSG00000134160; TAA
INSADGYSL

SEQ ID NO: 89698 - protein, 9 aa, Homo sapiens
  misc_feature: Table A; Target 89698; HLA-C*14:02; TRPM1; ENSG00000134160; TAA
INSADGYSL

SEQ ID NO: 89699 - protein, 10 aa, Homo sapiens
  misc_feature: Table A; Target 89699; HLA-A*01:01; TRPM1; ENSG00000134160; TAA
INSADGYSLY

SEQ ID NO: 89700 - protein, 10 aa, Homo sapiens
  misc_feature: Table A; Target 89700; HLA-A*29:02; TRPM1; ENSG00000134160; TAA
INSADGYSLY

SEQ ID NO: 89701 - protein, 10 aa, Homo sapiens
  misc_feature: Table A; Target 89701; HLA-A*25:01; TRPM1; ENSG00000134160; TAA
IPIGTKICEF

SEQ ID NO: 89702 - protein, 10 aa, Homo sapiens
  misc_feature: Table A; Target 89702; HLA-B*07:02; TRPM1; ENSG00000134160; TAA
IPIGTKICEF

SEQ ID NO: 89703 - protein, 10 aa, Homo sapiens
  misc_feature: Table A; Target 89703; HLA-B*35:01; TRPM1; ENSG00000134160; TAA
IPIGTKICEF

SEQ ID NO: 89704 - protein, 10 aa, Homo sapiens
  misc_feature: Table A; Target 89704; HLA-B*35:03; TRPM1; ENSG00000134160; TAA
IPIGTKICEF

SEQ ID NO: 89705 - protein, 10 aa, Homo sapiens
  misc_feature: Table A; Target 89705; HLA-B*55:01; TRPM1; ENSG00000134160; TAA
IPIGTKICEF

SEQ ID NO: 89706 - protein, 10 aa, Homo sapiens
  misc_feature: Table A; Target 89706; HLA-B*56:01; TRPM1; ENSG00000134160; TAA
IPIGTKICEF

SEQ ID NO: 89707 - protein, 9 aa, Homo sapiens
  misc_feature: Table A; Target 89707; HLA-B*51:01; TRPM1; ENSG00000134160; TAA
IPPLPSATP

SEQ ID NO: 89708 - protein, 9 aa, Homo sapiens
  misc_feature: Table A; Target 89708; HLA-B*54:01; TRPM1; ENSG00000134160; TAA
IPPLPSATP

SEQ ID NO: 89709 - protein, 9 aa, Homo sapiens
  misc_feature: Table A; Target 89709; HLA-B*56:01; TRPM1; ENSG00000134160; TAA
IPPLPSATP

SEQ ID NO: 89710 - protein, 9 aa, Homo sapiens
  misc_feature: Table A; Target 89710; HLA-B*07:02; TRPM1; ENSG00000134160; TAA
IPRIPRLSL

SEQ ID NO: 89711 - protein, 9 aa, Homo sapiens
  misc_feature: Table A; Target 89711; HLA-B*08:01; TRPM1; ENSG00000134160; TAA
IPRIPRLSL

SEQ ID NO: 89712 - protein, 9 aa, Homo sapiens
  misc_feature: Table A; Target 89712; HLA-C*07:02; TRPM1; ENSG00000134160; TAA
IPRIPRLSL

SEQ ID NO: 89713 - protein, 8 aa, Homo sapiens
  misc_feature: Table A; Target 89713; HLA-B*51:01; TRPM1; ENSG00000134160; TAA
IPRLSLTI

SEQ ID NO: 89714 - protein, 8 aa, Homo sapiens
  misc_feature: Table A; Target 89714; HLA-B*51:01; TRPM1; ENSG00000134160; TAA
IPYIVSEA

SEQ ID NO: 89715 - protein, 8 aa, Homo sapiens
  misc_feature: Table A; Target 89715; HLA-B*54:01; TRPM1; ENSG00000134160; TAA
IPYIVSEA

SEQ ID NO: 89716 - protein, 8 aa, Homo sapiens
  misc_feature: Table A; Target 89716; HLA-B*55:01; TRPM1; ENSG00000134160; TAA
IPYIVSEA

SEQ ID NO: 89717 - protein, 8 aa, Homo sapiens
  misc_feature: Table A; Target 89717; HLA-B*56:01; TRPM1; ENSG00000134160; TAA
IPYIVSEA

SEQ ID NO: 89718 - protein, 9 aa, Homo sapiens
  misc_feature: Table A; Target 89718; HLA-B*35:03; TRPM1; ENSG00000134160; TAA
IPYIVSEAA

SEQ ID NO: 89719 - protein, 9 aa, Homo sapiens
  misc_feature: Table A; Target 89719; HLA-B*51:01; TRPM1; ENSG00000134160; TAA
IPYIVSEAA

SEQ ID NO: 89720 - protein, 9 aa, Homo sapiens
  misc_feature: Table A; Target 89720; HLA-B*54:01; TRPM1; ENSG00000134160; TAA
IPYIVSEAA

SEQ ID NO: 89721 - protein, 9 aa, Homo sapiens
  misc_feature: Table A; Target 89721; HLA-B*55:01; TRPM1; ENSG00000134160; TAA
IPYIVSEAA

SEQ ID NO: 89722 - protein, 9 aa, Homo sapiens
  misc_feature: Table A; Target 89722; HLA-B*56:01; TRPM1; ENSG00000134160; TAA
IPYIVSEAA

SEQ ID NO: 89723 - protein, 10 aa, Homo sapiens
  misc_feature: Table A; Target 89723; HLA-B*51:01; TRPM1; ENSG00000134160; TAA
IPYIVSEAAV

SEQ ID NO: 89724 - protein, 10 aa, Homo sapiens
  misc_feature: Table A; Target 89724; HLA-B*54:01; TRPM1; ENSG00000134160; TAA
IPYIVSEAAV

SEQ ID NO: 89725 - protein, 10 aa, Homo sapiens
  misc_feature: Table A; Target 89725; HLA-B*56:01; TRPM1; ENSG00000134160; TAA
IPYIVSEAAV

SEQ ID NO: 89726 - protein, 9 aa, Homo sapiens
  misc_feature: Table A; Target 89726; HLA-A*31:01; TRPM1; ENSG00000134160; TAA
IQKTFNYNK

SEQ ID NO: 89727 - protein, 8 aa, Homo sapiens
  misc_feature: Table A; Target 89727; HLA-B*40:02; TRPM1; ENSG00000134160; TAA
ISHVGDAL

SEQ ID NO: 89728 - protein, 8 aa, Homo sapiens
  misc_feature: Table A; Target 89728; HLA-B*46:01; TRPM1; ENSG00000134160; TAA
ISHVGDAL

SEQ ID NO: 89729 - protein, 8 aa, Homo sapiens
  misc_feature: Table A; Target 89729; HLA-B*58:01; TRPM1; ENSG00000134160; TAA
ISHVGDAL

SEQ ID NO: 89730 - protein, 8 aa, Homo sapiens
  misc_feature: Table A; Target 89730; HLA-C*01:02; TRPM1; ENSG00000134160; TAA
ISHVGDAL

SEQ ID NO: 89731 - protein, 8 aa, Homo sapiens
  misc_feature: Table A; Target 89731; HLA-C*03:03; TRPM1; ENSG00000134160; TAA
ISHVGDAL

SEQ ID NO: 89732 - protein, 8 aa, Homo sapiens
  misc_feature: Table A; Target 89732; HLA-C*03:04; TRPM1; ENSG00000134160; TAA
ISHVGDAL

SEQ ID NO: 89733 - protein, 8 aa, Homo sapiens
  misc_feature: Table A; Target 89733; HLA-C*05:01; TRPM1; ENSG00000134160; TAA
ISHVGDAL

SEQ ID NO: 89734 - protein, 8 aa, Homo sapiens
  misc_feature: Table A; Target 89734; HLA-C*14:02; TRPM1; ENSG00000134160; TAA
ISHVGDAL

SEQ ID NO: 89735 - protein, 8 aa, Homo sapiens
  misc_feature: Table A; Target 89735; HLA-C*16:01; TRPM1; ENSG00000134160; TAA
ISHVGDAL

SEQ ID NO: 89736 - protein, 8 aa, Homo sapiens
  misc_feature: Table A; Target 89736; HLA-C*16:02; TRPM1; ENSG00000134160; TAA
ISHVGDAL

SEQ ID NO: 89737 - protein, 9 aa, Homo sapiens
  misc_feature: Table A; Target 89737; HLA-A*31:01; TRPM1; ENSG00000134160; TAA
ISLQKINTR

SEQ ID NO: 89738 - protein, 9 aa, Homo sapiens
  misc_feature: Table A; Target 89738; HLA-A*33:01; TRPM1; ENSG00000134160; TAA
ISLQKINTR

SEQ ID NO: 89739 - protein, 9 aa, Homo sapiens
  misc_feature: Table A; Target 89739; HLA-A*33:03; TRPM1; ENSG00000134160; TAA
ISLQKINTR

SEQ ID NO: 89740 - protein, 9 aa, Homo sapiens
  misc_feature: Table A; Target 89740; HLA-C*07:06; TRPM1; ENSG00000134160; TAA
ISLQKINTR

SEQ ID NO: 89741 - protein, 8 aa, Homo sapiens
  misc_feature: Table A; Target 89741; HLA-B*57:01; TRPM1; ENSG00000134160; TAA
ISNQVWKF

SEQ ID NO: 89742 - protein, 10 aa, Homo sapiens
  misc_feature: Table A; Target 89742; HLA-A*03:02; TRPM1; ENSG00000134160; TAA
ISQDLDNNSK

SEQ ID NO: 89743 - protein, 10 aa, Homo sapiens
  misc_feature: Table A; Target 89743; HLA-A*11:01; TRPM1; ENSG00000134160; TAA
ISQDLDNNSK

SEQ ID NO: 89744 - protein, 10 aa, Homo sapiens
  misc_feature: Table A; Target 89744; HLA-B*57:01; TRPM1; ENSG00000134160; TAA
ISVHGGLQNF

SEQ ID NO: 89745 - protein, 10 aa, Homo sapiens
  misc_feature: Table A; Target 89745; HLA-B*58:01; TRPM1; ENSG00000134160; TAA
ISVHGGLQNF

SEQ ID NO: 89746 - protein, 9 aa, Homo sapiens
  misc_feature: Table A; Target 89746; HLA-C*02:02; TRPM1; ENSG00000134160; TAA
ISYIVSLAL

SEQ ID NO: 89747 - protein, 9 aa, Homo sapiens
  misc_feature: Table A; Target 89747; HLA-C*03:03; TRPM1; ENSG00000134160; TAA
ISYIVSLAL

SEQ ID NO: 89748 - protein, 9 aa, Homo sapiens
  misc_feature: Table A; Target 89748; HLA-C*03:04; TRPM1; ENSG00000134160; TAA
ISYIVSLAL

SEQ ID NO: 89749 - protein, 10 aa, Homo sapiens
  misc_feature: Table A; Target 89749; HLA-B*58:01; TRPM1; ENSG00000134160; TAA
ISYPLEETKI

SEQ ID NO: 89750 - protein, 10 aa, Homo sapiens
  misc_feature: Table A; Target 89750; HLA-C*16:04; TRPM1; ENSG00000134160; TAA
ISYPLEETKI

SEQ ID NO: 89751 - protein, 10 aa, Homo sapiens
  misc_feature: Table A; Target 89751; HLA-A*01:01; TRPM1; ENSG00000134160; TAA
ITDLVAISTF

SEQ ID NO: 89752 - protein, 10 aa, Homo sapiens
  misc_feature: Table A; Target 89752; HLA-B*38:01; TRPM1; ENSG00000134160; TAA
ITDLVAISTF

SEQ ID NO: 89753 - protein, 10 aa, Homo sapiens
  misc_feature: Table A; Target 89753; HLA-C*04:01; TRPM1; ENSG00000134160; TAA
ITDLVAISTF

SEQ ID NO: 89754 - protein, 10 aa, Homo sapiens
  misc_feature: Table A; Target 89754; HLA-C*05:01; TRPM1; ENSG00000134160; TAA
ITDLVAISTF

SEQ ID NO: 89755 - protein, 10 aa, Homo sapiens
  misc_feature: Table A; Target 89755; HLA-A*01:01; TRPM1; ENSG00000134160; TAA
ITDQQLTTEW

SEQ ID NO: 89756 - protein, 10 aa, Homo sapiens
  misc_feature: Table A; Target 89756; HLA-A*25:01; TRPM1; ENSG00000134160; TAA
ITDQQLTTEW

SEQ ID NO: 89757 - protein, 10 aa, Homo sapiens
  misc_feature: Table A; Target 89757; HLA-A*32:01; TRPM1; ENSG00000134160; TAA
ITDQQLTTEW

SEQ ID NO: 89758 - protein, 10 aa, Homo sapiens
  misc_feature: Table A; Target 89758; HLA-B*57:01; TRPM1; ENSG00000134160; TAA
ITDQQLTTEW

SEQ ID NO: 89759 - protein, 10 aa, Homo sapiens
  misc_feature: Table A; Target 89759; HLA-B*58:01; TRPM1; ENSG00000134160; TAA
ITDQQLTTEW

SEQ ID NO: 89760 - protein, 10 aa, Homo sapiens
  misc_feature: Table A; Target 89760; HLA-C*05:01; TRPM1; ENSG00000134160; TAA
ITDQQLTTEW

SEQ ID NO: 89761 - protein, 10 aa, Homo sapiens
  misc_feature: Table A; Target 89761; HLA-C*16:04; TRPM1; ENSG00000134160; TAA
ITDQQLTTEW

SEQ ID NO: 89762 - protein, 9 aa, Homo sapiens
  misc_feature: Table A; Target 89762; HLA-A*01:01; TRPM1; ENSG00000134160; TAA
ITDRNGMEN

SEQ ID NO: 89763 - protein, 10 aa, Homo sapiens
  misc_feature: Table A; Target 89763; HLA-C*05:01; TRPM1; ENSG00000134160; TAA
ITDRNGMENL

SEQ ID NO: 89764 - protein, 11 aa, Homo sapiens
  misc_feature: Table A; Target 89764; HLA-A*01:01; TRPM1; ENSG00000134160; TAA
ITDRNGMENLL

SEQ ID NO: 89765 - protein, 9 aa, Homo sapiens
  misc_feature: Table A; Target 89765; HLA-C*05:01; TRPM1; ENSG00000134160; TAA
IVENKEDLV

SEQ ID NO: 89766 - protein, 11 aa, Homo sapiens
  misc_feature: Table A; Target 89766; HLA-A*03:02; TRPM1; ENSG00000134160; TAA
IVENKEDLVGK

SEQ ID NO: 89767 - protein, 11 aa, Homo sapiens
  misc_feature: Table A; Target 89767; HLA-A*11:01; TRPM1; ENSG00000134160; TAA
IVENKEDLVGK

SEQ ID NO: 89768 - protein, 11 aa, Homo sapiens
  misc_feature: Table A; Target 89768; HLA-B*27:02; TRPM1; ENSG00000134160; TAA
IVENKEDLVGK

SEQ ID NO: 89769 - protein, 9 aa, Homo sapiens
  misc_feature: Table A; Target 89769; HLA-A*02:01; TRPM1; ENSG00000134160; TAA
IVISYIVSL

SEQ ID NO: 89770 - protein, 9 aa, Homo sapiens
  misc_feature: Table A; Target 89770; HLA-A*02:03; TRPM1; ENSG00000134160; TAA
IVISYIVSL

SEQ ID NO: 89771 - protein, 9 aa, Homo sapiens
  misc_feature: Table A; Target 89771; HLA-A*02:04; TRPM1; ENSG00000134160; TAA
IVISYIVSL

SEQ ID NO: 89772 - protein, 9 aa, Homo sapiens
  misc_feature: Table A; Target 89772; HLA-A*02:07; TRPM1; ENSG00000134160; TAA
IVISYIVSL

SEQ ID NO: 89773 - protein, 9 aa, Homo sapiens
  misc_feature: Table A; Target 89773; HLA-A*03:01; TRPM1; ENSG00000134160; TAA
IVISYIVSL

SEQ ID NO: 89774 - protein, 9 aa, Homo sapiens
  misc_feature: Table A; Target 89774; HLA-A*11:01; TRPM1; ENSG00000134160; TAA
IVISYIVSL

SEQ ID NO: 89775 - protein, 9 aa, Homo sapiens
  misc_feature: Table A; Target 89775; HLA-A*23:01; TRPM1; ENSG00000134160; TAA
IVISYIVSL

SEQ ID NO: 89776 - protein, 9 aa, Homo sapiens
  misc_feature: Table A; Target 89776; HLA-A*24:02; TRPM1; ENSG00000134160; TAA
IVISYIVSL

SEQ ID NO: 89777 - protein, 9 aa, Homo sapiens
  misc_feature: Table A; Target 89777; HLA-A*25:01; TRPM1; ENSG00000134160; TAA
IVISYIVSL

SEQ ID NO: 89778 - protein, 9 aa, Homo sapiens
  misc_feature: Table A; Target 89778; HLA-A*26:01; TRPM1; ENSG00000134160; TAA
IVISYIVSL

SEQ ID NO: 89779 - protein, 9 aa, Homo sapiens
  misc_feature: Table A; Target 89779; HLA-A*30:01; TRPM1; ENSG00000134160; TAA
IVISYIVSL

SEQ ID NO: 89780 - protein, 9 aa, Homo sapiens
  misc_feature: Table A; Target 89780; HLA-A*31:01; TRPM1; ENSG00000134160; TAA
IVISYIVSL

SEQ ID NO: 89781 - protein, 9 aa, Homo sapiens
  misc_feature: Table A; Target 89781; HLA-A*32:01; TRPM1; ENSG00000134160; TAA
IVISYIVSL

SEQ ID NO: 89782 - protein, 9 aa, Homo sapiens
  misc_feature: Table A; Target 89782; HLA-A*68:01; TRPM1; ENSG00000134160; TAA
IVISYIVSL

SEQ ID NO: 89783 - protein, 9 aa, Homo sapiens
  misc_feature: Table A; Target 89783; HLA-A*68:02; TRPM1; ENSG00000134160; TAA
IVISYIVSL

SEQ ID NO: 89784 - protein, 9 aa, Homo sapiens
  misc_feature: Table A; Target 89784; HLA-B*07:02; TRPM1; ENSG00000134160; TAA
IVISYIVSL

SEQ ID NO: 89785 - protein, 9 aa, Homo sapiens
  misc_feature: Table A; Target 89785; HLA-B*13:02; TRPM1; ENSG00000134160; TAA
IVISYIVSL

SEQ ID NO: 89786 - protein, 9 aa, Homo sapiens
  misc_feature: Table A; Target 89786; HLA-B*15:01; TRPM1; ENSG00000134160; TAA
IVISYIVSL

SEQ ID NO: 89787 - protein, 9 aa, Homo sapiens
  misc_feature: Table A; Target 89787; HLA-B*35:01; TRPM1; ENSG00000134160; TAA
IVISYIVSL

SEQ ID NO: 89788 - protein, 9 aa, Homo sapiens
  misc_feature: Table A; Target 89788; HLA-B*35:03; TRPM1; ENSG00000134160; TAA
IVISYIVSL

SEQ ID NO: 89789 - protein, 9 aa, Homo sapiens
  misc_feature: Table A; Target 89789; HLA-B*40:01; TRPM1; ENSG00000134160; TAA
IVISYIVSL

SEQ ID NO: 89790 - protein, 9 aa, Homo sapiens
  misc_feature: Table A; Target 89790; HLA-B*46:01; TRPM1; ENSG00000134160; TAA
IVISYIVSL

SEQ ID NO: 89791 - protein, 9 aa, Homo sapiens
  misc_feature: Table A; Target 89791; HLA-B*55:01; TRPM1; ENSG00000134160; TAA
IVISYIVSL

SEQ ID NO: 89792 - protein, 9 aa, Homo sapiens
  misc_feature: Table A; Target 89792; HLA-B*57:01; TRPM1; ENSG00000134160; TAA
IVISYIVSL

SEQ ID NO: 89793 - protein, 9 aa, Homo sapiens
  misc_feature: Table A; Target 89793; HLA-B*58:01; TRPM1; ENSG00000134160; TAA
IVISYIVSL

SEQ ID NO: 89794 - protein, 9 aa, Homo sapiens
  misc_feature: Table A; Target 89794; HLA-C*01:02; TRPM1; ENSG00000134160; TAA
IVISYIVSL

SEQ ID NO: 89795 - protein, 9 aa, Homo sapiens
  misc_feature: Table A; Target 89795; HLA-C*02:02; TRPM1; ENSG00000134160; TAA
IVISYIVSL

SEQ ID NO: 89796 - protein, 9 aa, Homo sapiens
  misc_feature: Table A; Target 89796; HLA-C*03:03; TRPM1; ENSG00000134160; TAA
IVISYIVSL

SEQ ID NO: 89797 - protein, 9 aa, Homo sapiens
  misc_feature: Table A; Target 89797; HLA-C*03:04; TRPM1; ENSG00000134160; TAA
IVISYIVSL

SEQ ID NO: 89798 - protein, 9 aa, Homo sapiens
  misc_feature: Table A; Target 89798; HLA-C*07:04; TRPM1; ENSG00000134160; TAA
IVISYIVSL

SEQ ID NO: 89799 - protein, 9 aa, Homo sapiens
  misc_feature: Table A; Target 89799; HLA-C*12:03; TRPM1; ENSG00000134160; TAA
IVISYIVSL

SEQ ID NO: 89800 - protein, 9 aa, Homo sapiens
  misc_feature: Table A; Target 89800; HLA-C*14:02; TRPM1; ENSG00000134160; TAA
IVISYIVSL

SEQ ID NO: 89801 - protein, 9 aa, Homo sapiens
  misc_feature: Table A; Target 89801; HLA-C*16:02; TRPM1; ENSG00000134160; TAA
IVISYIVSL

SEQ ID NO: 89802 - protein, 9 aa, Homo sapiens
  misc_feature: Table A; Target 89802; HLA-C*16:04; TRPM1; ENSG00000134160; TAA
IVISYIVSL

SEQ ID NO: 89803 - protein, 10 aa, Homo sapiens
  misc_feature: Table A; Target 89803; HLA-A*03:01; TRPM1; ENSG00000134160; TAA
IVSGMTAEEK

SEQ ID NO: 89804 - protein, 10 aa, Homo sapiens
  misc_feature: Table A; Target 89804; HLA-A*03:02; TRPM1; ENSG00000134160; TAA
IVSGMTAEEK

SEQ ID NO: 89805 - protein, 10 aa, Homo sapiens
  misc_feature: Table A; Target 89805; HLA-A*11:01; TRPM1; ENSG00000134160; TAA
IVSGMTAEEK

SEQ ID NO: 89806 - protein, 10 aa, Homo sapiens
  misc_feature: Table A; Target 89806; HLA-B*27:02; TRPM1; ENSG00000134160; TAA
IVSGMTAEEK

SEQ ID NO: 89807 - protein, 11 aa, Homo sapiens
  misc_feature: Table A; Target 89807; HLA-A*03:02; TRPM1; ENSG00000134160; TAA
IVSGMTAEEKK

SEQ ID NO: 89808 - protein, 11 aa, Homo sapiens
  misc_feature: Table A; Target 89808; HLA-A*11:01; TRPM1; ENSG00000134160; TAA
IVSGMTAEEKK

SEQ ID NO: 89809 - protein, 8 aa, Homo sapiens
  misc_feature: Table A; Target 89809; HLA-B*27:02; TRPM1; ENSG00000134160; TAA
IVSLALEK

SEQ ID NO: 89810 - protein, 9 aa, Homo sapiens
  misc_feature: Table A; Target 89810; HLA-B*13:02; TRPM1; ENSG00000134160; TAA
IVSLALEKI

SEQ ID NO: 89811 - protein, 10 aa, Homo sapiens
  misc_feature: Table A; Target 89811; HLA-A*24:02; TRPM1; ENSG00000134160; TAA
IYGEVFADQI

SEQ ID NO: 89812 - protein, 8 aa, Homo sapiens
  misc_feature: Table A; Target 89812; HLA-A*23:01; TRPM1; ENSG00000134160; TAA
IYIIIMRL

SEQ ID NO: 89813 - protein, 8 aa, Homo sapiens
  misc_feature: Table A; Target 89813; HLA-A*24:02; TRPM1; ENSG00000134160; TAA
IYIIIMRL

SEQ ID NO: 89814 - protein, 9 aa, Homo sapiens
  misc_feature: Table A; Target 89814; HLA-A*25:01; TRPM1; ENSG00000134160; TAA
KAAMTTGAW

SEQ ID NO: 89815 - protein, 9 aa, Homo sapiens
  misc_feature: Table A; Target 89815; HLA-B*58:01; TRPM1; ENSG00000134160; TAA
KAAMTTGAW

SEQ ID NO: 89816 - protein, 8 aa, Homo sapiens
  misc_feature: Table A; Target 89816; HLA-B*08:01; TRPM1; ENSG00000134160; TAA
KALVACKL

SEQ ID NO: 89817 - protein, 9 aa, Homo sapiens
  misc_feature: Table A; Target 89817; HLA-B*57:01; TRPM1; ENSG00000134160; TAA
KALVACKLY

SEQ ID NO: 89818 - protein, 9 aa, Homo sapiens
  misc_feature: Table A; Target 89818; HLA-C*07:01; TRPM1; ENSG00000134160; TAA
KALVACKLY

SEQ ID NO: 89819 - protein, 9 aa, Homo sapiens
  misc_feature: Table A; Target 89819; HLA-A*29:02; TRPM1; ENSG00000134160; TAA
KAMYIRVSY

SEQ ID NO: 89820 - protein, 9 aa, Homo sapiens
  misc_feature: Table A; Target 89820; HLA-A*30:02; TRPM1; ENSG00000134160; TAA
KAMYIRVSY

SEQ ID NO: 89821 - protein, 9 aa, Homo sapiens
  misc_feature: Table A; Target 89821; HLA-A*31:01; TRPM1; ENSG00000134160; TAA
KAMYIRVSY

SEQ ID NO: 89822 - protein, 9 aa, Homo sapiens
  misc_feature: Table A; Target 89822; HLA-A*32:01; TRPM1; ENSG00000134160; TAA
KAMYIRVSY

SEQ ID NO: 89823 - protein, 9 aa, Homo sapiens
  misc_feature: Table A; Target 89823; HLA-B*46:01; TRPM1; ENSG00000134160; TAA
KAMYIRVSY

SEQ ID NO: 89824 - protein, 9 aa, Homo sapiens
  misc_feature: Table A; Target 89824; HLA-B*57:01; TRPM1; ENSG00000134160; TAA
KAMYIRVSY

SEQ ID NO: 89825 - protein, 9 aa, Homo sapiens
  misc_feature: Table A; Target 89825; HLA-B*58:01; TRPM1; ENSG00000134160; TAA
KAMYIRVSY

SEQ ID NO: 89826 - protein, 9 aa, Homo sapiens
  misc_feature: Table A; Target 89826; HLA-C*02:02; TRPM1; ENSG00000134160; TAA
KAMYIRVSY

SEQ ID NO: 89827 - protein, 9 aa, Homo sapiens
  misc_feature: Table A; Target 89827; HLA-C*16:01; TRPM1; ENSG00000134160; TAA
KAMYIRVSY

SEQ ID NO: 89828 - protein, 9 aa, Homo sapiens
  misc_feature: Table A; Target 89828; HLA-C*16:02; TRPM1; ENSG00000134160; TAA
KAMYIRVSY

SEQ ID NO: 89829 - protein, 9 aa, Homo sapiens
  misc_feature: Table A; Target 89829; HLA-C*16:04; TRPM1; ENSG00000134160; TAA
KAMYIRVSY

SEQ ID NO: 89830 - protein, 9 aa, Homo sapiens
  misc_feature: Table A; Target 89830; HLA-C*16:02; TRPM1; ENSG00000134160; TAA
KAQSHQLFA

SEQ ID NO: 89831 - protein, 9 aa, Homo sapiens
  misc_feature: Table A; Target 89831; HLA-C*16:02; TRPM1; ENSG00000134160; TAA
KATEKEKKP

SEQ ID NO: 89832 - protein, 8 aa, Homo sapiens
  misc_feature: Table A; Target 89832; HLA-B*37:01; TRPM1; ENSG00000134160; TAA
KDFGQLAL

SEQ ID NO: 89833 - protein, 8 aa, Homo sapiens
  misc_feature: Table A; Target 89833; HLA-B*37:01; TRPM1; ENSG00000134160; TAA
KDVKTHLV

SEQ ID NO: 89834 - protein, 9 aa, Homo sapiens
  misc_feature: Table A; Target 89834; HLA-B*37:01; TRPM1; ENSG00000134160; TAA
KDVTRVYQT

SEQ ID NO: 89835 - protein, 10 aa, Homo sapiens
  misc_feature: Table A; Target 89835; HLA-B*40:02; TRPM1; ENSG00000134160; TAA
KDVTRVYQTM

SEQ ID NO: 89836 - protein, 9 aa, Homo sapiens
  misc_feature: Table A; Target 89836; HLA-B*40:01; TRPM1; ENSG00000134160; TAA
KEDLVGKDV

SEQ ID NO: 89837 - protein, 9 aa, Homo sapiens
  misc_feature: Table A; Target 89837; HLA-B*44:02; TRPM1; ENSG00000134160; TAA
KEDLVGKDV

SEQ ID NO: 89838 - protein, 9 aa, Homo sapiens
  misc_feature: Table A; Target 89838; HLA-B*44:03; TRPM1; ENSG00000134160; TAA
KEDLVGKDV

SEQ ID NO: 89839 - protein, 9 aa, Homo sapiens
  misc_feature: Table A; Target 89839; HLA-B*49:01; TRPM1; ENSG00000134160; TAA
KEDLVGKDV

SEQ ID NO: 89840 - protein, 10 aa, Homo sapiens
  misc_feature: Table A; Target 89840; HLA-B*40:01; TRPM1; ENSG00000134160; TAA
KEDLVGKDVT

SEQ ID NO: 89841 - protein, 9 aa, Homo sapiens
  misc_feature: Table A; Target 89841; HLA-B*40:01; TRPM1; ENSG00000134160; TAA
KEEEIDIDV

SEQ ID NO: 89842 - protein, 9 aa, Homo sapiens
  misc_feature: Table A; Target 89842; HLA-B*49:01; TRPM1; ENSG00000134160; TAA
KEEEIDIDV

SEQ ID NO: 89843 - protein, 10 aa, Homo sapiens
  misc_feature: Table A; Target 89843; HLA-B*40:01; TRPM1; ENSG00000134160; TAA
KEEKDVKTHL

SEQ ID NO: 89844 - protein, 9 aa, Homo sapiens
  misc_feature: Table A; Target 89844; HLA-A*30:01; TRPM1; ENSG00000134160; TAA
KEETISPSL

SEQ ID NO: 89845 - protein, 9 aa, Homo sapiens
  misc_feature: Table A; Target 89845; HLA-B*18:01; TRPM1; ENSG00000134160; TAA
KEETISPSL

SEQ ID NO: 89846 - protein, 9 aa, Homo sapiens
  misc_feature: Table A; Target 89846; HLA-B*27:02; TRPM1; ENSG00000134160; TAA
KEETISPSL

SEQ ID NO: 89847 - protein, 9 aa, Homo sapiens
  misc_feature: Table A; Target 89847; HLA-B*37:01; TRPM1; ENSG00000134160; TAA
KEETISPSL

SEQ ID NO: 89848 - protein, 9 aa, Homo sapiens
  misc_feature: Table A; Target 89848; HLA-B*40:01; TRPM1; ENSG00000134160; TAA
KEETISPSL

SEQ ID NO: 89849 - protein, 9 aa, Homo sapiens
  misc_feature: Table A; Target 89849; HLA-B*40:02; TRPM1; ENSG00000134160; TAA
KEETISPSL

SEQ ID NO: 89850 - protein, 9 aa, Homo sapiens
  misc_feature: Table A; Target 89850; HLA-B*44:02; TRPM1; ENSG00000134160; TAA
KEETISPSL

SEQ ID NO: 89851 - protein, 9 aa, Homo sapiens
  misc_feature: Table A; Target 89851; HLA-B*44:03; TRPM1; ENSG00000134160; TAA
KEETISPSL

SEQ ID NO: 89852 - protein, 9 aa, Homo sapiens
  misc_feature: Table A; Target 89852; HLA-B*49:01; TRPM1; ENSG00000134160; TAA
KEETISPSL

SEQ ID NO: 89853 - protein, 9 aa, Homo sapiens
  misc_feature: Table A; Target 89853; HLA-C*16:04; TRPM1; ENSG00000134160; TAA
KEETISPSL

SEQ ID NO: 89854 - protein, 11 aa, Homo sapiens
  misc_feature: Table A; Target 89854; HLA-A*03:01; TRPM1; ENSG00000134160; TAA
KEETISPSLNK

SEQ ID NO: 89855 - protein, 11 aa, Homo sapiens
  misc_feature: Table A; Target 89855; HLA-A*03:02; TRPM1; ENSG00000134160; TAA
KEETISPSLNK

SEQ ID NO: 89856 - protein, 10 aa, Homo sapiens
  misc_feature: Table A; Target 89856; HLA-B*40:02; TRPM1; ENSG00000134160; TAA
KEKASTETEC

SEQ ID NO: 89857 - protein, 9 aa, Homo sapiens
  misc_feature: Table A; Target 89857; HLA-B*37:01; TRPM1; ENSG00000134160; TAA
KELVTVFRM

SEQ ID NO: 89858 - protein, 9 aa, Homo sapiens
  misc_feature: Table A; Target 89858; HLA-A*29:02; TRPM1; ENSG00000134160; TAA
KFWFYTISY

SEQ ID NO: 89859 - protein, 8 aa, Homo sapiens
  misc_feature: Table A; Target 89859; HLA-B*08:01; TRPM1; ENSG00000134160; TAA
KGLIKAAM

SEQ ID NO: 89860 - protein, 8 aa, Homo sapiens
  misc_feature: Table A; Target 89860; HLA-B*38:01; TRPM1; ENSG00000134160; TAA
KHDEQIAM

SEQ ID NO: 89861 - protein, 8 aa, Homo sapiens
  misc_feature: Table A; Target 89861; HLA-C*05:01; TRPM1; ENSG00000134160; TAA
KHDEQIAM

SEQ ID NO: 89862 - protein, 10 aa, Homo sapiens
  misc_feature: Table A; Target 89862; HLA-B*38:01; TRPM1; ENSG00000134160; TAA
KHDEQIAMKL

SEQ ID NO: 89863 - protein, 11 aa, Homo sapiens
  misc_feature: Table A; Target 89863; HLA-A*31:01; TRPM1; ENSG00000134160; TAA
KHISLQKINTR

SEQ ID NO: 89864 - protein, 8 aa, Homo sapiens
  misc_feature: Table A; Target 89864; HLA-B*15:03; TRPM1; ENSG00000134160; TAA
KKELVTVF

SEQ ID NO: 89865 - protein, 9 aa, Homo sapiens
  misc_feature: Table A; Target 89865; HLA-B*15:03; TRPM1; ENSG00000134160; TAA
KKKELVTVF

SEQ ID NO: 89866 - protein, 8 aa, Homo sapiens
  misc_feature: Table A; Target 89866; HLA-C*04:01; TRPM1; ENSG00000134160; TAA
KKKKKKKK

SEQ ID NO: 89867 - protein, 9 aa, Homo sapiens
  misc_feature: Table A; Target 89867; HLA-B*15:03; TRPM1; ENSG00000134160; TAA
KKSNLPPDY

SEQ ID NO: 89868 - protein, 9 aa, Homo sapiens
  misc_feature: Table A; Target 89868; HLA-A*02:01; TRPM1; ENSG00000134160; TAA
KLFLSDEEL

SEQ ID NO: 89869 - protein, 9 aa, Homo sapiens
  misc_feature: Table A; Target 89869; HLA-A*02:04; TRPM1; ENSG00000134160; TAA
KLFLSDEEL

SEQ ID NO: 89870 - protein, 9 aa, Homo sapiens
  misc_feature: Table A; Target 89870; HLA-B*40:01; TRPM1; ENSG00000134160; TAA
KLFLSDEEL

SEQ ID NO: 89871 - protein, 8 aa, Homo sapiens
  misc_feature: Table A; Target 89871; HLA-A*02:01; TRPM1; ENSG00000134160; TAA
KLGPDIGI

SEQ ID NO: 89872 - protein, 10 aa, Homo sapiens
  misc_feature: Table A; Target 89872; HLA-A*03:01; TRPM1; ENSG00000134160; TAA
KLGPDIGISK

SEQ ID NO: 89873 - protein, 10 aa, Homo sapiens
  misc_feature: Table A; Target 89873; HLA-A*03:02; TRPM1; ENSG00000134160; TAA
KLGPDIGISK

SEQ ID NO: 89874 - protein, 10 aa, Homo sapiens
  misc_feature: Table A; Target 89874; HLA-A*11:01; TRPM1; ENSG00000134160; TAA
KLGPDIGISK

SEQ ID NO: 89875 - protein, 10 aa, Homo sapiens
  misc_feature: Table A; Target 89875; HLA-A*31:01; TRPM1; ENSG00000134160; TAA
KLGPDIGISK

SEQ ID NO: 89876 - protein, 10 aa, Homo sapiens
  misc_feature: Table A; Target 89876; HLA-A*32:01; TRPM1; ENSG00000134160; TAA
KLGPDIGISK

SEQ ID NO: 89877 - protein, 10 aa, Homo sapiens
  misc_feature: Table A; Target 89877; HLA-B*27:02; TRPM1; ENSG00000134160; TAA
KLGPDIGISK

SEQ ID NO: 89878 - protein, 10 aa, Homo sapiens
  misc_feature: Table A; Target 89878; HLA-B*58:01; TRPM1; ENSG00000134160; TAA
KLGPDIGISK

SEQ ID NO: 89879 - protein, 10 aa, Homo sapiens
  misc_feature: Table A; Target 89879; HLA-C*01:02; TRPM1; ENSG00000134160; TAA
KLGPDIGISK

SEQ ID NO: 89880 - protein, 10 aa, Homo sapiens
  misc_feature: Table A; Target 89880; HLA-B*57:01; TRPM1; ENSG00000134160; TAA
KLLTYELKNW

SEQ ID NO: 89881 - protein, 9 aa, Homo sapiens
  misc_feature: Table A; Target 89881; HLA-A*31:01; TRPM1; ENSG00000134160; TAA
KMAVFLWQR

SEQ ID NO: 89882 - protein, 11 aa, Homo sapiens
  misc_feature: Table A; Target 89882; HLA-B*07:02; TRPM1; ENSG00000134160; TAA
KPDQTLGFPSL

SEQ ID NO: 89883 - protein, 11 aa, Homo sapiens
  misc_feature: Table A; Target 89883; HLA-B*35:03; TRPM1; ENSG00000134160; TAA
KPDQTLGFPSL

SEQ ID NO: 89884 - protein, 11 aa, Homo sapiens
  misc_feature: Table A; Target 89884; HLA-C*07:02; TRPM1; ENSG00000134160; TAA
KPDQTLGFPSL

SEQ ID NO: 89885 - protein, 10 aa, Homo sapiens
  misc_feature: Table A; Target 89885; HLA-A*03:01; TRPM1; ENSG00000134160; TAA
KQRSIPIGTK

SEQ ID NO: 89886 - protein, 10 aa, Homo sapiens
  misc_feature: Table A; Target 89886; HLA-A*25:01; TRPM1; ENSG00000134160; TAA
KQVETQPEKW

SEQ ID NO: 89887 - protein, 10 aa, Homo sapiens
  misc_feature: Table A; Target 89887; HLA-A*32:01; TRPM1; ENSG00000134160; TAA
KQVETQPEKW

SEQ ID NO: 89888 - protein, 10 aa, Homo sapiens
  misc_feature: Table A; Target 89888; HLA-B*44:02; TRPM1; ENSG00000134160; TAA
KQVETQPEKW

SEQ ID NO: 89889 - protein, 10 aa, Homo sapiens
  misc_feature: Table A; Target 89889; HLA-B*44:03; TRPM1; ENSG00000134160; TAA
KQVETQPEKW

SEQ ID NO: 89890 - protein, 10 aa, Homo sapiens
  misc_feature: Table A; Target 89890; HLA-B*57:01; TRPM1; ENSG00000134160; TAA
KQVETQPEKW

SEQ ID NO: 89891 - protein, 10 aa, Homo sapiens
  misc_feature: Table A; Target 89891; HLA-B*58:01; TRPM1; ENSG00000134160; TAA
KQVETQPEKW

SEQ ID NO: 89892 - protein, 10 aa, Homo sapiens
  misc_feature: Table A; Target 89892; HLA-C*16:04; TRPM1; ENSG00000134160; TAA
KQVETQPEKW

SEQ ID NO: 89893 - protein, 9 aa, Homo sapiens
  misc_feature: Table A; Target 89893; HLA-A*01:01; TRPM1; ENSG00000134160; TAA
KSDVQNTQL

SEQ ID NO: 89894 - protein, 9 aa, Homo sapiens
  misc_feature: Table A; Target 89894; HLA-A*02:07; TRPM1; ENSG00000134160; TAA
KSDVQNTQL

SEQ ID NO: 89895 - protein, 9 aa, Homo sapiens
  misc_feature: Table A; Target 89895; HLA-B*40:01; TRPM1; ENSG00000134160; TAA
KSDVQNTQL

SEQ ID NO: 89896 - protein, 9 aa, Homo sapiens
  misc_feature: Table A; Target 89896; HLA-B*58:01; TRPM1; ENSG00000134160; TAA
KSDVQNTQL

SEQ ID NO: 89897 - protein, 9 aa, Homo sapiens
  misc_feature: Table A; Target 89897; HLA-C*05:01; TRPM1; ENSG00000134160; TAA
KSDVQNTQL

SEQ ID NO: 89898 - protein, 8 aa, Homo sapiens
  misc_feature: Table A; Target 89898; HLA-B*57:01; TRPM1; ENSG00000134160; TAA
KSISNQVW

SEQ ID NO: 89899 - protein, 8 aa, Homo sapiens
  misc_feature: Table A; Target 89899; HLA-B*58:01; TRPM1; ENSG00000134160; TAA
KSISNQVW

SEQ ID NO: 89900 - protein, 10 aa, Homo sapiens
  misc_feature: Table A; Target 89900; HLA-B*57:01; TRPM1; ENSG00000134160; TAA
KSISNQVWKF

SEQ ID NO: 89901 - protein, 10 aa, Homo sapiens
  misc_feature: Table A; Target 89901; HLA-B*58:01; TRPM1; ENSG00000134160; TAA
KSISNQVWKF

SEQ ID NO: 89902 - protein, 8 aa, Homo sapiens
  misc_feature: Table A; Target 89902; HLA-A*30:02; TRPM1; ENSG00000134160; TAA
KSNLPPDY

SEQ ID NO: 89903 - protein, 9 aa, Homo sapiens
  misc_feature: Table A; Target 89903; HLA-A*31:01; TRPM1; ENSG00000134160; TAA
KSRSFVYSR

SEQ ID NO: 89904 - protein, 10 aa, Homo sapiens
  misc_feature: Table A; Target 89904; HLA-A*01:01; TRPM1; ENSG00000134160; TAA
KTDVIHGQDK

SEQ ID NO: 89905 - protein, 10 aa, Homo sapiens
  misc_feature: Table A; Target 89905; HLA-A*03:02; TRPM1; ENSG00000134160; TAA
KTDVIHGQDK

SEQ ID NO: 89906 - protein, 10 aa, Homo sapiens
  misc_feature: Table A; Target 89906; HLA-A*03:01; TRPM1; ENSG00000134160; TAA
KTMKSRSFVY

SEQ ID NO: 89907 - protein, 10 aa, Homo sapiens
  misc_feature: Table A; Target 89907; HLA-B*57:01; TRPM1; ENSG00000134160; TAA
KTMKSRSFVY

SEQ ID NO: 89908 - protein, 9 aa, Homo sapiens
  misc_feature: Table A; Target 89908; HLA-B*40:01; TRPM1; ENSG00000134160; TAA
KTSLQTVDL

SEQ ID NO: 89909 - protein, 9 aa, Homo sapiens
  misc_feature: Table A; Target 89909; HLA-A*31:01; TRPM1; ENSG00000134160; TAA
KYGAEVKLR

SEQ ID NO: 89910 - protein, 8 aa, Homo sapiens
  misc_feature: Table A; Target 89910; HLA-A*23:01; TRPM1; ENSG00000134160; TAA
KYLGPYVM

SEQ ID NO: 89911 - protein, 8 aa, Homo sapiens
  misc_feature: Table A; Target 89911; HLA-A*24:02; TRPM1; ENSG00000134160; TAA
KYLGPYVM

SEQ ID NO: 89912 - protein, 9 aa, Homo sapiens
  misc_feature: Table A; Target 89912; HLA-A*24:02; TRPM1; ENSG00000134160; TAA
KYLGPYVMM

SEQ ID NO: 89913 - protein, 10 aa, Homo sapiens
  misc_feature: Table A; Target 89913; HLA-A*23:01; TRPM1; ENSG00000134160; TAA
KYLGPYVMMI

SEQ ID NO: 89914 - protein, 10 aa, Homo sapiens
  misc_feature: Table A; Target 89914; HLA-A*24:02; TRPM1; ENSG00000134160; TAA
KYLGPYVMMI

SEQ ID NO: 89915 - protein, 8 aa, Homo sapiens
  misc_feature: Table A; Target 89915; HLA-C*05:01; TRPM1; ENSG00000134160; TAA
LADNGTLG

SEQ ID NO: 89916 - protein, 9 aa, Homo sapiens
  misc_feature: Table A; Target 89916; HLA-A*01:01; TRPM1; ENSG00000134160; TAA
LADNGTLGK

SEQ ID NO: 89917 - protein, 9 aa, Homo sapiens
  misc_feature: Table A; Target 89917; HLA-C*05:01; TRPM1; ENSG00000134160; TAA
LADNGTLGK

SEQ ID NO: 89918 - protein, 10 aa, Homo sapiens
  misc_feature: Table A; Target 89918; HLA-A*01:01; TRPM1; ENSG00000134160; TAA
LADNGTLGKY

SEQ ID NO: 89919 - protein, 10 aa, Homo sapiens
  misc_feature: Table A; Target 89919; HLA-A*26:01; TRPM1; ENSG00000134160; TAA
LADNGTLGKY

SEQ ID NO: 89920 - protein, 10 aa, Homo sapiens
  misc_feature: Table A; Target 89920; HLA-A*29:02; TRPM1; ENSG00000134160; TAA
LADNGTLGKY

SEQ ID NO: 89921 - protein, 10 aa, Homo sapiens
  misc_feature: Table A; Target 89921; HLA-A*30:02; TRPM1; ENSG00000134160; TAA
LADNGTLGKY

SEQ ID NO: 89922 - protein, 10 aa, Homo sapiens
  misc_feature: Table A; Target 89922; HLA-B*35:01; TRPM1; ENSG00000134160; TAA
LADNGTLGKY

SEQ ID NO: 89923 - protein, 10 aa, Homo sapiens
  misc_feature: Table A; Target 89923; HLA-B*46:01; TRPM1; ENSG00000134160; TAA
LADNGTLGKY

SEQ ID NO: 89924 - protein, 10 aa, Homo sapiens
  misc_feature: Table A; Target 89924; HLA-B*55:01; TRPM1; ENSG00000134160; TAA
LADNGTLGKY

SEQ ID NO: 89925 - protein, 10 aa, Homo sapiens
  misc_feature: Table A; Target 89925; HLA-C*05:01; TRPM1; ENSG00000134160; TAA
LADNGTLGKY

SEQ ID NO: 89926 - protein, 10 aa, Homo sapiens
  misc_feature: Table A; Target 89926; HLA-C*16:02; TRPM1; ENSG00000134160; TAA
LADNGTLGKY

SEQ ID NO: 89927 - protein, 9 aa, Homo sapiens
  misc_feature: Table A; Target 89927; HLA-B*51:01; TRPM1; ENSG00000134160; TAA
LALEKIREI

SEQ ID NO: 89928 - protein, 10 aa, Homo sapiens
  misc_feature: Table A; Target 89928; HLA-A*29:02; TRPM1; ENSG00000134160; TAA
LALELLDQSY

SEQ ID NO: 89929 - protein, 10 aa, Homo sapiens
  misc_feature: Table A; Target 89929; HLA-A*30:02; TRPM1; ENSG00000134160; TAA
LALELLDQSY

SEQ ID NO: 89930 - protein, 10 aa, Homo sapiens
  misc_feature: Table A; Target 89930; HLA-B*27:02; TRPM1; ENSG00000134160; TAA
LALELLDQSY

SEQ ID NO: 89931 - protein, 10 aa, Homo sapiens
  misc_feature: Table A; Target 89931; HLA-B*35:01; TRPM1; ENSG00000134160; TAA
LALELLDQSY

SEQ ID NO: 89932 - protein, 10 aa, Homo sapiens
  misc_feature: Table A; Target 89932; HLA-C*16:04; TRPM1; ENSG00000134160; TAA
LALELLDQSY

SEQ ID NO: 89933 - protein, 11 aa, Homo sapiens
  misc_feature: Table A; Target 89933; HLA-B*27:02; TRPM1; ENSG00000134160; TAA
LALELLDQSYK

SEQ ID NO: 89934 - protein, 10 aa, Homo sapiens
  misc_feature: Table A; Target 89934; HLA-B*27:02; TRPM1; ENSG00000134160; TAA
LAQLEELSNR

SEQ ID NO: 89935 - protein, 9 aa, Homo sapiens
  misc_feature: Table A; Target 89935; HLA-B*54:01; TRPM1; ENSG00000134160; TAA
LAWNRVDIA

SEQ ID NO: 89936 - protein, 8 aa, Homo sapiens
  misc_feature: Table A; Target 89936; HLA-B*27:02; TRPM1; ENSG00000134160; TAA
LDALVLDR

SEQ ID NO: 89937 - protein, 10 aa, Homo sapiens
  misc_feature: Table A; Target 89937; HLA-B*40:01; TRPM1; ENSG00000134160; TAA
LEEINERETF

SEQ ID NO: 89938 - protein, 10 aa, Homo sapiens
  misc_feature: Table A; Target 89938; HLA-B*44:02; TRPM1; ENSG00000134160; TAA
LEEINERETF

SEQ ID NO: 89939 - protein, 10 aa, Homo sapiens
  misc_feature: Table A; Target 89939; HLA-B*44:03; TRPM1; ENSG00000134160; TAA
LEEINERETF

SEQ ID NO: 89940 - protein, 8 aa, Homo sapiens
  misc_feature: Table A; Target 89940; HLA-B*18:01; TRPM1; ENSG00000134160; TAA
LEELSNRM

SEQ ID NO: 89941 - protein, 9 aa, Homo sapiens
  misc_feature: Table A; Target 89941; HLA-B*49:01; TRPM1; ENSG00000134160; TAA
LEELSNRMV

SEQ ID NO: 89942 - protein, 9 aa, Homo sapiens
  misc_feature: Table A; Target 89942; HLA-B*40:01; TRPM1; ENSG00000134160; TAA
LEELYNTRL

SEQ ID NO: 89943 - protein, 9 aa, Homo sapiens
  misc_feature: Table A; Target 89943; HLA-B*18:01; TRPM1; ENSG00000134160; TAA
LEETKITRY

SEQ ID NO: 89944 - protein, 9 aa, Homo sapiens
  misc_feature: Table A; Target 89944; HLA-B*44:02; TRPM1; ENSG00000134160; TAA
LEETKITRY

SEQ ID NO: 89945 - protein, 9 aa, Homo sapiens
  misc_feature: Table A; Target 89945; HLA-B*44:03; TRPM1; ENSG00000134160; TAA
LEETKITRY

SEQ ID NO: 89946 - protein, 8 aa, Homo sapiens
  misc_feature: Table A; Target 89946; HLA-B*18:01; TRPM1; ENSG00000134160; TAA
LEFQGGGY

SEQ ID NO: 89947 - protein, 8 aa, Homo sapiens
  misc_feature: Table A; Target 89947; HLA-B*39:01; TRPM1; ENSG00000134160; TAA
LEFQGGGY

SEQ ID NO: 89948 - protein, 8 aa, Homo sapiens
  misc_feature: Table A; Target 89948; HLA-B*44:03; TRPM1; ENSG00000134160; TAA
LEFQGGGY

SEQ ID NO: 89949 - protein, 8 aa, Homo sapiens
  misc_feature: Table A; Target 89949; HLA-C*16:04; TRPM1; ENSG00000134160; TAA
LEFQGGGY

SEQ ID NO: 89950 - protein, 10 aa, Homo sapiens
  misc_feature: Table A; Target 89950; HLA-A*30:01; TRPM1; ENSG00000134160; TAA
LEFQGGGYSN

SEQ ID NO: 89951 - protein, 10 aa, Homo sapiens
  misc_feature: Table A; Target 89951; HLA-B*18:01; TRPM1; ENSG00000134160; TAA
LEFQGGGYSN

SEQ ID NO: 89952 - protein, 10 aa, Homo sapiens
  misc_feature: Table A; Target 89952; HLA-B*27:05; TRPM1; ENSG00000134160; TAA
LEFQGGGYSN

SEQ ID NO: 89953 - protein, 10 aa, Homo sapiens
  misc_feature: Table A; Target 89953; HLA-B*40:01; TRPM1; ENSG00000134160; TAA
LEFQGGGYSN

SEQ ID NO: 89954 - protein, 10 aa, Homo sapiens
  misc_feature: Table A; Target 89954; HLA-B*40:02; TRPM1; ENSG00000134160; TAA
LEFQGGGYSN

SEQ ID NO: 89955 - protein, 10 aa, Homo sapiens
  misc_feature: Table A; Target 89955; HLA-B*49:01; TRPM1; ENSG00000134160; TAA
LEFQGGGYSN

SEQ ID NO: 89956 - protein, 11 aa, Homo sapiens
  misc_feature: Table A; Target 89956; HLA-B*27:05; TRPM1; ENSG00000134160; TAA
LEFQGGGYSNK

SEQ ID NO: 89957 - protein, 11 aa, Homo sapiens
  misc_feature: Table A; Target 89957; HLA-B*49:01; TRPM1; ENSG00000134160; TAA
LEFQGGGYSNK

SEQ ID NO: 89958 - protein, 8 aa, Homo sapiens
  misc_feature: Table A; Target 89958; HLA-B*18:01; TRPM1; ENSG00000134160; TAA
LELLDQSY

SEQ ID NO: 89959 - protein, 10 aa, Homo sapiens
  misc_feature: Table A; Target 89959; HLA-B*49:01; TRPM1; ENSG00000134160; TAA
LELPKLLISV

SEQ ID NO: 89960 - protein, 9 aa, Homo sapiens
  misc_feature: Table A; Target 89960; HLA-A*30:01; TRPM1; ENSG00000134160; TAA
LEQAMLDAL

SEQ ID NO: 89961 - protein, 9 aa, Homo sapiens
  misc_feature: Table A; Target 89961; HLA-B*18:01; TRPM1; ENSG00000134160; TAA
LEQAMLDAL

SEQ ID NO: 89962 - protein, 9 aa, Homo sapiens
  misc_feature: Table A; Target 89962; HLA-B*40:01; TRPM1; ENSG00000134160; TAA
LEQAMLDAL

SEQ ID NO: 89963 - protein, 9 aa, Homo sapiens
  misc_feature: Table A; Target 89963; HLA-B*40:02; TRPM1; ENSG00000134160; TAA
LEQAMLDAL

SEQ ID NO: 89964 - protein, 9 aa, Homo sapiens
  misc_feature: Table A; Target 89964; HLA-B*49:01; TRPM1; ENSG00000134160; TAA
LEQAMLDAL

SEQ ID NO: 89965 - protein, 9 aa, Homo sapiens
  misc_feature: Table A; Target 89965; HLA-B*18:01; TRPM1; ENSG00000134160; TAA
LEYLMGGAY

SEQ ID NO: 89966 - protein, 9 aa, Homo sapiens
  misc_feature: Table A; Target 89966; HLA-B*44:02; TRPM1; ENSG00000134160; TAA
LEYLMGGAY

SEQ ID NO: 89967 - protein, 9 aa, Homo sapiens
  misc_feature: Table A; Target 89967; HLA-B*44:03; TRPM1; ENSG00000134160; TAA
LEYLMGGAY

SEQ ID NO: 89968 - protein, 9 aa, Homo sapiens
  misc_feature: Table A; Target 89968; HLA-C*16:04; TRPM1; ENSG00000134160; TAA
LEYLMGGAY

SEQ ID NO: 89969 - protein, 9 aa, Homo sapiens
  misc_feature: Table A; Target 89969; HLA-A*03:01; TRPM1; ENSG00000134160; TAA
LGFPSLRSK

SEQ ID NO: 89970 - protein, 9 aa, Homo sapiens
  misc_feature: Table A; Target 89970; HLA-A*11:01; TRPM1; ENSG00000134160; TAA
LGFPSLRSK

SEQ ID NO: 89971 - protein, 8 aa, Homo sapiens
  misc_feature: Table A; Target 89971; HLA-B*46:01; TRPM1; ENSG00000134160; TAA
LGKYGAEV

SEQ ID NO: 89972 - protein, 9 aa, Homo sapiens
  misc_feature: Table A; Target 89972; HLA-A*11:01; TRPM1; ENSG00000134160; TAA
LGPDIGISK

SEQ ID NO: 89973 - protein, 9 aa, Homo sapiens
  misc_feature: Table A; Target 89973; HLA-C*01:02; TRPM1; ENSG00000134160; TAA
LGPPNTLHL

SEQ ID NO: 89974 - protein, 10 aa, Homo sapiens
  misc_feature: Table A; Target 89974; HLA-A*02:07; TRPM1; ENSG00000134160; TAA
LGPPNTLHLL

SEQ ID NO: 89975 - protein, 8 aa, Homo sapiens
  misc_feature: Table A; Target 89975; HLA-B*51:01; TRPM1; ENSG00000134160; TAA
LGPYVMMI

SEQ ID NO: 89976 - protein, 10 aa, Homo sapiens
  misc_feature: Table A; Target 89976; HLA-B*27:02; TRPM1; ENSG00000134160; TAA
LGPYVMMIGK

SEQ ID NO: 89977 - protein, 9 aa, Homo sapiens
  misc_feature: Table A; Target 89977; HLA-A*29:02; TRPM1; ENSG00000134160; TAA
LGYLLLFNY

SEQ ID NO: 89978 - protein, 9 aa, Homo sapiens
  misc_feature: Table A; Target 89978; HLA-B*38:01; TRPM1; ENSG00000134160; TAA
LHEFEEQCV

SEQ ID NO: 89979 - protein, 9 aa, Homo sapiens
  misc_feature: Table A; Target 89979; HLA-A*32:01; TRPM1; ENSG00000134160; TAA
LIAVFNNTF

SEQ ID NO: 89980 - protein, 9 aa, Homo sapiens
  misc_feature: Table A; Target 89980; HLA-B*15:01; TRPM1; ENSG00000134160; TAA
LIAVFNNTF

SEQ ID NO: 89981 - protein, 9 aa, Homo sapiens
  misc_feature: Table A; Target 89981; HLA-B*46:01; TRPM1; ENSG00000134160; TAA
LIAVFNNTF

SEQ ID NO: 89982 - protein, 9 aa, Homo sapiens
  misc_feature: Table A; Target 89982; HLA-B*58:01; TRPM1; ENSG00000134160; TAA
LIAVFNNTF

SEQ ID NO: 89983 - protein, 9 aa, Homo sapiens
  misc_feature: Table A; Target 89983; HLA-C*02:02; TRPM1; ENSG00000134160; TAA
LIAVFNNTF

SEQ ID NO: 89984 - protein, 8 aa, Homo sapiens
  misc_feature: Table A; Target 89984; HLA-C*05:01; TRPM1; ENSG00000134160; TAA
LIDIGLVL

SEQ ID NO: 89985 - protein, 10 aa, Homo sapiens
  misc_feature: Table A; Target 89985; HLA-A*01:01; TRPM1; ENSG00000134160; TAA
LIDIGLVLEY

SEQ ID NO: 89986 - protein, 10 aa, Homo sapiens
  misc_feature: Table A; Target 89986; HLA-A*29:02; TRPM1; ENSG00000134160; TAA
LIDIGLVLEY

SEQ ID NO: 89987 - protein, 8 aa, Homo sapiens
  misc_feature: Table A; Target 89987; HLA-C*05:01; TRPM1; ENSG00000134160; TAA
LIENGVNM

SEQ ID NO: 89988 - protein, 8 aa, Homo sapiens
  misc_feature: Table A; Target 89988; HLA-A*02:04; TRPM1; ENSG00000134160; TAA
LLFEDTSL

SEQ ID NO: 89989 - protein, 9 aa, Homo sapiens
  misc_feature: Table A; Target 89989; HLA-A*02:01; TRPM1; ENSG00000134160; TAA
LLFNYVILV

SEQ ID NO: 89990 - protein, 9 aa, Homo sapiens
  misc_feature: Table A; Target 89990; HLA-A*02:03; TRPM1; ENSG00000134160; TAA
LLFNYVILV

SEQ ID NO: 89991 - protein, 9 aa, Homo sapiens
  misc_feature: Table A; Target 89991; HLA-A*02:04; TRPM1; ENSG00000134160; TAA
LLFNYVILV

SEQ ID NO: 89992 - protein, 9 aa, Homo sapiens
  misc_feature: Table A; Target 89992; HLA-A*02:07; TRPM1; ENSG00000134160; TAA
LLFNYVILV

SEQ ID NO: 89993 - protein, 9 aa, Homo sapiens
  misc_feature: Table A; Target 89993; HLA-A*68:02; TRPM1; ENSG00000134160; TAA
LLFNYVILV

SEQ ID NO: 89994 - protein, 9 aa, Homo sapiens
  misc_feature: Table A; Target 89994; HLA-A*02:01; TRPM1; ENSG00000134160; TAA
LLIENGVNM

SEQ ID NO: 89995 - protein, 9 aa, Homo sapiens
  misc_feature: Table A; Target 89995; HLA-A*02:07; TRPM1; ENSG00000134160; TAA
LLIENGVNM

SEQ ID NO: 89996 - protein, 9 aa, Homo sapiens
  misc_feature: Table A; Target 89996; HLA-B*15:01; TRPM1; ENSG00000134160; TAA
LLIENGVNM

SEQ ID NO: 89997 - protein, 9 aa, Homo sapiens
  misc_feature: Table A; Target 89997; HLA-B*46:01; TRPM1; ENSG00000134160; TAA
LLIENGVNM

SEQ ID NO: 89998 - protein, 9 aa, Homo sapiens
  misc_feature: Table A; Target 89998; HLA-C*01:02; TRPM1; ENSG00000134160; TAA
LLIENGVNM

SEQ ID NO: 89999 - protein, 9 aa, Homo sapiens
  misc_feature: Table A; Target 89999; HLA-C*03:03; TRPM1; ENSG00000134160; TAA
LLIENGVNM

SEQ ID NO: 90000 - protein, 9 aa, Homo sapiens
  misc_feature: Table A; Target 90000; HLA-C*03:04; TRPM1; ENSG00000134160; TAA
LLIENGVNM

SEQ ID NO: 90001 - protein, 9 aa, Homo sapiens
  misc_feature: Table A; Target 90001; HLA-C*05:01; TRPM1; ENSG00000134160; TAA
LLIENGVNM

SEQ ID NO: 90002 - protein, 9 aa, Homo sapiens
  misc_feature: Table A; Target 90002; HLA-C*14:02; TRPM1; ENSG00000134160; TAA
LLIENGVNM

SEQ ID NO: 90003 - protein, 9 aa, Homo sapiens
  misc_feature: Table A; Target 90003; HLA-A*02:03; TRPM1; ENSG00000134160; TAA
LLKGTNVSA

SEQ ID NO: 90004 - protein, 9 aa, Homo sapiens
  misc_feature: Table A; Target 90004; HLA-A*32:01; TRPM1; ENSG00000134160; TAA
LLKGTNVSA

SEQ ID NO: 90005 - protein, 9 aa, Homo sapiens
  misc_feature: Table A; Target 90005; HLA-B*08:01; TRPM1; ENSG00000134160; TAA
LLKGTNVSA

SEQ ID NO: 90006 - protein, 9 aa, Homo sapiens
  misc_feature: Table A; Target 90006; HLA-B*46:01; TRPM1; ENSG00000134160; TAA
LLKGTNVSA

SEQ ID NO: 90007 - protein, 9 aa, Homo sapiens
  misc_feature: Table A; Target 90007; HLA-A*02:01; TRPM1; ENSG00000134160; TAA
LLPPTILFL

SEQ ID NO: 90008 - protein, 9 aa, Homo sapiens
  misc_feature: Table A; Target 90008; HLA-A*02:03; TRPM1; ENSG00000134160; TAA
LLPPTILFL

SEQ ID NO: 90009 - protein, 9 aa, Homo sapiens
  misc_feature: Table A; Target 90009; HLA-A*02:04; TRPM1; ENSG00000134160; TAA
LLPPTILFL

SEQ ID NO: 90010 - protein, 9 aa, Homo sapiens
  misc_feature: Table A; Target 90010; HLA-A*02:07; TRPM1; ENSG00000134160; TAA
LLPPTILFL

SEQ ID NO: 90011 - protein, 9 aa, Homo sapiens
  misc_feature: Table A; Target 90011; HLA-A*24:02; TRPM1; ENSG00000134160; TAA
LLPPTILFL

SEQ ID NO: 90012 - protein, 11 aa, Homo sapiens
  misc_feature: Table A; Target 90012; HLA-A*02:07; TRPM1; ENSG00000134160; TAA
LLPPTILFLEF

SEQ ID NO: 90013 - protein, 11 aa, Homo sapiens
  misc_feature: Table A; Target 90013; HLA-A*24:02; TRPM1; ENSG00000134160; TAA
LLPPTILFLEF

SEQ ID NO: 90014 - protein, 11 aa, Homo sapiens
  misc_feature: Table A; Target 90014; HLA-A*29:02; TRPM1; ENSG00000134160; TAA
LLPPTILFLEF

SEQ ID NO: 90015 - protein, 10 aa, Homo sapiens
  misc_feature: Table A; Target 90015; HLA-A*02:03; TRPM1; ENSG00000134160; TAA
LLRQSSINSA

SEQ ID NO: 90016 - protein, 10 aa, Homo sapiens
  misc_feature: Table A; Target 90016; HLA-A*02:04; TRPM1; ENSG00000134160; TAA
LLTDMWMGRL

SEQ ID NO: 90017 - protein, 9 aa, Homo sapiens
  misc_feature: Table A; Target 90017; HLA-A*02:01; TRPM1; ENSG00000134160; TAA
LLVANILLV

SEQ ID NO: 90018 - protein, 9 aa, Homo sapiens
  misc_feature: Table A; Target 90018; HLA-A*02:03; TRPM1; ENSG00000134160; TAA
LLVANILLV

SEQ ID NO: 90019 - protein, 9 aa, Homo sapiens
  misc_feature: Table A; Target 90019; HLA-A*02:04; TRPM1; ENSG00000134160; TAA
LLVANILLV

SEQ ID NO: 90020 - protein, 9 aa, Homo sapiens
  misc_feature: Table A; Target 90020; HLA-A*02:07; TRPM1; ENSG00000134160; TAA
LLVANILLV

SEQ ID NO: 90021 - protein, 9 aa, Homo sapiens
  misc_feature: Table A; Target 90021; HLA-B*13:02; TRPM1; ENSG00000134160; TAA
LLVANILLV

SEQ ID NO: 90022 - protein, 9 aa, Homo sapiens
  misc_feature: Table A; Target 90022; HLA-A*02:01; TRPM1; ENSG00000134160; TAA
LLVNLLIAV

SEQ ID NO: 90023 - protein, 9 aa, Homo sapiens
  misc_feature: Table A; Target 90023; HLA-A*02:03; TRPM1; ENSG00000134160; TAA
LLVNLLIAV

SEQ ID NO: 90024 - protein, 9 aa, Homo sapiens
  misc_feature: Table A; Target 90024; HLA-A*02:04; TRPM1; ENSG00000134160; TAA
LLVNLLIAV

SEQ ID NO: 90025 - protein, 9 aa, Homo sapiens
  misc_feature: Table A; Target 90025; HLA-A*02:07; TRPM1; ENSG00000134160; TAA
LLVNLLIAV

SEQ ID NO: 90026 - protein, 9 aa, Homo sapiens
  misc_feature: Table A; Target 90026; HLA-A*23:01; TRPM1; ENSG00000134160; TAA
LLVTIQKTF

SEQ ID NO: 90027 - protein, 9 aa, Homo sapiens
  misc_feature: Table A; Target 90027; HLA-B*57:01; TRPM1; ENSG00000134160; TAA
LLVTIQKTF

SEQ ID NO: 90028 - protein, 9 aa, Homo sapiens
  misc_feature: Table A; Target 90028; HLA-B*58:01; TRPM1; ENSG00000134160; TAA
LLVTIQKTF

SEQ ID NO: 90029 - protein, 11 aa, Homo sapiens
  misc_feature: Table A; Target 90029; HLA-A*29:02; TRPM1; ENSG00000134160; TAA
LLVTIQKTFNY

SEQ ID NO: 90030 - protein, 8 aa, Homo sapiens
  misc_feature: Table A; Target 90030; HLA-C*05:01; TRPM1; ENSG00000134160; TAA
LMSEPGKL

SEQ ID NO: 90031 - protein, 8 aa, Homo sapiens
  misc_feature: Table A; Target 90031; HLA-B*08:01; TRPM1; ENSG00000134160; TAA
LPKLLISV

SEQ ID NO: 90032 - protein, 8 aa, Homo sapiens
  misc_feature: Table A; Target 90032; HLA-B*51:01; TRPM1; ENSG00000134160; TAA
LPKLLISV

SEQ ID NO: 90033 - protein, 8 aa, Homo sapiens
  misc_feature: Table A; Target 90033; HLA-B*54:01; TRPM1; ENSG00000134160; TAA
LPKLLISV

SEQ ID NO: 90034 - protein, 8 aa, Homo sapiens
  misc_feature: Table A; Target 90034; HLA-B*56:01; TRPM1; ENSG00000134160; TAA
LPKLLISV

SEQ ID NO: 90035 - protein, 9 aa, Homo sapiens
  misc_feature: Table A; Target 90035; HLA-B*07:02; TRPM1; ENSG00000134160; TAA
LPPDYHISL

SEQ ID NO: 90036 - protein, 9 aa, Homo sapiens
  misc_feature: Table A; Target 90036; HLA-B*08:01; TRPM1; ENSG00000134160; TAA
LPPDYHISL

SEQ ID NO: 90037 - protein, 9 aa, Homo sapiens
  misc_feature: Table A; Target 90037; HLA-B*35:01; TRPM1; ENSG00000134160; TAA
LPPDYHISL

SEQ ID NO: 90038 - protein, 9 aa, Homo sapiens
  misc_feature: Table A; Target 90038; HLA-B*35:03; TRPM1; ENSG00000134160; TAA
LPPDYHISL

SEQ ID NO: 90039 - protein, 9 aa, Homo sapiens
  misc_feature: Table A; Target 90039; HLA-B*51:01; TRPM1; ENSG00000134160; TAA
LPPDYHISL

SEQ ID NO: 90040 - protein, 9 aa, Homo sapiens
  misc_feature: Table A; Target 90040; HLA-B*54:01; TRPM1; ENSG00000134160; TAA
LPPDYHISL

SEQ ID NO: 90041 - protein, 9 aa, Homo sapiens
  misc_feature: Table A; Target 90041; HLA-C*01:02; TRPM1; ENSG00000134160; TAA
LPPDYHISL

SEQ ID NO: 90042 - protein, 9 aa, Homo sapiens
  misc_feature: Table A; Target 90042; HLA-C*07:02; TRPM1; ENSG00000134160; TAA
LPPDYHISL

SEQ ID NO: 90043 - protein, 10 aa, Homo sapiens
  misc_feature: Table A; Target 90043; HLA-B*51:01; TRPM1; ENSG00000134160; TAA
LPPDYHISLI

SEQ ID NO: 90044 - protein, 8 aa, Homo sapiens
  misc_feature: Table A; Target 90044; HLA-B*51:01; TRPM1; ENSG00000134160; TAA
LPPTILFL

SEQ ID NO: 90045 - protein, 9 aa, Homo sapiens
  misc_feature: Table A; Target 90045; HLA-B*39:01; TRPM1; ENSG00000134160; TAA
LQEEPPIPV

SEQ ID NO: 90046 - protein, 9 aa, Homo sapiens
  misc_feature: Table A; Target 90046; HLA-C*05:01; TRPM1; ENSG00000134160; TAA
LQEEPPIPV

SEQ ID NO: 90047 - protein, 11 aa, Homo sapiens
  misc_feature: Table A; Target 90047; HLA-B*38:01; TRPM1; ENSG00000134160; TAA
LQEEPPIPVVI

SEQ ID NO: 90048 - protein, 8 aa, Homo sapiens
  misc_feature: Table A; Target 90048; HLA-B*08:01; TRPM1; ENSG00000134160; TAA
LQKINTRL

SEQ ID NO: 90049 - protein, 9 aa, Homo sapiens
  misc_feature: Table A; Target 90049; HLA-A*11:01; TRPM1; ENSG00000134160; TAA
LQNFEMQPK

SEQ ID NO: 90050 - protein, 9 aa, Homo sapiens
  misc_feature: Table A; Target 90050; HLA-B*27:02; TRPM1; ENSG00000134160; TAA
LQNFEMQPK

SEQ ID NO: 90051 - protein, 9 aa, Homo sapiens
  misc_feature: Table A; Target 90051; HLA-A*26:01; TRPM1; ENSG00000134160; TAA
LQNQPYMGY

SEQ ID NO: 90052 - protein, 9 aa, Homo sapiens
  misc_feature: Table A; Target 90052; HLA-A*29:02; TRPM1; ENSG00000134160; TAA
LQNQPYMGY

SEQ ID NO: 90053 - protein, 9 aa, Homo sapiens
  misc_feature: Table A; Target 90053; HLA-A*30:02; TRPM1; ENSG00000134160; TAA
LQNQPYMGY

SEQ ID NO: 90054 - protein, 9 aa, Homo sapiens
  misc_feature: Table A; Target 90054; HLA-A*32:01; TRPM1; ENSG00000134160; TAA
LQNQPYMGY

SEQ ID NO: 90055 - protein, 9 aa, Homo sapiens
  misc_feature: Table A; Target 90055; HLA-B*15:01; TRPM1; ENSG00000134160; TAA
LQNQPYMGY

SEQ ID NO: 90056 - protein, 9 aa, Homo sapiens
  misc_feature: Table A; Target 90056; HLA-B*15:03; TRPM1; ENSG00000134160; TAA
LQNQPYMGY

SEQ ID NO: 90057 - protein, 9 aa, Homo sapiens
  misc_feature: Table A; Target 90057; HLA-B*46:01; TRPM1; ENSG00000134160; TAA
LQNQPYMGY

SEQ ID NO: 90058 - protein, 9 aa, Homo sapiens
  misc_feature: Table A; Target 90058; HLA-C*07:04; TRPM1; ENSG00000134160; TAA
LQNQPYMGY

SEQ ID NO: 90059 - protein, 9 aa, Homo sapiens
  misc_feature: Table A; Target 90059; HLA-C*14:02; TRPM1; ENSG00000134160; TAA
LQNQPYMGY

SEQ ID NO: 90060 - protein, 9 aa, Homo sapiens
  misc_feature: Table A; Target 90060; HLA-C*16:01; TRPM1; ENSG00000134160; TAA
LQNQPYMGY

SEQ ID NO: 90061 - protein, 9 aa, Homo sapiens
  misc_feature: Table A; Target 90061; HLA-C*16:04; TRPM1; ENSG00000134160; TAA
LQNQPYMGY

SEQ ID NO: 90062 - protein, 9 aa, Homo sapiens
  misc_feature: Table A; Target 90062; HLA-B*27:05; TRPM1; ENSG00000134160; TAA
LRLAQLEEL

SEQ ID NO: 90063 - protein, 9 aa, Homo sapiens
  misc_feature: Table A; Target 90063; HLA-C*05:01; TRPM1; ENSG00000134160; TAA
LSDEELKRL

SEQ ID NO: 90064 - protein, 9 aa, Homo sapiens
  misc_feature: Table A; Target 90064; HLA-B*58:01; TRPM1; ENSG00000134160; TAA
LSNRMVNAL

SEQ ID NO: 90065 - protein, 9 aa, Homo sapiens
  misc_feature: Table A; Target 90065; HLA-C*01:02; TRPM1; ENSG00000134160; TAA
LSNRMVNAL

SEQ ID NO: 90066 - protein, 9 aa, Homo sapiens
  misc_feature: Table A; Target 90066; HLA-C*03:04; TRPM1; ENSG00000134160; TAA
LSNRMVNAL

SEQ ID NO: 90067 - protein, 9 aa, Homo sapiens
  misc_feature: Table A; Target 90067; HLA-C*07:04; TRPM1; ENSG00000134160; TAA
LSNRMVNAL

SEQ ID NO: 90068 - protein, 9 aa, Homo sapiens
  misc_feature: Table A; Target 90068; HLA-C*16:01; TRPM1; ENSG00000134160; TAA
LSNRMVNAL

SEQ ID NO: 90069 - protein, 9 aa, Homo sapiens
  misc_feature: Table A; Target 90069; HLA-C*03:03; TRPM1; ENSG00000134160; TAA
LSTSPGTGV

SEQ ID NO: 90070 - protein, 9 aa, Homo sapiens
  misc_feature: Table A; Target 90070; HLA-C*03:04; TRPM1; ENSG00000134160; TAA
LSTSPGTGV

SEQ ID NO: 90071 - protein, 9 aa, Homo sapiens
  misc_feature: Table A; Target 90071; HLA-C*05:01; TRPM1; ENSG00000134160; TAA
LSTSPGTGV

SEQ ID NO: 90072 - protein, 11 aa, Homo sapiens
  misc_feature: Table A; Target 90072; HLA-A*03:02; TRPM1; ENSG00000134160; TAA
LSTSPGTGVRK

SEQ ID NO: 90073 - protein, 11 aa, Homo sapiens
  misc_feature: Table A; Target 90073; HLA-A*11:01; TRPM1; ENSG00000134160; TAA
LSTSPGTGVRK

SEQ ID NO: 90074 - protein, 9 aa, Homo sapiens
  misc_feature: Table A; Target 90074; HLA-B*58:01; TRPM1; ENSG00000134160; TAA
LSVKPDQTL

SEQ ID NO: 90075 - protein, 9 aa, Homo sapiens
  misc_feature: Table A; Target 90075; HLA-C*03:03; TRPM1; ENSG00000134160; TAA
LSVKPDQTL

SEQ ID NO: 90076 - protein, 9 aa, Homo sapiens
  misc_feature: Table A; Target 90076; HLA-C*03:04; TRPM1; ENSG00000134160; TAA
LSVKPDQTL

SEQ ID NO: 90077 - protein, 11 aa, Homo sapiens
  misc_feature: Table A; Target 90077; HLA-B*57:01; TRPM1; ENSG00000134160; TAA
LSVKPDQTLGF

SEQ ID NO: 90078 - protein, 9 aa, Homo sapiens
  misc_feature: Table A; Target 90078; HLA-A*02:01; TRPM1; ENSG00000134160; TAA
LTIPRLEEL

SEQ ID NO: 90079 - protein, 9 aa, Homo sapiens
  misc_feature: Table A; Target 90079; HLA-A*02:03; TRPM1; ENSG00000134160; TAA
LTIPRLEEL

SEQ ID NO: 90080 - protein, 9 aa, Homo sapiens
  misc_feature: Table A; Target 90080; HLA-A*02:04; TRPM1; ENSG00000134160; TAA
LTIPRLEEL

SEQ ID NO: 90081 - protein, 9 aa, Homo sapiens
  misc_feature: Table A; Target 90081; HLA-A*02:07; TRPM1; ENSG00000134160; TAA
LTIPRLEEL

SEQ ID NO: 90082 - protein, 9 aa, Homo sapiens
  misc_feature: Table A; Target 90082; HLA-A*24:02; TRPM1; ENSG00000134160; TAA
LTIPRLEEL

SEQ ID NO: 90083 - protein, 9 aa, Homo sapiens
  misc_feature: Table A; Target 90083; HLA-A*25:01; TRPM1; ENSG00000134160; TAA
LTIPRLEEL

SEQ ID NO: 90084 - protein, 9 aa, Homo sapiens
  misc_feature: Table A; Target 90084; HLA-A*68:02; TRPM1; ENSG00000134160; TAA
LTIPRLEEL

SEQ ID NO: 90085 - protein, 9 aa, Homo sapiens
  misc_feature: Table A; Target 90085; HLA-B*46:01; TRPM1; ENSG00000134160; TAA
LTIPRLEEL

SEQ ID NO: 90086 - protein, 9 aa, Homo sapiens
  misc_feature: Table A; Target 90086; HLA-B*58:01; TRPM1; ENSG00000134160; TAA
LTIPRLEEL

SEQ ID NO: 90087 - protein, 9 aa, Homo sapiens
  misc_feature: Table A; Target 90087; HLA-C*02:02; TRPM1; ENSG00000134160; TAA
LTIPRLEEL

SEQ ID NO: 90088 - protein, 9 aa, Homo sapiens
  misc_feature: Table A; Target 90088; HLA-C*03:03; TRPM1; ENSG00000134160; TAA
LTIPRLEEL

SEQ ID NO: 90089 - protein, 9 aa, Homo sapiens
  misc_feature: Table A; Target 90089; HLA-C*03:04; TRPM1; ENSG00000134160; TAA
LTIPRLEEL

SEQ ID NO: 90090 - protein, 9 aa, Homo sapiens
  misc_feature: Table A; Target 90090; HLA-C*16:01; TRPM1; ENSG00000134160; TAA
LTIPRLEEL

SEQ ID NO: 90091 - protein, 9 aa, Homo sapiens
  misc_feature: Table A; Target 90091; HLA-C*16:02; TRPM1; ENSG00000134160; TAA
LTIPRLEEL

SEQ ID NO: 90092 - protein, 10 aa, Homo sapiens
  misc_feature: Table A; Target 90092; HLA-A*01:01; TRPM1; ENSG00000134160; TAA
LTIPRLEELY

SEQ ID NO: 90093 - protein, 10 aa, Homo sapiens
  misc_feature: Table A; Target 90093; HLA-B*57:01; TRPM1; ENSG00000134160; TAA
LTIPRLEELY

SEQ ID NO: 90094 - protein, 9 aa, Homo sapiens
  misc_feature: Table A; Target 90094; HLA-A*29:02; TRPM1; ENSG00000134160; TAA
LTPALMACY

SEQ ID NO: 90095 - protein, 9 aa, Homo sapiens
  misc_feature: Table A; Target 90095; HLA-A*30:02; TRPM1; ENSG00000134160; TAA
LTPALMACY

SEQ ID NO: 90096 - protein, 10 aa, Homo sapiens
  misc_feature: Table A; Target 90096; HLA-A*68:02; TRPM1; ENSG00000134160; TAA
LVANILLVNL

SEQ ID NO: 90097 - protein, 9 aa, Homo sapiens
  misc_feature: Table A; Target 90097; HLA-A*01:01; TRPM1; ENSG00000134160; TAA
LVDDISQDL

SEQ ID NO: 90098 - protein, 9 aa, Homo sapiens
  misc_feature: Table A; Target 90098; HLA-A*02:07; TRPM1; ENSG00000134160; TAA
LVDDISQDL

SEQ ID NO: 90099 - protein, 9 aa, Homo sapiens
  misc_feature: Table A; Target 90099; HLA-B*27:05; TRPM1; ENSG00000134160; TAA
LVDDISQDL

SEQ ID NO: 90100 - protein, 9 aa, Homo sapiens
  misc_feature: Table A; Target 90100; HLA-B*35:03; TRPM1; ENSG00000134160; TAA
LVDDISQDL

SEQ ID NO: 90101 - protein, 9 aa, Homo sapiens
  misc_feature: Table A; Target 90101; HLA-B*38:01; TRPM1; ENSG00000134160; TAA
LVDDISQDL

SEQ ID NO: 90102 - protein, 9 aa, Homo sapiens
  misc_feature: Table A; Target 90102; HLA-C*04:01; TRPM1; ENSG00000134160; TAA
LVDDISQDL

SEQ ID NO: 90103 - protein, 9 aa, Homo sapiens
  misc_feature: Table A; Target 90103; HLA-C*05:01; TRPM1; ENSG00000134160; TAA
LVDDISQDL

SEQ ID NO: 90104 - protein, 9 aa, Homo sapiens
  misc_feature: Table A; Target 90104; HLA-C*07:04; TRPM1; ENSG00000134160; TAA
LVDDISQDL

SEQ ID NO: 90105 - protein, 11 aa, Homo sapiens
  misc_feature: Table A; Target 90105; HLA-C*07:04; TRPM1; ENSG00000134160; TAA
LVGGVNQDVEY

SEQ ID NO: 90106 - protein, 9 aa, Homo sapiens
  misc_feature: Table A; Target 90106; HLA-B*46:01; TRPM1; ENSG00000134160; TAA
LVIVSGMTA

SEQ ID NO: 90107 - protein, 9 aa, Homo sapiens
  misc_feature: Table A; Target 90107; HLA-B*54:01; TRPM1; ENSG00000134160; TAA
LVIVSGMTA

SEQ ID NO: 90108 - protein, 9 aa, Homo sapiens
  misc_feature: Table A; Target 90108; HLA-C*01:02; TRPM1; ENSG00000134160; TAA
LVIVSGMTA

SEQ ID NO: 90109 - protein, 9 aa, Homo sapiens
  misc_feature: Table A; Target 90109; HLA-C*03:03; TRPM1; ENSG00000134160; TAA
LVIVSGMTA

SEQ ID NO: 90110 - protein, 9 aa, Homo sapiens
  misc_feature: Table A; Target 90110; HLA-C*03:04; TRPM1; ENSG00000134160; TAA
LVIVSGMTA

SEQ ID NO: 90111 - protein, 9 aa, Homo sapiens
  misc_feature: Table A; Target 90111; HLA-A*02:01; TRPM1; ENSG00000134160; TAA
LVLDRVDFV

SEQ ID NO: 90112 - protein, 9 aa, Homo sapiens
  misc_feature: Table A; Target 90112; HLA-A*02:03; TRPM1; ENSG00000134160; TAA
LVLDRVDFV

SEQ ID NO: 90113 - protein, 9 aa, Homo sapiens
  misc_feature: Table A; Target 90113; HLA-A*02:04; TRPM1; ENSG00000134160; TAA
LVLDRVDFV

SEQ ID NO: 90114 - protein, 9 aa, Homo sapiens
  misc_feature: Table A; Target 90114; HLA-A*02:07; TRPM1; ENSG00000134160; TAA
LVLDRVDFV

SEQ ID NO: 90115 - protein, 9 aa, Homo sapiens
  misc_feature: Table A; Target 90115; HLA-A*68:02; TRPM1; ENSG00000134160; TAA
LVLDRVDFV

SEQ ID NO: 90116 - protein, 9 aa, Homo sapiens
  misc_feature: Table A; Target 90116; HLA-B*35:01; TRPM1; ENSG00000134160; TAA
LVNLLIAVF

SEQ ID NO: 90117 - protein, 9 aa, Homo sapiens
  misc_feature: Table A; Target 90117; HLA-C*01:02; TRPM1; ENSG00000134160; TAA
LVPECQNSL

SEQ ID NO: 90118 - protein, 10 aa, Homo sapiens
  misc_feature: Table A; Target 90118; HLA-A*29:02; TRPM1; ENSG00000134160; TAA
LVTIQKTFNY

SEQ ID NO: 90119 - protein, 10 aa, Homo sapiens
  misc_feature: Table A; Target 90119; HLA-A*30:02; TRPM1; ENSG00000134160; TAA
LVTIQKTFNY

SEQ ID NO: 90120 - protein, 9 aa, Homo sapiens
  misc_feature: Table A; Target 90120; HLA-A*02:01; TRPM1; ENSG00000134160; TAA
LVVEGGPNV

SEQ ID NO: 90121 - protein, 9 aa, Homo sapiens
  misc_feature: Table A; Target 90121; HLA-A*02:07; TRPM1; ENSG00000134160; TAA
LVVEGGPNV

SEQ ID NO: 90122 - protein, 9 aa, Homo sapiens
  misc_feature: Table A; Target 90122; HLA-C*03:04; TRPM1; ENSG00000134160; TAA
LVVEGGPNV

SEQ ID NO: 90123 - protein, 10 aa, Homo sapiens
  misc_feature: Table A; Target 90123; HLA-B*35:03; TRPM1; ENSG00000134160; TAA
MAHESSESDL

SEQ ID NO: 90124 - protein, 10 aa, Homo sapiens
  misc_feature: Table A; Target 90124; HLA-C*03:03; TRPM1; ENSG00000134160; TAA
MAHESSESDL

SEQ ID NO: 90125 - protein, 10 aa, Homo sapiens
  misc_feature: Table A; Target 90125; HLA-C*03:04; TRPM1; ENSG00000134160; TAA
MAHESSESDL

SEQ ID NO: 90126 - protein, 8 aa, Homo sapiens
  misc_feature: Table A; Target 90126; HLA-B*51:01; TRPM1; ENSG00000134160; TAA
MAILTALL

SEQ ID NO: 90127 - protein, 8 aa, Homo sapiens
  misc_feature: Table A; Target 90127; HLA-B*08:01; TRPM1; ENSG00000134160; TAA
MAKALVAC

SEQ ID NO: 90128 - protein, 8 aa, Homo sapiens
  misc_feature: Table A; Target 90128; HLA-B*54:01; TRPM1; ENSG00000134160; TAA
MAKALVAC

SEQ ID NO: 90129 - protein, 9 aa, Homo sapiens
  misc_feature: Table A; Target 90129; HLA-A*33:03; TRPM1; ENSG00000134160; TAA
MAKALVACK

SEQ ID NO: 90130 - protein, 10 aa, Homo sapiens
  misc_feature: Table A; Target 90130; HLA-B*39:01; TRPM1; ENSG00000134160; TAA
MEDDEPPAKG

SEQ ID NO: 90131 - protein, 11 aa, Homo sapiens
  misc_feature: Table A; Target 90131; HLA-B*40:01; TRPM1; ENSG00000134160; TAA
MEINPPCGENL

SEQ ID NO: 90132 - protein, 8 aa, Homo sapiens
  misc_feature: Table A; Target 90132; HLA-B*18:01; TRPM1; ENSG00000134160; TAA
MENLLSVK

SEQ ID NO: 90133 - protein, 9 aa, Homo sapiens
  misc_feature: Table A; Target 90133; HLA-C*07:01; TRPM1; ENSG00000134160; TAA
MGGAYRCNY

SEQ ID NO: 90134 - protein, 9 aa, Homo sapiens
  misc_feature: Table A; Target 90134; HLA-B*51:01; TRPM1; ENSG00000134160; TAA
MGILLPPTI

SEQ ID NO: 90135 - protein, 11 aa, Homo sapiens
  misc_feature: Table A; Target 90135; HLA-B*55:01; TRPM1; ENSG00000134160; TAA
MGSEGQQDIEM

SEQ ID NO: 90136 - protein, 8 aa, Homo sapiens
  misc_feature: Table A; Target 90136; HLA-B*08:01; TRPM1; ENSG00000134160; TAA
MGYGRVIY

SEQ ID NO: 90137 - protein, 8 aa, Homo sapiens
  misc_feature: Table A; Target 90137; HLA-C*12:03; TRPM1; ENSG00000134160; TAA
MGYGRVIY

SEQ ID NO: 90138 - protein, 8 aa, Homo sapiens
  misc_feature: Table A; Target 90138; HLA-C*16:01; TRPM1; ENSG00000134160; TAA
MGYGRVIY

SEQ ID NO: 90139 - protein, 9 aa, Homo sapiens
  misc_feature: Table A; Target 90139; HLA-A*02:07; TRPM1; ENSG00000134160; TAA
MIDMLYFVV

SEQ ID NO: 90140 - protein, 8 aa, Homo sapiens
  misc_feature: Table A; Target 90140; HLA-A*02:04; TRPM1; ENSG00000134160; TAA
MIGAILRL

SEQ ID NO: 90141 - protein, 9 aa, Homo sapiens
  misc_feature: Table A; Target 90141; HLA-A*01:01; TRPM1; ENSG00000134160; TAA
MLDALVLDR

SEQ ID NO: 90142 - protein, 10 aa, Homo sapiens
  misc_feature: Table A; Target 90142; HLA-A*02:07; TRPM1; ENSG00000134160; TAA
MLDALVLDRV

SEQ ID NO: 90143 - protein, 11 aa, Homo sapiens
  misc_feature: Table A; Target 90143; HLA-A*02:04; TRPM1; ENSG00000134160; TAA
MLLTDMWMGRL

SEQ ID NO: 90144 - protein, 9 aa, Homo sapiens
  misc_feature: Table A; Target 90144; HLA-A*02:04; TRPM1; ENSG00000134160; TAA
MLYFVVIML

SEQ ID NO: 90145 - protein, 9 aa, Homo sapiens
  misc_feature: Table A; Target 90145; HLA-A*02:07; TRPM1; ENSG00000134160; TAA
MLYFVVIML

SEQ ID NO: 90146 - protein, 10 aa, Homo sapiens
  misc_feature: Table A; Target 90146; HLA-B*54:01; TRPM1; ENSG00000134160; TAA
MPYWMIYGEV

SEQ ID NO: 90147 - protein, 9 aa, Homo sapiens
  misc_feature: Table A; Target 90147; HLA-A*24:02; TRPM1; ENSG00000134160; TAA
MQPKLKQVF

SEQ ID NO: 90148 - protein, 9 aa, Homo sapiens
  misc_feature: Table A; Target 90148; HLA-B*27:02; TRPM1; ENSG00000134160; TAA
MRLEEINER

SEQ ID NO: 90149 - protein, 9 aa, Homo sapiens
  misc_feature: Table A; Target 90149; HLA-B*27:05; TRPM1; ENSG00000134160; TAA
MRLEEINER

SEQ ID NO: 90150 - protein, 9 aa, Homo sapiens
  misc_feature: Table A; Target 90150; HLA-A*01:01; TRPM1; ENSG00000134160; TAA
MSEPGKLSQ

SEQ ID NO: 90151 - protein, 10 aa, Homo sapiens
  misc_feature: Table A; Target 90151; HLA-A*01:01; TRPM1; ENSG00000134160; TAA
MSEPGKLSQK

SEQ ID NO: 90152 - protein, 9 aa, Homo sapiens
  misc_feature: Table A; Target 90152; HLA-B*54:01; TRPM1; ENSG00000134160; TAA
MSFGVARQA

SEQ ID NO: 90153 - protein, 9 aa, Homo sapiens
  misc_feature: Table A; Target 90153; HLA-B*56:01; TRPM1; ENSG00000134160; TAA
MSFGVARQA

SEQ ID NO: 90154 - protein, 9 aa, Homo sapiens
  misc_feature: Table A; Target 90154; HLA-C*16:01; TRPM1; ENSG00000134160; TAA
MSFGVARQA

SEQ ID NO: 90155 - protein, 8 aa, Homo sapiens
  misc_feature: Table A; Target 90155; HLA-B*08:01; TRPM1; ENSG00000134160; TAA
MSNPLSKL

SEQ ID NO: 90156 - protein, 8 aa, Homo sapiens
  misc_feature: Table A; Target 90156; HLA-C*03:04; TRPM1; ENSG00000134160; TAA
MSNPLSKL

SEQ ID NO: 90157 - protein, 8 aa, Homo sapiens
  misc_feature: Table A; Target 90157; HLA-C*16:01; TRPM1; ENSG00000134160; TAA
MSNPLSKL

SEQ ID NO: 90158 - protein, 10 aa, Homo sapiens
  misc_feature: Table A; Target 90158; HLA-B*54:01; TRPM1; ENSG00000134160; TAA
MSNPLSKLSV

SEQ ID NO: 90159 - protein, 10 aa, Homo sapiens
  misc_feature: Table A; Target 90159; HLA-C*16:04; TRPM1; ENSG00000134160; TAA
MSNPLSKLSV

SEQ ID NO: 90160 - protein, 9 aa, Homo sapiens
  misc_feature: Table A; Target 90160; HLA-A*11:01; TRPM1; ENSG00000134160; TAA
MTAEEKKVK

SEQ ID NO: 90161 - protein, 10 aa, Homo sapiens
  misc_feature: Table A; Target 90161; HLA-A*68:01; TRPM1; ENSG00000134160; TAA
MTAEEKKVKK

SEQ ID NO: 90162 - protein, 9 aa, Homo sapiens
  misc_feature: Table A; Target 90162; HLA-A*02:04; TRPM1; ENSG00000134160; TAA
MVKDWQLEL

SEQ ID NO: 90163 - protein, 9 aa, Homo sapiens
  misc_feature: Table A; Target 90163; HLA-B*54:01; TRPM1; ENSG00000134160; TAA
MVNALENLA

SEQ ID NO: 90164 - protein, 9 aa, Homo sapiens
  misc_feature: Table A; Target 90164; HLA-A*31:01; TRPM1; ENSG00000134160; TAA
MVWAVLMKR

SEQ ID NO: 90165 - protein, 8 aa, Homo sapiens
  misc_feature: Table A; Target 90165; HLA-C*05:01; TRPM1; ENSG00000134160; TAA
NADAGSRK

SEQ ID NO: 90166 - protein, 9 aa, Homo sapiens
  misc_feature: Table A; Target 90166; HLA-B*51:01; TRPM1; ENSG00000134160; TAA
NALENLAGI

SEQ ID NO: 90167 - protein, 11 aa, Homo sapiens
  misc_feature: Table A; Target 90167; HLA-C*07:06; TRPM1; ENSG00000134160; TAA
NALENLAGIDR

SEQ ID NO: 90168 - protein, 8 aa, Homo sapiens
  misc_feature: Table A; Target 90168; HLA-B*35:03; TRPM1; ENSG00000134160; TAA
NALEQAML

SEQ ID NO: 90169 - protein, 8 aa, Homo sapiens
  misc_feature: Table A; Target 90169; HLA-B*51:01; TRPM1; ENSG00000134160; TAA
NALEQAML

SEQ ID NO: 90170 - protein, 8 aa, Homo sapiens
  misc_feature: Table A; Target 90170; HLA-B*37:01; TRPM1; ENSG00000134160; TAA
NESLREQL

SEQ ID NO: 90171 - protein, 9 aa, Homo sapiens
  misc_feature: Table A; Target 90171; HLA-B*37:01; TRPM1; ENSG00000134160; TAA
NESLREQLL

SEQ ID NO: 90172 - protein, 9 aa, Homo sapiens
  misc_feature: Table A; Target 90172; HLA-B*40:01; TRPM1; ENSG00000134160; TAA
NESLREQLL

SEQ ID NO: 90173 - protein, 9 aa, Homo sapiens
  misc_feature: Table A; Target 90173; HLA-B*44:02; TRPM1; ENSG00000134160; TAA
NESLREQLL

SEQ ID NO: 90174 - protein, 9 aa, Homo sapiens
  misc_feature: Table A; Target 90174; HLA-A*02:01; TRPM1; ENSG00000134160; TAA
NGMENLLSV

SEQ ID NO: 90175 - protein, 9 aa, Homo sapiens
  misc_feature: Table A; Target 90175; HLA-B*13:02; TRPM1; ENSG00000134160; TAA
NGMENLLSV

SEQ ID NO: 90176 - protein, 9 aa, Homo sapiens
  misc_feature: Table A; Target 90176; HLA-B*51:01; TRPM1; ENSG00000134160; TAA
NGMENLLSV

SEQ ID NO: 90177 - protein, 9 aa, Homo sapiens
  misc_feature: Table A; Target 90177; HLA-B*54:01; TRPM1; ENSG00000134160; TAA
NGMENLLSV

SEQ ID NO: 90178 - protein, 9 aa, Homo sapiens
  misc_feature: Table A; Target 90178; HLA-B*56:01; TRPM1; ENSG00000134160; TAA
NGMENLLSV

SEQ ID NO: 90179 - protein, 10 aa, Homo sapiens
  misc_feature: Table A; Target 90179; HLA-A*11:01; TRPM1; ENSG00000134160; TAA
NGMENLLSVK

SEQ ID NO: 90180 - protein, 8 aa, Homo sapiens
  misc_feature: Table A; Target 90180; HLA-A*01:01; TRPM1; ENSG00000134160; TAA
NIEGTISY

SEQ ID NO: 90181 - protein, 11 aa, Homo sapiens
  misc_feature: Table A; Target 90181; HLA-A*25:01; TRPM1; ENSG00000134160; TAA
NITDLVAISTF

SEQ ID NO: 90182 - protein, 11 aa, Homo sapiens
  misc_feature: Table A; Target 90182; HLA-A*26:01; TRPM1; ENSG00000134160; TAA
NITDLVAISTF

SEQ ID NO: 90183 - protein, 9 aa, Homo sapiens
  misc_feature: Table A; Target 90183; HLA-B*15:03; TRPM1; ENSG00000134160; TAA
NKAQSHQLF

SEQ ID NO: 90184 - protein, 9 aa, Homo sapiens
  misc_feature: Table A; Target 90184; HLA-B*15:03; TRPM1; ENSG00000134160; TAA
NKYLGPYVM

SEQ ID NO: 90185 - protein, 9 aa, Homo sapiens
  misc_feature: Table A; Target 90185; HLA-A*03:01; TRPM1; ENSG00000134160; TAA
NLFGPKRPK

SEQ ID NO: 90186 - protein, 10 aa, Homo sapiens
  misc_feature: Table A; Target 90186; HLA-A*02:07; TRPM1; ENSG00000134160; TAA
NLPPDYHISL

SEQ ID NO: 90187 - protein, 8 aa, Homo sapiens
  misc_feature: Table A; Target 90187; HLA-B*08:01; TRPM1; ENSG00000134160; TAA
NPGLKVIM

SEQ ID NO: 90188 - protein, 8 aa, Homo sapiens
  misc_feature: Table A; Target 90188; HLA-B*08:01; TRPM1; ENSG00000134160; TAA
NPLSKLSV

SEQ ID NO: 90189 - protein, 8 aa, Homo sapiens
  misc_feature: Table A; Target 90189; HLA-B*51:01; TRPM1; ENSG00000134160; TAA
NPLSKLSV

SEQ ID NO: 90190 - protein, 9 aa, Homo sapiens
  misc_feature: Table A; Target 90190; HLA-B*07:02; TRPM1; ENSG00000134160; TAA
NPLSKLSVL

SEQ ID NO: 90191 - protein, 9 aa, Homo sapiens
  misc_feature: Table A; Target 90191; HLA-B*08:01; TRPM1; ENSG00000134160; TAA
NPLSKLSVL

SEQ ID NO: 90192 - protein, 9 aa, Homo sapiens
  misc_feature: Table A; Target 90192; HLA-B*35:01; TRPM1; ENSG00000134160; TAA
NPLSKLSVL

SEQ ID NO: 90193 - protein, 9 aa, Homo sapiens
  misc_feature: Table A; Target 90193; HLA-B*35:03; TRPM1; ENSG00000134160; TAA
NPLSKLSVL

SEQ ID NO: 90194 - protein, 9 aa, Homo sapiens
  misc_feature: Table A; Target 90194; HLA-B*51:01; TRPM1; ENSG00000134160; TAA
NPLSKLSVL

SEQ ID NO: 90195 - protein, 9 aa, Homo sapiens
  misc_feature: Table A; Target 90195; HLA-B*55:01; TRPM1; ENSG00000134160; TAA
NPLSKLSVL

SEQ ID NO: 90196 - protein, 9 aa, Homo sapiens
  misc_feature: Table A; Target 90196; HLA-B*56:01; TRPM1; ENSG00000134160; TAA
NPLSKLSVL

SEQ ID NO: 90197 - protein, 9 aa, Homo sapiens
  misc_feature: Table A; Target 90197; HLA-C*07:02; TRPM1; ENSG00000134160; TAA
NPLSKLSVL

SEQ ID NO: 90198 - protein, 9 aa, Homo sapiens
  misc_feature: Table A; Target 90198; HLA-B*38:01; TRPM1; ENSG00000134160; TAA
NQDVEYSSI

SEQ ID NO: 90199 - protein, 9 aa, Homo sapiens
  misc_feature: Table A; Target 90199; HLA-B*39:01; TRPM1; ENSG00000134160; TAA
NQDVEYSSI

SEQ ID NO: 90200 - protein, 9 aa, Homo sapiens
  misc_feature: Table A; Target 90200; HLA-C*05:01; TRPM1; ENSG00000134160; TAA
NQDVEYSSI

SEQ ID NO: 90201 - protein, 8 aa, Homo sapiens
  misc_feature: Table A; Target 90201; HLA-B*35:03; TRPM1; ENSG00000134160; TAA
NSADGYSL

SEQ ID NO: 90202 - protein, 8 aa, Homo sapiens
  misc_feature: Table A; Target 90202; HLA-B*39:01; TRPM1; ENSG00000134160; TAA
NSADGYSL

SEQ ID NO: 90203 - protein, 8 aa, Homo sapiens
  misc_feature: Table A; Target 90203; HLA-C*01:02; TRPM1; ENSG00000134160; TAA
NSADGYSL

SEQ ID NO: 90204 - protein, 8 aa, Homo sapiens
  misc_feature: Table A; Target 90204; HLA-C*03:03; TRPM1; ENSG00000134160; TAA
NSADGYSL

SEQ ID NO: 90205 - protein, 8 aa, Homo sapiens
  misc_feature: Table A; Target 90205; HLA-C*03:04; TRPM1; ENSG00000134160; TAA
NSADGYSL

SEQ ID NO: 90206 - protein, 8 aa, Homo sapiens
  misc_feature: Table A; Target 90206; HLA-C*05:01; TRPM1; ENSG00000134160; TAA
NSADGYSL

SEQ ID NO: 90207 - protein, 8 aa, Homo sapiens
  misc_feature: Table A; Target 90207; HLA-C*14:02; TRPM1; ENSG00000134160; TAA
NSADGYSL

SEQ ID NO: 90208 - protein, 8 aa, Homo sapiens
  misc_feature: Table A; Target 90208; HLA-C*16:01; TRPM1; ENSG00000134160; TAA
NSADGYSL

SEQ ID NO: 90209 - protein, 9 aa, Homo sapiens
  misc_feature: Table A; Target 90209; HLA-A*01:01; TRPM1; ENSG00000134160; TAA
NSADGYSLY

SEQ ID NO: 90210 - protein, 9 aa, Homo sapiens
  misc_feature: Table A; Target 90210; HLA-A*25:01; TRPM1; ENSG00000134160; TAA
NSADGYSLY

SEQ ID NO: 90211 - protein, 9 aa, Homo sapiens
  misc_feature: Table A; Target 90211; HLA-A*26:01; TRPM1; ENSG00000134160; TAA
NSADGYSLY

SEQ ID NO: 90212 - protein, 9 aa, Homo sapiens
  misc_feature: Table A; Target 90212; HLA-A*29:02; TRPM1; ENSG00000134160; TAA
NSADGYSLY

SEQ ID NO: 90213 - protein, 9 aa, Homo sapiens
  misc_feature: Table A; Target 90213; HLA-A*30:02; TRPM1; ENSG00000134160; TAA
NSADGYSLY

SEQ ID NO: 90214 - protein, 9 aa, Homo sapiens
  misc_feature: Table A; Target 90214; HLA-A*33:01; TRPM1; ENSG00000134160; TAA
NSADGYSLY

SEQ ID NO: 90215 - protein, 9 aa, Homo sapiens
  misc_feature: Table A; Target 90215; HLA-A*68:01; TRPM1; ENSG00000134160; TAA
NSADGYSLY

SEQ ID NO: 90216 - protein, 9 aa, Homo sapiens
  misc_feature: Table A; Target 90216; HLA-B*35:01; TRPM1; ENSG00000134160; TAA
NSADGYSLY

SEQ ID NO: 90217 - protein, 9 aa, Homo sapiens
  misc_feature: Table A; Target 90217; HLA-C*02:02; TRPM1; ENSG00000134160; TAA
NSADGYSLY

SEQ ID NO: 90218 - protein, 9 aa, Homo sapiens
  misc_feature: Table A; Target 90218; HLA-C*07:04; TRPM1; ENSG00000134160; TAA
NSADGYSLY

SEQ ID NO: 90219 - protein, 9 aa, Homo sapiens
  misc_feature: Table A; Target 90219; HLA-C*07:06; TRPM1; ENSG00000134160; TAA
NSADGYSLY

SEQ ID NO: 90220 - protein, 9 aa, Homo sapiens
  misc_feature: Table A; Target 90220; HLA-C*16:02; TRPM1; ENSG00000134160; TAA
NSADGYSLY

SEQ ID NO: 90221 - protein, 10 aa, Homo sapiens
  misc_feature: Table A; Target 90221; HLA-A*33:01; TRPM1; ENSG00000134160; TAA
NSADGYSLYR

SEQ ID NO: 90222 - protein, 10 aa, Homo sapiens
  misc_feature: Table A; Target 90222; HLA-A*33:03; TRPM1; ENSG00000134160; TAA
NSADGYSLYR

SEQ ID NO: 90223 - protein, 10 aa, Homo sapiens
  misc_feature: Table A; Target 90223; HLA-A*68:01; TRPM1; ENSG00000134160; TAA
NSADGYSLYR

SEQ ID NO: 90224 - protein, 10 aa, Homo sapiens
  misc_feature: Table A; Target 90224; HLA-C*07:06; TRPM1; ENSG00000134160; TAA
NSADGYSLYR

SEQ ID NO: 90225 - protein, 11 aa, Homo sapiens
  misc_feature: Table A; Target 90225; HLA-A*01:01; TRPM1; ENSG00000134160; TAA
NSADGYSLYRY

SEQ ID NO: 90226 - protein, 11 aa, Homo sapiens
  misc_feature: Table A; Target 90226; HLA-A*29:02; TRPM1; ENSG00000134160; TAA
NSADGYSLYRY

SEQ ID NO: 90227 - protein, 11 aa, Homo sapiens
  misc_feature: Table A; Target 90227; HLA-A*30:02; TRPM1; ENSG00000134160; TAA
NSADGYSLYRY

SEQ ID NO: 90228 - protein, 8 aa, Homo sapiens
  misc_feature: Table A; Target 90228; HLA-B*08:01; TRPM1; ENSG00000134160; TAA
NSHTHFIL

SEQ ID NO: 90229 - protein, 9 aa, Homo sapiens
  misc_feature: Table A; Target 90229; HLA-B*54:01; TRPM1; ENSG00000134160; TAA
NSHTHFILA

SEQ ID NO: 90230 - protein, 11 aa, Homo sapiens
  misc_feature: Table A; Target 90230; HLA-A*68:01; TRPM1; ENSG00000134160; TAA
NTDANADAGSR

SEQ ID NO: 90231 - protein, 9 aa, Homo sapiens
  misc_feature: Table A; Target 90231; HLA-A*02:03; TRPM1; ENSG00000134160; TAA
NTFFEVKSI

SEQ ID NO: 90232 - protein, 9 aa, Homo sapiens
  misc_feature: Table A; Target 90232; HLA-A*68:02; TRPM1; ENSG00000134160; TAA
NTFFEVKSI

SEQ ID NO: 90233 - protein, 9 aa, Homo sapiens
  misc_feature: Table A; Target 90233; HLA-B*51:01; TRPM1; ENSG00000134160; TAA
NTFFEVKSI

SEQ ID NO: 90234 - protein, 9 aa, Homo sapiens
  misc_feature: Table A; Target 90234; HLA-C*12:03; TRPM1; ENSG00000134160; TAA
NTFFEVKSI

SEQ ID NO: 90235 - protein, 9 aa, Homo sapiens
  misc_feature: Table A; Target 90235; HLA-C*16:02; TRPM1; ENSG00000134160; TAA
NTFFEVKSI

SEQ ID NO: 90236 - protein, 10 aa, Homo sapiens
  misc_feature: Table A; Target 90236; HLA-B*07:02; TRPM1; ENSG00000134160; TAA
NTRLGPPNTL

SEQ ID NO: 90237 - protein, 10 aa, Homo sapiens
  misc_feature: Table A; Target 90237; HLA-C*07:02; TRPM1; ENSG00000134160; TAA
NTRLGPPNTL

SEQ ID NO: 90238 - protein, 11 aa, Homo sapiens
  misc_feature: Table A; Target 90238; HLA-A*33:01; TRPM1; ENSG00000134160; TAA
NVKSIQGKLDR

SEQ ID NO: 90239 - protein, 10 aa, Homo sapiens
  misc_feature: Table A; Target 90239; HLA-C*07:06; TRPM1; ENSG00000134160; TAA
NVSAPDQLSL

SEQ ID NO: 90240 - protein, 9 aa, Homo sapiens
  misc_feature: Table A; Target 90240; HLA-A*01:01; TRPM1; ENSG00000134160; TAA
NVVSIVLEY

SEQ ID NO: 90241 - protein, 9 aa, Homo sapiens
  misc_feature: Table A; Target 90241; HLA-A*25:01; TRPM1; ENSG00000134160; TAA
NVVSIVLEY

SEQ ID NO: 90242 - protein, 9 aa, Homo sapiens
  misc_feature: Table A; Target 90242; HLA-A*26:01; TRPM1; ENSG00000134160; TAA
NVVSIVLEY

SEQ ID NO: 90243 - protein, 9 aa, Homo sapiens
  misc_feature: Table A; Target 90243; HLA-A*29:02; TRPM1; ENSG00000134160; TAA
NVVSIVLEY

SEQ ID NO: 90244 - protein, 9 aa, Homo sapiens
  misc_feature: Table A; Target 90244; HLA-A*30:02; TRPM1; ENSG00000134160; TAA
NVVSIVLEY

SEQ ID NO: 90245 - protein, 9 aa, Homo sapiens
  misc_feature: Table A; Target 90245; HLA-A*32:01; TRPM1; ENSG00000134160; TAA
NVVSIVLEY

SEQ ID NO: 90246 - protein, 9 aa, Homo sapiens
  misc_feature: Table A; Target 90246; HLA-A*68:01; TRPM1; ENSG00000134160; TAA
NVVSIVLEY

SEQ ID NO: 90247 - protein, 9 aa, Homo sapiens
  misc_feature: Table A; Target 90247; HLA-B*15:01; TRPM1; ENSG00000134160; TAA
NVVSIVLEY

SEQ ID NO: 90248 - protein, 9 aa, Homo sapiens
  misc_feature: Table A; Target 90248; HLA-B*18:01; TRPM1; ENSG00000134160; TAA
NVVSIVLEY

SEQ ID NO: 90249 - protein, 9 aa, Homo sapiens
  misc_feature: Table A; Target 90249; HLA-B*35:01; TRPM1; ENSG00000134160; TAA
NVVSIVLEY

SEQ ID NO: 90250 - protein, 9 aa, Homo sapiens
  misc_feature: Table A; Target 90250; HLA-B*44:03; TRPM1; ENSG00000134160; TAA
NVVSIVLEY

SEQ ID NO: 90251 - protein, 9 aa, Homo sapiens
  misc_feature: Table A; Target 90251; HLA-B*46:01; TRPM1; ENSG00000134160; TAA
NVVSIVLEY

SEQ ID NO: 90252 - protein, 9 aa, Homo sapiens
  misc_feature: Table A; Target 90252; HLA-C*02:02; TRPM1; ENSG00000134160; TAA
NVVSIVLEY

SEQ ID NO: 90253 - protein, 9 aa, Homo sapiens
  misc_feature: Table A; Target 90253; HLA-C*07:06; TRPM1; ENSG00000134160; TAA
NVVSIVLEY

SEQ ID NO: 90254 - protein, 9 aa, Homo sapiens
  misc_feature: Table A; Target 90254; HLA-C*12:03; TRPM1; ENSG00000134160; TAA
NVVSIVLEY

SEQ ID NO: 90255 - protein, 9 aa, Homo sapiens
  misc_feature: Table A; Target 90255; HLA-C*16:04; TRPM1; ENSG00000134160; TAA
NVVSIVLEY

SEQ ID NO: 90256 - protein, 10 aa, Homo sapiens
  misc_feature: Table A; Target 90256; HLA-A*68:02; TRPM1; ENSG00000134160; TAA
NVVSIVLEYL

SEQ ID NO: 90257 - protein, 8 aa, Homo sapiens
  misc_feature: Table A; Target 90257; HLA-C*14:02; TRPM1; ENSG00000134160; TAA
NYNKAQSH

SEQ ID NO: 90258 - protein, 10 aa, Homo sapiens
  misc_feature: Table A; Target 90258; HLA-A*23:01; TRPM1; ENSG00000134160; TAA
NYNKAQSHQL

SEQ ID NO: 90259 - protein, 10 aa, Homo sapiens
  misc_feature: Table A; Target 90259; HLA-A*24:02; TRPM1; ENSG00000134160; TAA
NYNKAQSHQL

SEQ ID NO: 90260 - protein, 11 aa, Homo sapiens
  misc_feature: Table A; Target 90260; HLA-A*23:01; TRPM1; ENSG00000134160; TAA
NYNKAQSHQLF

SEQ ID NO: 90261 - protein, 11 aa, Homo sapiens
  misc_feature: Table A; Target 90261; HLA-A*24:02; TRPM1; ENSG00000134160; TAA
NYNKAQSHQLF

SEQ ID NO: 90262 - protein, 8 aa, Homo sapiens
  misc_feature: Table A; Target 90262; HLA-B*37:01; TRPM1; ENSG00000134160; TAA
PDSLLHLM

SEQ ID NO: 90263 - protein, 8 aa, Homo sapiens
  misc_feature: Table A; Target 90263; HLA-B*07:02; TRPM1; ENSG00000134160; TAA
PGTGVRKK

SEQ ID NO: 90264 - protein, 8 aa, Homo sapiens
  misc_feature: Table A; Target 90264; HLA-C*06:02; TRPM1; ENSG00000134160; TAA
PGTGVRKK

SEQ ID NO: 90265 - protein, 8 aa, Homo sapiens
  misc_feature: Table A; Target 90265; HLA-C*07:02; TRPM1; ENSG00000134160; TAA
PGTGVRKK

SEQ ID NO: 90266 - protein, 10 aa, Homo sapiens
  misc_feature: Table A; Target 90266; HLA-A*01:01; TRPM1; ENSG00000134160; TAA
PLEETKITRY

SEQ ID NO: 90267 - protein, 10 aa, Homo sapiens
  misc_feature: Table A; Target 90267; HLA-A*01:01; TRPM1; ENSG00000134160; TAA
PTDSYGVLEF

SEQ ID NO: 90268 - protein, 9 aa, Homo sapiens
  misc_feature: Table A; Target 90268; HLA-C*14:02; TRPM1; ENSG00000134160; TAA
PYIVSEAAV

SEQ ID NO: 90269 - protein, 9 aa, Homo sapiens
  misc_feature: Table A; Target 90269; HLA-A*24:02; TRPM1; ENSG00000134160; TAA
PYMGYGRVI

SEQ ID NO: 90270 - protein, 9 aa, Homo sapiens
  misc_feature: Table A; Target 90270; HLA-B*35:03; TRPM1; ENSG00000134160; TAA
QAMLDALVL

SEQ ID NO: 90271 - protein, 9 aa, Homo sapiens
  misc_feature: Table A; Target 90271; HLA-B*39:01; TRPM1; ENSG00000134160; TAA
QAMLDALVL

SEQ ID NO: 90272 - protein, 9 aa, Homo sapiens
  misc_feature: Table A; Target 90272; HLA-C*03:03; TRPM1; ENSG00000134160; TAA
QAMLDALVL

SEQ ID NO: 90273 - protein, 9 aa, Homo sapiens
  misc_feature: Table A; Target 90273; HLA-C*03:04; TRPM1; ENSG00000134160; TAA
QAMLDALVL

SEQ ID NO: 90274 - protein, 11 aa, Homo sapiens
  misc_feature: Table A; Target 90274; HLA-B*27:02; TRPM1; ENSG00000134160; TAA
QAMLDALVLDR

SEQ ID NO: 90275 - protein, 9 aa, Homo sapiens
  misc_feature: Table A; Target 90275; HLA-A*31:01; TRPM1; ENSG00000134160; TAA
QCQVQKITR

SEQ ID NO: 90276 - protein, 9 aa, Homo sapiens
  misc_feature: Table A; Target 90276; HLA-A*30:01; TRPM1; ENSG00000134160; TAA
QEEPPIPVV

SEQ ID NO: 90277 - protein, 9 aa, Homo sapiens
  misc_feature: Table A; Target 90277; HLA-B*37:01; TRPM1; ENSG00000134160; TAA
QEEPPIPVV

SEQ ID NO: 90278 - protein, 9 aa, Homo sapiens
  misc_feature: Table A; Target 90278; HLA-B*40:01; TRPM1; ENSG00000134160; TAA
QEEPPIPVV

SEQ ID NO: 90279 - protein, 9 aa, Homo sapiens
  misc_feature: Table A; Target 90279; HLA-B*40:02; TRPM1; ENSG00000134160; TAA
QEEPPIPVV

SEQ ID NO: 90280 - protein, 9 aa, Homo sapiens
  misc_feature: Table A; Target 90280; HLA-B*44:02; TRPM1; ENSG00000134160; TAA
QEEPPIPVV

SEQ ID NO: 90281 - protein, 9 aa, Homo sapiens
  misc_feature: Table A; Target 90281; HLA-B*44:03; TRPM1; ENSG00000134160; TAA
QEEPPIPVV

SEQ ID NO: 90282 - protein, 9 aa, Homo sapiens
  misc_feature: Table A; Target 90282; HLA-B*49:01; TRPM1; ENSG00000134160; TAA
QEEPPIPVV

SEQ ID NO: 90283 - protein, 10 aa, Homo sapiens
  misc_feature: Table A; Target 90283; HLA-A*30:01; TRPM1; ENSG00000134160; TAA
QEEPPIPVVI

SEQ ID NO: 90284 - protein, 10 aa, Homo sapiens
  misc_feature: Table A; Target 90284; HLA-B*38:01; TRPM1; ENSG00000134160; TAA
QEEPPIPVVI

SEQ ID NO: 90285 - protein, 10 aa, Homo sapiens
  misc_feature: Table A; Target 90285; HLA-B*39:01; TRPM1; ENSG00000134160; TAA
QEEPPIPVVI

SEQ ID NO: 90286 - protein, 10 aa, Homo sapiens
  misc_feature: Table A; Target 90286; HLA-B*40:01; TRPM1; ENSG00000134160; TAA
QEEPPIPVVI

SEQ ID NO: 90287 - protein, 10 aa, Homo sapiens
  misc_feature: Table A; Target 90287; HLA-B*44:02; TRPM1; ENSG00000134160; TAA
QEEPPIPVVI

SEQ ID NO: 90288 - protein, 10 aa, Homo sapiens
  misc_feature: Table A; Target 90288; HLA-B*44:03; TRPM1; ENSG00000134160; TAA
QEEPPIPVVI

SEQ ID NO: 90289 - protein, 10 aa, Homo sapiens
  misc_feature: Table A; Target 90289; HLA-B*49:01; TRPM1; ENSG00000134160; TAA
QEEPPIPVVI

SEQ ID NO: 90290 - protein, 10 aa, Homo sapiens
  misc_feature: Table A; Target 90290; HLA-B*40:01; TRPM1; ENSG00000134160; TAA
QEERDRGLKL

SEQ ID NO: 90291 - protein, 8 aa, Homo sapiens
  misc_feature: Table A; Target 90291; HLA-B*18:01; TRPM1; ENSG00000134160; TAA
QEWIVISY

SEQ ID NO: 90292 - protein, 8 aa, Homo sapiens
  misc_feature: Table A; Target 90292; HLA-B*37:01; TRPM1; ENSG00000134160; TAA
QEWIVISY

SEQ ID NO: 90293 - protein, 8 aa, Homo sapiens
  misc_feature: Table A; Target 90293; HLA-B*44:02; TRPM1; ENSG00000134160; TAA
QEWIVISY

SEQ ID NO: 90294 - protein, 8 aa, Homo sapiens
  misc_feature: Table A; Target 90294; HLA-B*44:03; TRPM1; ENSG00000134160; TAA
QEWIVISY

SEQ ID NO: 90295 - protein, 9 aa, Homo sapiens
  misc_feature: Table A; Target 90295; HLA-B*44:02; TRPM1; ENSG00000134160; TAA
QEWIVISYI

SEQ ID NO: 90296 - protein, 9 aa, Homo sapiens
  misc_feature: Table A; Target 90296; HLA-B*49:01; TRPM1; ENSG00000134160; TAA
QEWIVISYI

SEQ ID NO: 90297 - protein, 9 aa, Homo sapiens
  misc_feature: Table A; Target 90297; HLA-A*30:01; TRPM1; ENSG00000134160; TAA
QEYWNITDL

SEQ ID NO: 90298 - protein, 9 aa, Homo sapiens
  misc_feature: Table A; Target 90298; HLA-B*37:01; TRPM1; ENSG00000134160; TAA
QEYWNITDL

SEQ ID NO: 90299 - protein, 9 aa, Homo sapiens
  misc_feature: Table A; Target 90299; HLA-B*40:01; TRPM1; ENSG00000134160; TAA
QEYWNITDL

SEQ ID NO: 90300 - protein, 9 aa, Homo sapiens
  misc_feature: Table A; Target 90300; HLA-B*49:01; TRPM1; ENSG00000134160; TAA
QEYWNITDL

SEQ ID NO: 90301 - protein, 10 aa, Homo sapiens
  misc_feature: Table A; Target 90301; HLA-B*49:01; TRPM1; ENSG00000134160; TAA
QEYWNITDLV

SEQ ID NO: 90302 - protein, 9 aa, Homo sapiens
  misc_feature: Table A; Target 90302; HLA-A*02:04; TRPM1; ENSG00000134160; TAA
QHFLTIPRL

SEQ ID NO: 90303 - protein, 9 aa, Homo sapiens
  misc_feature: Table A; Target 90303; HLA-B*38:01; TRPM1; ENSG00000134160; TAA
QHFLTIPRL

SEQ ID NO: 90304 - protein, 9 aa, Homo sapiens
  misc_feature: Table A; Target 90304; HLA-B*54:01; TRPM1; ENSG00000134160; TAA
QHIPPLPSA

SEQ ID NO: 90305 - protein, 9 aa, Homo sapiens
  misc_feature: Table A; Target 90305; HLA-B*56:01; TRPM1; ENSG00000134160; TAA
QHIPPLPSA

SEQ ID NO: 90306 - protein, 9 aa, Homo sapiens
  misc_feature: Table A; Target 90306; HLA-A*01:01; TRPM1; ENSG00000134160; TAA
QIAMKLLTY

SEQ ID NO: 90307 - protein, 9 aa, Homo sapiens
  misc_feature: Table A; Target 90307; HLA-A*03:01; TRPM1; ENSG00000134160; TAA
QIAMKLLTY

SEQ ID NO: 90308 - protein, 9 aa, Homo sapiens
  misc_feature: Table A; Target 90308; HLA-A*25:01; TRPM1; ENSG00000134160; TAA
QIAMKLLTY

SEQ ID NO: 90309 - protein, 9 aa, Homo sapiens
  misc_feature: Table A; Target 90309; HLA-A*26:01; TRPM1; ENSG00000134160; TAA
QIAMKLLTY

SEQ ID NO: 90310 - protein, 9 aa, Homo sapiens
  misc_feature: Table A; Target 90310; HLA-A*29:02; TRPM1; ENSG00000134160; TAA
QIAMKLLTY

SEQ ID NO: 90311 - protein, 9 aa, Homo sapiens
  misc_feature: Table A; Target 90311; HLA-A*32:01; TRPM1; ENSG00000134160; TAA
QIAMKLLTY

SEQ ID NO: 90312 - protein, 9 aa, Homo sapiens
  misc_feature: Table A; Target 90312; HLA-B*15:01; TRPM1; ENSG00000134160; TAA
QIAMKLLTY

SEQ ID NO: 90313 - protein, 9 aa, Homo sapiens
  misc_feature: Table A; Target 90313; HLA-C*02:02; TRPM1; ENSG00000134160; TAA
QIAMKLLTY

SEQ ID NO: 90314 - protein, 9 aa, Homo sapiens
  misc_feature: Table A; Target 90314; HLA-C*07:04; TRPM1; ENSG00000134160; TAA
QIAMKLLTY

SEQ ID NO: 90315 - protein, 9 aa, Homo sapiens
  misc_feature: Table A; Target 90315; HLA-C*16:01; TRPM1; ENSG00000134160; TAA
QIAMKLLTY

SEQ ID NO: 90316 - protein, 9 aa, Homo sapiens
  misc_feature: Table A; Target 90316; HLA-A*02:07; TRPM1; ENSG00000134160; TAA
QIDLYAMEI

SEQ ID NO: 90317 - protein, 9 aa, Homo sapiens
  misc_feature: Table A; Target 90317; HLA-B*57:01; TRPM1; ENSG00000134160; TAA
QIFVFGPHW

SEQ ID NO: 90318 - protein, 10 aa, Homo sapiens
  misc_feature: Table A; Target 90318; HLA-A*02:01; TRPM1; ENSG00000134160; TAA
QLEELSNRMV

SEQ ID NO: 90319 - protein, 9 aa, Homo sapiens
  misc_feature: Table A; Target 90319; HLA-A*02:01; TRPM1; ENSG00000134160; TAA
QLFAIIMEC

SEQ ID NO: 90320 - protein, 9 aa, Homo sapiens
  misc_feature: Table A; Target 90320; HLA-A*02:03; TRPM1; ENSG00000134160; TAA
QLFAIIMEC

SEQ ID NO: 90321 - protein, 9 aa, Homo sapiens
  misc_feature: Table A; Target 90321; HLA-B*13:02; TRPM1; ENSG00000134160; TAA
QLTVETTNI

SEQ ID NO: 90322 - protein, 8 aa, Homo sapiens
  misc_feature: Table A; Target 90322; HLA-B*37:01; TRPM1; ENSG00000134160; TAA
QNSLHLSL

SEQ ID NO: 90323 - protein, 8 aa, Homo sapiens
  misc_feature: Table A; Target 90323; HLA-B*08:01; TRPM1; ENSG00000134160; TAA
QPKLKQVF

SEQ ID NO: 90324 - protein, 10 aa, Homo sapiens
  misc_feature: Table A; Target 90324; HLA-B*51:01; TRPM1; ENSG00000134160; TAA
QPYMGYGRVI

SEQ ID NO: 90325 - protein, 9 aa, Homo sapiens
  misc_feature: Table A; Target 90325; HLA-B*38:01; TRPM1; ENSG00000134160; TAA
QQDIEMAIL

SEQ ID NO: 90326 - protein, 9 aa, Homo sapiens
  misc_feature: Table A; Target 90326; HLA-B*38:01; TRPM1; ENSG00000134160; TAA
QQSSSDERI

SEQ ID NO: 90327 - protein, 9 aa, Homo sapiens
  misc_feature: Table A; Target 90327; HLA-B*27:05; TRPM1; ENSG00000134160; TAA
QRGEESMAK

SEQ ID NO: 90328 - protein, 9 aa, Homo sapiens
  misc_feature: Table A; Target 90328; HLA-B*27:05; TRPM1; ENSG00000134160; TAA
QRSIPIGTK

SEQ ID NO: 90329 - protein, 9 aa, Homo sapiens
  misc_feature: Table A; Target 90329; HLA-B*27:02; TRPM1; ENSG00000134160; TAA
QRYQLIMTF

SEQ ID NO: 90330 - protein, 9 aa, Homo sapiens
  misc_feature: Table A; Target 90330; HLA-C*16:04; TRPM1; ENSG00000134160; TAA
QRYQLIMTF

SEQ ID NO: 90331 - protein, 10 aa, Homo sapiens
  misc_feature: Table A; Target 90331; HLA-A*01:01; TRPM1; ENSG00000134160; TAA
QSSINSADGY

SEQ ID NO: 90332 - protein, 10 aa, Homo sapiens
  misc_feature: Table A; Target 90332; HLA-A*30:02; TRPM1; ENSG00000134160; TAA
QSSINSADGY

SEQ ID NO: 90333 - protein, 8 aa, Homo sapiens
  misc_feature: Table A; Target 90333; HLA-A*01:01; TRPM1; ENSG00000134160; TAA
QSYPTDSY

SEQ ID NO: 90334 - protein, 8 aa, Homo sapiens
  misc_feature: Table A; Target 90334; HLA-A*30:02; TRPM1; ENSG00000134160; TAA
QSYPTDSY

SEQ ID NO: 90335 - protein, 8 aa, Homo sapiens
  misc_feature: Table A; Target 90335; HLA-A*32:01; TRPM1; ENSG00000134160; TAA
QSYPTDSY

SEQ ID NO: 90336 - protein, 8 aa, Homo sapiens
  misc_feature: Table A; Target 90336; HLA-B*15:03; TRPM1; ENSG00000134160; TAA
QSYPTDSY

SEQ ID NO: 90337 - protein, 8 aa, Homo sapiens
  misc_feature: Table A; Target 90337; HLA-B*46:01; TRPM1; ENSG00000134160; TAA
QSYPTDSY

SEQ ID NO: 90338 - protein, 8 aa, Homo sapiens
  misc_feature: Table A; Target 90338; HLA-C*16:02; TRPM1; ENSG00000134160; TAA
QSYPTDSY

SEQ ID NO: 90339 - protein, 9 aa, Homo sapiens
  misc_feature: Table A; Target 90339; HLA-A*03:01; TRPM1; ENSG00000134160; TAA
QTLGFPSLR

SEQ ID NO: 90340 - protein, 9 aa, Homo sapiens
  misc_feature: Table A; Target 90340; HLA-A*11:01; TRPM1; ENSG00000134160; TAA
QTLGFPSLR

SEQ ID NO: 90341 - protein, 9 aa, Homo sapiens
  misc_feature: Table A; Target 90341; HLA-A*31:01; TRPM1; ENSG00000134160; TAA
QTLGFPSLR

SEQ ID NO: 90342 - protein, 9 aa, Homo sapiens
  misc_feature: Table A; Target 90342; HLA-A*33:01; TRPM1; ENSG00000134160; TAA
QTLGFPSLR

SEQ ID NO: 90343 - protein, 9 aa, Homo sapiens
  misc_feature: Table A; Target 90343; HLA-A*33:03; TRPM1; ENSG00000134160; TAA
QTLGFPSLR

SEQ ID NO: 90344 - protein, 9 aa, Homo sapiens
  misc_feature: Table A; Target 90344; HLA-A*68:01; TRPM1; ENSG00000134160; TAA
QTLGFPSLR

SEQ ID NO: 90345 - protein, 9 aa, Homo sapiens
  misc_feature: Table A; Target 90345; HLA-C*07:06; TRPM1; ENSG00000134160; TAA
QTLGFPSLR

SEQ ID NO: 90346 - protein, 11 aa, Homo sapiens
  misc_feature: Table A; Target 90346; HLA-A*03:01; TRPM1; ENSG00000134160; TAA
QTLGFPSLRSK

SEQ ID NO: 90347 - protein, 11 aa, Homo sapiens
  misc_feature: Table A; Target 90347; HLA-A*03:02; TRPM1; ENSG00000134160; TAA
QTLGFPSLRSK

SEQ ID NO: 90348 - protein, 11 aa, Homo sapiens
  misc_feature: Table A; Target 90348; HLA-A*11:01; TRPM1; ENSG00000134160; TAA
QTLGFPSLRSK

SEQ ID NO: 90349 - protein, 11 aa, Homo sapiens
  misc_feature: Table A; Target 90349; HLA-A*31:01; TRPM1; ENSG00000134160; TAA
QTLGFPSLRSK

SEQ ID NO: 90350 - protein, 9 aa, Homo sapiens
  misc_feature: Table A; Target 90350; HLA-A*01:01; TRPM1; ENSG00000134160; TAA
QTMSNPLSK

SEQ ID NO: 90351 - protein, 9 aa, Homo sapiens
  misc_feature: Table A; Target 90351; HLA-A*03:01; TRPM1; ENSG00000134160; TAA
QTMSNPLSK

SEQ ID NO: 90352 - protein, 9 aa, Homo sapiens
  misc_feature: Table A; Target 90352; HLA-A*03:02; TRPM1; ENSG00000134160; TAA
QTMSNPLSK

SEQ ID NO: 90353 - protein, 9 aa, Homo sapiens
  misc_feature: Table A; Target 90353; HLA-A*11:01; TRPM1; ENSG00000134160; TAA
QTMSNPLSK

SEQ ID NO: 90354 - protein, 9 aa, Homo sapiens
  misc_feature: Table A; Target 90354; HLA-A*33:03; TRPM1; ENSG00000134160; TAA
QTMSNPLSK

SEQ ID NO: 90355 - protein, 9 aa, Homo sapiens
  misc_feature: Table A; Target 90355; HLA-A*68:01; TRPM1; ENSG00000134160; TAA
QTMSNPLSK

SEQ ID NO: 90356 - protein, 9 aa, Homo sapiens
  misc_feature: Table A; Target 90356; HLA-C*07:06; TRPM1; ENSG00000134160; TAA
QTMSNPLSK

SEQ ID NO: 90357 - protein, 10 aa, Homo sapiens
  misc_feature: Table A; Target 90357; HLA-A*03:01; TRPM1; ENSG00000134160; TAA
QTMSNPLSKL

SEQ ID NO: 90358 - protein, 10 aa, Homo sapiens
  misc_feature: Table A; Target 90358; HLA-A*03:02; TRPM1; ENSG00000134160; TAA
QTMSNPLSKL

SEQ ID NO: 90359 - protein, 10 aa, Homo sapiens
  misc_feature: Table A; Target 90359; HLA-A*11:01; TRPM1; ENSG00000134160; TAA
QTMSNPLSKL

SEQ ID NO: 90360 - protein, 10 aa, Homo sapiens
  misc_feature: Table A; Target 90360; HLA-A*25:01; TRPM1; ENSG00000134160; TAA
QTMSNPLSKL

SEQ ID NO: 90361 - protein, 10 aa, Homo sapiens
  misc_feature: Table A; Target 90361; HLA-A*26:01; TRPM1; ENSG00000134160; TAA
QTMSNPLSKL

SEQ ID NO: 90362 - protein, 10 aa, Homo sapiens
  misc_feature: Table A; Target 90362; HLA-A*33:03; TRPM1; ENSG00000134160; TAA
QTMSNPLSKL

SEQ ID NO: 90363 - protein, 10 aa, Homo sapiens
  misc_feature: Table A; Target 90363; HLA-A*68:01; TRPM1; ENSG00000134160; TAA
QTMSNPLSKL

SEQ ID NO: 90364 - protein, 10 aa, Homo sapiens
  misc_feature: Table A; Target 90364; HLA-A*68:02; TRPM1; ENSG00000134160; TAA
QTMSNPLSKL

SEQ ID NO: 90365 - protein, 10 aa, Homo sapiens
  misc_feature: Table A; Target 90365; HLA-B*57:01; TRPM1; ENSG00000134160; TAA
QTMSNPLSKL

SEQ ID NO: 90366 - protein, 10 aa, Homo sapiens
  misc_feature: Table A; Target 90366; HLA-B*58:01; TRPM1; ENSG00000134160; TAA
QTMSNPLSKL

SEQ ID NO: 90367 - protein, 10 aa, Homo sapiens
  misc_feature: Table A; Target 90367; HLA-A*25:01; TRPM1; ENSG00000134160; TAA
QTVDLRLAQL

SEQ ID NO: 90368 - protein, 10 aa, Homo sapiens
  misc_feature: Table A; Target 90368; HLA-A*26:01; TRPM1; ENSG00000134160; TAA
QTVDLRLAQL

SEQ ID NO: 90369 - protein, 10 aa, Homo sapiens
  misc_feature: Table A; Target 90369; HLA-A*68:02; TRPM1; ENSG00000134160; TAA
QTVDLRLAQL

SEQ ID NO: 90370 - protein, 9 aa, Homo sapiens
  misc_feature: Table A; Target 90370; HLA-A*01:01; TRPM1; ENSG00000134160; TAA
QVETQPEKW

SEQ ID NO: 90371 - protein, 9 aa, Homo sapiens
  misc_feature: Table A; Target 90371; HLA-A*25:01; TRPM1; ENSG00000134160; TAA
QVETQPEKW

SEQ ID NO: 90372 - protein, 9 aa, Homo sapiens
  misc_feature: Table A; Target 90372; HLA-A*32:01; TRPM1; ENSG00000134160; TAA
QVETQPEKW

SEQ ID NO: 90373 - protein, 9 aa, Homo sapiens
  misc_feature: Table A; Target 90373; HLA-B*44:03; TRPM1; ENSG00000134160; TAA
QVETQPEKW

SEQ ID NO: 90374 - protein, 9 aa, Homo sapiens
  misc_feature: Table A; Target 90374; HLA-B*57:01; TRPM1; ENSG00000134160; TAA
QVETQPEKW

SEQ ID NO: 90375 - protein, 9 aa, Homo sapiens
  misc_feature: Table A; Target 90375; HLA-B*58:01; TRPM1; ENSG00000134160; TAA
QVETQPEKW

SEQ ID NO: 90376 - protein, 9 aa, Homo sapiens
  misc_feature: Table A; Target 90376; HLA-C*16:04; TRPM1; ENSG00000134160; TAA
QVETQPEKW

SEQ ID NO: 90377 - protein, 9 aa, Homo sapiens
  misc_feature: Table A; Target 90377; HLA-A*03:01; TRPM1; ENSG00000134160; TAA
QVFGKGLIK

SEQ ID NO: 90378 - protein, 9 aa, Homo sapiens
  misc_feature: Table A; Target 90378; HLA-A*03:02; TRPM1; ENSG00000134160; TAA
QVFGKGLIK

SEQ ID NO: 90379 - protein, 9 aa, Homo sapiens
  misc_feature: Table A; Target 90379; HLA-A*11:01; TRPM1; ENSG00000134160; TAA
QVFGKGLIK

SEQ ID NO: 90380 - protein, 9 aa, Homo sapiens
  misc_feature: Table A; Target 90380; HLA-A*31:01; TRPM1; ENSG00000134160; TAA
QVFGKGLIK

SEQ ID NO: 90381 - protein, 10 aa, Homo sapiens
  misc_feature: Table A; Target 90381; HLA-A*02:03; TRPM1; ENSG00000134160; TAA
QVFGKGLIKA

SEQ ID NO: 90382 - protein, 10 aa, Homo sapiens
  misc_feature: Table A; Target 90382; HLA-A*68:02; TRPM1; ENSG00000134160; TAA
QVFGKGLIKA

SEQ ID NO: 90383 - protein, 10 aa, Homo sapiens
  misc_feature: Table A; Target 90383; HLA-A*24:02; TRPM1; ENSG00000134160; TAA
QYPFHELMVW

SEQ ID NO: 90384 - protein, 11 aa, Homo sapiens
  misc_feature: Table A; Target 90384; HLA-A*03:02; TRPM1; ENSG00000134160; TAA
RASDILSFAHK

SEQ ID NO: 90385 - protein, 11 aa, Homo sapiens
  misc_feature: Table A; Target 90385; HLA-A*11:01; TRPM1; ENSG00000134160; TAA
RASDILSFAHK

SEQ ID NO: 90386 - protein, 10 aa, Homo sapiens
  misc_feature: Table A; Target 90386; HLA-A*30:02; TRPM1; ENSG00000134160; TAA
RASSECEATY

SEQ ID NO: 90387 - protein, 10 aa, Homo sapiens
  misc_feature: Table A; Target 90387; HLA-B*15:01; TRPM1; ENSG00000134160; TAA
RASSECEATY

SEQ ID NO: 90388 - protein, 8 aa, Homo sapiens
  misc_feature: Table A; Target 90388; HLA-B*37:01; TRPM1; ENSG00000134160; TAA
RDFIAHTC

SEQ ID NO: 90389 - protein, 8 aa, Homo sapiens
  misc_feature: Table A; Target 90389; HLA-B*37:01; TRPM1; ENSG00000134160; TAA
RDVKKSNL

SEQ ID NO: 90390 - protein, 11 aa, Homo sapiens
  misc_feature: Table A; Target 90390; HLA-B*40:01; TRPM1; ENSG00000134160; TAA
REILMSEPGKL

SEQ ID NO: 90391 - protein, 8 aa, Homo sapiens
  misc_feature: Table A; Target 90391; HLA-B*37:01; TRPM1; ENSG00000134160; TAA
REQLLVTI

SEQ ID NO: 90392 - protein, 8 aa, Homo sapiens
  misc_feature: Table A; Target 90392; HLA-B*49:01; TRPM1; ENSG00000134160; TAA
REQLLVTI

SEQ ID NO: 90393 - protein, 9 aa, Homo sapiens
  misc_feature: Table A; Target 90393; HLA-A*30:01; TRPM1; ENSG00000134160; TAA
RETFMKTSL

SEQ ID NO: 90394 - protein, 9 aa, Homo sapiens
  misc_feature: Table A; Target 90394; HLA-B*37:01; TRPM1; ENSG00000134160; TAA
RETFMKTSL

SEQ ID NO: 90395 - protein, 9 aa, Homo sapiens
  misc_feature: Table A; Target 90395; HLA-B*40:01; TRPM1; ENSG00000134160; TAA
RETFMKTSL

SEQ ID NO: 90396 - protein, 9 aa, Homo sapiens
  misc_feature: Table A; Target 90396; HLA-B*40:02; TRPM1; ENSG00000134160; TAA
RETFMKTSL

SEQ ID NO: 90397 - protein, 9 aa, Homo sapiens
  misc_feature: Table A; Target 90397; HLA-B*44:03; TRPM1; ENSG00000134160; TAA
RETFMKTSL

SEQ ID NO: 90398 - protein, 9 aa, Homo sapiens
  misc_feature: Table A; Target 90398; HLA-A*24:02; TRPM1; ENSG00000134160; TAA
RFQYPFHEL

SEQ ID NO: 90399 - protein, 11 aa, Homo sapiens
  misc_feature: Table A; Target 90399; HLA-A*03:01; TRPM1; ENSG00000134160; TAA
RLAQLEELSNR

SEQ ID NO: 90400 - protein, 11 aa, Homo sapiens
  misc_feature: Table A; Target 90400; HLA-A*31:01; TRPM1; ENSG00000134160; TAA
RLAQLEELSNR

SEQ ID NO: 90401 - protein, 10 aa, Homo sapiens
  misc_feature: Table A; Target 90401; HLA-A*02:04; TRPM1; ENSG00000134160; TAA
RLEELYNTRL

SEQ ID NO: 90402 - protein, 10 aa, Homo sapiens
  misc_feature: Table A; Target 90402; HLA-A*02:07; TRPM1; ENSG00000134160; TAA
RLEELYNTRL

SEQ ID NO: 90403 - protein, 9 aa, Homo sapiens
  misc_feature: Table A; Target 90403; HLA-A*03:01; TRPM1; ENSG00000134160; TAA
RLGPPNTLH

SEQ ID NO: 90404 - protein, 9 aa, Homo sapiens
  misc_feature: Table A; Target 90404; HLA-A*03:02; TRPM1; ENSG00000134160; TAA
RLGPPNTLH

SEQ ID NO: 90405 - protein, 11 aa, Homo sapiens
  misc_feature: Table A; Target 90405; HLA-A*02:04; TRPM1; ENSG00000134160; TAA
RLGPPNTLHLL

SEQ ID NO: 90406 - protein, 11 aa, Homo sapiens
  misc_feature: Table A; Target 90406; HLA-A*03:01; TRPM1; ENSG00000134160; TAA
RLGPPNTLHLL

SEQ ID NO: 90407 - protein, 11 aa, Homo sapiens
  misc_feature: Table A; Target 90407; HLA-A*31:01; TRPM1; ENSG00000134160; TAA
RLGPPNTLHLL

SEQ ID NO: 90408 - protein, 9 aa, Homo sapiens
  misc_feature: Table A; Target 90408; HLA-A*02:01; TRPM1; ENSG00000134160; TAA
RLGQGVPLV

SEQ ID NO: 90409 - protein, 9 aa, Homo sapiens
  misc_feature: Table A; Target 90409; HLA-A*02:03; TRPM1; ENSG00000134160; TAA
RLGQGVPLV

SEQ ID NO: 90410 - protein, 9 aa, Homo sapiens
  misc_feature: Table A; Target 90410; HLA-A*02:04; TRPM1; ENSG00000134160; TAA
RLGQGVPLV

SEQ ID NO: 90411 - protein, 11 aa, Homo sapiens
  misc_feature: Table A; Target 90411; HLA-A*02:04; TRPM1; ENSG00000134160; TAA
RLGQGVPLVGL

SEQ ID NO: 90412 - protein, 10 aa, Homo sapiens
  misc_feature: Table A; Target 90412; HLA-A*02:03; TRPM1; ENSG00000134160; TAA
RLHEFEEQCV

SEQ ID NO: 90413 - protein, 9 aa, Homo sapiens
  misc_feature: Table A; Target 90413; HLA-A*02:01; TRPM1; ENSG00000134160; TAA
RLLEKHISL

SEQ ID NO: 90414 - protein, 9 aa, Homo sapiens
  misc_feature: Table A; Target 90414; HLA-A*02:03; TRPM1; ENSG00000134160; TAA
RLLEKHISL

SEQ ID NO: 90415 - protein, 9 aa, Homo sapiens
  misc_feature: Table A; Target 90415; HLA-A*02:04; TRPM1; ENSG00000134160; TAA
RLLEKHISL

SEQ ID NO: 90416 - protein, 9 aa, Homo sapiens
  misc_feature: Table A; Target 90416; HLA-A*02:07; TRPM1; ENSG00000134160; TAA
RLLEKHISL

SEQ ID NO: 90417 - protein, 9 aa, Homo sapiens
  misc_feature: Table A; Target 90417; HLA-A*03:01; TRPM1; ENSG00000134160; TAA
RLLEKHISL

SEQ ID NO: 90418 - protein, 9 aa, Homo sapiens
  misc_feature: Table A; Target 90418; HLA-A*31:01; TRPM1; ENSG00000134160; TAA
RLLEKHISL

SEQ ID NO: 90419 - protein, 9 aa, Homo sapiens
  misc_feature: Table A; Target 90419; HLA-B*08:01; TRPM1; ENSG00000134160; TAA
RLLEKHISL

SEQ ID NO: 90420 - protein, 9 aa, Homo sapiens
  misc_feature: Table A; Target 90420; HLA-B*37:01; TRPM1; ENSG00000134160; TAA
RLLEKHISL

SEQ ID NO: 90421 - protein, 11 aa, Homo sapiens
  misc_feature: Table A; Target 90421; HLA-A*03:01; TRPM1; ENSG00000134160; TAA
RLLEKHISLQK

SEQ ID NO: 90422 - protein, 9 aa, Homo sapiens
  misc_feature: Table A; Target 90422; HLA-A*02:01; TRPM1; ENSG00000134160; TAA
RLPPCIPGA

SEQ ID NO: 90423 - protein, 9 aa, Homo sapiens
  misc_feature: Table A; Target 90423; HLA-A*02:07; TRPM1; ENSG00000134160; TAA
RLPPCIPGA

SEQ ID NO: 90424 - protein, 10 aa, Homo sapiens
  misc_feature: Table A; Target 90424; HLA-A*03:01; TRPM1; ENSG00000134160; TAA
RLQNQPYMGY

SEQ ID NO: 90425 - protein, 10 aa, Homo sapiens
  misc_feature: Table A; Target 90425; HLA-A*03:02; TRPM1; ENSG00000134160; TAA
RLQNQPYMGY

SEQ ID NO: 90426 - protein, 10 aa, Homo sapiens
  misc_feature: Table A; Target 90426; HLA-A*29:02; TRPM1; ENSG00000134160; TAA
RLQNQPYMGY

SEQ ID NO: 90427 - protein, 10 aa, Homo sapiens
  misc_feature: Table A; Target 90427; HLA-A*30:02; TRPM1; ENSG00000134160; TAA
RLQNQPYMGY

SEQ ID NO: 90428 - protein, 10 aa, Homo sapiens
  misc_feature: Table A; Target 90428; HLA-B*15:01; TRPM1; ENSG00000134160; TAA
RLQNQPYMGY

SEQ ID NO: 90429 - protein, 9 aa, Homo sapiens
  misc_feature: Table A; Target 90429; HLA-A*03:01; TRPM1; ENSG00000134160; TAA
RMRKNPGLK

SEQ ID NO: 90430 - protein, 9 aa, Homo sapiens
  misc_feature: Table A; Target 90430; HLA-A*02:04; TRPM1; ENSG00000134160; TAA
RMVNALENL

SEQ ID NO: 90431 - protein, 9 aa, Homo sapiens
  misc_feature: Table A; Target 90431; HLA-B*58:01; TRPM1; ENSG00000134160; TAA
RMVNALENL

SEQ ID NO: 90432 - protein, 9 aa, Homo sapiens
  misc_feature: Table A; Target 90432; HLA-B*07:02; TRPM1; ENSG00000134160; TAA
RPVLPPPMI

SEQ ID NO: 90433 - protein, 9 aa, Homo sapiens
  misc_feature: Table A; Target 90433; HLA-B*51:01; TRPM1; ENSG00000134160; TAA
RPVLPPPMI

SEQ ID NO: 90434 - protein, 9 aa, Homo sapiens
  misc_feature: Table A; Target 90434; HLA-B*56:01; TRPM1; ENSG00000134160; TAA
RPVLPPPMI

SEQ ID NO: 90435 - protein, 9 aa, Homo sapiens
  misc_feature: Table A; Target 90435; HLA-C*07:02; TRPM1; ENSG00000134160; TAA
RPVLPPPMI

SEQ ID NO: 90436 - protein, 11 aa, Homo sapiens
  misc_feature: Table A; Target 90436; HLA-A*30:02; TRPM1; ENSG00000134160; TAA
RQSSINSADGY

SEQ ID NO: 90437 - protein, 11 aa, Homo sapiens
  misc_feature: Table A; Target 90437; HLA-B*15:01; TRPM1; ENSG00000134160; TAA
RQSSINSADGY

SEQ ID NO: 90438 - protein, 11 aa, Homo sapiens
  misc_feature: Table A; Target 90438; HLA-B*15:03; TRPM1; ENSG00000134160; TAA
RQSSINSADGY

SEQ ID NO: 90439 - protein, 9 aa, Homo sapiens
  misc_feature: Table A; Target 90439; HLA-A*31:01; TRPM1; ENSG00000134160; TAA
RSFVYSRGR

SEQ ID NO: 90440 - protein, 9 aa, Homo sapiens
  misc_feature: Table A; Target 90440; HLA-B*57:01; TRPM1; ENSG00000134160; TAA
RSFVYSRGR

SEQ ID NO: 90441 - protein, 9 aa, Homo sapiens
  misc_feature: Table A; Target 90441; HLA-A*23:01; TRPM1; ENSG00000134160; TAA
RSIPIGTKI

SEQ ID NO: 90442 - protein, 9 aa, Homo sapiens
  misc_feature: Table A; Target 90442; HLA-A*32:01; TRPM1; ENSG00000134160; TAA
RSIPIGTKI

SEQ ID NO: 90443 - protein, 9 aa, Homo sapiens
  misc_feature: Table A; Target 90443; HLA-B*57:01; TRPM1; ENSG00000134160; TAA
RSIPIGTKI

SEQ ID NO: 90444 - protein, 9 aa, Homo sapiens
  misc_feature: Table A; Target 90444; HLA-B*58:01; TRPM1; ENSG00000134160; TAA
RSIPIGTKI

SEQ ID NO: 90445 - protein, 10 aa, Homo sapiens
  misc_feature: Table A; Target 90445; HLA-A*31:01; TRPM1; ENSG00000134160; TAA
RSKSLHGHPR

SEQ ID NO: 90446 - protein, 11 aa, Homo sapiens
  misc_feature: Table A; Target 90446; HLA-A*03:01; TRPM1; ENSG00000134160; TAA
RTLYNNLFGPK

SEQ ID NO: 90447 - protein, 9 aa, Homo sapiens
  misc_feature: Table A; Target 90447; HLA-A*02:07; TRPM1; ENSG00000134160; TAA
RVDFVKLLI

SEQ ID NO: 90448 - protein, 8 aa, Homo sapiens
  misc_feature: Table A; Target 90448; HLA-A*02:04; TRPM1; ENSG00000134160; TAA
RVLDIFGV

SEQ ID NO: 90449 - protein, 10 aa, Homo sapiens
  misc_feature: Table A; Target 90449; HLA-A*03:01; TRPM1; ENSG00000134160; TAA
RVLDIFGVNK

SEQ ID NO: 90450 - protein, 10 aa, Homo sapiens
  misc_feature: Table A; Target 90450; HLA-A*03:02; TRPM1; ENSG00000134160; TAA
RVLDIFGVNK

SEQ ID NO: 90451 - protein, 10 aa, Homo sapiens
  misc_feature: Table A; Target 90451; HLA-A*11:01; TRPM1; ENSG00000134160; TAA
RVLDIFGVNK

SEQ ID NO: 90452 - protein, 10 aa, Homo sapiens
  misc_feature: Table A; Target 90452; HLA-A*31:01; TRPM1; ENSG00000134160; TAA
RVLDIFGVNK

SEQ ID NO: 90453 - protein, 11 aa, Homo sapiens
  misc_feature: Table A; Target 90453; HLA-A*29:02; TRPM1; ENSG00000134160; TAA
RVLDIFGVNKY

SEQ ID NO: 90454 - protein, 11 aa, Homo sapiens
  misc_feature: Table A; Target 90454; HLA-A*30:02; TRPM1; ENSG00000134160; TAA
RVLDIFGVNKY

SEQ ID NO: 90455 - protein, 11 aa, Homo sapiens
  misc_feature: Table A; Target 90455; HLA-B*57:01; TRPM1; ENSG00000134160; TAA
RVLDIFGVNKY

SEQ ID NO: 90456 - protein, 10 aa, Homo sapiens
  misc_feature: Table A; Target 90456; HLA-A*03:01; TRPM1; ENSG00000134160; TAA
RVYQTMSNPL

SEQ ID NO: 90457 - protein, 11 aa, Homo sapiens
  misc_feature: Table A; Target 90457; HLA-A*24:02; TRPM1; ENSG00000134160; TAA
RYHFNGEELLF

SEQ ID NO: 90458 - protein, 8 aa, Homo sapiens
  misc_feature: Table A; Target 90458; HLA-A*24:02; TRPM1; ENSG00000134160; TAA
RYQLIMTF

SEQ ID NO: 90459 - protein, 8 aa, Homo sapiens
  misc_feature: Table A; Target 90459; HLA-A*01:01; TRPM1; ENSG00000134160; TAA
SADGYSLY

SEQ ID NO: 90460 - protein, 8 aa, Homo sapiens
  misc_feature: Table A; Target 90460; HLA-C*05:01; TRPM1; ENSG00000134160; TAA
SADGYSLY

SEQ ID NO: 90461 - protein, 9 aa, Homo sapiens
  misc_feature: Table A; Target 90461; HLA-A*11:01; TRPM1; ENSG00000134160; TAA
SADGYSLYR

SEQ ID NO: 90462 - protein, 9 aa, Homo sapiens
  misc_feature: Table A; Target 90462; HLA-A*33:01; TRPM1; ENSG00000134160; TAA
SADGYSLYR

SEQ ID NO: 90463 - protein, 9 aa, Homo sapiens
  misc_feature: Table A; Target 90463; HLA-A*68:01; TRPM1; ENSG00000134160; TAA
SADGYSLYR

SEQ ID NO: 90464 - protein, 9 aa, Homo sapiens
  misc_feature: Table A; Target 90464; HLA-C*07:06; TRPM1; ENSG00000134160; TAA
SADGYSLYR

SEQ ID NO: 90465 - protein, 10 aa, Homo sapiens
  misc_feature: Table A; Target 90465; HLA-A*01:01; TRPM1; ENSG00000134160; TAA
SADGYSLYRY

SEQ ID NO: 90466 - protein, 10 aa, Homo sapiens
  misc_feature: Table A; Target 90466; HLA-A*29:02; TRPM1; ENSG00000134160; TAA
SADGYSLYRY

SEQ ID NO: 90467 - protein, 10 aa, Homo sapiens
  misc_feature: Table A; Target 90467; HLA-A*30:02; TRPM1; ENSG00000134160; TAA
SADGYSLYRY

SEQ ID NO: 90468 - protein, 8 aa, Homo sapiens
  misc_feature: Table A; Target 90468; HLA-B*51:01; TRPM1; ENSG00000134160; TAA
SAPDQLSL

SEQ ID NO: 90469 - protein, 8 aa, Homo sapiens
  misc_feature: Table A; Target 90469; HLA-C*01:02; TRPM1; ENSG00000134160; TAA
SAPDQLSL

SEQ ID NO: 90470 - protein, 10 aa, Homo sapiens
  misc_feature: Table A; Target 90470; HLA-C*01:02; TRPM1; ENSG00000134160; TAA
SAPDQLSLAL

SEQ ID NO: 90471 - protein, 9 aa, Homo sapiens
  misc_feature: Table A; Target 90471; HLA-B*35:03; TRPM1; ENSG00000134160; TAA
SATPDGSHL

SEQ ID NO: 90472 - protein, 9 aa, Homo sapiens
  misc_feature: Table A; Target 90472; HLA-C*03:03; TRPM1; ENSG00000134160; TAA
SATPDGSHL

SEQ ID NO: 90473 - protein, 9 aa, Homo sapiens
  misc_feature: Table A; Target 90473; HLA-C*03:04; TRPM1; ENSG00000134160; TAA
SATPDGSHL

SEQ ID NO: 90474 - protein, 9 aa, Homo sapiens
  misc_feature: Table A; Target 90474; HLA-C*16:02; TRPM1; ENSG00000134160; TAA
SATPDGSHL

SEQ ID NO: 90475 - protein, 10 aa, Homo sapiens
  misc_feature: Table A; Target 90475; HLA-B*44:02; TRPM1; ENSG00000134160; TAA
SDILSFAHKY

SEQ ID NO: 90476 - protein, 10 aa, Homo sapiens
  misc_feature: Table A; Target 90476; HLA-B*44:03; TRPM1; ENSG00000134160; TAA
SDILSFAHKY

SEQ ID NO: 90477 - protein, 8 aa, Homo sapiens
  misc_feature: Table A; Target 90477; HLA-A*30:01; TRPM1; ENSG00000134160; TAA
SDVQNTQL

SEQ ID NO: 90478 - protein, 8 aa, Homo sapiens
  misc_feature: Table A; Target 90478; HLA-B*37:01; TRPM1; ENSG00000134160; TAA
SDVQNTQL

SEQ ID NO: 90479 - protein, 9 aa, Homo sapiens
  misc_feature: Table A; Target 90479; HLA-B*18:01; TRPM1; ENSG00000134160; TAA
SEAAVQAEH

SEQ ID NO: 90480 - protein, 9 aa, Homo sapiens
  misc_feature: Table A; Target 90480; HLA-B*40:01; TRPM1; ENSG00000134160; TAA
SEAAVQAEH

SEQ ID NO: 90481 - protein, 9 aa, Homo sapiens
  misc_feature: Table A; Target 90481; HLA-B*44:03; TRPM1; ENSG00000134160; TAA
SEAAVQAEH

SEQ ID NO: 90482 - protein, 9 aa, Homo sapiens
  misc_feature: Table A; Target 90482; HLA-C*02:02; TRPM1; ENSG00000134160; TAA
SEAAVQAEH

SEQ ID NO: 90483 - protein, 9 aa, Homo sapiens
  misc_feature: Table A; Target 90483; HLA-C*16:04; TRPM1; ENSG00000134160; TAA
SEAAVQAEH

SEQ ID NO: 90484 - protein, 8 aa, Homo sapiens
  misc_feature: Table A; Target 90484; HLA-B*18:01; TRPM1; ENSG00000134160; TAA
SECEATYL

SEQ ID NO: 90485 - protein, 8 aa, Homo sapiens
  misc_feature: Table A; Target 90485; HLA-B*37:01; TRPM1; ENSG00000134160; TAA
SECEATYL

SEQ ID NO: 90486 - protein, 9 aa, Homo sapiens
  misc_feature: Table A; Target 90486; HLA-A*30:01; TRPM1; ENSG00000134160; TAA
SECEATYLL

SEQ ID NO: 90487 - protein, 9 aa, Homo sapiens
  misc_feature: Table A; Target 90487; HLA-B*37:01; TRPM1; ENSG00000134160; TAA
SECEATYLL

SEQ ID NO: 90488 - protein, 9 aa, Homo sapiens
  misc_feature: Table A; Target 90488; HLA-B*38:01; TRPM1; ENSG00000134160; TAA
SECEATYLL

SEQ ID NO: 90489 - protein, 9 aa, Homo sapiens
  misc_feature: Table A; Target 90489; HLA-B*40:01; TRPM1; ENSG00000134160; TAA
SECEATYLL

SEQ ID NO: 90490 - protein, 9 aa, Homo sapiens
  misc_feature: Table A; Target 90490; HLA-B*40:02; TRPM1; ENSG00000134160; TAA
SECEATYLL

SEQ ID NO: 90491 - protein, 9 aa, Homo sapiens
  misc_feature: Table A; Target 90491; HLA-B*44:02; TRPM1; ENSG00000134160; TAA
SECEATYLL

SEQ ID NO: 90492 - protein, 9 aa, Homo sapiens
  misc_feature: Table A; Target 90492; HLA-B*44:03; TRPM1; ENSG00000134160; TAA
SECEATYLL

SEQ ID NO: 90493 - protein, 9 aa, Homo sapiens
  misc_feature: Table A; Target 90493; HLA-B*49:01; TRPM1; ENSG00000134160; TAA
SECEATYLL

SEQ ID NO: 90494 - protein, 9 aa, Homo sapiens
  misc_feature: Table A; Target 90494; HLA-A*30:01; TRPM1; ENSG00000134160; TAA
SEGQQDIEM

SEQ ID NO: 90495 - protein, 9 aa, Homo sapiens
  misc_feature: Table A; Target 90495; HLA-B*40:01; TRPM1; ENSG00000134160; TAA
SEGQQDIEM

SEQ ID NO: 90496 - protein, 9 aa, Homo sapiens
  misc_feature: Table A; Target 90496; HLA-B*44:02; TRPM1; ENSG00000134160; TAA
SEGQQDIEM

SEQ ID NO: 90497 - protein, 9 aa, Homo sapiens
  misc_feature: Table A; Target 90497; HLA-B*44:03; TRPM1; ENSG00000134160; TAA
SEGQQDIEM

SEQ ID NO: 90498 - protein, 9 aa, Homo sapiens
  misc_feature: Table A; Target 90498; HLA-A*30:01; TRPM1; ENSG00000134160; TAA
SERVENMSM

SEQ ID NO: 90499 - protein, 9 aa, Homo sapiens
  misc_feature: Table A; Target 90499; HLA-B*37:01; TRPM1; ENSG00000134160; TAA
SERVENMSM

SEQ ID NO: 90500 - protein, 9 aa, Homo sapiens
  misc_feature: Table A; Target 90500; HLA-B*40:01; TRPM1; ENSG00000134160; TAA
SERVENMSM

SEQ ID NO: 90501 - protein, 9 aa, Homo sapiens
  misc_feature: Table A; Target 90501; HLA-B*40:02; TRPM1; ENSG00000134160; TAA
SERVENMSM

SEQ ID NO: 90502 - protein, 9 aa, Homo sapiens
  misc_feature: Table A; Target 90502; HLA-B*49:01; TRPM1; ENSG00000134160; TAA
SERVENMSM

SEQ ID NO: 90503 - protein, 9 aa, Homo sapiens
  misc_feature: Table A; Target 90503; HLA-A*30:01; TRPM1; ENSG00000134160; TAA
SESDLVDDI

SEQ ID NO: 90504 - protein, 9 aa, Homo sapiens
  misc_feature: Table A; Target 90504; HLA-B*40:01; TRPM1; ENSG00000134160; TAA
SESDLVDDI

SEQ ID NO: 90505 - protein, 9 aa, Homo sapiens
  misc_feature: Table A; Target 90505; HLA-B*44:02; TRPM1; ENSG00000134160; TAA
SESDLVDDI

SEQ ID NO: 90506 - protein, 9 aa, Homo sapiens
  misc_feature: Table A; Target 90506; HLA-B*44:03; TRPM1; ENSG00000134160; TAA
SESDLVDDI

SEQ ID NO: 90507 - protein, 9 aa, Homo sapiens
  misc_feature: Table A; Target 90507; HLA-B*49:01; TRPM1; ENSG00000134160; TAA
SESDLVDDI

SEQ ID NO: 90508 - protein, 9 aa, Homo sapiens
  misc_feature: Table A; Target 90508; HLA-B*27:05; TRPM1; ENSG00000134160; TAA
SHSTDIPYI

SEQ ID NO: 90509 - protein, 9 aa, Homo sapiens
  misc_feature: Table A; Target 90509; HLA-B*38:01; TRPM1; ENSG00000134160; TAA
SHSTDIPYI

SEQ ID NO: 90510 - protein, 9 aa, Homo sapiens
  misc_feature: Table A; Target 90510; HLA-B*39:01; TRPM1; ENSG00000134160; TAA
SHSTDIPYI

SEQ ID NO: 90511 - protein, 10 aa, Homo sapiens
  misc_feature: Table A; Target 90511; HLA-B*38:01; TRPM1; ENSG00000134160; TAA
SHSTDIPYIV

SEQ ID NO: 90512 - protein, 8 aa, Homo sapiens
  misc_feature: Table A; Target 90512; HLA-A*30:02; TRPM1; ENSG00000134160; TAA
SINSADGY

SEQ ID NO: 90513 - protein, 8 aa, Homo sapiens
  misc_feature: Table A; Target 90513; HLA-B*39:01; TRPM1; ENSG00000134160; TAA
SINSADGY

SEQ ID NO: 90514 - protein, 10 aa, Homo sapiens
  misc_feature: Table A; Target 90514; HLA-B*07:02; TRPM1; ENSG00000134160; TAA
SINSADGYSL

SEQ ID NO: 90515 - protein, 10 aa, Homo sapiens
  misc_feature: Table A; Target 90515; HLA-B*38:01; TRPM1; ENSG00000134160; TAA
SINSADGYSL

SEQ ID NO: 90516 - protein, 10 aa, Homo sapiens
  misc_feature: Table A; Target 90516; HLA-B*40:01; TRPM1; ENSG00000134160; TAA
SINSADGYSL

SEQ ID NO: 90517 - protein, 10 aa, Homo sapiens
  misc_feature: Table A; Target 90517; HLA-C*01:02; TRPM1; ENSG00000134160; TAA
SINSADGYSL

SEQ ID NO: 90518 - protein, 11 aa, Homo sapiens
  misc_feature: Table A; Target 90518; HLA-A*01:01; TRPM1; ENSG00000134160; TAA
SINSADGYSLY

SEQ ID NO: 90519 - protein, 11 aa, Homo sapiens
  misc_feature: Table A; Target 90519; HLA-A*25:01; TRPM1; ENSG00000134160; TAA
SINSADGYSLY

SEQ ID NO: 90520 - protein, 11 aa, Homo sapiens
  misc_feature: Table A; Target 90520; HLA-A*26:01; TRPM1; ENSG00000134160; TAA
SINSADGYSLY

SEQ ID NO: 90521 - protein, 11 aa, Homo sapiens
  misc_feature: Table A; Target 90521; HLA-A*29:02; TRPM1; ENSG00000134160; TAA
SINSADGYSLY

SEQ ID NO: 90522 - protein, 11 aa, Homo sapiens
  misc_feature: Table A; Target 90522; HLA-A*30:02; TRPM1; ENSG00000134160; TAA
SINSADGYSLY

SEQ ID NO: 90523 - protein, 11 aa, Homo sapiens
  misc_feature: Table A; Target 90523; HLA-B*15:01; TRPM1; ENSG00000134160; TAA
SINSADGYSLY

SEQ ID NO: 90524 - protein, 11 aa, Homo sapiens
  misc_feature: Table A; Target 90524; HLA-B*15:03; TRPM1; ENSG00000134160; TAA
SINSADGYSLY

SEQ ID NO: 90525 - protein, 9 aa, Homo sapiens
  misc_feature: Table A; Target 90525; HLA-A*02:04; TRPM1; ENSG00000134160; TAA
SISNQVWKF

SEQ ID NO: 90526 - protein, 9 aa, Homo sapiens
  misc_feature: Table A; Target 90526; HLA-A*24:02; TRPM1; ENSG00000134160; TAA
SISNQVWKF

SEQ ID NO: 90527 - protein, 11 aa, Homo sapiens
  misc_feature: Table A; Target 90527; HLA-A*25:01; TRPM1; ENSG00000134160; TAA
SITDQQLTTEW

SEQ ID NO: 90528 - protein, 11 aa, Homo sapiens
  misc_feature: Table A; Target 90528; HLA-A*32:01; TRPM1; ENSG00000134160; TAA
SITDQQLTTEW

SEQ ID NO: 90529 - protein, 11 aa, Homo sapiens
  misc_feature: Table A; Target 90529; HLA-B*57:01; TRPM1; ENSG00000134160; TAA
SITDQQLTTEW

SEQ ID NO: 90530 - protein, 11 aa, Homo sapiens
  misc_feature: Table A; Target 90530; HLA-B*58:01; TRPM1; ENSG00000134160; TAA
SITDQQLTTEW

SEQ ID NO: 90531 - protein, 9 aa, Homo sapiens
  misc_feature: Table A; Target 90531; HLA-A*03:01; TRPM1; ENSG00000134160; TAA
SLAPPTDSK

SEQ ID NO: 90532 - protein, 9 aa, Homo sapiens
  misc_feature: Table A; Target 90532; HLA-A*03:02; TRPM1; ENSG00000134160; TAA
SLAPPTDSK

SEQ ID NO: 90533 - protein, 9 aa, Homo sapiens
  misc_feature: Table A; Target 90533; HLA-A*11:01; TRPM1; ENSG00000134160; TAA
SLAPPTDSK

SEQ ID NO: 90534 - protein, 9 aa, Homo sapiens
  misc_feature: Table A; Target 90534; HLA-B*13:02; TRPM1; ENSG00000134160; TAA
SLAPPTDSK

SEQ ID NO: 90535 - protein, 9 aa, Homo sapiens
  misc_feature: Table A; Target 90535; HLA-C*07:06; TRPM1; ENSG00000134160; TAA
SLAPPTDSK

SEQ ID NO: 90536 - protein, 9 aa, Homo sapiens
  misc_feature: Table A; Target 90536; HLA-A*02:01; TRPM1; ENSG00000134160; TAA
SLHGHPRNV

SEQ ID NO: 90537 - protein, 9 aa, Homo sapiens
  misc_feature: Table A; Target 90537; HLA-A*02:03; TRPM1; ENSG00000134160; TAA
SLHGHPRNV

SEQ ID NO: 90538 - protein, 9 aa, Homo sapiens
  misc_feature: Table A; Target 90538; HLA-A*02:01; TRPM1; ENSG00000134160; TAA
SLIDIGLVL

SEQ ID NO: 90539 - protein, 9 aa, Homo sapiens
  misc_feature: Table A; Target 90539; HLA-A*02:03; TRPM1; ENSG00000134160; TAA
SLIDIGLVL

SEQ ID NO: 90540 - protein, 9 aa, Homo sapiens
  misc_feature: Table A; Target 90540; HLA-A*02:04; TRPM1; ENSG00000134160; TAA
SLIDIGLVL

SEQ ID NO: 90541 - protein, 9 aa, Homo sapiens
  misc_feature: Table A; Target 90541; HLA-A*02:07; TRPM1; ENSG00000134160; TAA
SLIDIGLVL

SEQ ID NO: 90542 - protein, 9 aa, Homo sapiens
  misc_feature: Table A; Target 90542; HLA-A*23:01; TRPM1; ENSG00000134160; TAA
SLIDIGLVL

SEQ ID NO: 90543 - protein, 9 aa, Homo sapiens
  misc_feature: Table A; Target 90543; HLA-C*03:04; TRPM1; ENSG00000134160; TAA
SLIDIGLVL

SEQ ID NO: 90544 - protein, 11 aa, Homo sapiens
  misc_feature: Table A; Target 90544; HLA-A*26:01; TRPM1; ENSG00000134160; TAA
SLIDIGLVLEY

SEQ ID NO: 90545 - protein, 11 aa, Homo sapiens
  misc_feature: Table A; Target 90545; HLA-A*29:02; TRPM1; ENSG00000134160; TAA
SLIDIGLVLEY

SEQ ID NO: 90546 - protein, 11 aa, Homo sapiens
  misc_feature: Table A; Target 90546; HLA-A*30:02; TRPM1; ENSG00000134160; TAA
SLIDIGLVLEY

SEQ ID NO: 90547 - protein, 9 aa, Homo sapiens
  misc_feature: Table A; Target 90547; HLA-A*02:01; TRPM1; ENSG00000134160; TAA
SLQKINTRL

SEQ ID NO: 90548 - protein, 9 aa, Homo sapiens
  misc_feature: Table A; Target 90548; HLA-A*02:03; TRPM1; ENSG00000134160; TAA
SLQKINTRL

SEQ ID NO: 90549 - protein, 9 aa, Homo sapiens
  misc_feature: Table A; Target 90549; HLA-A*02:04; TRPM1; ENSG00000134160; TAA
SLQKINTRL

SEQ ID NO: 90550 - protein, 9 aa, Homo sapiens
  misc_feature: Table A; Target 90550; HLA-A*02:01; TRPM1; ENSG00000134160; TAA
SLQTVDLRL

SEQ ID NO: 90551 - protein, 9 aa, Homo sapiens
  misc_feature: Table A; Target 90551; HLA-A*02:04; TRPM1; ENSG00000134160; TAA
SLQTVDLRL

SEQ ID NO: 90552 - protein, 9 aa, Homo sapiens
  misc_feature: Table A; Target 90552; HLA-A*02:07; TRPM1; ENSG00000134160; TAA
SLQTVDLRL

SEQ ID NO: 90553 - protein, 9 aa, Homo sapiens
  misc_feature: Table A; Target 90553; HLA-A*23:01; TRPM1; ENSG00000134160; TAA
SLQTVDLRL

SEQ ID NO: 90554 - protein, 9 aa, Homo sapiens
  misc_feature: Table A; Target 90554; HLA-B*13:02; TRPM1; ENSG00000134160; TAA
SLQTVDLRL

SEQ ID NO: 90555 - protein, 10 aa, Homo sapiens
  misc_feature: Table A; Target 90555; HLA-A*02:03; TRPM1; ENSG00000134160; TAA
SLQTVDLRLA

SEQ ID NO: 90556 - protein, 10 aa, Homo sapiens
  misc_feature: Table A; Target 90556; HLA-A*02:03; TRPM1; ENSG00000134160; TAA
SLREQLLVTI

SEQ ID NO: 90557 - protein, 10 aa, Homo sapiens
  misc_feature: Table A; Target 90557; HLA-A*02:04; TRPM1; ENSG00000134160; TAA
SLREQLLVTI

SEQ ID NO: 90558 - protein, 10 aa, Homo sapiens
  misc_feature: Table A; Target 90558; HLA-A*02:01; TRPM1; ENSG00000134160; TAA
SLSTSPGTGV

SEQ ID NO: 90559 - protein, 10 aa, Homo sapiens
  misc_feature: Table A; Target 90559; HLA-A*02:03; TRPM1; ENSG00000134160; TAA
SLSTSPGTGV

SEQ ID NO: 90560 - protein, 8 aa, Homo sapiens
  misc_feature: Table A; Target 90560; HLA-B*37:01; TRPM1; ENSG00000134160; TAA
SLVIVSGM

SEQ ID NO: 90561 - protein, 9 aa, Homo sapiens
  misc_feature: Table A; Target 90561; HLA-A*02:01; TRPM1; ENSG00000134160; TAA
SMAKALVAC

SEQ ID NO: 90562 - protein, 10 aa, Homo sapiens
  misc_feature: Table A; Target 90562; HLA-A*03:02; TRPM1; ENSG00000134160; TAA
SMAKALVACK

SEQ ID NO: 90563 - protein, 8 aa, Homo sapiens
  misc_feature: Table A; Target 90563; HLA-B*08:01; TRPM1; ENSG00000134160; TAA
SNRMVNAL

SEQ ID NO: 90564 - protein, 9 aa, Homo sapiens
  misc_feature: Table A; Target 90564; HLA-B*07:02; TRPM1; ENSG00000134160; TAA
SPSLNKTDV

SEQ ID NO: 90565 - protein, 10 aa, Homo sapiens
  misc_feature: Table A; Target 90565; HLA-B*07:02; TRPM1; ENSG00000134160; TAA
SPSLNKTDVI

SEQ ID NO: 90566 - protein, 8 aa, Homo sapiens
  misc_feature: Table A; Target 90566; HLA-B*15:01; TRPM1; ENSG00000134160; TAA
SQMLLTDM

SEQ ID NO: 90567 - protein, 8 aa, Homo sapiens
  misc_feature: Table A; Target 90567; HLA-B*15:03; TRPM1; ENSG00000134160; TAA
SQMLLTDM

SEQ ID NO: 90568 - protein, 9 aa, Homo sapiens
  misc_feature: Table A; Target 90568; HLA-B*44:02; TRPM1; ENSG00000134160; TAA
SQMLLTDMW

SEQ ID NO: 90569 - protein, 9 aa, Homo sapiens
  misc_feature: Table A; Target 90569; HLA-C*16:04; TRPM1; ENSG00000134160; TAA
SQMLLTDMW

SEQ ID NO: 90570 - protein, 11 aa, Homo sapiens
  misc_feature: Table A; Target 90570; HLA-C*16:04; TRPM1; ENSG00000134160; TAA
SRASSECEATY

SEQ ID NO: 90571 - protein, 8 aa, Homo sapiens
  misc_feature: Table A; Target 90571; HLA-C*05:01; TRPM1; ENSG00000134160; TAA
SSDERIRV

SEQ ID NO: 90572 - protein, 9 aa, Homo sapiens
  misc_feature: Table A; Target 90572; HLA-C*05:01; TRPM1; ENSG00000134160; TAA
SSECEATYL

SEQ ID NO: 90573 - protein, 9 aa, Homo sapiens
  misc_feature: Table A; Target 90573; HLA-A*01:01; TRPM1; ENSG00000134160; TAA
SSINSADGY

SEQ ID NO: 90574 - protein, 9 aa, Homo sapiens
  misc_feature: Table A; Target 90574; HLA-A*26:01; TRPM1; ENSG00000134160; TAA
SSINSADGY

SEQ ID NO: 90575 - protein, 9 aa, Homo sapiens
  misc_feature: Table A; Target 90575; HLA-A*29:02; TRPM1; ENSG00000134160; TAA
SSINSADGY

SEQ ID NO: 90576 - protein, 9 aa, Homo sapiens
  misc_feature: Table A; Target 90576; HLA-A*30:02; TRPM1; ENSG00000134160; TAA
SSINSADGY

SEQ ID NO: 90577 - protein, 9 aa, Homo sapiens
  misc_feature: Table A; Target 90577; HLA-A*32:01; TRPM1; ENSG00000134160; TAA
SSINSADGY

SEQ ID NO: 90578 - protein, 9 aa, Homo sapiens
  misc_feature: Table A; Target 90578; HLA-B*15:01; TRPM1; ENSG00000134160; TAA
SSINSADGY

SEQ ID NO: 90579 - protein, 9 aa, Homo sapiens
  misc_feature: Table A; Target 90579; HLA-B*15:03; TRPM1; ENSG00000134160; TAA
SSINSADGY

SEQ ID NO: 90580 - protein, 9 aa, Homo sapiens
  misc_feature: Table A; Target 90580; HLA-B*27:02; TRPM1; ENSG00000134160; TAA
SSINSADGY

SEQ ID NO: 90581 - protein, 9 aa, Homo sapiens
  misc_feature: Table A; Target 90581; HLA-B*58:01; TRPM1; ENSG00000134160; TAA
SSINSADGY

SEQ ID NO: 90582 - protein, 9 aa, Homo sapiens
  misc_feature: Table A; Target 90582; HLA-C*16:04; TRPM1; ENSG00000134160; TAA
SSINSADGY

SEQ ID NO: 90583 - protein, 8 aa, Homo sapiens
  misc_feature: Table A; Target 90583; HLA-C*05:01; TRPM1; ENSG00000134160; TAA
STDIPYIV

SEQ ID NO: 90584 - protein, 9 aa, Homo sapiens
  misc_feature: Table A; Target 90584; HLA-A*68:02; TRPM1; ENSG00000134160; TAA
STFMIGAIL

SEQ ID NO: 90585 - protein, 10 aa, Homo sapiens
  misc_feature: Table A; Target 90585; HLA-A*31:01; TRPM1; ENSG00000134160; TAA
STFMIGAILR

SEQ ID NO: 90586 - protein, 10 aa, Homo sapiens
  misc_feature: Table A; Target 90586; HLA-A*68:01; TRPM1; ENSG00000134160; TAA
STFMIGAILR

SEQ ID NO: 90587 - protein, 10 aa, Homo sapiens
  misc_feature: Table A; Target 90587; HLA-A*68:02; TRPM1; ENSG00000134160; TAA
STFMIGAILR

SEQ ID NO: 90588 - protein, 11 aa, Homo sapiens
  misc_feature: Table A; Target 90588; HLA-A*02:04; TRPM1; ENSG00000134160; TAA
STFMIGAILRL

SEQ ID NO: 90589 - protein, 11 aa, Homo sapiens
  misc_feature: Table A; Target 90589; HLA-A*68:02; TRPM1; ENSG00000134160; TAA
STFMIGAILRL

SEQ ID NO: 90590 - protein, 9 aa, Homo sapiens
  misc_feature: Table A; Target 90590; HLA-A*11:01; TRPM1; ENSG00000134160; TAA
STSPGTGVR

SEQ ID NO: 90591 - protein, 9 aa, Homo sapiens
  misc_feature: Table A; Target 90591; HLA-A*33:03; TRPM1; ENSG00000134160; TAA
STSPGTGVR

SEQ ID NO: 90592 - protein, 9 aa, Homo sapiens
  misc_feature: Table A; Target 90592; HLA-A*68:01; TRPM1; ENSG00000134160; TAA
STSPGTGVR

SEQ ID NO: 90593 - protein, 9 aa, Homo sapiens
  misc_feature: Table A; Target 90593; HLA-C*07:06; TRPM1; ENSG00000134160; TAA
STSPGTGVR

SEQ ID NO: 90594 - protein, 10 aa, Homo sapiens
  misc_feature: Table A; Target 90594; HLA-A*01:01; TRPM1; ENSG00000134160; TAA
STSPGTGVRK

SEQ ID NO: 90595 - protein, 10 aa, Homo sapiens
  misc_feature: Table A; Target 90595; HLA-A*03:01; TRPM1; ENSG00000134160; TAA
STSPGTGVRK

SEQ ID NO: 90596 - protein, 10 aa, Homo sapiens
  misc_feature: Table A; Target 90596; HLA-A*03:02; TRPM1; ENSG00000134160; TAA
STSPGTGVRK

SEQ ID NO: 90597 - protein, 10 aa, Homo sapiens
  misc_feature: Table A; Target 90597; HLA-A*11:01; TRPM1; ENSG00000134160; TAA
STSPGTGVRK

SEQ ID NO: 90598 - protein, 10 aa, Homo sapiens
  misc_feature: Table A; Target 90598; HLA-A*68:01; TRPM1; ENSG00000134160; TAA
STSPGTGVRK

SEQ ID NO: 90599 - protein, 10 aa, Homo sapiens
  misc_feature: Table A; Target 90599; HLA-C*07:06; TRPM1; ENSG00000134160; TAA
STSPGTGVRK

SEQ ID NO: 90600 - protein, 11 aa, Homo sapiens
  misc_feature: Table A; Target 90600; HLA-A*03:01; TRPM1; ENSG00000134160; TAA
STSPGTGVRKK

SEQ ID NO: 90601 - protein, 11 aa, Homo sapiens
  misc_feature: Table A; Target 90601; HLA-A*03:02; TRPM1; ENSG00000134160; TAA
STSPGTGVRKK

SEQ ID NO: 90602 - protein, 11 aa, Homo sapiens
  misc_feature: Table A; Target 90602; HLA-A*11:01; TRPM1; ENSG00000134160; TAA
STSPGTGVRKK

SEQ ID NO: 90603 - protein, 11 aa, Homo sapiens
  misc_feature: Table A; Target 90603; HLA-A*68:01; TRPM1; ENSG00000134160; TAA
STSPGTGVRKK

SEQ ID NO: 90604 - protein, 9 aa, Homo sapiens
  misc_feature: Table A; Target 90604; HLA-A*01:01; TRPM1; ENSG00000134160; TAA
SVAKHTQSY

SEQ ID NO: 90605 - protein, 9 aa, Homo sapiens
  misc_feature: Table A; Target 90605; HLA-A*03:01; TRPM1; ENSG00000134160; TAA
SVAKHTQSY

SEQ ID NO: 90606 - protein, 9 aa, Homo sapiens
  misc_feature: Table A; Target 90606; HLA-A*25:01; TRPM1; ENSG00000134160; TAA
SVAKHTQSY

SEQ ID NO: 90607 - protein, 9 aa, Homo sapiens
  misc_feature: Table A; Target 90607; HLA-A*26:01; TRPM1; ENSG00000134160; TAA
SVAKHTQSY

SEQ ID NO: 90608 - protein, 9 aa, Homo sapiens
  misc_feature: Table A; Target 90608; HLA-A*29:02; TRPM1; ENSG00000134160; TAA
SVAKHTQSY

SEQ ID NO: 90609 - protein, 9 aa, Homo sapiens
  misc_feature: Table A; Target 90609; HLA-A*30:02; TRPM1; ENSG00000134160; TAA
SVAKHTQSY

SEQ ID NO: 90610 - protein, 9 aa, Homo sapiens
  misc_feature: Table A; Target 90610; HLA-A*32:01; TRPM1; ENSG00000134160; TAA
SVAKHTQSY

SEQ ID NO: 90611 - protein, 9 aa, Homo sapiens
  misc_feature: Table A; Target 90611; HLA-B*15:01; TRPM1; ENSG00000134160; TAA
SVAKHTQSY

SEQ ID NO: 90612 - protein, 9 aa, Homo sapiens
  misc_feature: Table A; Target 90612; HLA-B*15:03; TRPM1; ENSG00000134160; TAA
SVAKHTQSY

SEQ ID NO: 90613 - protein, 9 aa, Homo sapiens
  misc_feature: Table A; Target 90613; HLA-B*35:01; TRPM1; ENSG00000134160; TAA
SVAKHTQSY

SEQ ID NO: 90614 - protein, 9 aa, Homo sapiens
  misc_feature: Table A; Target 90614; HLA-B*44:03; TRPM1; ENSG00000134160; TAA
SVAKHTQSY

SEQ ID NO: 90615 - protein, 9 aa, Homo sapiens
  misc_feature: Table A; Target 90615; HLA-B*46:01; TRPM1; ENSG00000134160; TAA
SVAKHTQSY

SEQ ID NO: 90616 - protein, 9 aa, Homo sapiens
  misc_feature: Table A; Target 90616; HLA-B*58:01; TRPM1; ENSG00000134160; TAA
SVAKHTQSY

SEQ ID NO: 90617 - protein, 9 aa, Homo sapiens
  misc_feature: Table A; Target 90617; HLA-C*02:02; TRPM1; ENSG00000134160; TAA
SVAKHTQSY

SEQ ID NO: 90618 - protein, 9 aa, Homo sapiens
  misc_feature: Table A; Target 90618; HLA-C*07:04; TRPM1; ENSG00000134160; TAA
SVAKHTQSY

SEQ ID NO: 90619 - protein, 9 aa, Homo sapiens
  misc_feature: Table A; Target 90619; HLA-C*07:06; TRPM1; ENSG00000134160; TAA
SVAKHTQSY

SEQ ID NO: 90620 - protein, 9 aa, Homo sapiens
  misc_feature: Table A; Target 90620; HLA-C*16:01; TRPM1; ENSG00000134160; TAA
SVAKHTQSY

SEQ ID NO: 90621 - protein, 9 aa, Homo sapiens
  misc_feature: Table A; Target 90621; HLA-A*25:01; TRPM1; ENSG00000134160; TAA
SVHGGLQNF

SEQ ID NO: 90622 - protein, 9 aa, Homo sapiens
  misc_feature: Table A; Target 90622; HLA-A*26:01; TRPM1; ENSG00000134160; TAA
SVHGGLQNF

SEQ ID NO: 90623 - protein, 9 aa, Homo sapiens
  misc_feature: Table A; Target 90623; HLA-A*30:02; TRPM1; ENSG00000134160; TAA
SVHGGLQNF

SEQ ID NO: 90624 - protein, 9 aa, Homo sapiens
  misc_feature: Table A; Target 90624; HLA-A*32:01; TRPM1; ENSG00000134160; TAA
SVHGGLQNF

SEQ ID NO: 90625 - protein, 9 aa, Homo sapiens
  misc_feature: Table A; Target 90625; HLA-B*15:01; TRPM1; ENSG00000134160; TAA
SVHGGLQNF

SEQ ID NO: 90626 - protein, 9 aa, Homo sapiens
  misc_feature: Table A; Target 90626; HLA-B*46:01; TRPM1; ENSG00000134160; TAA
SVHGGLQNF

SEQ ID NO: 90627 - protein, 10 aa, Homo sapiens
  misc_feature: Table A; Target 90627; HLA-A*25:01; TRPM1; ENSG00000134160; TAA
SVKPDQTLGF

SEQ ID NO: 90628 - protein, 10 aa, Homo sapiens
  misc_feature: Table A; Target 90628; HLA-A*26:01; TRPM1; ENSG00000134160; TAA
SVKPDQTLGF

SEQ ID NO: 90629 - protein, 10 aa, Homo sapiens
  misc_feature: Table A; Target 90629; HLA-A*30:02; TRPM1; ENSG00000134160; TAA
SVKPDQTLGF

SEQ ID NO: 90630 - protein, 10 aa, Homo sapiens
  misc_feature: Table A; Target 90630; HLA-A*31:01; TRPM1; ENSG00000134160; TAA
SVKPDQTLGF

SEQ ID NO: 90631 - protein, 10 aa, Homo sapiens
  misc_feature: Table A; Target 90631; HLA-A*32:01; TRPM1; ENSG00000134160; TAA
SVKPDQTLGF

SEQ ID NO: 90632 - protein, 10 aa, Homo sapiens
  misc_feature: Table A; Target 90632; HLA-B*15:01; TRPM1; ENSG00000134160; TAA
SVKPDQTLGF

SEQ ID NO: 90633 - protein, 10 aa, Homo sapiens
  misc_feature: Table A; Target 90633; HLA-B*57:01; TRPM1; ENSG00000134160; TAA
SVKPDQTLGF

SEQ ID NO: 90634 - protein, 10 aa, Homo sapiens
  misc_feature: Table A; Target 90634; HLA-B*57:01; TRPM1; ENSG00000134160; TAA
SVLNNSHTHF

SEQ ID NO: 90635 - protein, 9 aa, Homo sapiens
  misc_feature: Table A; Target 90635; HLA-A*11:01; TRPM1; ENSG00000134160; TAA
SVSSLVIVS

SEQ ID NO: 90636 - protein, 10 aa, Homo sapiens
  misc_feature: Table A; Target 90636; HLA-C*07:06; TRPM1; ENSG00000134160; TAA
SVSSLVIVSG

SEQ ID NO: 90637 - protein, 11 aa, Homo sapiens
  misc_feature: Table A; Target 90637; HLA-A*26:01; TRPM1; ENSG00000134160; TAA
SVSSLVIVSGM

SEQ ID NO: 90638 - protein, 9 aa, Homo sapiens
  misc_feature: Table A; Target 90638; HLA-A*24:02; TRPM1; ENSG00000134160; TAA
SYDTKPDSL

SEQ ID NO: 90639 - protein, 9 aa, Homo sapiens
  misc_feature: Table A; Target 90639; HLA-A*32:01; TRPM1; ENSG00000134160; TAA
SYDTKPDSL

SEQ ID NO: 90640 - protein, 9 aa, Homo sapiens
  misc_feature: Table A; Target 90640; HLA-B*35:03; TRPM1; ENSG00000134160; TAA
SYDTKPDSL

SEQ ID NO: 90641 - protein, 9 aa, Homo sapiens
  misc_feature: Table A; Target 90641; HLA-C*04:01; TRPM1; ENSG00000134160; TAA
SYDTKPDSL

SEQ ID NO: 90642 - protein, 9 aa, Homo sapiens
  misc_feature: Table A; Target 90642; HLA-C*05:01; TRPM1; ENSG00000134160; TAA
SYDTKPDSL

SEQ ID NO: 90643 - protein, 9 aa, Homo sapiens
  misc_feature: Table A; Target 90643; HLA-C*14:02; TRPM1; ENSG00000134160; TAA
SYDTKPDSL

SEQ ID NO: 90644 - protein, 10 aa, Homo sapiens
  misc_feature: Table A; Target 90644; HLA-C*04:01; TRPM1; ENSG00000134160; TAA
SYDTKPDSLL

SEQ ID NO: 90645 - protein, 8 aa, Homo sapiens
  misc_feature: Table A; Target 90645; HLA-A*23:01; TRPM1; ENSG00000134160; TAA
SYIVSLAL

SEQ ID NO: 90646 - protein, 8 aa, Homo sapiens
  misc_feature: Table A; Target 90646; HLA-C*14:02; TRPM1; ENSG00000134160; TAA
SYIVSLAL

SEQ ID NO: 90647 - protein, 9 aa, Homo sapiens
  misc_feature: Table A; Target 90647; HLA-A*23:01; TRPM1; ENSG00000134160; TAA
SYLGYLLLF

SEQ ID NO: 90648 - protein, 9 aa, Homo sapiens
  misc_feature: Table A; Target 90648; HLA-A*24:02; TRPM1; ENSG00000134160; TAA
SYLGYLLLF

SEQ ID NO: 90649 - protein, 9 aa, Homo sapiens
  misc_feature: Table A; Target 90649; HLA-A*29:02; TRPM1; ENSG00000134160; TAA
SYLGYLLLF

SEQ ID NO: 90650 - protein, 11 aa, Homo sapiens
  misc_feature: Table A; Target 90650; HLA-A*29:02; TRPM1; ENSG00000134160; TAA
SYLGYLLLFNY

SEQ ID NO: 90651 - protein, 9 aa, Homo sapiens
  misc_feature: Table A; Target 90651; HLA-A*23:01; TRPM1; ENSG00000134160; TAA
SYPLEETKI

SEQ ID NO: 90652 - protein, 9 aa, Homo sapiens
  misc_feature: Table A; Target 90652; HLA-A*24:02; TRPM1; ENSG00000134160; TAA
SYPLEETKI

SEQ ID NO: 90653 - protein, 9 aa, Homo sapiens
  misc_feature: Table A; Target 90653; HLA-C*01:02; TRPM1; ENSG00000134160; TAA
SYPLEETKI

SEQ ID NO: 90654 - protein, 9 aa, Homo sapiens
  misc_feature: Table A; Target 90654; HLA-B*08:01; TRPM1; ENSG00000134160; TAA
TALLKGTNV

SEQ ID NO: 90655 - protein, 9 aa, Homo sapiens
  misc_feature: Table A; Target 90655; HLA-B*51:01; TRPM1; ENSG00000134160; TAA
TALLKGTNV

SEQ ID NO: 90656 - protein, 11 aa, Homo sapiens
  misc_feature: Table A; Target 90656; HLA-B*54:01; TRPM1; ENSG00000134160; TAA
TALLKGTNVSA

SEQ ID NO: 90657 - protein, 9 aa, Homo sapiens
  misc_feature: Table A; Target 90657; HLA-B*54:01; TRPM1; ENSG00000134160; TAA
TCLKLAVAA

SEQ ID NO: 90658 - protein, 9 aa, Homo sapiens
  misc_feature: Table A; Target 90658; HLA-B*18:01; TRPM1; ENSG00000134160; TAA
TDLVAISTF

SEQ ID NO: 90659 - protein, 9 aa, Homo sapiens
  misc_feature: Table A; Target 90659; HLA-B*37:01; TRPM1; ENSG00000134160; TAA
TDLVAISTF

SEQ ID NO: 90660 - protein, 9 aa, Homo sapiens
  misc_feature: Table A; Target 90660; HLA-B*44:02; TRPM1; ENSG00000134160; TAA
TDLVAISTF

SEQ ID NO: 90661 - protein, 9 aa, Homo sapiens
  misc_feature: Table A; Target 90661; HLA-B*44:03; TRPM1; ENSG00000134160; TAA
TDLVAISTF

SEQ ID NO: 90662 - protein, 9 aa, Homo sapiens
  misc_feature: Table A; Target 90662; HLA-C*04:01; TRPM1; ENSG00000134160; TAA
TDLVAISTF

SEQ ID NO: 90663 - protein, 9 aa, Homo sapiens
  misc_feature: Table A; Target 90663; HLA-B*27:02; TRPM1; ENSG00000134160; TAA
TDQQLTTEW

SEQ ID NO: 90664 - protein, 9 aa, Homo sapiens
  misc_feature: Table A; Target 90664; HLA-B*44:02; TRPM1; ENSG00000134160; TAA
TDQQLTTEW

SEQ ID NO: 90665 - protein, 9 aa, Homo sapiens
  misc_feature: Table A; Target 90665; HLA-B*44:03; TRPM1; ENSG00000134160; TAA
TDQQLTTEW

SEQ ID NO: 90666 - protein, 9 aa, Homo sapiens
  misc_feature: Table A; Target 90666; HLA-C*16:04; TRPM1; ENSG00000134160; TAA
TDQQLTTEW

SEQ ID NO: 90667 - protein, 8 aa, Homo sapiens
  misc_feature: Table A; Target 90667; HLA-B*37:01; TRPM1; ENSG00000134160; TAA
TDSKATEK

SEQ ID NO: 90668 - protein, 9 aa, Homo sapiens
  misc_feature: Table A; Target 90668; HLA-B*37:01; TRPM1; ENSG00000134160; TAA
TDSYGVLEF

SEQ ID NO: 90669 - protein, 9 aa, Homo sapiens
  misc_feature: Table A; Target 90669; HLA-C*04:01; TRPM1; ENSG00000134160; TAA
TDSYGVLEF

SEQ ID NO: 90670 - protein, 9 aa, Homo sapiens
  misc_feature: Table A; Target 90670; HLA-C*07:04; TRPM1; ENSG00000134160; TAA
TDSYGVLEF

SEQ ID NO: 90671 - protein, 9 aa, Homo sapiens
  misc_feature: Table A; Target 90671; HLA-B*37:01; TRPM1; ENSG00000134160; TAA
TEKEKKPPM

SEQ ID NO: 90672 - protein, 9 aa, Homo sapiens
  misc_feature: Table A; Target 90672; HLA-B*40:02; TRPM1; ENSG00000134160; TAA
TEKEKKPPM

SEQ ID NO: 90673 - protein, 10 aa, Homo sapiens
  misc_feature: Table A; Target 90673; HLA-B*49:01; TRPM1; ENSG00000134160; TAA
TEWQCQVQKI

SEQ ID NO: 90674 - protein, 8 aa, Homo sapiens
  misc_feature: Table A; Target 90674; HLA-B*51:01; TRPM1; ENSG00000134160; TAA
TFFEVKSI

SEQ ID NO: 90675 - protein, 9 aa, Homo sapiens
  misc_feature: Table A; Target 90675; HLA-A*33:03; TRPM1; ENSG00000134160; TAA
TFMIGAILR

SEQ ID NO: 90676 - protein, 10 aa, Homo sapiens
  misc_feature: Table A; Target 90676; HLA-A*23:01; TRPM1; ENSG00000134160; TAA
TFMIGAILRL

SEQ ID NO: 90677 - protein, 10 aa, Homo sapiens
  misc_feature: Table A; Target 90677; HLA-A*24:02; TRPM1; ENSG00000134160; TAA
TFMIGAILRL

SEQ ID NO: 90678 - protein, 11 aa, Homo sapiens
  misc_feature: Table A; Target 90678; HLA-B*27:05; TRPM1; ENSG00000134160; TAA
THFILADNGTL

SEQ ID NO: 90679 - protein, 11 aa, Homo sapiens
  misc_feature: Table A; Target 90679; HLA-B*38:01; TRPM1; ENSG00000134160; TAA
THFILADNGTL

SEQ ID NO: 90680 - protein, 9 aa, Homo sapiens
  misc_feature: Table A; Target 90680; HLA-A*29:02; TRPM1; ENSG00000134160; TAA
TIPRLEELY

SEQ ID NO: 90681 - protein, 8 aa, Homo sapiens
  misc_feature: Table A; Target 90681; HLA-A*30:02; TRPM1; ENSG00000134160; TAA
TIQKTFNY

SEQ ID NO: 90682 - protein, 8 aa, Homo sapiens
  misc_feature: Table A; Target 90682; HLA-B*15:01; TRPM1; ENSG00000134160; TAA
TIQKTFNY

SEQ ID NO: 90683 - protein, 8 aa, Homo sapiens
  misc_feature: Table A; Target 90683; HLA-B*37:01; TRPM1; ENSG00000134160; TAA
TIQKTFNY

SEQ ID NO: 90684 - protein, 10 aa, Homo sapiens
  misc_feature: Table A; Target 90684; HLA-A*03:02; TRPM1; ENSG00000134160; TAA
TIQKTFNYNK

SEQ ID NO: 90685 - protein, 10 aa, Homo sapiens
  misc_feature: Table A; Target 90685; HLA-A*11:01; TRPM1; ENSG00000134160; TAA
TIQKTFNYNK

SEQ ID NO: 90686 - protein, 10 aa, Homo sapiens
  misc_feature: Table A; Target 90686; HLA-A*03:01; TRPM1; ENSG00000134160; TAA
TLGFPSLRSK

SEQ ID NO: 90687 - protein, 9 aa, Homo sapiens
  misc_feature: Table A; Target 90687; HLA-A*02:01; TRPM1; ENSG00000134160; TAA
TLGKYGAEV

SEQ ID NO: 90688 - protein, 9 aa, Homo sapiens
  misc_feature: Table A; Target 90688; HLA-A*02:03; TRPM1; ENSG00000134160; TAA
TLGKYGAEV

SEQ ID NO: 90689 - protein, 10 aa, Homo sapiens
  misc_feature: Table A; Target 90689; HLA-A*03:01; TRPM1; ENSG00000134160; TAA
TLYNNLFGPK

SEQ ID NO: 90690 - protein, 10 aa, Homo sapiens
  misc_feature: Table A; Target 90690; HLA-A*03:02; TRPM1; ENSG00000134160; TAA
TLYNNLFGPK

SEQ ID NO: 90691 - protein, 10 aa, Homo sapiens
  misc_feature: Table A; Target 90691; HLA-A*11:01; TRPM1; ENSG00000134160; TAA
TLYNNLFGPK

SEQ ID NO: 90692 - protein, 10 aa, Homo sapiens
  misc_feature: Table A; Target 90692; HLA-B*27:02; TRPM1; ENSG00000134160; TAA
TLYNNLFGPK

SEQ ID NO: 90693 - protein, 9 aa, Homo sapiens
  misc_feature: Table A; Target 90693; HLA-A*03:01; TRPM1; ENSG00000134160; TAA
TMKSRSFVY

SEQ ID NO: 90694 - protein, 9 aa, Homo sapiens
  misc_feature: Table A; Target 90694; HLA-A*29:02; TRPM1; ENSG00000134160; TAA
TMKSRSFVY

SEQ ID NO: 90695 - protein, 9 aa, Homo sapiens
  misc_feature: Table A; Target 90695; HLA-A*30:02; TRPM1; ENSG00000134160; TAA
TMKSRSFVY

SEQ ID NO: 90696 - protein, 9 aa, Homo sapiens
  misc_feature: Table A; Target 90696; HLA-B*08:01; TRPM1; ENSG00000134160; TAA
TMKSRSFVY

SEQ ID NO: 90697 - protein, 9 aa, Homo sapiens
  misc_feature: Table A; Target 90697; HLA-B*15:01; TRPM1; ENSG00000134160; TAA
TMKSRSFVY

SEQ ID NO: 90698 - protein, 9 aa, Homo sapiens
  misc_feature: Table A; Target 90698; HLA-B*46:01; TRPM1; ENSG00000134160; TAA
TMKSRSFVY

SEQ ID NO: 90699 - protein, 9 aa, Homo sapiens
  misc_feature: Table A; Target 90699; HLA-C*07:01; TRPM1; ENSG00000134160; TAA
TMKSRSFVY

SEQ ID NO: 90700 - protein, 9 aa, Homo sapiens
  misc_feature: Table A; Target 90700; HLA-A*02:01; TRPM1; ENSG00000134160; TAA
TMSNPLSKL

SEQ ID NO: 90701 - protein, 9 aa, Homo sapiens
  misc_feature: Table A; Target 90701; HLA-A*02:03; TRPM1; ENSG00000134160; TAA
TMSNPLSKL

SEQ ID NO: 90702 - protein, 9 aa, Homo sapiens
  misc_feature: Table A; Target 90702; HLA-A*02:04; TRPM1; ENSG00000134160; TAA
TMSNPLSKL

SEQ ID NO: 90703 - protein, 9 aa, Homo sapiens
  misc_feature: Table A; Target 90703; HLA-A*02:07; TRPM1; ENSG00000134160; TAA
TMSNPLSKL

SEQ ID NO: 90704 - protein, 9 aa, Homo sapiens
  misc_feature: Table A; Target 90704; HLA-A*03:01; TRPM1; ENSG00000134160; TAA
TMSNPLSKL

SEQ ID NO: 90705 - protein, 9 aa, Homo sapiens
  misc_feature: Table A; Target 90705; HLA-A*23:01; TRPM1; ENSG00000134160; TAA
TMSNPLSKL

SEQ ID NO: 90706 - protein, 9 aa, Homo sapiens
  misc_feature: Table A; Target 90706; HLA-A*24:02; TRPM1; ENSG00000134160; TAA
TMSNPLSKL

SEQ ID NO: 90707 - protein, 9 aa, Homo sapiens
  misc_feature: Table A; Target 90707; HLA-A*32:01; TRPM1; ENSG00000134160; TAA
TMSNPLSKL

SEQ ID NO: 90708 - protein, 9 aa, Homo sapiens
  misc_feature: Table A; Target 90708; HLA-B*07:02; TRPM1; ENSG00000134160; TAA
TMSNPLSKL

SEQ ID NO: 90709 - protein, 9 aa, Homo sapiens
  misc_feature: Table A; Target 90709; HLA-B*27:05; TRPM1; ENSG00000134160; TAA
TMSNPLSKL

SEQ ID NO: 90710 - protein, 9 aa, Homo sapiens
  misc_feature: Table A; Target 90710; HLA-B*37:01; TRPM1; ENSG00000134160; TAA
TMSNPLSKL

SEQ ID NO: 90711 - protein, 9 aa, Homo sapiens
  misc_feature: Table A; Target 90711; HLA-B*38:01; TRPM1; ENSG00000134160; TAA
TMSNPLSKL

SEQ ID NO: 90712 - protein, 9 aa, Homo sapiens
  misc_feature: Table A; Target 90712; HLA-B*46:01; TRPM1; ENSG00000134160; TAA
TMSNPLSKL

SEQ ID NO: 90713 - protein, 9 aa, Homo sapiens
  misc_feature: Table A; Target 90713; HLA-B*55:01; TRPM1; ENSG00000134160; TAA
TMSNPLSKL

SEQ ID NO: 90714 - protein, 9 aa, Homo sapiens
  misc_feature: Table A; Target 90714; HLA-C*03:04; TRPM1; ENSG00000134160; TAA
TMSNPLSKL

SEQ ID NO: 90715 - protein, 9 aa, Homo sapiens
  misc_feature: Table A; Target 90715; HLA-C*05:01; TRPM1; ENSG00000134160; TAA
TMSNPLSKL

SEQ ID NO: 90716 - protein, 9 aa, Homo sapiens
  misc_feature: Table A; Target 90716; HLA-C*07:04; TRPM1; ENSG00000134160; TAA
TMSNPLSKL

SEQ ID NO: 90717 - protein, 9 aa, Homo sapiens
  misc_feature: Table A; Target 90717; HLA-C*12:03; TRPM1; ENSG00000134160; TAA
TMSNPLSKL

SEQ ID NO: 90718 - protein, 9 aa, Homo sapiens
  misc_feature: Table A; Target 90718; HLA-C*16:01; TRPM1; ENSG00000134160; TAA
TMSNPLSKL

SEQ ID NO: 90719 - protein, 9 aa, Homo sapiens
  misc_feature: Table A; Target 90719; HLA-C*16:02; TRPM1; ENSG00000134160; TAA
TMSNPLSKL

SEQ ID NO: 90720 - protein, 11 aa, Homo sapiens
  misc_feature: Table A; Target 90720; HLA-B*13:02; TRPM1; ENSG00000134160; TAA
TMSNPLSKLSV

SEQ ID NO: 90721 - protein, 9 aa, Homo sapiens
  misc_feature: Table A; Target 90721; HLA-A*25:01; TRPM1; ENSG00000134160; TAA
TNIEGTISY

SEQ ID NO: 90722 - protein, 9 aa, Homo sapiens
  misc_feature: Table A; Target 90722; HLA-A*26:01; TRPM1; ENSG00000134160; TAA
TNIEGTISY

SEQ ID NO: 90723 - protein, 9 aa, Homo sapiens
  misc_feature: Table A; Target 90723; HLA-A*29:02; TRPM1; ENSG00000134160; TAA
TNIEGTISY

SEQ ID NO: 90724 - protein, 9 aa, Homo sapiens
  misc_feature: Table A; Target 90724; HLA-A*30:02; TRPM1; ENSG00000134160; TAA
TNIEGTISY

SEQ ID NO: 90725 - protein, 9 aa, Homo sapiens
  misc_feature: Table A; Target 90725; HLA-A*32:01; TRPM1; ENSG00000134160; TAA
TNIEGTISY

SEQ ID NO: 90726 - protein, 9 aa, Homo sapiens
  misc_feature: Table A; Target 90726; HLA-B*15:01; TRPM1; ENSG00000134160; TAA
TNIEGTISY

SEQ ID NO: 90727 - protein, 9 aa, Homo sapiens
  misc_feature: Table A; Target 90727; HLA-B*15:03; TRPM1; ENSG00000134160; TAA
TNIEGTISY

SEQ ID NO: 90728 - protein, 9 aa, Homo sapiens
  misc_feature: Table A; Target 90728; HLA-B*18:01; TRPM1; ENSG00000134160; TAA
TNIEGTISY

SEQ ID NO: 90729 - protein, 9 aa, Homo sapiens
  misc_feature: Table A; Target 90729; HLA-B*35:01; TRPM1; ENSG00000134160; TAA
TNIEGTISY

SEQ ID NO: 90730 - protein, 9 aa, Homo sapiens
  misc_feature: Table A; Target 90730; HLA-B*39:01; TRPM1; ENSG00000134160; TAA
TNIEGTISY

SEQ ID NO: 90731 - protein, 9 aa, Homo sapiens
  misc_feature: Table A; Target 90731; HLA-B*44:02; TRPM1; ENSG00000134160; TAA
TNIEGTISY

SEQ ID NO: 90732 - protein, 9 aa, Homo sapiens
  misc_feature: Table A; Target 90732; HLA-B*44:03; TRPM1; ENSG00000134160; TAA
TNIEGTISY

SEQ ID NO: 90733 - protein, 9 aa, Homo sapiens
  misc_feature: Table A; Target 90733; HLA-B*46:01; TRPM1; ENSG00000134160; TAA
TNIEGTISY

SEQ ID NO: 90734 - protein, 9 aa, Homo sapiens
  misc_feature: Table A; Target 90734; HLA-B*58:01; TRPM1; ENSG00000134160; TAA
TNIEGTISY

SEQ ID NO: 90735 - protein, 9 aa, Homo sapiens
  misc_feature: Table A; Target 90735; HLA-C*01:02; TRPM1; ENSG00000134160; TAA
TNIEGTISY

SEQ ID NO: 90736 - protein, 9 aa, Homo sapiens
  misc_feature: Table A; Target 90736; HLA-C*02:02; TRPM1; ENSG00000134160; TAA
TNIEGTISY

SEQ ID NO: 90737 - protein, 9 aa, Homo sapiens
  misc_feature: Table A; Target 90737; HLA-C*03:03; TRPM1; ENSG00000134160; TAA
TNIEGTISY

SEQ ID NO: 90738 - protein, 9 aa, Homo sapiens
  misc_feature: Table A; Target 90738; HLA-C*07:04; TRPM1; ENSG00000134160; TAA
TNIEGTISY

SEQ ID NO: 90739 - protein, 9 aa, Homo sapiens
  misc_feature: Table A; Target 90739; HLA-C*07:06; TRPM1; ENSG00000134160; TAA
TNIEGTISY

SEQ ID NO: 90740 - protein, 9 aa, Homo sapiens
  misc_feature: Table A; Target 90740; HLA-C*14:02; TRPM1; ENSG00000134160; TAA
TNIEGTISY

SEQ ID NO: 90741 - protein, 9 aa, Homo sapiens
  misc_feature: Table A; Target 90741; HLA-C*16:01; TRPM1; ENSG00000134160; TAA
TNIEGTISY

SEQ ID NO: 90742 - protein, 9 aa, Homo sapiens
  misc_feature: Table A; Target 90742; HLA-C*16:04; TRPM1; ENSG00000134160; TAA
TNIEGTISY

SEQ ID NO: 90743 - protein, 9 aa, Homo sapiens
  misc_feature: Table A; Target 90743; HLA-B*39:01; TRPM1; ENSG00000134160; TAA
TNVSAPDQL

SEQ ID NO: 90744 - protein, 8 aa, Homo sapiens
  misc_feature: Table A; Target 90744; HLA-B*35:01; TRPM1; ENSG00000134160; TAA
TPALMACY

SEQ ID NO: 90745 - protein, 9 aa, Homo sapiens
  misc_feature: Table A; Target 90745; HLA-B*35:03; TRPM1; ENSG00000134160; TAA
TPALMACYL

SEQ ID NO: 90746 - protein, 9 aa, Homo sapiens
  misc_feature: Table A; Target 90746; HLA-B*07:02; TRPM1; ENSG00000134160; TAA
TPDGSHLAV

SEQ ID NO: 90747 - protein, 9 aa, Homo sapiens
  misc_feature: Table A; Target 90747; HLA-B*35:01; TRPM1; ENSG00000134160; TAA
TPDGSHLAV

SEQ ID NO: 90748 - protein, 9 aa, Homo sapiens
  misc_feature: Table A; Target 90748; HLA-B*35:03; TRPM1; ENSG00000134160; TAA
TPDGSHLAV

SEQ ID NO: 90749 - protein, 9 aa, Homo sapiens
  misc_feature: Table A; Target 90749; HLA-B*51:01; TRPM1; ENSG00000134160; TAA
TPDGSHLAV

SEQ ID NO: 90750 - protein, 9 aa, Homo sapiens
  misc_feature: Table A; Target 90750; HLA-B*55:01; TRPM1; ENSG00000134160; TAA
TPDGSHLAV

SEQ ID NO: 90751 - protein, 9 aa, Homo sapiens
  misc_feature: Table A; Target 90751; HLA-B*56:01; TRPM1; ENSG00000134160; TAA
TPDGSHLAV

SEQ ID NO: 90752 - protein, 9 aa, Homo sapiens
  misc_feature: Table A; Target 90752; HLA-C*05:01; TRPM1; ENSG00000134160; TAA
TPDGSHLAV

SEQ ID NO: 90753 - protein, 9 aa, Homo sapiens
  misc_feature: Table A; Target 90753; HLA-C*07:02; TRPM1; ENSG00000134160; TAA
TPDGSHLAV

SEQ ID NO: 90754 - protein, 10 aa, Homo sapiens
  misc_feature: Table A; Target 90754; HLA-B*13:02; TRPM1; ENSG00000134160; TAA
TQLTVETTNI

SEQ ID NO: 90755 - protein, 10 aa, Homo sapiens
  misc_feature: Table A; Target 90755; HLA-B*38:01; TRPM1; ENSG00000134160; TAA
TQLTVETTNI

SEQ ID NO: 90756 - protein, 9 aa, Homo sapiens
  misc_feature: Table A; Target 90756; HLA-A*26:01; TRPM1; ENSG00000134160; TAA
TQSYPTDSY

SEQ ID NO: 90757 - protein, 9 aa, Homo sapiens
  misc_feature: Table A; Target 90757; HLA-A*30:02; TRPM1; ENSG00000134160; TAA
TQSYPTDSY

SEQ ID NO: 90758 - protein, 9 aa, Homo sapiens
  misc_feature: Table A; Target 90758; HLA-A*32:01; TRPM1; ENSG00000134160; TAA
TQSYPTDSY

SEQ ID NO: 90759 - protein, 9 aa, Homo sapiens
  misc_feature: Table A; Target 90759; HLA-B*15:01; TRPM1; ENSG00000134160; TAA
TQSYPTDSY

SEQ ID NO: 90760 - protein, 9 aa, Homo sapiens
  misc_feature: Table A; Target 90760; HLA-B*15:03; TRPM1; ENSG00000134160; TAA
TQSYPTDSY

SEQ ID NO: 90761 - protein, 9 aa, Homo sapiens
  misc_feature: Table A; Target 90761; HLA-B*27:02; TRPM1; ENSG00000134160; TAA
TQSYPTDSY

SEQ ID NO: 90762 - protein, 9 aa, Homo sapiens
  misc_feature: Table A; Target 90762; HLA-B*27:05; TRPM1; ENSG00000134160; TAA
TQSYPTDSY

SEQ ID NO: 90763 - protein, 9 aa, Homo sapiens
  misc_feature: Table A; Target 90763; HLA-B*35:01; TRPM1; ENSG00000134160; TAA
TQSYPTDSY

SEQ ID NO: 90764 - protein, 9 aa, Homo sapiens
  misc_feature: Table A; Target 90764; HLA-B*38:01; TRPM1; ENSG00000134160; TAA
TQSYPTDSY

SEQ ID NO: 90765 - protein, 9 aa, Homo sapiens
  misc_feature: Table A; Target 90765; HLA-B*39:01; TRPM1; ENSG00000134160; TAA
TQSYPTDSY

SEQ ID NO: 90766 - protein, 9 aa, Homo sapiens
  misc_feature: Table A; Target 90766; HLA-B*46:01; TRPM1; ENSG00000134160; TAA
TQSYPTDSY

SEQ ID NO: 90767 - protein, 9 aa, Homo sapiens
  misc_feature: Table A; Target 90767; HLA-C*01:02; TRPM1; ENSG00000134160; TAA
TQSYPTDSY

SEQ ID NO: 90768 - protein, 9 aa, Homo sapiens
  misc_feature: Table A; Target 90768; HLA-C*07:04; TRPM1; ENSG00000134160; TAA
TQSYPTDSY

SEQ ID NO: 90769 - protein, 9 aa, Homo sapiens
  misc_feature: Table A; Target 90769; HLA-C*07:06; TRPM1; ENSG00000134160; TAA
TQSYPTDSY

SEQ ID NO: 90770 - protein, 9 aa, Homo sapiens
  misc_feature: Table A; Target 90770; HLA-C*14:02; TRPM1; ENSG00000134160; TAA
TQSYPTDSY

SEQ ID NO: 90771 - protein, 9 aa, Homo sapiens
  misc_feature: Table A; Target 90771; HLA-C*16:04; TRPM1; ENSG00000134160; TAA
TQSYPTDSY

SEQ ID NO: 90772 - protein, 11 aa, Homo sapiens
  misc_feature: Table A; Target 90772; HLA-B*38:01; TRPM1; ENSG00000134160; TAA
TQSYPTDSYGV

SEQ ID NO: 90773 - protein, 9 aa, Homo sapiens
  misc_feature: Table A; Target 90773; HLA-B*27:05; TRPM1; ENSG00000134160; TAA
TRLGPPNTL

SEQ ID NO: 90774 - protein, 9 aa, Homo sapiens
  misc_feature: Table A; Target 90774; HLA-B*38:01; TRPM1; ENSG00000134160; TAA
TRLGPPNTL

SEQ ID NO: 90775 - protein, 9 aa, Homo sapiens
  misc_feature: Table A; Target 90775; HLA-B*39:01; TRPM1; ENSG00000134160; TAA
TRLGPPNTL

SEQ ID NO: 90776 - protein, 9 aa, Homo sapiens
  misc_feature: Table A; Target 90776; HLA-C*06:02; TRPM1; ENSG00000134160; TAA
TRLGPPNTL

SEQ ID NO: 90777 - protein, 9 aa, Homo sapiens
  misc_feature: Table A; Target 90777; HLA-C*16:04; TRPM1; ENSG00000134160; TAA
TRLGPPNTL

SEQ ID NO: 90778 - protein, 9 aa, Homo sapiens
  misc_feature: Table A; Target 90778; HLA-B*27:05; TRPM1; ENSG00000134160; TAA
TRLGQGVPL

SEQ ID NO: 90779 - protein, 9 aa, Homo sapiens
  misc_feature: Table A; Target 90779; HLA-B*39:01; TRPM1; ENSG00000134160; TAA
TRLGQGVPL

SEQ ID NO: 90780 - protein, 9 aa, Homo sapiens
  misc_feature: Table A; Target 90780; HLA-B*38:01; TRPM1; ENSG00000134160; TAA
TRYFPDETI

SEQ ID NO: 90781 - protein, 10 aa, Homo sapiens
  misc_feature: Table A; Target 90781; HLA-A*01:01; TRPM1; ENSG00000134160; TAA
TSERVENMSM

SEQ ID NO: 90782 - protein, 9 aa, Homo sapiens
  misc_feature: Table A; Target 90782; HLA-C*07:06; TRPM1; ENSG00000134160; TAA
TSLQTVDLR

SEQ ID NO: 90783 - protein, 9 aa, Homo sapiens
  misc_feature: Table A; Target 90783; HLA-A*03:02; TRPM1; ENSG00000134160; TAA
TSPGTGVRK

SEQ ID NO: 90784 - protein, 9 aa, Homo sapiens
  misc_feature: Table A; Target 90784; HLA-A*11:01; TRPM1; ENSG00000134160; TAA
TSPGTGVRK

SEQ ID NO: 90785 - protein, 10 aa, Homo sapiens
  misc_feature: Table A; Target 90785; HLA-A*03:02; TRPM1; ENSG00000134160; TAA
TTEWQCQVQK

SEQ ID NO: 90786 - protein, 10 aa, Homo sapiens
  misc_feature: Table A; Target 90786; HLA-A*01:01; TRPM1; ENSG00000134160; TAA
TTNIEGTISY

SEQ ID NO: 90787 - protein, 10 aa, Homo sapiens
  misc_feature: Table A; Target 90787; HLA-A*25:01; TRPM1; ENSG00000134160; TAA
TTNIEGTISY

SEQ ID NO: 90788 - protein, 10 aa, Homo sapiens
  misc_feature: Table A; Target 90788; HLA-A*26:01; TRPM1; ENSG00000134160; TAA
TTNIEGTISY

SEQ ID NO: 90789 - protein, 10 aa, Homo sapiens
  misc_feature: Table A; Target 90789; HLA-A*29:02; TRPM1; ENSG00000134160; TAA
TTNIEGTISY

SEQ ID NO: 90790 - protein, 10 aa, Homo sapiens
  misc_feature: Table A; Target 90790; HLA-A*30:02; TRPM1; ENSG00000134160; TAA
TTNIEGTISY

SEQ ID NO: 90791 - protein, 10 aa, Homo sapiens
  misc_feature: Table A; Target 90791; HLA-A*32:01; TRPM1; ENSG00000134160; TAA
TTNIEGTISY

SEQ ID NO: 90792 - protein, 10 aa, Homo sapiens
  misc_feature: Table A; Target 90792; HLA-B*15:01; TRPM1; ENSG00000134160; TAA
TTNIEGTISY

SEQ ID NO: 90793 - protein, 10 aa, Homo sapiens
  misc_feature: Table A; Target 90793; HLA-B*46:01; TRPM1; ENSG00000134160; TAA
TTNIEGTISY

SEQ ID NO: 90794 - protein, 10 aa, Homo sapiens
  misc_feature: Table A; Target 90794; HLA-C*07:06; TRPM1; ENSG00000134160; TAA
TTNIEGTISY

SEQ ID NO: 90795 - protein, 9 aa, Homo sapiens
  misc_feature: Table A; Target 90795; HLA-A*02:07; TRPM1; ENSG00000134160; TAA
TVDLRLAQL

SEQ ID NO: 90796 - protein, 9 aa, Homo sapiens
  misc_feature: Table A; Target 90796; HLA-B*07:02; TRPM1; ENSG00000134160; TAA
TVDLRLAQL

SEQ ID NO: 90797 - protein, 9 aa, Homo sapiens
  misc_feature: Table A; Target 90797; HLA-B*08:01; TRPM1; ENSG00000134160; TAA
TVDLRLAQL

SEQ ID NO: 90798 - protein, 9 aa, Homo sapiens
  misc_feature: Table A; Target 90798; HLA-C*05:01; TRPM1; ENSG00000134160; TAA
TVDLRLAQL

SEQ ID NO: 90799 - protein, 9 aa, Homo sapiens
  misc_feature: Table A; Target 90799; HLA-B*35:03; TRPM1; ENSG00000134160; TAA
TYDDFSYQT

SEQ ID NO: 90800 - protein, 9 aa, Homo sapiens
  misc_feature: Table A; Target 90800; HLA-A*23:01; TRPM1; ENSG00000134160; TAA
TYLLRQSSI

SEQ ID NO: 90801 - protein, 9 aa, Homo sapiens
  misc_feature: Table A; Target 90801; HLA-A*24:02; TRPM1; ENSG00000134160; TAA
TYLLRQSSI

SEQ ID NO: 90802 - protein, 9 aa, Homo sapiens
  misc_feature: Table A; Target 90802; HLA-B*08:01; TRPM1; ENSG00000134160; TAA
TYLLRQSSI

SEQ ID NO: 90803 - protein, 9 aa, Homo sapiens
  misc_feature: Table A; Target 90803; HLA-B*37:01; TRPM1; ENSG00000134160; TAA
TYLLRQSSI

SEQ ID NO: 90804 - protein, 9 aa, Homo sapiens
  misc_feature: Table A; Target 90804; HLA-C*01:02; TRPM1; ENSG00000134160; TAA
TYLLRQSSI

SEQ ID NO: 90805 - protein, 9 aa, Homo sapiens
  misc_feature: Table A; Target 90805; HLA-C*07:02; TRPM1; ENSG00000134160; TAA
TYLLRQSSI

SEQ ID NO: 90806 - protein, 9 aa, Homo sapiens
  misc_feature: Table A; Target 90806; HLA-C*14:02; TRPM1; ENSG00000134160; TAA
TYLLRQSSI

SEQ ID NO: 90807 - protein, 8 aa, Homo sapiens
  misc_feature: Table A; Target 90807; HLA-B*51:01; TRPM1; ENSG00000134160; TAA
VAEAIPRI

SEQ ID NO: 90808 - protein, 8 aa, Homo sapiens
  misc_feature: Table A; Target 90808; HLA-B*51:01; TRPM1; ENSG00000134160; TAA
VAISTFMI

SEQ ID NO: 90809 - protein, 8 aa, Homo sapiens
  misc_feature: Table A; Target 90809; HLA-A*30:02; TRPM1; ENSG00000134160; TAA
VAKHTQSY

SEQ ID NO: 90810 - protein, 8 aa, Homo sapiens
  misc_feature: Table A; Target 90810; HLA-A*32:01; TRPM1; ENSG00000134160; TAA
VAKHTQSY

SEQ ID NO: 90811 - protein, 8 aa, Homo sapiens
  misc_feature: Table A; Target 90811; HLA-B*08:01; TRPM1; ENSG00000134160; TAA
VAKHTQSY

SEQ ID NO: 90812 - protein, 8 aa, Homo sapiens
  misc_feature: Table A; Target 90812; HLA-B*15:01; TRPM1; ENSG00000134160; TAA
VAKHTQSY

SEQ ID NO: 90813 - protein, 8 aa, Homo sapiens
  misc_feature: Table A; Target 90813; HLA-B*15:03; TRPM1; ENSG00000134160; TAA
VAKHTQSY

SEQ ID NO: 90814 - protein, 8 aa, Homo sapiens
  misc_feature: Table A; Target 90814; HLA-B*46:01; TRPM1; ENSG00000134160; TAA
VAKHTQSY

SEQ ID NO: 90815 - protein, 8 aa, Homo sapiens
  misc_feature: Table A; Target 90815; HLA-B*58:01; TRPM1; ENSG00000134160; TAA
VAKHTQSY

SEQ ID NO: 90816 - protein, 8 aa, Homo sapiens
  misc_feature: Table A; Target 90816; HLA-C*02:02; TRPM1; ENSG00000134160; TAA
VAKHTQSY

SEQ ID NO: 90817 - protein, 8 aa, Homo sapiens
  misc_feature: Table A; Target 90817; HLA-C*12:03; TRPM1; ENSG00000134160; TAA
VAKHTQSY

SEQ ID NO: 90818 - protein, 8 aa, Homo sapiens
  misc_feature: Table A; Target 90818; HLA-C*16:01; TRPM1; ENSG00000134160; TAA
VAKHTQSY

SEQ ID NO: 90819 - protein, 8 aa, Homo sapiens
  misc_feature: Table A; Target 90819; HLA-C*16:02; TRPM1; ENSG00000134160; TAA
VAKHTQSY

SEQ ID NO: 90820 - protein, 9 aa, Homo sapiens
  misc_feature: Table A; Target 90820; HLA-C*02:02; TRPM1; ENSG00000134160; TAA
VANILLVNL

SEQ ID NO: 90821 - protein, 8 aa, Homo sapiens
  misc_feature: Table A; Target 90821; HLA-C*05:01; TRPM1; ENSG00000134160; TAA
VDDISQDL

SEQ ID NO: 90822 - protein, 8 aa, Homo sapiens
  misc_feature: Table A; Target 90822; HLA-B*27:02; TRPM1; ENSG00000134160; TAA
VDDPAVSR

SEQ ID NO: 90823 - protein, 9 aa, Homo sapiens
  misc_feature: Table A; Target 90823; HLA-A*02:07; TRPM1; ENSG00000134160; TAA
VDDPAVSRF

SEQ ID NO: 90824 - protein, 9 aa, Homo sapiens
  misc_feature: Table A; Target 90824; HLA-A*23:01; TRPM1; ENSG00000134160; TAA
VDDPAVSRF

SEQ ID NO: 90825 - protein, 9 aa, Homo sapiens
  misc_feature: Table A; Target 90825; HLA-A*24:02; TRPM1; ENSG00000134160; TAA
VDDPAVSRF

SEQ ID NO: 90826 - protein, 9 aa, Homo sapiens
  misc_feature: Table A; Target 90826; HLA-A*32:01; TRPM1; ENSG00000134160; TAA
VDDPAVSRF

SEQ ID NO: 90827 - protein, 9 aa, Homo sapiens
  misc_feature: Table A; Target 90827; HLA-B*18:01; TRPM1; ENSG00000134160; TAA
VDDPAVSRF

SEQ ID NO: 90828 - protein, 9 aa, Homo sapiens
  misc_feature: Table A; Target 90828; HLA-B*37:01; TRPM1; ENSG00000134160; TAA
VDDPAVSRF

SEQ ID NO: 90829 - protein, 9 aa, Homo sapiens
  misc_feature: Table A; Target 90829; HLA-B*38:01; TRPM1; ENSG00000134160; TAA
VDDPAVSRF

SEQ ID NO: 90830 - protein, 9 aa, Homo sapiens
  misc_feature: Table A; Target 90830; HLA-B*44:02; TRPM1; ENSG00000134160; TAA
VDDPAVSRF

SEQ ID NO: 90831 - protein, 9 aa, Homo sapiens
  misc_feature: Table A; Target 90831; HLA-B*44:03; TRPM1; ENSG00000134160; TAA
VDDPAVSRF

SEQ ID NO: 90832 - protein, 9 aa, Homo sapiens
  misc_feature: Table A; Target 90832; HLA-C*04:01; TRPM1; ENSG00000134160; TAA
VDDPAVSRF

SEQ ID NO: 90833 - protein, 9 aa, Homo sapiens
  misc_feature: Table A; Target 90833; HLA-C*05:01; TRPM1; ENSG00000134160; TAA
VDDPAVSRF

SEQ ID NO: 90834 - protein, 9 aa, Homo sapiens
  misc_feature: Table A; Target 90834; HLA-C*16:04; TRPM1; ENSG00000134160; TAA
VDDPAVSRF

SEQ ID NO: 90835 - protein, 11 aa, Homo sapiens
  misc_feature: Table A; Target 90835; HLA-A*01:01; TRPM1; ENSG00000134160; TAA
VDDPAVSRFQY

SEQ ID NO: 90836 - protein, 11 aa, Homo sapiens
  misc_feature: Table A; Target 90836; HLA-A*30:02; TRPM1; ENSG00000134160; TAA
VDDPAVSRFQY

SEQ ID NO: 90837 - protein, 9 aa, Homo sapiens
  misc_feature: Table A; Target 90837; HLA-B*37:01; TRPM1; ENSG00000134160; TAA
VDIARSQIF

SEQ ID NO: 90838 - protein, 9 aa, Homo sapiens
  misc_feature: Table A; Target 90838; HLA-B*40:02; TRPM1; ENSG00000134160; TAA
VDIARSQIF

SEQ ID NO: 90839 - protein, 9 aa, Homo sapiens
  misc_feature: Table A; Target 90839; HLA-B*44:02; TRPM1; ENSG00000134160; TAA
VDIARSQIF

SEQ ID NO: 90840 - protein, 9 aa, Homo sapiens
  misc_feature: Table A; Target 90840; HLA-C*07:04; TRPM1; ENSG00000134160; TAA
VDIARSQIF

SEQ ID NO: 90841 - protein, 9 aa, Homo sapiens
  misc_feature: Table A; Target 90841; HLA-C*12:03; TRPM1; ENSG00000134160; TAA
VDIARSQIF

SEQ ID NO: 90842 - protein, 8 aa, Homo sapiens
  misc_feature: Table A; Target 90842; HLA-B*37:01; TRPM1; ENSG00000134160; TAA
VDLRLAQL

SEQ ID NO: 90843 - protein, 10 aa, Homo sapiens
  misc_feature: Table A; Target 90843; HLA-B*40:01; TRPM1; ENSG00000134160; TAA
VEEETDPRKI

SEQ ID NO: 90844 - protein, 10 aa, Homo sapiens
  misc_feature: Table A; Target 90844; HLA-B*49:01; TRPM1; ENSG00000134160; TAA
VEEETDPRKI

SEQ ID NO: 90845 - protein, 8 aa, Homo sapiens
  misc_feature: Table A; Target 90845; HLA-B*40:01; TRPM1; ENSG00000134160; TAA
VEGGPNVV

SEQ ID NO: 90846 - protein, 8 aa, Homo sapiens
  misc_feature: Table A; Target 90846; HLA-B*49:01; TRPM1; ENSG00000134160; TAA
VEGGPNVV

SEQ ID NO: 90847 - protein, 8 aa, Homo sapiens
  misc_feature: Table A; Target 90847; HLA-C*12:03; TRPM1; ENSG00000134160; TAA
VEGGPNVV

SEQ ID NO: 90848 - protein, 10 aa, Homo sapiens
  misc_feature: Table A; Target 90848; HLA-A*30:01; TRPM1; ENSG00000134160; TAA
VEGGPNVVSI

SEQ ID NO: 90849 - protein, 10 aa, Homo sapiens
  misc_feature: Table A; Target 90849; HLA-B*40:01; TRPM1; ENSG00000134160; TAA
VEGGPNVVSI

SEQ ID NO: 90850 - protein, 10 aa, Homo sapiens
  misc_feature: Table A; Target 90850; HLA-B*49:01; TRPM1; ENSG00000134160; TAA
VEGGPNVVSI

SEQ ID NO: 90851 - protein, 11 aa, Homo sapiens
  misc_feature: Table A; Target 90851; HLA-B*49:01; TRPM1; ENSG00000134160; TAA
VEGGPNVVSIV

SEQ ID NO: 90852 - protein, 8 aa, Homo sapiens
  misc_feature: Table A; Target 90852; HLA-B*18:01; TRPM1; ENSG00000134160; TAA
VENMSMRL

SEQ ID NO: 90853 - protein, 8 aa, Homo sapiens
  misc_feature: Table A; Target 90853; HLA-B*37:01; TRPM1; ENSG00000134160; TAA
VENMSMRL

SEQ ID NO: 90854 - protein, 8 aa, Homo sapiens
  misc_feature: Table A; Target 90854; HLA-B*40:01; TRPM1; ENSG00000134160; TAA
VENMSMRL

SEQ ID NO: 90855 - protein, 8 aa, Homo sapiens
  misc_feature: Table A; Target 90855; HLA-B*18:01; TRPM1; ENSG00000134160; TAA
VETQPEKW

SEQ ID NO: 90856 - protein, 8 aa, Homo sapiens
  misc_feature: Table A; Target 90856; HLA-B*27:02; TRPM1; ENSG00000134160; TAA
VETQPEKW

SEQ ID NO: 90857 - protein, 8 aa, Homo sapiens
  misc_feature: Table A; Target 90857; HLA-B*44:02; TRPM1; ENSG00000134160; TAA
VETQPEKW

SEQ ID NO: 90858 - protein, 8 aa, Homo sapiens
  misc_feature: Table A; Target 90858; HLA-B*44:03; TRPM1; ENSG00000134160; TAA
VETQPEKW

SEQ ID NO: 90859 - protein, 8 aa, Homo sapiens
  misc_feature: Table A; Target 90859; HLA-C*16:04; TRPM1; ENSG00000134160; TAA
VETQPEKW

SEQ ID NO: 90860 - protein, 10 aa, Homo sapiens
  misc_feature: Table A; Target 90860; HLA-B*49:01; TRPM1; ENSG00000134160; TAA
VETQPEKWSV

SEQ ID NO: 90861 - protein, 10 aa, Homo sapiens
  misc_feature: Table A; Target 90861; HLA-A*30:01; TRPM1; ENSG00000134160; TAA
VETTNIEGTI

SEQ ID NO: 90862 - protein, 10 aa, Homo sapiens
  misc_feature: Table A; Target 90862; HLA-B*40:01; TRPM1; ENSG00000134160; TAA
VETTNIEGTI

SEQ ID NO: 90863 - protein, 10 aa, Homo sapiens
  misc_feature: Table A; Target 90863; HLA-B*49:01; TRPM1; ENSG00000134160; TAA
VETTNIEGTI

SEQ ID NO: 90864 - protein, 9 aa, Homo sapiens
  misc_feature: Table A; Target 90864; HLA-B*49:01; TRPM1; ENSG00000134160; TAA
VEYSSITDQ

SEQ ID NO: 90865 - protein, 11 aa, Homo sapiens
  misc_feature: Table A; Target 90865; HLA-A*30:01; TRPM1; ENSG00000134160; TAA
VEYSSITDQQL

SEQ ID NO: 90866 - protein, 11 aa, Homo sapiens
  misc_feature: Table A; Target 90866; HLA-B*39:01; TRPM1; ENSG00000134160; TAA
VEYSSITDQQL

SEQ ID NO: 90867 - protein, 11 aa, Homo sapiens
  misc_feature: Table A; Target 90867; HLA-B*40:01; TRPM1; ENSG00000134160; TAA
VEYSSITDQQL

SEQ ID NO: 90868 - protein, 11 aa, Homo sapiens
  misc_feature: Table A; Target 90868; HLA-B*40:02; TRPM1; ENSG00000134160; TAA
VEYSSITDQQL

SEQ ID NO: 90869 - protein, 11 aa, Homo sapiens
  misc_feature: Table A; Target 90869; HLA-B*44:02; TRPM1; ENSG00000134160; TAA
VEYSSITDQQL

SEQ ID NO: 90870 - protein, 11 aa, Homo sapiens
  misc_feature: Table A; Target 90870; HLA-B*44:03; TRPM1; ENSG00000134160; TAA
VEYSSITDQQL

SEQ ID NO: 90871 - protein, 11 aa, Homo sapiens
  misc_feature: Table A; Target 90871; HLA-B*49:01; TRPM1; ENSG00000134160; TAA
VEYSSITDQQL

SEQ ID NO: 90872 - protein, 9 aa, Homo sapiens
  misc_feature: Table A; Target 90872; HLA-A*01:01; TRPM1; ENSG00000134160; TAA
VFADQIDLY

SEQ ID NO: 90873 - protein, 9 aa, Homo sapiens
  misc_feature: Table A; Target 90873; HLA-A*23:01; TRPM1; ENSG00000134160; TAA
VFADQIDLY

SEQ ID NO: 90874 - protein, 9 aa, Homo sapiens
  misc_feature: Table A; Target 90874; HLA-A*24:02; TRPM1; ENSG00000134160; TAA
VFADQIDLY

SEQ ID NO: 90875 - protein, 9 aa, Homo sapiens
  misc_feature: Table A; Target 90875; HLA-A*29:02; TRPM1; ENSG00000134160; TAA
VFADQIDLY

SEQ ID NO: 90876 - protein, 9 aa, Homo sapiens
  misc_feature: Table A; Target 90876; HLA-A*30:02; TRPM1; ENSG00000134160; TAA
VFADQIDLY

SEQ ID NO: 90877 - protein, 9 aa, Homo sapiens
  misc_feature: Table A; Target 90877; HLA-B*15:01; TRPM1; ENSG00000134160; TAA
VFADQIDLY

SEQ ID NO: 90878 - protein, 9 aa, Homo sapiens
  misc_feature: Table A; Target 90878; HLA-B*15:03; TRPM1; ENSG00000134160; TAA
VFADQIDLY

SEQ ID NO: 90879 - protein, 9 aa, Homo sapiens
  misc_feature: Table A; Target 90879; HLA-B*35:01; TRPM1; ENSG00000134160; TAA
VFADQIDLY

SEQ ID NO: 90880 - protein, 9 aa, Homo sapiens
  misc_feature: Table A; Target 90880; HLA-B*46:01; TRPM1; ENSG00000134160; TAA
VFADQIDLY

SEQ ID NO: 90881 - protein, 9 aa, Homo sapiens
  misc_feature: Table A; Target 90881; HLA-B*55:01; TRPM1; ENSG00000134160; TAA
VFADQIDLY

SEQ ID NO: 90882 - protein, 9 aa, Homo sapiens
  misc_feature: Table A; Target 90882; HLA-C*14:02; TRPM1; ENSG00000134160; TAA
VFADQIDLY

SEQ ID NO: 90883 - protein, 9 aa, Homo sapiens
  misc_feature: Table A; Target 90883; HLA-A*24:02; TRPM1; ENSG00000134160; TAA
VFGPHWPPL

SEQ ID NO: 90884 - protein, 9 aa, Homo sapiens
  misc_feature: Table A; Target 90884; HLA-A*29:02; TRPM1; ENSG00000134160; TAA
VFNNTFFEV

SEQ ID NO: 90885 - protein, 9 aa, Homo sapiens
  misc_feature: Table A; Target 90885; HLA-C*14:02; TRPM1; ENSG00000134160; TAA
VFNNTFFEV

SEQ ID NO: 90886 - protein, 9 aa, Homo sapiens
  misc_feature: Table A; Target 90886; HLA-A*29:02; TRPM1; ENSG00000134160; TAA
VGKDVTRVY

SEQ ID NO: 90887 - protein, 9 aa, Homo sapiens
  misc_feature: Table A; Target 90887; HLA-A*30:02; TRPM1; ENSG00000134160; TAA
VGKDVTRVY

SEQ ID NO: 90888 - protein, 9 aa, Homo sapiens
  misc_feature: Table A; Target 90888; HLA-A*32:01; TRPM1; ENSG00000134160; TAA
VGKDVTRVY

SEQ ID NO: 90889 - protein, 9 aa, Homo sapiens
  misc_feature: Table A; Target 90889; HLA-B*08:01; TRPM1; ENSG00000134160; TAA
VGKDVTRVY

SEQ ID NO: 90890 - protein, 9 aa, Homo sapiens
  misc_feature: Table A; Target 90890; HLA-B*15:01; TRPM1; ENSG00000134160; TAA
VGKDVTRVY

SEQ ID NO: 90891 - protein, 9 aa, Homo sapiens
  misc_feature: Table A; Target 90891; HLA-B*15:03; TRPM1; ENSG00000134160; TAA
VGKDVTRVY

SEQ ID NO: 90892 - protein, 9 aa, Homo sapiens
  misc_feature: Table A; Target 90892; HLA-B*46:01; TRPM1; ENSG00000134160; TAA
VGKDVTRVY

SEQ ID NO: 90893 - protein, 9 aa, Homo sapiens
  misc_feature: Table A; Target 90893; HLA-B*57:01; TRPM1; ENSG00000134160; TAA
VGKDVTRVY

SEQ ID NO: 90894 - protein, 9 aa, Homo sapiens
  misc_feature: Table A; Target 90894; HLA-C*01:02; TRPM1; ENSG00000134160; TAA
VGKDVTRVY

SEQ ID NO: 90895 - protein, 9 aa, Homo sapiens
  misc_feature: Table A; Target 90895; HLA-C*02:02; TRPM1; ENSG00000134160; TAA
VGKDVTRVY

SEQ ID NO: 90896 - protein, 9 aa, Homo sapiens
  misc_feature: Table A; Target 90896; HLA-C*06:02; TRPM1; ENSG00000134160; TAA
VGKDVTRVY

SEQ ID NO: 90897 - protein, 9 aa, Homo sapiens
  misc_feature: Table A; Target 90897; HLA-C*07:01; TRPM1; ENSG00000134160; TAA
VGKDVTRVY

SEQ ID NO: 90898 - protein, 9 aa, Homo sapiens
  misc_feature: Table A; Target 90898; HLA-C*07:04; TRPM1; ENSG00000134160; TAA
VGKDVTRVY

SEQ ID NO: 90899 - protein, 9 aa, Homo sapiens
  misc_feature: Table A; Target 90899; HLA-C*12:03; TRPM1; ENSG00000134160; TAA
VGKDVTRVY

SEQ ID NO: 90900 - protein, 9 aa, Homo sapiens
  misc_feature: Table A; Target 90900; HLA-C*14:02; TRPM1; ENSG00000134160; TAA
VGKDVTRVY

SEQ ID NO: 90901 - protein, 9 aa, Homo sapiens
  misc_feature: Table A; Target 90901; HLA-C*16:01; TRPM1; ENSG00000134160; TAA
VGKDVTRVY

SEQ ID NO: 90902 - protein, 9 aa, Homo sapiens
  misc_feature: Table A; Target 90902; HLA-C*16:02; TRPM1; ENSG00000134160; TAA
VGKDVTRVY

SEQ ID NO: 90903 - protein, 9 aa, Homo sapiens
  misc_feature: Table A; Target 90903; HLA-C*16:04; TRPM1; ENSG00000134160; TAA
VGKDVTRVY

SEQ ID NO: 90904 - protein, 8 aa, Homo sapiens
  misc_feature: Table A; Target 90904; HLA-B*37:01; TRPM1; ENSG00000134160; TAA
VIMLVVLM

SEQ ID NO: 90905 - protein, 9 aa, Homo sapiens
  misc_feature: Table A; Target 90905; HLA-A*02:07; TRPM1; ENSG00000134160; TAA
VISHVGDAL

SEQ ID NO: 90906 - protein, 9 aa, Homo sapiens
  misc_feature: Table A; Target 90906; HLA-B*07:02; TRPM1; ENSG00000134160; TAA
VISHVGDAL

SEQ ID NO: 90907 - protein, 9 aa, Homo sapiens
  misc_feature: Table A; Target 90907; HLA-B*35:03; TRPM1; ENSG00000134160; TAA
VISHVGDAL

SEQ ID NO: 90908 - protein, 9 aa, Homo sapiens
  misc_feature: Table A; Target 90908; HLA-B*38:01; TRPM1; ENSG00000134160; TAA
VISHVGDAL

SEQ ID NO: 90909 - protein, 9 aa, Homo sapiens
  misc_feature: Table A; Target 90909; HLA-B*39:01; TRPM1; ENSG00000134160; TAA
VISHVGDAL

SEQ ID NO: 90910 - protein, 9 aa, Homo sapiens
  misc_feature: Table A; Target 90910; HLA-B*40:01; TRPM1; ENSG00000134160; TAA
VISHVGDAL

SEQ ID NO: 90911 - protein, 9 aa, Homo sapiens
  misc_feature: Table A; Target 90911; HLA-C*01:02; TRPM1; ENSG00000134160; TAA
VISHVGDAL

SEQ ID NO: 90912 - protein, 9 aa, Homo sapiens
  misc_feature: Table A; Target 90912; HLA-C*03:03; TRPM1; ENSG00000134160; TAA
VISHVGDAL

SEQ ID NO: 90913 - protein, 9 aa, Homo sapiens
  misc_feature: Table A; Target 90913; HLA-C*03:04; TRPM1; ENSG00000134160; TAA
VISHVGDAL

SEQ ID NO: 90914 - protein, 9 aa, Homo sapiens
  misc_feature: Table A; Target 90914; HLA-C*05:01; TRPM1; ENSG00000134160; TAA
VISHVGDAL

SEQ ID NO: 90915 - protein, 9 aa, Homo sapiens
  misc_feature: Table A; Target 90915; HLA-C*07:04; TRPM1; ENSG00000134160; TAA
VISHVGDAL

SEQ ID NO: 90916 - protein, 9 aa, Homo sapiens
  misc_feature: Table A; Target 90916; HLA-C*16:01; TRPM1; ENSG00000134160; TAA
VISHVGDAL

SEQ ID NO: 90917 - protein, 9 aa, Homo sapiens
  misc_feature: Table A; Target 90917; HLA-C*16:04; TRPM1; ENSG00000134160; TAA
VISHVGDAL

SEQ ID NO: 90918 - protein, 10 aa, Homo sapiens
  misc_feature: Table A; Target 90918; HLA-A*03:02; TRPM1; ENSG00000134160; TAA
VISHVGDALK

SEQ ID NO: 90919 - protein, 11 aa, Homo sapiens
  misc_feature: Table A; Target 90919; HLA-A*03:02; TRPM1; ENSG00000134160; TAA
VIVSGMTAEEK

SEQ ID NO: 90920 - protein, 10 aa, Homo sapiens
  misc_feature: Table A; Target 90920; HLA-A*30:02; TRPM1; ENSG00000134160; TAA
VKKSNLPPDY

SEQ ID NO: 90921 - protein, 9 aa, Homo sapiens
  misc_feature: Table A; Target 90921; HLA-B*15:03; TRPM1; ENSG00000134160; TAA
VKPDQTLGF

SEQ ID NO: 90922 - protein, 9 aa, Homo sapiens
  misc_feature: Table A; Target 90922; HLA-B*15:03; TRPM1; ENSG00000134160; TAA
VKSISNQVW

SEQ ID NO: 90923 - protein, 9 aa, Homo sapiens
  misc_feature: Table A; Target 90923; HLA-A*01:01; TRPM1; ENSG00000134160; TAA
VLDIFGVNK

SEQ ID NO: 90924 - protein, 9 aa, Homo sapiens
  misc_feature: Table A; Target 90924; HLA-A*03:01; TRPM1; ENSG00000134160; TAA
VLDIFGVNK

SEQ ID NO: 90925 - protein, 9 aa, Homo sapiens
  misc_feature: Table A; Target 90925; HLA-A*03:02; TRPM1; ENSG00000134160; TAA
VLDIFGVNK

SEQ ID NO: 90926 - protein, 9 aa, Homo sapiens
  misc_feature: Table A; Target 90926; HLA-A*11:01; TRPM1; ENSG00000134160; TAA
VLDIFGVNK

SEQ ID NO: 90927 - protein, 10 aa, Homo sapiens
  misc_feature: Table A; Target 90927; HLA-A*01:01; TRPM1; ENSG00000134160; TAA
VLDIFGVNKY

SEQ ID NO: 90928 - protein, 10 aa, Homo sapiens
  misc_feature: Table A; Target 90928; HLA-A*30:02; TRPM1; ENSG00000134160; TAA
VLDIFGVNKY

SEQ ID NO: 90929 - protein, 10 aa, Homo sapiens
  misc_feature: Table A; Target 90929; HLA-B*15:01; TRPM1; ENSG00000134160; TAA
VLDIFGVNKY

SEQ ID NO: 90930 - protein, 10 aa, Homo sapiens
  misc_feature: Table A; Target 90930; HLA-A*02:07; TRPM1; ENSG00000134160; TAA
VLDRVDFVKL

SEQ ID NO: 90931 - protein, 9 aa, Homo sapiens
  misc_feature: Table A; Target 90931; HLA-A*01:01; TRPM1; ENSG00000134160; TAA
VLEFQGGGY

SEQ ID NO: 90932 - protein, 9 aa, Homo sapiens
  misc_feature: Table A; Target 90932; HLA-A*30:02; TRPM1; ENSG00000134160; TAA
VLEFQGGGY

SEQ ID NO: 90933 - protein, 9 aa, Homo sapiens
  misc_feature: Table A; Target 90933; HLA-B*15:01; TRPM1; ENSG00000134160; TAA
VLEFQGGGY

SEQ ID NO: 90934 - protein, 10 aa, Homo sapiens
  misc_feature: Table A; Target 90934; HLA-A*01:01; TRPM1; ENSG00000134160; TAA
VLEYLMGGAY

SEQ ID NO: 90935 - protein, 10 aa, Homo sapiens
  misc_feature: Table A; Target 90935; HLA-A*30:02; TRPM1; ENSG00000134160; TAA
VLEYLMGGAY

SEQ ID NO: 90936 - protein, 8 aa, Homo sapiens
  misc_feature: Table A; Target 90936; HLA-B*08:01; TRPM1; ENSG00000134160; TAA
VLMKRQKM

SEQ ID NO: 90937 - protein, 9 aa, Homo sapiens
  misc_feature: Table A; Target 90937; HLA-A*03:01; TRPM1; ENSG00000134160; TAA
VLMSFGVAR

SEQ ID NO: 90938 - protein, 9 aa, Homo sapiens
  misc_feature: Table A; Target 90938; HLA-A*03:02; TRPM1; ENSG00000134160; TAA
VLMSFGVAR

SEQ ID NO: 90939 - protein, 9 aa, Homo sapiens
  misc_feature: Table A; Target 90939; HLA-A*11:01; TRPM1; ENSG00000134160; TAA
VLMSFGVAR

SEQ ID NO: 90940 - protein, 9 aa, Homo sapiens
  misc_feature: Table A; Target 90940; HLA-A*31:01; TRPM1; ENSG00000134160; TAA
VLMSFGVAR

SEQ ID NO: 90941 - protein, 9 aa, Homo sapiens
  misc_feature: Table A; Target 90941; HLA-A*33:01; TRPM1; ENSG00000134160; TAA
VLMSFGVAR

SEQ ID NO: 90942 - protein, 9 aa, Homo sapiens
  misc_feature: Table A; Target 90942; HLA-A*33:03; TRPM1; ENSG00000134160; TAA
VLMSFGVAR

SEQ ID NO: 90943 - protein, 9 aa, Homo sapiens
  misc_feature: Table A; Target 90943; HLA-A*23:01; TRPM1; ENSG00000134160; TAA
VLNNSHTHF

SEQ ID NO: 90944 - protein, 9 aa, Homo sapiens
  misc_feature: Table A; Target 90944; HLA-A*24:02; TRPM1; ENSG00000134160; TAA
VLNNSHTHF

SEQ ID NO: 90945 - protein, 9 aa, Homo sapiens
  misc_feature: Table A; Target 90945; HLA-A*29:02; TRPM1; ENSG00000134160; TAA
VLNNSHTHF

SEQ ID NO: 90946 - protein, 9 aa, Homo sapiens
  misc_feature: Table A; Target 90946; HLA-A*32:01; TRPM1; ENSG00000134160; TAA
VLNNSHTHF

SEQ ID NO: 90947 - protein, 9 aa, Homo sapiens
  misc_feature: Table A; Target 90947; HLA-B*15:01; TRPM1; ENSG00000134160; TAA
VLNNSHTHF

SEQ ID NO: 90948 - protein, 9 aa, Homo sapiens
  misc_feature: Table A; Target 90948; HLA-B*46:01; TRPM1; ENSG00000134160; TAA
VLNNSHTHF

SEQ ID NO: 90949 - protein, 9 aa, Homo sapiens
  misc_feature: Table A; Target 90949; HLA-C*07:04; TRPM1; ENSG00000134160; TAA
VLNNSHTHF

SEQ ID NO: 90950 - protein, 9 aa, Homo sapiens
  misc_feature: Table A; Target 90950; HLA-A*02:07; TRPM1; ENSG00000134160; TAA
VLPPPMIIL

SEQ ID NO: 90951 - protein, 9 aa, Homo sapiens
  misc_feature: Table A; Target 90951; HLA-A*24:02; TRPM1; ENSG00000134160; TAA
VLPPPMIIL

SEQ ID NO: 90952 - protein, 9 aa, Homo sapiens
  misc_feature: Table A; Target 90952; HLA-A*23:01; TRPM1; ENSG00000134160; TAA
VNMQHFLTI

SEQ ID NO: 90953 - protein, 8 aa, Homo sapiens
  misc_feature: Table A; Target 90953; HLA-B*07:02; TRPM1; ENSG00000134160; TAA
VPLVGLVV

SEQ ID NO: 90954 - protein, 8 aa, Homo sapiens
  misc_feature: Table A; Target 90954; HLA-B*08:01; TRPM1; ENSG00000134160; TAA
VPLVGLVV

SEQ ID NO: 90955 - protein, 8 aa, Homo sapiens
  misc_feature: Table A; Target 90955; HLA-B*51:01; TRPM1; ENSG00000134160; TAA
VPLVGLVV

SEQ ID NO: 90956 - protein, 8 aa, Homo sapiens
  misc_feature: Table A; Target 90956; HLA-B*54:01; TRPM1; ENSG00000134160; TAA
VPLVGLVV

SEQ ID NO: 90957 - protein, 8 aa, Homo sapiens
  misc_feature: Table A; Target 90957; HLA-B*56:01; TRPM1; ENSG00000134160; TAA
VPLVGLVV

SEQ ID NO: 90958 - protein, 9 aa, Homo sapiens
  misc_feature: Table A; Target 90958; HLA-A*24:02; TRPM1; ENSG00000134160; TAA
VQAEHKEQF

SEQ ID NO: 90959 - protein, 9 aa, Homo sapiens
  misc_feature: Table A; Target 90959; HLA-A*32:01; TRPM1; ENSG00000134160; TAA
VQAEHKEQF

SEQ ID NO: 90960 - protein, 9 aa, Homo sapiens
  misc_feature: Table A; Target 90960; HLA-B*13:02; TRPM1; ENSG00000134160; TAA
VQAEHKEQF

SEQ ID NO: 90961 - protein, 9 aa, Homo sapiens
  misc_feature: Table A; Target 90961; HLA-B*15:01; TRPM1; ENSG00000134160; TAA
VQAEHKEQF

SEQ ID NO: 90962 - protein, 9 aa, Homo sapiens
  misc_feature: Table A; Target 90962; HLA-B*15:03; TRPM1; ENSG00000134160; TAA
VQAEHKEQF

SEQ ID NO: 90963 - protein, 9 aa, Homo sapiens
  misc_feature: Table A; Target 90963; HLA-B*18:01; TRPM1; ENSG00000134160; TAA
VQAEHKEQF

SEQ ID NO: 90964 - protein, 9 aa, Homo sapiens
  misc_feature: Table A; Target 90964; HLA-B*37:01; TRPM1; ENSG00000134160; TAA
VQAEHKEQF

SEQ ID NO: 90965 - protein, 9 aa, Homo sapiens
  misc_feature: Table A; Target 90965; HLA-B*38:01; TRPM1; ENSG00000134160; TAA
VQAEHKEQF

SEQ ID NO: 90966 - protein, 9 aa, Homo sapiens
  misc_feature: Table A; Target 90966; HLA-B*44:02; TRPM1; ENSG00000134160; TAA
VQAEHKEQF

SEQ ID NO: 90967 - protein, 9 aa, Homo sapiens
  misc_feature: Table A; Target 90967; HLA-B*44:03; TRPM1; ENSG00000134160; TAA
VQAEHKEQF

SEQ ID NO: 90968 - protein, 9 aa, Homo sapiens
  misc_feature: Table A; Target 90968; HLA-B*46:01; TRPM1; ENSG00000134160; TAA
VQAEHKEQF

SEQ ID NO: 90969 - protein, 9 aa, Homo sapiens
  misc_feature: Table A; Target 90969; HLA-B*58:01; TRPM1; ENSG00000134160; TAA
VQAEHKEQF

SEQ ID NO: 90970 - protein, 9 aa, Homo sapiens
  misc_feature: Table A; Target 90970; HLA-C*02:02; TRPM1; ENSG00000134160; TAA
VQAEHKEQF

SEQ ID NO: 90971 - protein, 9 aa, Homo sapiens
  misc_feature: Table A; Target 90971; HLA-C*07:04; TRPM1; ENSG00000134160; TAA
VQAEHKEQF

SEQ ID NO: 90972 - protein, 9 aa, Homo sapiens
  misc_feature: Table A; Target 90972; HLA-C*12:03; TRPM1; ENSG00000134160; TAA
VQAEHKEQF

SEQ ID NO: 90973 - protein, 9 aa, Homo sapiens
  misc_feature: Table A; Target 90973; HLA-C*14:02; TRPM1; ENSG00000134160; TAA
VQAEHKEQF

SEQ ID NO: 90974 - protein, 9 aa, Homo sapiens
  misc_feature: Table A; Target 90974; HLA-C*16:01; TRPM1; ENSG00000134160; TAA
VQAEHKEQF

SEQ ID NO: 90975 - protein, 9 aa, Homo sapiens
  misc_feature: Table A; Target 90975; HLA-C*16:02; TRPM1; ENSG00000134160; TAA
VQAEHKEQF

SEQ ID NO: 90976 - protein, 9 aa, Homo sapiens
  misc_feature: Table A; Target 90976; HLA-C*16:04; TRPM1; ENSG00000134160; TAA
VQAEHKEQF

SEQ ID NO: 90977 - protein, 8 aa, Homo sapiens
  misc_feature: Table A; Target 90977; HLA-B*13:02; TRPM1; ENSG00000134160; TAA
VQNTQLTV

SEQ ID NO: 90978 - protein, 9 aa, Homo sapiens
  misc_feature: Table A; Target 90978; HLA-A*01:01; TRPM1; ENSG00000134160; TAA
VSAPDQLSL

SEQ ID NO: 90979 - protein, 9 aa, Homo sapiens
  misc_feature: Table A; Target 90979; HLA-A*30:01; TRPM1; ENSG00000134160; TAA
VSAPDQLSL

SEQ ID NO: 90980 - protein, 9 aa, Homo sapiens
  misc_feature: Table A; Target 90980; HLA-B*39:01; TRPM1; ENSG00000134160; TAA
VSAPDQLSL

SEQ ID NO: 90981 - protein, 9 aa, Homo sapiens
  misc_feature: Table A; Target 90981; HLA-B*40:01; TRPM1; ENSG00000134160; TAA
VSAPDQLSL

SEQ ID NO: 90982 - protein, 9 aa, Homo sapiens
  misc_feature: Table A; Target 90982; HLA-B*57:01; TRPM1; ENSG00000134160; TAA
VSAPDQLSL

SEQ ID NO: 90983 - protein, 9 aa, Homo sapiens
  misc_feature: Table A; Target 90983; HLA-B*58:01; TRPM1; ENSG00000134160; TAA
VSAPDQLSL

SEQ ID NO: 90984 - protein, 9 aa, Homo sapiens
  misc_feature: Table A; Target 90984; HLA-C*01:02; TRPM1; ENSG00000134160; TAA
VSAPDQLSL

SEQ ID NO: 90985 - protein, 9 aa, Homo sapiens
  misc_feature: Table A; Target 90985; HLA-C*03:03; TRPM1; ENSG00000134160; TAA
VSAPDQLSL

SEQ ID NO: 90986 - protein, 9 aa, Homo sapiens
  misc_feature: Table A; Target 90986; HLA-C*03:04; TRPM1; ENSG00000134160; TAA
VSAPDQLSL

SEQ ID NO: 90987 - protein, 9 aa, Homo sapiens
  misc_feature: Table A; Target 90987; HLA-C*05:01; TRPM1; ENSG00000134160; TAA
VSAPDQLSL

SEQ ID NO: 90988 - protein, 9 aa, Homo sapiens
  misc_feature: Table A; Target 90988; HLA-C*16:01; TRPM1; ENSG00000134160; TAA
VSAPDQLSL

SEQ ID NO: 90989 - protein, 9 aa, Homo sapiens
  misc_feature: Table A; Target 90989; HLA-C*16:02; TRPM1; ENSG00000134160; TAA
VSAPDQLSL

SEQ ID NO: 90990 - protein, 9 aa, Homo sapiens
  misc_feature: Table A; Target 90990; HLA-C*16:04; TRPM1; ENSG00000134160; TAA
VSAPDQLSL

SEQ ID NO: 90991 - protein, 9 aa, Homo sapiens
  misc_feature: Table A; Target 90991; HLA-A*02:01; TRPM1; ENSG00000134160; TAA
VSTGVISHV

SEQ ID NO: 90992 - protein, 9 aa, Homo sapiens
  misc_feature: Table A; Target 90992; HLA-A*02:03; TRPM1; ENSG00000134160; TAA
VSTGVISHV

SEQ ID NO: 90993 - protein, 9 aa, Homo sapiens
  misc_feature: Table A; Target 90993; HLA-A*02:04; TRPM1; ENSG00000134160; TAA
VSTGVISHV

SEQ ID NO: 90994 - protein, 9 aa, Homo sapiens
  misc_feature: Table A; Target 90994; HLA-A*02:07; TRPM1; ENSG00000134160; TAA
VSTGVISHV

SEQ ID NO: 90995 - protein, 9 aa, Homo sapiens
  misc_feature: Table A; Target 90995; HLA-A*23:01; TRPM1; ENSG00000134160; TAA
VSTGVISHV

SEQ ID NO: 90996 - protein, 9 aa, Homo sapiens
  misc_feature: Table A; Target 90996; HLA-A*30:01; TRPM1; ENSG00000134160; TAA
VSTGVISHV

SEQ ID NO: 90997 - protein, 9 aa, Homo sapiens
  misc_feature: Table A; Target 90997; HLA-A*32:01; TRPM1; ENSG00000134160; TAA
VSTGVISHV

SEQ ID NO: 90998 - protein, 9 aa, Homo sapiens
  misc_feature: Table A; Target 90998; HLA-A*68:02; TRPM1; ENSG00000134160; TAA
VSTGVISHV

SEQ ID NO: 90999 - protein, 9 aa, Homo sapiens
  misc_feature: Table A; Target 90999; HLA-B*13:02; TRPM1; ENSG00000134160; TAA
VSTGVISHV

SEQ ID NO: 91000 - protein, 9 aa, Homo sapiens
  misc_feature: Table A; Target 91000; HLA-B*49:01; TRPM1; ENSG00000134160; TAA
VSTGVISHV

SEQ ID NO: 91001 - protein, 9 aa, Homo sapiens
  misc_feature: Table A; Target 91001; HLA-B*55:01; TRPM1; ENSG00000134160; TAA
VSTGVISHV

SEQ ID NO: 91002 - protein, 9 aa, Homo sapiens
  misc_feature: Table A; Target 91002; HLA-B*58:01; TRPM1; ENSG00000134160; TAA
VSTGVISHV

SEQ ID NO: 91003 - protein, 9 aa, Homo sapiens
  misc_feature: Table A; Target 91003; HLA-C*02:02; TRPM1; ENSG00000134160; TAA
VSTGVISHV

SEQ ID NO: 91004 - protein, 9 aa, Homo sapiens
  misc_feature: Table A; Target 91004; HLA-C*03:03; TRPM1; ENSG00000134160; TAA
VSTGVISHV

SEQ ID NO: 91005 - protein, 9 aa, Homo sapiens
  misc_feature: Table A; Target 91005; HLA-C*03:04; TRPM1; ENSG00000134160; TAA
VSTGVISHV

SEQ ID NO: 91006 - protein, 9 aa, Homo sapiens
  misc_feature: Table A; Target 91006; HLA-C*06:02; TRPM1; ENSG00000134160; TAA
VSTGVISHV

SEQ ID NO: 91007 - protein, 9 aa, Homo sapiens
  misc_feature: Table A; Target 91007; HLA-C*12:03; TRPM1; ENSG00000134160; TAA
VSTGVISHV

SEQ ID NO: 91008 - protein, 9 aa, Homo sapiens
  misc_feature: Table A; Target 91008; HLA-C*16:01; TRPM1; ENSG00000134160; TAA
VSTGVISHV

SEQ ID NO: 91009 - protein, 9 aa, Homo sapiens
  misc_feature: Table A; Target 91009; HLA-C*16:02; TRPM1; ENSG00000134160; TAA
VSTGVISHV

SEQ ID NO: 91010 - protein, 9 aa, Homo sapiens
  misc_feature: Table A; Target 91010; HLA-C*16:04; TRPM1; ENSG00000134160; TAA
VSTGVISHV

SEQ ID NO: 91011 - protein, 10 aa, Homo sapiens
  misc_feature: Table A; Target 91011; HLA-C*03:03; TRPM1; ENSG00000134160; TAA
VSYDTKPDSL

SEQ ID NO: 91012 - protein, 10 aa, Homo sapiens
  misc_feature: Table A; Target 91012; HLA-C*03:04; TRPM1; ENSG00000134160; TAA
VSYDTKPDSL

SEQ ID NO: 91013 - protein, 9 aa, Homo sapiens
  misc_feature: Table A; Target 91013; HLA-A*01:01; TRPM1; ENSG00000134160; TAA
VTIQKTFNY

SEQ ID NO: 91014 - protein, 9 aa, Homo sapiens
  misc_feature: Table A; Target 91014; HLA-A*03:01; TRPM1; ENSG00000134160; TAA
VTIQKTFNY

SEQ ID NO: 91015 - protein, 9 aa, Homo sapiens
  misc_feature: Table A; Target 91015; HLA-A*03:02; TRPM1; ENSG00000134160; TAA
VTIQKTFNY

SEQ ID NO: 91016 - protein, 9 aa, Homo sapiens
  misc_feature: Table A; Target 91016; HLA-A*11:01; TRPM1; ENSG00000134160; TAA
VTIQKTFNY

SEQ ID NO: 91017 - protein, 9 aa, Homo sapiens
  misc_feature: Table A; Target 91017; HLA-A*23:01; TRPM1; ENSG00000134160; TAA
VTIQKTFNY

SEQ ID NO: 91018 - protein, 9 aa, Homo sapiens
  misc_feature: Table A; Target 91018; HLA-A*24:02; TRPM1; ENSG00000134160; TAA
VTIQKTFNY

SEQ ID NO: 91019 - protein, 9 aa, Homo sapiens
  misc_feature: Table A; Target 91019; HLA-A*25:01; TRPM1; ENSG00000134160; TAA
VTIQKTFNY

SEQ ID NO: 91020 - protein, 9 aa, Homo sapiens
  misc_feature: Table A; Target 91020; HLA-A*26:01; TRPM1; ENSG00000134160; TAA
VTIQKTFNY

SEQ ID NO: 91021 - protein, 9 aa, Homo sapiens
  misc_feature: Table A; Target 91021; HLA-A*29:02; TRPM1; ENSG00000134160; TAA
VTIQKTFNY

SEQ ID NO: 91022 - protein, 9 aa, Homo sapiens
  misc_feature: Table A; Target 91022; HLA-A*30:02; TRPM1; ENSG00000134160; TAA
VTIQKTFNY

SEQ ID NO: 91023 - protein, 9 aa, Homo sapiens
  misc_feature: Table A; Target 91023; HLA-A*31:01; TRPM1; ENSG00000134160; TAA
VTIQKTFNY

SEQ ID NO: 91024 - protein, 9 aa, Homo sapiens
  misc_feature: Table A; Target 91024; HLA-A*32:01; TRPM1; ENSG00000134160; TAA
VTIQKTFNY

SEQ ID NO: 91025 - protein, 9 aa, Homo sapiens
  misc_feature: Table A; Target 91025; HLA-A*33:03; TRPM1; ENSG00000134160; TAA
VTIQKTFNY

SEQ ID NO: 91026 - protein, 9 aa, Homo sapiens
  misc_feature: Table A; Target 91026; HLA-B*15:01; TRPM1; ENSG00000134160; TAA
VTIQKTFNY

SEQ ID NO: 91027 - protein, 9 aa, Homo sapiens
  misc_feature: Table A; Target 91027; HLA-B*15:03; TRPM1; ENSG00000134160; TAA
VTIQKTFNY

SEQ ID NO: 91028 - protein, 9 aa, Homo sapiens
  misc_feature: Table A; Target 91028; HLA-B*44:03; TRPM1; ENSG00000134160; TAA
VTIQKTFNY

SEQ ID NO: 91029 - protein, 9 aa, Homo sapiens
  misc_feature: Table A; Target 91029; HLA-B*46:01; TRPM1; ENSG00000134160; TAA
VTIQKTFNY

SEQ ID NO: 91030 - protein, 9 aa, Homo sapiens
  misc_feature: Table A; Target 91030; HLA-B*57:01; TRPM1; ENSG00000134160; TAA
VTIQKTFNY

SEQ ID NO: 91031 - protein, 9 aa, Homo sapiens
  misc_feature: Table A; Target 91031; HLA-B*58:01; TRPM1; ENSG00000134160; TAA
VTIQKTFNY

SEQ ID NO: 91032 - protein, 9 aa, Homo sapiens
  misc_feature: Table A; Target 91032; HLA-C*01:02; TRPM1; ENSG00000134160; TAA
VTIQKTFNY

SEQ ID NO: 91033 - protein, 9 aa, Homo sapiens
  misc_feature: Table A; Target 91033; HLA-C*02:02; TRPM1; ENSG00000134160; TAA
VTIQKTFNY

SEQ ID NO: 91034 - protein, 9 aa, Homo sapiens
  misc_feature: Table A; Target 91034; HLA-C*07:01; TRPM1; ENSG00000134160; TAA
VTIQKTFNY

SEQ ID NO: 91035 - protein, 9 aa, Homo sapiens
  misc_feature: Table A; Target 91035; HLA-C*12:03; TRPM1; ENSG00000134160; TAA
VTIQKTFNY

SEQ ID NO: 91036 - protein, 9 aa, Homo sapiens
  misc_feature: Table A; Target 91036; HLA-C*14:02; TRPM1; ENSG00000134160; TAA
VTIQKTFNY

SEQ ID NO: 91037 - protein, 9 aa, Homo sapiens
  misc_feature: Table A; Target 91037; HLA-C*16:01; TRPM1; ENSG00000134160; TAA
VTIQKTFNY

SEQ ID NO: 91038 - protein, 9 aa, Homo sapiens
  misc_feature: Table A; Target 91038; HLA-C*16:02; TRPM1; ENSG00000134160; TAA
VTIQKTFNY

SEQ ID NO: 91039 - protein, 9 aa, Homo sapiens
  misc_feature: Table A; Target 91039; HLA-C*16:04; TRPM1; ENSG00000134160; TAA
VTIQKTFNY

SEQ ID NO: 91040 - protein, 11 aa, Homo sapiens
  misc_feature: Table A; Target 91040; HLA-A*11:01; TRPM1; ENSG00000134160; TAA
VTIQKTFNYNK

SEQ ID NO: 91041 - protein, 11 aa, Homo sapiens
  misc_feature: Table A; Target 91041; HLA-A*31:01; TRPM1; ENSG00000134160; TAA
VTIQKTFNYNK

SEQ ID NO: 91042 - protein, 8 aa, Homo sapiens
  misc_feature: Table A; Target 91042; HLA-B*08:01; TRPM1; ENSG00000134160; TAA
VTRVYQTM

SEQ ID NO: 91043 - protein, 8 aa, Homo sapiens
  misc_feature: Table A; Target 91043; HLA-B*46:01; TRPM1; ENSG00000134160; TAA
VTRVYQTM

SEQ ID NO: 91044 - protein, 9 aa, Homo sapiens
  misc_feature: Table A; Target 91044; HLA-A*26:01; TRPM1; ENSG00000134160; TAA
VTSERVENM

SEQ ID NO: 91045 - protein, 9 aa, Homo sapiens
  misc_feature: Table A; Target 91045; HLA-A*32:01; TRPM1; ENSG00000134160; TAA
VTSERVENM

SEQ ID NO: 91046 - protein, 9 aa, Homo sapiens
  misc_feature: Table A; Target 91046; HLA-B*37:01; TRPM1; ENSG00000134160; TAA
VTSERVENM

SEQ ID NO: 91047 - protein, 9 aa, Homo sapiens
  misc_feature: Table A; Target 91047; HLA-C*01:02; TRPM1; ENSG00000134160; TAA
VTSERVENM

SEQ ID NO: 91048 - protein, 9 aa, Homo sapiens
  misc_feature: Table A; Target 91048; HLA-C*02:02; TRPM1; ENSG00000134160; TAA
VTSERVENM

SEQ ID NO: 91049 - protein, 9 aa, Homo sapiens
  misc_feature: Table A; Target 91049; HLA-C*12:03; TRPM1; ENSG00000134160; TAA
VTSERVENM

SEQ ID NO: 91050 - protein, 9 aa, Homo sapiens
  misc_feature: Table A; Target 91050; HLA-C*14:02; TRPM1; ENSG00000134160; TAA
VTSERVENM

SEQ ID NO: 91051 - protein, 9 aa, Homo sapiens
  misc_feature: Table A; Target 91051; HLA-C*16:01; TRPM1; ENSG00000134160; TAA
VTSERVENM

SEQ ID NO: 91052 - protein, 9 aa, Homo sapiens
  misc_feature: Table A; Target 91052; HLA-C*16:02; TRPM1; ENSG00000134160; TAA
VTSERVENM

SEQ ID NO: 91053 - protein, 8 aa, Homo sapiens
  misc_feature: Table A; Target 91053; HLA-C*05:01; TRPM1; ENSG00000134160; TAA
VVEGGPNV

SEQ ID NO: 91054 - protein, 9 aa, Homo sapiens
  misc_feature: Table A; Target 91054; HLA-A*01:01; TRPM1; ENSG00000134160; TAA
VVEGGPNVV

SEQ ID NO: 91055 - protein, 9 aa, Homo sapiens
  misc_feature: Table A; Target 91055; HLA-B*39:01; TRPM1; ENSG00000134160; TAA
VVEGGPNVV

SEQ ID NO: 91056 - protein, 9 aa, Homo sapiens
  misc_feature: Table A; Target 91056; HLA-C*05:01; TRPM1; ENSG00000134160; TAA
VVEGGPNVV

SEQ ID NO: 91057 - protein, 9 aa, Homo sapiens
  misc_feature: Table A; Target 91057; HLA-C*12:03; TRPM1; ENSG00000134160; TAA
VVEGGPNVV

SEQ ID NO: 91058 - protein, 9 aa, Homo sapiens
  misc_feature: Table A; Target 91058; HLA-C*12:03; TRPM1; ENSG00000134160; TAA
VVIMLVVLM

SEQ ID NO: 91059 - protein, 10 aa, Homo sapiens
  misc_feature: Table A; Target 91059; HLA-A*31:01; TRPM1; ENSG00000134160; TAA
VVLMSFGVAR

SEQ ID NO: 91060 - protein, 10 aa, Homo sapiens
  misc_feature: Table A; Target 91060; HLA-A*33:01; TRPM1; ENSG00000134160; TAA
VVLMSFGVAR

SEQ ID NO: 91061 - protein, 8 aa, Homo sapiens
  misc_feature: Table A; Target 91061; HLA-A*29:02; TRPM1; ENSG00000134160; TAA
VVSIVLEY

SEQ ID NO: 91062 - protein, 9 aa, Homo sapiens
  misc_feature: Table A; Target 91062; HLA-A*68:02; TRPM1; ENSG00000134160; TAA
VVSIVLEYL

SEQ ID NO: 91063 - protein, 8 aa, Homo sapiens
  misc_feature: Table A; Target 91063; HLA-C*14:02; TRPM1; ENSG00000134160; TAA
VYQTMSNP

SEQ ID NO: 91064 - protein, 9 aa, Homo sapiens
  misc_feature: Table A; Target 91064; HLA-A*23:01; TRPM1; ENSG00000134160; TAA
VYQTMSNPL

SEQ ID NO: 91065 - protein, 9 aa, Homo sapiens
  misc_feature: Table A; Target 91065; HLA-A*24:02; TRPM1; ENSG00000134160; TAA
VYQTMSNPL

SEQ ID NO: 91066 - protein, 9 aa, Homo sapiens
  misc_feature: Table A; Target 91066; HLA-B*07:02; TRPM1; ENSG00000134160; TAA
VYQTMSNPL

SEQ ID NO: 91067 - protein, 9 aa, Homo sapiens
  misc_feature: Table A; Target 91067; HLA-C*01:02; TRPM1; ENSG00000134160; TAA
VYQTMSNPL

SEQ ID NO: 91068 - protein, 9 aa, Homo sapiens
  misc_feature: Table A; Target 91068; HLA-C*04:01; TRPM1; ENSG00000134160; TAA
VYQTMSNPL

SEQ ID NO: 91069 - protein, 9 aa, Homo sapiens
  misc_feature: Table A; Target 91069; HLA-C*06:02; TRPM1; ENSG00000134160; TAA
VYQTMSNPL

SEQ ID NO: 91070 - protein, 9 aa, Homo sapiens
  misc_feature: Table A; Target 91070; HLA-C*07:02; TRPM1; ENSG00000134160; TAA
VYQTMSNPL

SEQ ID NO: 91071 - protein, 9 aa, Homo sapiens
  misc_feature: Table A; Target 91071; HLA-C*07:04; TRPM1; ENSG00000134160; TAA
VYQTMSNPL

SEQ ID NO: 91072 - protein, 9 aa, Homo sapiens
  misc_feature: Table A; Target 91072; HLA-C*14:02; TRPM1; ENSG00000134160; TAA
VYQTMSNPL

SEQ ID NO: 91073 - protein, 9 aa, Homo sapiens
  misc_feature: Table A; Target 91073; HLA-C*16:01; TRPM1; ENSG00000134160; TAA
VYQTMSNPL

SEQ ID NO: 91074 - protein, 9 aa, Homo sapiens
  misc_feature: Table A; Target 91074; HLA-C*16:02; TRPM1; ENSG00000134160; TAA
VYQTMSNPL

SEQ ID NO: 91075 - protein, 10 aa, Homo sapiens
  misc_feature: Table A; Target 91075; HLA-A*29:02; TRPM1; ENSG00000134160; TAA
WFYTISYLGY

SEQ ID NO: 91076 - protein, 9 aa, Homo sapiens
  misc_feature: Table A; Target 91076; HLA-C*07:04; TRPM1; ENSG00000134160; TAA
WVNALEQAM

SEQ ID NO: 91077 - protein, 9 aa, Homo sapiens
  misc_feature: Table A; Target 91077; HLA-B*54:01; TRPM1; ENSG00000134160; TAA
YAMEINPPC

SEQ ID NO: 91078 - protein, 9 aa, Homo sapiens
  misc_feature: Table A; Target 91078; HLA-C*02:02; TRPM1; ENSG00000134160; TAA
YAMEINPPC

SEQ ID NO: 91079 - protein, 9 aa, Homo sapiens
  misc_feature: Table A; Target 91079; HLA-C*12:03; TRPM1; ENSG00000134160; TAA
YAMEINPPC

SEQ ID NO: 91080 - protein, 10 aa, Homo sapiens
  misc_feature: Table A; Target 91080; HLA-B*27:02; TRPM1; ENSG00000134160; TAA
YDDFSYQTSK

SEQ ID NO: 91081 - protein, 8 aa, Homo sapiens
  misc_feature: Table A; Target 91081; HLA-B*37:01; TRPM1; ENSG00000134160; TAA
YDEEGKRL

SEQ ID NO: 91082 - protein, 8 aa, Homo sapiens
  misc_feature: Table A; Target 91082; HLA-A*30:01; TRPM1; ENSG00000134160; TAA
YDTKPDSL

SEQ ID NO: 91083 - protein, 8 aa, Homo sapiens
  misc_feature: Table A; Target 91083; HLA-B*37:01; TRPM1; ENSG00000134160; TAA
YDTKPDSL

SEQ ID NO: 91084 - protein, 9 aa, Homo sapiens
  misc_feature: Table A; Target 91084; HLA-B*38:01; TRPM1; ENSG00000134160; TAA
YDTKPDSLL

SEQ ID NO: 91085 - protein, 9 aa, Homo sapiens
  misc_feature: Table A; Target 91085; HLA-B*40:02; TRPM1; ENSG00000134160; TAA
YDTKPDSLL

SEQ ID NO: 91086 - protein, 9 aa, Homo sapiens
  misc_feature: Table A; Target 91086; HLA-C*14:02; TRPM1; ENSG00000134160; TAA
YFPDETINA

SEQ ID NO: 91087 - protein, 10 aa, Homo sapiens
  misc_feature: Table A; Target 91087; HLA-C*14:02; TRPM1; ENSG00000134160; TAA
YFPDETINAC

SEQ ID NO: 91088 - protein, 11 aa, Homo sapiens
  misc_feature: Table A; Target 91088; HLA-A*23:01; TRPM1; ENSG00000134160; TAA
YFPDETINACK

SEQ ID NO: 91089 - protein, 11 aa, Homo sapiens
  misc_feature: Table A; Target 91089; HLA-A*29:02; TRPM1; ENSG00000134160; TAA
YFPDETINACK

SEQ ID NO: 91090 - protein, 8 aa, Homo sapiens
  misc_feature: Table A; Target 91090; HLA-B*38:01; TRPM1; ENSG00000134160; TAA
YHFNGEEL

SEQ ID NO: 91091 - protein, 8 aa, Homo sapiens
  misc_feature: Table A; Target 91091; HLA-B*39:01; TRPM1; ENSG00000134160; TAA
YHFNGEEL

SEQ ID NO: 91092 - protein, 8 aa, Homo sapiens
  misc_feature: Table A; Target 91092; HLA-C*03:03; TRPM1; ENSG00000134160; TAA
YHFNGEEL

SEQ ID NO: 91093 - protein, 8 aa, Homo sapiens
  misc_feature: Table A; Target 91093; HLA-C*03:04; TRPM1; ENSG00000134160; TAA
YHFNGEEL

SEQ ID NO: 91094 - protein, 9 aa, Homo sapiens
  misc_feature: Table A; Target 91094; HLA-A*68:02; TRPM1; ENSG00000134160; TAA
YHFNGEELL

SEQ ID NO: 91095 - protein, 9 aa, Homo sapiens
  misc_feature: Table A; Target 91095; HLA-B*38:01; TRPM1; ENSG00000134160; TAA
YHFNGEELL

SEQ ID NO: 91096 - protein, 9 aa, Homo sapiens
  misc_feature: Table A; Target 91096; HLA-B*39:01; TRPM1; ENSG00000134160; TAA
YHFNGEELL

SEQ ID NO: 91097 - protein, 10 aa, Homo sapiens
  misc_feature: Table A; Target 91097; HLA-B*38:01; TRPM1; ENSG00000134160; TAA
YHFNGEELLF

SEQ ID NO: 91098 - protein, 9 aa, Homo sapiens
  misc_feature: Table A; Target 91098; HLA-B*27:02; TRPM1; ENSG00000134160; TAA
YIVSLALEK

SEQ ID NO: 91099 - protein, 9 aa, Homo sapiens
  misc_feature: Table A; Target 91099; HLA-B*15:03; TRPM1; ENSG00000134160; TAA
YKHDEQIAM

SEQ ID NO: 91100 - protein, 9 aa, Homo sapiens
  misc_feature: Table A; Target 91100; HLA-C*03:03; TRPM1; ENSG00000134160; TAA
YKHDEQIAM

SEQ ID NO: 91101 - protein, 9 aa, Homo sapiens
  misc_feature: Table A; Target 91101; HLA-A*02:01; TRPM1; ENSG00000134160; TAA
YLGPYVMMI

SEQ ID NO: 91102 - protein, 9 aa, Homo sapiens
  misc_feature: Table A; Target 91102; HLA-A*02:03; TRPM1; ENSG00000134160; TAA
YLGPYVMMI

SEQ ID NO: 91103 - protein, 9 aa, Homo sapiens
  misc_feature: Table A; Target 91103; HLA-A*02:04; TRPM1; ENSG00000134160; TAA
YLGPYVMMI

SEQ ID NO: 91104 - protein, 9 aa, Homo sapiens
  misc_feature: Table A; Target 91104; HLA-A*02:07; TRPM1; ENSG00000134160; TAA
YLGPYVMMI

SEQ ID NO: 91105 - protein, 9 aa, Homo sapiens
  misc_feature: Table A; Target 91105; HLA-A*24:02; TRPM1; ENSG00000134160; TAA
YLGPYVMMI

SEQ ID NO: 91106 - protein, 9 aa, Homo sapiens
  misc_feature: Table A; Target 91106; HLA-B*13:02; TRPM1; ENSG00000134160; TAA
YLGPYVMMI

SEQ ID NO: 91107 - protein, 11 aa, Homo sapiens
  misc_feature: Table A; Target 91107; HLA-A*02:01; TRPM1; ENSG00000134160; TAA
YLLRQSSINSA

SEQ ID NO: 91108 - protein, 9 aa, Homo sapiens
  misc_feature: Table A; Target 91108; HLA-A*02:01; TRPM1; ENSG00000134160; TAA
YLLVANILL

SEQ ID NO: 91109 - protein, 9 aa, Homo sapiens
  misc_feature: Table A; Target 91109; HLA-A*02:04; TRPM1; ENSG00000134160; TAA
YLLVANILL

SEQ ID NO: 91110 - protein, 9 aa, Homo sapiens
  misc_feature: Table A; Target 91110; HLA-A*02:07; TRPM1; ENSG00000134160; TAA
YLLVANILL

SEQ ID NO: 91111 - protein, 11 aa, Homo sapiens
  misc_feature: Table A; Target 91111; HLA-A*29:02; TRPM1; ENSG00000134160; TAA
YLMGGAYRCNY

SEQ ID NO: 91112 - protein, 10 aa, Homo sapiens
  misc_feature: Table A; Target 91112; HLA-A*01:01; TRPM1; ENSG00000134160; TAA
YLQEEPPIPV

SEQ ID NO: 91113 - protein, 10 aa, Homo sapiens
  misc_feature: Table A; Target 91113; HLA-A*02:01; TRPM1; ENSG00000134160; TAA
YLQEEPPIPV

SEQ ID NO: 91114 - protein, 10 aa, Homo sapiens
  misc_feature: Table A; Target 91114; HLA-A*02:03; TRPM1; ENSG00000134160; TAA
YLQEEPPIPV

SEQ ID NO: 91115 - protein, 10 aa, Homo sapiens
  misc_feature: Table A; Target 91115; HLA-A*02:04; TRPM1; ENSG00000134160; TAA
YLQEEPPIPV

SEQ ID NO: 91116 - protein, 10 aa, Homo sapiens
  misc_feature: Table A; Target 91116; HLA-A*02:07; TRPM1; ENSG00000134160; TAA
YLQEEPPIPV

SEQ ID NO: 91117 - protein, 11 aa, Homo sapiens
  misc_feature: Table A; Target 91117; HLA-A*02:01; TRPM1; ENSG00000134160; TAA
YLQEEPPIPVV

SEQ ID NO: 91118 - protein, 11 aa, Homo sapiens
  misc_feature: Table A; Target 91118; HLA-A*02:03; TRPM1; ENSG00000134160; TAA
YLQEEPPIPVV

SEQ ID NO: 91119 - protein, 11 aa, Homo sapiens
  misc_feature: Table A; Target 91119; HLA-A*02:04; TRPM1; ENSG00000134160; TAA
YLQEEPPIPVV

SEQ ID NO: 91120 - protein, 9 aa, Homo sapiens
  misc_feature: Table A; Target 91120; HLA-A*29:02; TRPM1; ENSG00000134160; TAA
YMGYGRVIY

SEQ ID NO: 91121 - protein, 9 aa, Homo sapiens
  misc_feature: Table A; Target 91121; HLA-B*57:01; TRPM1; ENSG00000134160; TAA
YNAPIVKFW

SEQ ID NO: 91122 - protein, 9 aa, Homo sapiens
  misc_feature: Table A; Target 91122; HLA-B*08:01; TRPM1; ENSG00000134160; TAA
YNKAQSHQL

SEQ ID NO: 91123 - protein, 9 aa, Homo sapiens
  misc_feature: Table A; Target 91123; HLA-B*40:02; TRPM1; ENSG00000134160; TAA
YNKAQSHQL

SEQ ID NO: 91124 - protein, 9 aa, Homo sapiens
  misc_feature: Table A; Target 91124; HLA-C*07:02; TRPM1; ENSG00000134160; TAA
YNKAQSHQL

SEQ ID NO: 91125 - protein, 9 aa, Homo sapiens
  misc_feature: Table A; Target 91125; HLA-C*16:02; TRPM1; ENSG00000134160; TAA
YNKAQSHQL

SEQ ID NO: 91126 - protein, 10 aa, Homo sapiens
  misc_feature: Table A; Target 91126; HLA-A*33:01; TRPM1; ENSG00000134160; TAA
YNKAQSHQLF

SEQ ID NO: 91127 - protein, 9 aa, Homo sapiens
  misc_feature: Table A; Target 91127; HLA-A*33:01; TRPM1; ENSG00000134160; TAA
YNNLFGPKR

SEQ ID NO: 91128 - protein, 8 aa, Homo sapiens
  misc_feature: Table A; Target 91128; HLA-B*51:01; TRPM1; ENSG00000134160; TAA
YPFHELMV

SEQ ID NO: 91129 - protein, 8 aa, Homo sapiens
  misc_feature: Table A; Target 91129; HLA-B*54:01; TRPM1; ENSG00000134160; TAA
YPFHELMV

SEQ ID NO: 91130 - protein, 9 aa, Homo sapiens
  misc_feature: Table A; Target 91130; HLA-B*54:01; TRPM1; ENSG00000134160; TAA
YPFHELMVW

SEQ ID NO: 91131 - protein, 10 aa, Homo sapiens
  misc_feature: Table A; Target 91131; HLA-B*54:01; TRPM1; ENSG00000134160; TAA
YPFHELMVWA

SEQ ID NO: 91132 - protein, 8 aa, Homo sapiens
  misc_feature: Table A; Target 91132; HLA-B*08:01; TRPM1; ENSG00000134160; TAA
YPLEETKI

SEQ ID NO: 91133 - protein, 8 aa, Homo sapiens
  misc_feature: Table A; Target 91133; HLA-B*35:03; TRPM1; ENSG00000134160; TAA
YPLEETKI

SEQ ID NO: 91134 - protein, 8 aa, Homo sapiens
  misc_feature: Table A; Target 91134; HLA-B*51:01; TRPM1; ENSG00000134160; TAA
YPLEETKI

SEQ ID NO: 91135 - protein, 10 aa, Homo sapiens
  misc_feature: Table A; Target 91135; HLA-A*33:03; TRPM1; ENSG00000134160; TAA
YPLEETKITR

SEQ ID NO: 91136 - protein, 10 aa, Homo sapiens
  misc_feature: Table A; Target 91136; HLA-A*68:01; TRPM1; ENSG00000134160; TAA
YPLEETKITR

SEQ ID NO: 91137 - protein, 10 aa, Homo sapiens
  misc_feature: Table A; Target 91137; HLA-B*35:01; TRPM1; ENSG00000134160; TAA
YPLEETKITR

SEQ ID NO: 91138 - protein, 10 aa, Homo sapiens
  misc_feature: Table A; Target 91138; HLA-B*35:03; TRPM1; ENSG00000134160; TAA
YPLEETKITR

SEQ ID NO: 91139 - protein, 10 aa, Homo sapiens
  misc_feature: Table A; Target 91139; HLA-B*54:01; TRPM1; ENSG00000134160; TAA
YPLEETKITR

SEQ ID NO: 91140 - protein, 10 aa, Homo sapiens
  misc_feature: Table A; Target 91140; HLA-B*56:01; TRPM1; ENSG00000134160; TAA
YPLEETKITR

SEQ ID NO: 91141 - protein, 10 aa, Homo sapiens
  misc_feature: Table A; Target 91141; HLA-C*07:06; TRPM1; ENSG00000134160; TAA
YPLEETKITR

SEQ ID NO: 91142 - protein, 11 aa, Homo sapiens
  misc_feature: Table A; Target 91142; HLA-A*01:01; TRPM1; ENSG00000134160; TAA
YPLEETKITRY

SEQ ID NO: 91143 - protein, 11 aa, Homo sapiens
  misc_feature: Table A; Target 91143; HLA-A*26:01; TRPM1; ENSG00000134160; TAA
YPLEETKITRY

SEQ ID NO: 91144 - protein, 11 aa, Homo sapiens
  misc_feature: Table A; Target 91144; HLA-A*29:02; TRPM1; ENSG00000134160; TAA
YPLEETKITRY

SEQ ID NO: 91145 - protein, 11 aa, Homo sapiens
  misc_feature: Table A; Target 91145; HLA-A*30:02; TRPM1; ENSG00000134160; TAA
YPLEETKITRY

SEQ ID NO: 91146 - protein, 11 aa, Homo sapiens
  misc_feature: Table A; Target 91146; HLA-B*35:01; TRPM1; ENSG00000134160; TAA
YPLEETKITRY

SEQ ID NO: 91147 - protein, 11 aa, Homo sapiens
  misc_feature: Table A; Target 91147; HLA-B*55:01; TRPM1; ENSG00000134160; TAA
YPLEETKITRY

SEQ ID NO: 91148 - protein, 8 aa, Homo sapiens
  misc_feature: Table A; Target 91148; HLA-B*35:01; TRPM1; ENSG00000134160; TAA
YPTDSYGV

SEQ ID NO: 91149 - protein, 8 aa, Homo sapiens
  misc_feature: Table A; Target 91149; HLA-B*35:03; TRPM1; ENSG00000134160; TAA
YPTDSYGV

SEQ ID NO: 91150 - protein, 8 aa, Homo sapiens
  misc_feature: Table A; Target 91150; HLA-B*51:01; TRPM1; ENSG00000134160; TAA
YPTDSYGV

SEQ ID NO: 91151 - protein, 8 aa, Homo sapiens
  misc_feature: Table A; Target 91151; HLA-B*54:01; TRPM1; ENSG00000134160; TAA
YPTDSYGV

SEQ ID NO: 91152 - protein, 8 aa, Homo sapiens
  misc_feature: Table A; Target 91152; HLA-B*55:01; TRPM1; ENSG00000134160; TAA
YPTDSYGV

SEQ ID NO: 91153 - protein, 8 aa, Homo sapiens
  misc_feature: Table A; Target 91153; HLA-B*56:01; TRPM1; ENSG00000134160; TAA
YPTDSYGV

SEQ ID NO: 91154 - protein, 9 aa, Homo sapiens
  misc_feature: Table A; Target 91154; HLA-A*25:01; TRPM1; ENSG00000134160; TAA
YPTDSYGVL

SEQ ID NO: 91155 - protein, 9 aa, Homo sapiens
  misc_feature: Table A; Target 91155; HLA-B*07:02; TRPM1; ENSG00000134160; TAA
YPTDSYGVL

SEQ ID NO: 91156 - protein, 9 aa, Homo sapiens
  misc_feature: Table A; Target 91156; HLA-B*35:01; TRPM1; ENSG00000134160; TAA
YPTDSYGVL

SEQ ID NO: 91157 - protein, 9 aa, Homo sapiens
  misc_feature: Table A; Target 91157; HLA-B*35:03; TRPM1; ENSG00000134160; TAA
YPTDSYGVL

SEQ ID NO: 91158 - protein, 9 aa, Homo sapiens
  misc_feature: Table A; Target 91158; HLA-B*39:01; TRPM1; ENSG00000134160; TAA
YPTDSYGVL

SEQ ID NO: 91159 - protein, 9 aa, Homo sapiens
  misc_feature: Table A; Target 91159; HLA-B*51:01; TRPM1; ENSG00000134160; TAA
YPTDSYGVL

SEQ ID NO: 91160 - protein, 9 aa, Homo sapiens
  misc_feature: Table A; Target 91160; HLA-B*54:01; TRPM1; ENSG00000134160; TAA
YPTDSYGVL

SEQ ID NO: 91161 - protein, 9 aa, Homo sapiens
  misc_feature: Table A; Target 91161; HLA-B*55:01; TRPM1; ENSG00000134160; TAA
YPTDSYGVL

SEQ ID NO: 91162 - protein, 9 aa, Homo sapiens
  misc_feature: Table A; Target 91162; HLA-B*56:01; TRPM1; ENSG00000134160; TAA
YPTDSYGVL

SEQ ID NO: 91163 - protein, 9 aa, Homo sapiens
  misc_feature: Table A; Target 91163; HLA-C*01:02; TRPM1; ENSG00000134160; TAA
YPTDSYGVL

SEQ ID NO: 91164 - protein, 9 aa, Homo sapiens
  misc_feature: Table A; Target 91164; HLA-C*03:03; TRPM1; ENSG00000134160; TAA
YPTDSYGVL

SEQ ID NO: 91165 - protein, 9 aa, Homo sapiens
  misc_feature: Table A; Target 91165; HLA-C*03:04; TRPM1; ENSG00000134160; TAA
YPTDSYGVL

SEQ ID NO: 91166 - protein, 9 aa, Homo sapiens
  misc_feature: Table A; Target 91166; HLA-C*05:01; TRPM1; ENSG00000134160; TAA
YPTDSYGVL

SEQ ID NO: 91167 - protein, 9 aa, Homo sapiens
  misc_feature: Table A; Target 91167; HLA-C*07:02; TRPM1; ENSG00000134160; TAA
YPTDSYGVL

SEQ ID NO: 91168 - protein, 9 aa, Homo sapiens
  misc_feature: Table A; Target 91168; HLA-C*14:02; TRPM1; ENSG00000134160; TAA
YPTDSYGVL

SEQ ID NO: 91169 - protein, 11 aa, Homo sapiens
  misc_feature: Table A; Target 91169; HLA-B*27:02; TRPM1; ENSG00000134160; TAA
YPTDSYGVLEF

SEQ ID NO: 91170 - protein, 11 aa, Homo sapiens
  misc_feature: Table A; Target 91170; HLA-B*35:01; TRPM1; ENSG00000134160; TAA
YPTDSYGVLEF

SEQ ID NO: 91171 - protein, 11 aa, Homo sapiens
  misc_feature: Table A; Target 91171; HLA-B*35:03; TRPM1; ENSG00000134160; TAA
YPTDSYGVLEF

SEQ ID NO: 91172 - protein, 11 aa, Homo sapiens
  misc_feature: Table A; Target 91172; HLA-B*54:01; TRPM1; ENSG00000134160; TAA
YPTDSYGVLEF

SEQ ID NO: 91173 - protein, 8 aa, Homo sapiens
  misc_feature: Table A; Target 91173; HLA-B*39:01; TRPM1; ENSG00000134160; TAA
YQTMSNPL

SEQ ID NO: 91174 - protein, 8 aa, Homo sapiens
  misc_feature: Table A; Target 91174; HLA-C*07:04; TRPM1; ENSG00000134160; TAA
YQTMSNPL

SEQ ID NO: 91175 - protein, 9 aa, Homo sapiens
  misc_feature: Table A; Target 91175; HLA-B*27:05; TRPM1; ENSG00000134160; TAA
YQTMSNPLS

SEQ ID NO: 91176 - protein, 10 aa, Homo sapiens
  misc_feature: Table A; Target 91176; HLA-B*27:02; TRPM1; ENSG00000134160; TAA
YQTMSNPLSK

SEQ ID NO: 91177 - protein, 8 aa, Homo sapiens
  misc_feature: Table A; Target 91177; HLA-B*51:01; TRPM1; ENSG00000134160; TAA
YSNKAMYI

SEQ ID NO: 91178 - protein, 9 aa, Homo sapiens
  misc_feature: Table A; Target 91178; HLA-B*27:05; TRPM1; ENSG00000134160; TAA
YSSITDQQL

SEQ ID NO: 91179 - protein, 9 aa, Homo sapiens
  misc_feature: Table A; Target 91179; HLA-B*35:03; TRPM1; ENSG00000134160; TAA
YSSITDQQL

SEQ ID NO: 91180 - protein, 9 aa, Homo sapiens
  misc_feature: Table A; Target 91180; HLA-B*38:01; TRPM1; ENSG00000134160; TAA
YSSITDQQL

SEQ ID NO: 91181 - protein, 9 aa, Homo sapiens
  misc_feature: Table A; Target 91181; HLA-B*58:01; TRPM1; ENSG00000134160; TAA
YSSITDQQL

SEQ ID NO: 91182 - protein, 9 aa, Homo sapiens
  misc_feature: Table A; Target 91182; HLA-C*05:01; TRPM1; ENSG00000134160; TAA
YSSITDQQL

SEQ ID NO: 91183 - protein, 9 aa, Homo sapiens
  misc_feature: Table A; Target 91183; HLA-C*07:04; TRPM1; ENSG00000134160; TAA
YSSITDQQL

SEQ ID NO: 91184 - protein, 8 aa, Homo sapiens
  misc_feature: Table A; Target 91184; HLA-A*01:01; TRPM1; ENSG00000134160; TAA
YTISYLGY

SEQ ID NO: 91185 - protein, 8 aa, Homo sapiens
  misc_feature: Table A; Target 91185; HLA-A*26:01; TRPM1; ENSG00000134160; TAA
YTISYLGY

SEQ ID NO: 91186 - protein, 9 aa, Homo sapiens
  misc_feature: Table A; Target 91186; HLA-A*68:02; TRPM1; ENSG00000134160; TAA
YTISYLGYL

SEQ ID NO: 91187 - protein, 10 aa, Homo sapiens
  misc_feature: Table A; Target 91187; HLA-A*68:02; TRPM1; ENSG00000134160; TAA
YTISYLGYLL

SEQ ID NO: 91188 - protein, 9 aa, Homo sapiens
  misc_feature: Table A; Target 91188; HLA-A*24:02; TRPM1; ENSG00000134160; TAA
YWMIYGEVF

SEQ ID NO: 91189 - protein, 8 aa, Homo sapiens
  misc_feature: Table A; Target 91189; HLA-B*37:01; TSPAN10; ENSG00000182612; TAA
AAQRVVYL

SEQ ID NO: 91190 - protein, 8 aa, Homo sapiens
  misc_feature: Table A; Target 91190; HLA-C*12:03; TSPAN10; ENSG00000182612; TAA
AAQRVVYL

SEQ ID NO: 91191 - protein, 8 aa, Homo sapiens
  misc_feature: Table A; Target 91191; HLA-C*16:02; TSPAN10; ENSG00000182612; TAA
AAQRVVYL

SEQ ID NO: 91192 - protein, 8 aa, Homo sapiens
  misc_feature: Table A; Target 91192; HLA-B*07:02; TSPAN10; ENSG00000182612; TAA
AARLLGAL

SEQ ID NO: 91193 - protein, 8 aa, Homo sapiens
  misc_feature: Table A; Target 91193; HLA-B*08:01; TSPAN10; ENSG00000182612; TAA
AARLLGAL

SEQ ID NO: 91194 - protein, 8 aa, Homo sapiens
  misc_feature: Table A; Target 91194; HLA-B*46:01; TSPAN10; ENSG00000182612; TAA
AARLLGAL

SEQ ID NO: 91195 - protein, 8 aa, Homo sapiens
  misc_feature: Table A; Target 91195; HLA-C*07:02; TSPAN10; ENSG00000182612; TAA
AARLLGAL

SEQ ID NO: 91196 - protein, 9 aa, Homo sapiens
  misc_feature: Table A; Target 91196; HLA-B*54:01; TSPAN10; ENSG00000182612; TAA
AARLLGALA

SEQ ID NO: 91197 - protein, 9 aa, Homo sapiens
  misc_feature: Table A; Target 91197; HLA-B*56:01; TSPAN10; ENSG00000182612; TAA
AARLLGALA

SEQ ID NO: 91198 - protein, 9 aa, Homo sapiens
  misc_feature: Table A; Target 91198; HLA-C*06:02; TSPAN10; ENSG00000182612; TAA
AARLLGALA

SEQ ID NO: 91199 - protein, 10 aa, Homo sapiens
  misc_feature: Table A; Target 91199; HLA-B*54:01; TSPAN10; ENSG00000182612; TAA
AARLLGALAA

SEQ ID NO: 91200 - protein, 10 aa, Homo sapiens
  misc_feature: Table A; Target 91200; HLA-B*56:01; TSPAN10; ENSG00000182612; TAA
AARLLGALAA

SEQ ID NO: 91201 - protein, 10 aa, Homo sapiens
  misc_feature: Table A; Target 91201; HLA-C*06:02; TSPAN10; ENSG00000182612; TAA
AARLLGALAA

SEQ ID NO: 91202 - protein, 11 aa, Homo sapiens
  misc_feature: Table A; Target 91202; HLA-A*31:01; TSPAN10; ENSG00000182612; TAA
AARLLGALAAR

SEQ ID NO: 91203 - protein, 11 aa, Homo sapiens
  misc_feature: Table A; Target 91203; HLA-A*33:01; TSPAN10; ENSG00000182612; TAA
AARLLGALAAR

SEQ ID NO: 91204 - protein, 11 aa, Homo sapiens
  misc_feature: Table A; Target 91204; HLA-A*33:03; TSPAN10; ENSG00000182612; TAA
AARLLGALAAR

SEQ ID NO: 91205 - protein, 11 aa, Homo sapiens
  misc_feature: Table A; Target 91205; HLA-B*57:01; TSPAN10; ENSG00000182612; TAA
AARLLGALAAR

SEQ ID NO: 91206 - protein, 8 aa, Homo sapiens
  misc_feature: Table A; Target 91206; HLA-A*30:02; TSPAN10; ENSG00000182612; TAA
AARSGAAY

SEQ ID NO: 91207 - protein, 8 aa, Homo sapiens
  misc_feature: Table A; Target 91207; HLA-A*32:01; TSPAN10; ENSG00000182612; TAA
AARSGAAY

SEQ ID NO: 91208 - protein, 8 aa, Homo sapiens
  misc_feature: Table A; Target 91208; HLA-B*07:02; TSPAN10; ENSG00000182612; TAA
AARSGAAY

SEQ ID NO: 91209 - protein, 8 aa, Homo sapiens
  misc_feature: Table A; Target 91209; HLA-B*15:01; TSPAN10; ENSG00000182612; TAA
AARSGAAY

SEQ ID NO: 91210 - protein, 8 aa, Homo sapiens
  misc_feature: Table A; Target 91210; HLA-B*15:03; TSPAN10; ENSG00000182612; TAA
AARSGAAY

SEQ ID NO: 91211 - protein, 8 aa, Homo sapiens
  misc_feature: Table A; Target 91211; HLA-B*46:01; TSPAN10; ENSG00000182612; TAA
AARSGAAY

SEQ ID NO: 91212 - protein, 8 aa, Homo sapiens
  misc_feature: Table A; Target 91212; HLA-C*01:02; TSPAN10; ENSG00000182612; TAA
AARSGAAY

SEQ ID NO: 91213 - protein, 8 aa, Homo sapiens
  misc_feature: Table A; Target 91213; HLA-C*02:02; TSPAN10; ENSG00000182612; TAA
AARSGAAY

SEQ ID NO: 91214 - protein, 8 aa, Homo sapiens
  misc_feature: Table A; Target 91214; HLA-C*03:04; TSPAN10; ENSG00000182612; TAA
AARSGAAY

SEQ ID NO: 91215 - protein, 8 aa, Homo sapiens
  misc_feature: Table A; Target 91215; HLA-C*14:02; TSPAN10; ENSG00000182612; TAA
AARSGAAY

SEQ ID NO: 91216 - protein, 8 aa, Homo sapiens
  misc_feature: Table A; Target 91216; HLA-C*16:01; TSPAN10; ENSG00000182612; TAA
AARSGAAY

SEQ ID NO: 91217 - protein, 10 aa, Homo sapiens
  misc_feature: Table A; Target 91217; HLA-C*06:02; TSPAN10; ENSG00000182612; TAA
AARSGAAYGP

SEQ ID NO: 91218 - protein, 10 aa, Homo sapiens
  misc_feature: Table A; Target 91218; HLA-C*07:02; TSPAN10; ENSG00000182612; TAA
AARSGAAYGP

SEQ ID NO: 91219 - protein, 8 aa, Homo sapiens
  misc_feature: Table A; Target 91219; HLA-B*13:02; TSPAN10; ENSG00000182612; TAA
AASGGYAI

SEQ ID NO: 91220 - protein, 8 aa, Homo sapiens
  misc_feature: Table A; Target 91220; HLA-B*37:01; TSPAN10; ENSG00000182612; TAA
AASGGYAI

SEQ ID NO: 91221 - protein, 8 aa, Homo sapiens
  misc_feature: Table A; Target 91221; HLA-B*39:01; TSPAN10; ENSG00000182612; TAA
AASGGYAI

SEQ ID NO: 91222 - protein, 8 aa, Homo sapiens
  misc_feature: Table A; Target 91222; HLA-B*58:01; TSPAN10; ENSG00000182612; TAA
AASGGYAI

SEQ ID NO: 91223 - protein, 8 aa, Homo sapiens
  misc_feature: Table A; Target 91223; HLA-C*03:03; TSPAN10; ENSG00000182612; TAA
AASGGYAI

SEQ ID NO: 91224 - protein, 8 aa, Homo sapiens
  misc_feature: Table A; Target 91224; HLA-C*03:04; TSPAN10; ENSG00000182612; TAA
AASGGYAI

SEQ ID NO: 91225 - protein, 8 aa, Homo sapiens
  misc_feature: Table A; Target 91225; HLA-C*16:01; TSPAN10; ENSG00000182612; TAA
AASGGYAI

SEQ ID NO: 91226 - protein, 8 aa, Homo sapiens
  misc_feature: Table A; Target 91226; HLA-C*16:02; TSPAN10; ENSG00000182612; TAA
AASGGYAI

SEQ ID NO: 91227 - protein, 8 aa, Homo sapiens
  misc_feature: Table A; Target 91227; HLA-C*16:04; TSPAN10; ENSG00000182612; TAA
AASGGYAI

SEQ ID NO: 91228 - protein, 9 aa, Homo sapiens
  misc_feature: Table A; Target 91228; HLA-B*56:01; TSPAN10; ENSG00000182612; TAA
AASGGYAIA

SEQ ID NO: 91229 - protein, 10 aa, Homo sapiens
  misc_feature: Table A; Target 91229; HLA-A*11:01; TSPAN10; ENSG00000182612; TAA
AASGGYAIAV

SEQ ID NO: 91230 - protein, 10 aa, Homo sapiens
  misc_feature: Table A; Target 91230; HLA-B*56:01; TSPAN10; ENSG00000182612; TAA
AASGGYAIAV

SEQ ID NO: 91231 - protein, 10 aa, Homo sapiens
  misc_feature: Table A; Target 91231; HLA-C*02:02; TSPAN10; ENSG00000182612; TAA
AASGGYAIAV

SEQ ID NO: 91232 - protein, 10 aa, Homo sapiens
  misc_feature: Table A; Target 91232; HLA-C*03:03; TSPAN10; ENSG00000182612; TAA
AASGGYAIAV

SEQ ID NO: 91233 - protein, 10 aa, Homo sapiens
  misc_feature: Table A; Target 91233; HLA-C*12:03; TSPAN10; ENSG00000182612; TAA
AASGGYAIAV

SEQ ID NO: 91234 - protein, 10 aa, Homo sapiens
  misc_feature: Table A; Target 91234; HLA-C*16:02; TSPAN10; ENSG00000182612; TAA
AASGGYAIAV

SEQ ID NO: 91235 - protein, 10 aa, Homo sapiens
  misc_feature: Table A; Target 91235; HLA-C*16:04; TSPAN10; ENSG00000182612; TAA
AASGGYAIAV

SEQ ID NO: 91236 - protein, 11 aa, Homo sapiens
  misc_feature: Table A; Target 91236; HLA-C*16:04; TSPAN10; ENSG00000182612; TAA
AASGGYAIAVV

SEQ ID NO: 91237 - protein, 8 aa, Homo sapiens
  misc_feature: Table A; Target 91237; HLA-C*03:03; TSPAN10; ENSG00000182612; TAA
AASLAGCL

SEQ ID NO: 91238 - protein, 8 aa, Homo sapiens
  misc_feature: Table A; Target 91238; HLA-C*03:04; TSPAN10; ENSG00000182612; TAA
AASLAGCL

SEQ ID NO: 91239 - protein, 8 aa, Homo sapiens
  misc_feature: Table A; Target 91239; HLA-C*16:01; TSPAN10; ENSG00000182612; TAA
AASLAGCL

SEQ ID NO: 91240 - protein, 8 aa, Homo sapiens
  misc_feature: Table A; Target 91240; HLA-C*12:03; TSPAN10; ENSG00000182612; TAA
AAYGPGAH

SEQ ID NO: 91241 - protein, 9 aa, Homo sapiens
  misc_feature: Table A; Target 91241; HLA-B*46:01; TSPAN10; ENSG00000182612; TAA
AAYGPGAHG

SEQ ID NO: 91242 - protein, 9 aa, Homo sapiens
  misc_feature: Table A; Target 91242; HLA-C*03:03; TSPAN10; ENSG00000182612; TAA
AAYGPGAHG

SEQ ID NO: 91243 - protein, 9 aa, Homo sapiens
  misc_feature: Table A; Target 91243; HLA-C*03:04; TSPAN10; ENSG00000182612; TAA
AAYGPGAHG

SEQ ID NO: 91244 - protein, 10 aa, Homo sapiens
  misc_feature: Table A; Target 91244; HLA-C*04:01; TSPAN10; ENSG00000182612; TAA
AAYGPGAHGE

SEQ ID NO: 91245 - protein, 10 aa, Homo sapiens
  misc_feature: Table A; Target 91245; HLA-C*06:02; TSPAN10; ENSG00000182612; TAA
AAYGPGAHGE

SEQ ID NO: 91246 - protein, 10 aa, Homo sapiens
  misc_feature: Table A; Target 91246; HLA-C*16:02; TSPAN10; ENSG00000182612; TAA
AAYGPGAHGE

SEQ ID NO: 91247 - protein, 8 aa, Homo sapiens
  misc_feature: Table A; Target 91247; HLA-B*37:01; TSPAN10; ENSG00000182612; TAA
ADAAQRVV

SEQ ID NO: 91248 - protein, 8 aa, Homo sapiens
  misc_feature: Table A; Target 91248; HLA-C*06:02; TSPAN10; ENSG00000182612; TAA
ADAAQRVV

SEQ ID NO: 91249 - protein, 8 aa, Homo sapiens
  misc_feature: Table A; Target 91249; HLA-C*16:01; TSPAN10; ENSG00000182612; TAA
ADAAQRVV

SEQ ID NO: 91250 - protein, 8 aa, Homo sapiens
  misc_feature: Table A; Target 91250; HLA-C*16:02; TSPAN10; ENSG00000182612; TAA
ADAAQRVV

SEQ ID NO: 91251 - protein, 9 aa, Homo sapiens
  misc_feature: Table A; Target 91251; HLA-A*25:01; TSPAN10; ENSG00000182612; TAA
ADAAQRVVY

SEQ ID NO: 91252 - protein, 9 aa, Homo sapiens
  misc_feature: Table A; Target 91252; HLA-A*26:01; TSPAN10; ENSG00000182612; TAA
ADAAQRVVY

SEQ ID NO: 91253 - protein, 9 aa, Homo sapiens
  misc_feature: Table A; Target 91253; HLA-A*29:02; TSPAN10; ENSG00000182612; TAA
ADAAQRVVY

SEQ ID NO: 91254 - protein, 9 aa, Homo sapiens
  misc_feature: Table A; Target 91254; HLA-A*30:01; TSPAN10; ENSG00000182612; TAA
ADAAQRVVY

SEQ ID NO: 91255 - protein, 9 aa, Homo sapiens
  misc_feature: Table A; Target 91255; HLA-A*30:02; TSPAN10; ENSG00000182612; TAA
ADAAQRVVY

SEQ ID NO: 91256 - protein, 9 aa, Homo sapiens
  misc_feature: Table A; Target 91256; HLA-A*32:01; TSPAN10; ENSG00000182612; TAA
ADAAQRVVY

SEQ ID NO: 91257 - protein, 9 aa, Homo sapiens
  misc_feature: Table A; Target 91257; HLA-B*15:01; TSPAN10; ENSG00000182612; TAA
ADAAQRVVY

SEQ ID NO: 91258 - protein, 9 aa, Homo sapiens
  misc_feature: Table A; Target 91258; HLA-B*15:03; TSPAN10; ENSG00000182612; TAA
ADAAQRVVY

SEQ ID NO: 91259 - protein, 9 aa, Homo sapiens
  misc_feature: Table A; Target 91259; HLA-B*18:01; TSPAN10; ENSG00000182612; TAA
ADAAQRVVY

SEQ ID NO: 91260 - protein, 9 aa, Homo sapiens
  misc_feature: Table A; Target 91260; HLA-B*27:02; TSPAN10; ENSG00000182612; TAA
ADAAQRVVY

SEQ ID NO: 91261 - protein, 9 aa, Homo sapiens
  misc_feature: Table A; Target 91261; HLA-B*27:05; TSPAN10; ENSG00000182612; TAA
ADAAQRVVY

SEQ ID NO: 91262 - protein, 9 aa, Homo sapiens
  misc_feature: Table A; Target 91262; HLA-B*35:01; TSPAN10; ENSG00000182612; TAA
ADAAQRVVY

SEQ ID NO: 91263 - protein, 9 aa, Homo sapiens
  misc_feature: Table A; Target 91263; HLA-B*37:01; TSPAN10; ENSG00000182612; TAA
ADAAQRVVY

SEQ ID NO: 91264 - protein, 9 aa, Homo sapiens
  misc_feature: Table A; Target 91264; HLA-B*44:02; TSPAN10; ENSG00000182612; TAA
ADAAQRVVY

SEQ ID NO: 91265 - protein, 9 aa, Homo sapiens
  misc_feature: Table A; Target 91265; HLA-B*44:03; TSPAN10; ENSG00000182612; TAA
ADAAQRVVY

SEQ ID NO: 91266 - protein, 9 aa, Homo sapiens
  misc_feature: Table A; Target 91266; HLA-B*46:01; TSPAN10; ENSG00000182612; TAA
ADAAQRVVY

SEQ ID NO: 91267 - protein, 9 aa, Homo sapiens
  misc_feature: Table A; Target 91267; HLA-C*02:02; TSPAN10; ENSG00000182612; TAA
ADAAQRVVY

SEQ ID NO: 91268 - protein, 9 aa, Homo sapiens
  misc_feature: Table A; Target 91268; HLA-C*04:01; TSPAN10; ENSG00000182612; TAA
ADAAQRVVY

SEQ ID NO: 91269 - protein, 9 aa, Homo sapiens
  misc_feature: Table A; Target 91269; HLA-C*07:01; TSPAN10; ENSG00000182612; TAA
ADAAQRVVY

SEQ ID NO: 91270 - protein, 9 aa, Homo sapiens
  misc_feature: Table A; Target 91270; HLA-C*07:04; TSPAN10; ENSG00000182612; TAA
ADAAQRVVY

SEQ ID NO: 91271 - protein, 9 aa, Homo sapiens
  misc_feature: Table A; Target 91271; HLA-C*12:03; TSPAN10; ENSG00000182612; TAA
ADAAQRVVY

SEQ ID NO: 91272 - protein, 9 aa, Homo sapiens
  misc_feature: Table A; Target 91272; HLA-C*14:02; TSPAN10; ENSG00000182612; TAA
ADAAQRVVY

SEQ ID NO: 91273 - protein, 9 aa, Homo sapiens
  misc_feature: Table A; Target 91273; HLA-C*16:01; TSPAN10; ENSG00000182612; TAA
ADAAQRVVY

SEQ ID NO: 91274 - protein, 9 aa, Homo sapiens
  misc_feature: Table A; Target 91274; HLA-C*16:02; TSPAN10; ENSG00000182612; TAA
ADAAQRVVY

SEQ ID NO: 91275 - protein, 9 aa, Homo sapiens
  misc_feature: Table A; Target 91275; HLA-C*16:04; TSPAN10; ENSG00000182612; TAA
ADAAQRVVY

SEQ ID NO: 91276 - protein, 10 aa, Homo sapiens
  misc_feature: Table A; Target 91276; HLA-B*37:01; TSPAN10; ENSG00000182612; TAA
ADAAQRVVYL

SEQ ID NO: 91277 - protein, 10 aa, Homo sapiens
  misc_feature: Table A; Target 91277; HLA-B*40:02; TSPAN10; ENSG00000182612; TAA
ADAAQRVVYL

SEQ ID NO: 91278 - protein, 10 aa, Homo sapiens
  misc_feature: Table A; Target 91278; HLA-B*44:02; TSPAN10; ENSG00000182612; TAA
ADAAQRVVYL

SEQ ID NO: 91279 - protein, 10 aa, Homo sapiens
  misc_feature: Table A; Target 91279; HLA-C*04:01; TSPAN10; ENSG00000182612; TAA
ADAAQRVVYL

SEQ ID NO: 91280 - protein, 9 aa, Homo sapiens
  misc_feature: Table A; Target 91280; HLA-A*30:01; TSPAN10; ENSG00000182612; TAA
AELLLAARL

SEQ ID NO: 91281 - protein, 9 aa, Homo sapiens
  misc_feature: Table A; Target 91281; HLA-B*18:01; TSPAN10; ENSG00000182612; TAA
AELLLAARL

SEQ ID NO: 91282 - protein, 9 aa, Homo sapiens
  misc_feature: Table A; Target 91282; HLA-B*27:02; TSPAN10; ENSG00000182612; TAA
AELLLAARL

SEQ ID NO: 91283 - protein, 9 aa, Homo sapiens
  misc_feature: Table A; Target 91283; HLA-B*37:01; TSPAN10; ENSG00000182612; TAA
AELLLAARL

SEQ ID NO: 91284 - protein, 9 aa, Homo sapiens
  misc_feature: Table A; Target 91284; HLA-B*40:01; TSPAN10; ENSG00000182612; TAA
AELLLAARL

SEQ ID NO: 91285 - protein, 9 aa, Homo sapiens
  misc_feature: Table A; Target 91285; HLA-B*40:02; TSPAN10; ENSG00000182612; TAA
AELLLAARL

SEQ ID NO: 91286 - protein, 9 aa, Homo sapiens
  misc_feature: Table A; Target 91286; HLA-B*44:02; TSPAN10; ENSG00000182612; TAA
AELLLAARL

SEQ ID NO: 91287 - protein, 9 aa, Homo sapiens
  misc_feature: Table A; Target 91287; HLA-B*44:03; TSPAN10; ENSG00000182612; TAA
AELLLAARL

SEQ ID NO: 91288 - protein, 9 aa, Homo sapiens
  misc_feature: Table A; Target 91288; HLA-B*49:01; TSPAN10; ENSG00000182612; TAA
AELLLAARL

SEQ ID NO: 91289 - protein, 9 aa, Homo sapiens
  misc_feature: Table A; Target 91289; HLA-C*16:04; TSPAN10; ENSG00000182612; TAA
AELLLAARL

SEQ ID NO: 91290 - protein, 10 aa, Homo sapiens
  misc_feature: Table A; Target 91290; HLA-B*44:02; TSPAN10; ENSG00000182612; TAA
AELLLAARLL

SEQ ID NO: 91291 - protein, 10 aa, Homo sapiens
  misc_feature: Table A; Target 91291; HLA-B*44:03; TSPAN10; ENSG00000182612; TAA
AELLLAARLL

SEQ ID NO: 91292 - protein, 8 aa, Homo sapiens
  misc_feature: Table A; Target 91292; HLA-B*37:01; TSPAN10; ENSG00000182612; TAA
AGALVVAL

SEQ ID NO: 91293 - protein, 9 aa, Homo sapiens
  misc_feature: Table A; Target 91293; HLA-A*25:01; TSPAN10; ENSG00000182612; TAA
AGALVVALW

SEQ ID NO: 91294 - protein, 9 aa, Homo sapiens
  misc_feature: Table A; Target 91294; HLA-B*44:02; TSPAN10; ENSG00000182612; TAA
AGALVVALW

SEQ ID NO: 91295 - protein, 9 aa, Homo sapiens
  misc_feature: Table A; Target 91295; HLA-B*44:03; TSPAN10; ENSG00000182612; TAA
AGALVVALW

SEQ ID NO: 91296 - protein, 9 aa, Homo sapiens
  misc_feature: Table A; Target 91296; HLA-B*57:01; TSPAN10; ENSG00000182612; TAA
AGALVVALW

SEQ ID NO: 91297 - protein, 9 aa, Homo sapiens
  misc_feature: Table A; Target 91297; HLA-B*58:01; TSPAN10; ENSG00000182612; TAA
AGALVVALW

SEQ ID NO: 91298 - protein, 9 aa, Homo sapiens
  misc_feature: Table A; Target 91298; HLA-C*16:04; TSPAN10; ENSG00000182612; TAA
AGALVVALW

SEQ ID NO: 91299 - protein, 9 aa, Homo sapiens
  misc_feature: Table A; Target 91299; HLA-A*30:02; TSPAN10; ENSG00000182612; TAA
AGQKPLSVH

SEQ ID NO: 91300 - protein, 10 aa, Homo sapiens
  misc_feature: Table A; Target 91300; HLA-A*31:01; TSPAN10; ENSG00000182612; TAA
AGQKPLSVHR

SEQ ID NO: 91301 - protein, 9 aa, Homo sapiens
  misc_feature: Table A; Target 91301; HLA-B*27:05; TSPAN10; ENSG00000182612; TAA
AHYQDDPDL

SEQ ID NO: 91302 - protein, 9 aa, Homo sapiens
  misc_feature: Table A; Target 91302; HLA-B*38:01; TSPAN10; ENSG00000182612; TAA
AHYQDDPDL

SEQ ID NO: 91303 - protein, 9 aa, Homo sapiens
  misc_feature: Table A; Target 91303; HLA-B*39:01; TSPAN10; ENSG00000182612; TAA
AHYQDDPDL

SEQ ID NO: 91304 - protein, 11 aa, Homo sapiens
  misc_feature: Table A; Target 91304; HLA-B*38:01; TSPAN10; ENSG00000182612; TAA
AHYQDDPDLRF

SEQ ID NO: 91305 - protein, 9 aa, Homo sapiens
  misc_feature: Table A; Target 91305; HLA-A*02:03; TSPAN10; ENSG00000182612; TAA
AIGLWGLAV

SEQ ID NO: 91306 - protein, 9 aa, Homo sapiens
  misc_feature: Table A; Target 91306; HLA-A*02:04; TSPAN10; ENSG00000182612; TAA
AIGLWGLAV

SEQ ID NO: 91307 - protein, 9 aa, Homo sapiens
  misc_feature: Table A; Target 91307; HLA-A*02:03; TSPAN10; ENSG00000182612; TAA
ALAARSGAA

SEQ ID NO: 91308 - protein, 9 aa, Homo sapiens
  misc_feature: Table A; Target 91308; HLA-A*32:01; TSPAN10; ENSG00000182612; TAA
ALAARSGAA

SEQ ID NO: 91309 - protein, 9 aa, Homo sapiens
  misc_feature: Table A; Target 91309; HLA-B*08:01; TSPAN10; ENSG00000182612; TAA
ALAARSGAA

SEQ ID NO: 91310 - protein, 9 aa, Homo sapiens
  misc_feature: Table A; Target 91310; HLA-B*55:01; TSPAN10; ENSG00000182612; TAA
ALAARSGAA

SEQ ID NO: 91311 - protein, 10 aa, Homo sapiens
  misc_feature: Table A; Target 91311; HLA-A*25:01; TSPAN10; ENSG00000182612; TAA
ALAARSGAAY

SEQ ID NO: 91312 - protein, 10 aa, Homo sapiens
  misc_feature: Table A; Target 91312; HLA-A*26:01; TSPAN10; ENSG00000182612; TAA
ALAARSGAAY

SEQ ID NO: 91313 - protein, 10 aa, Homo sapiens
  misc_feature: Table A; Target 91313; HLA-A*29:02; TSPAN10; ENSG00000182612; TAA
ALAARSGAAY

SEQ ID NO: 91314 - protein, 10 aa, Homo sapiens
  misc_feature: Table A; Target 91314; HLA-A*30:02; TSPAN10; ENSG00000182612; TAA
ALAARSGAAY

SEQ ID NO: 91315 - protein, 10 aa, Homo sapiens
  misc_feature: Table A; Target 91315; HLA-A*32:01; TSPAN10; ENSG00000182612; TAA
ALAARSGAAY

SEQ ID NO: 91316 - protein, 10 aa, Homo sapiens
  misc_feature: Table A; Target 91316; HLA-B*15:01; TSPAN10; ENSG00000182612; TAA
ALAARSGAAY

SEQ ID NO: 91317 - protein, 10 aa, Homo sapiens
  misc_feature: Table A; Target 91317; HLA-B*15:03; TSPAN10; ENSG00000182612; TAA
ALAARSGAAY

SEQ ID NO: 91318 - protein, 10 aa, Homo sapiens
  misc_feature: Table A; Target 91318; HLA-B*46:01; TSPAN10; ENSG00000182612; TAA
ALAARSGAAY

SEQ ID NO: 91319 - protein, 10 aa, Homo sapiens
  misc_feature: Table A; Target 91319; HLA-C*07:04; TSPAN10; ENSG00000182612; TAA
ALAARSGAAY

SEQ ID NO: 91320 - protein, 10 aa, Homo sapiens
  misc_feature: Table A; Target 91320; HLA-C*14:02; TSPAN10; ENSG00000182612; TAA
ALAARSGAAY

SEQ ID NO: 91321 - protein, 9 aa, Homo sapiens
  misc_feature: Table A; Target 91321; HLA-A*02:01; TSPAN10; ENSG00000182612; TAA
ALAIGLWGL

SEQ ID NO: 91322 - protein, 9 aa, Homo sapiens
  misc_feature: Table A; Target 91322; HLA-A*02:03; TSPAN10; ENSG00000182612; TAA
ALAIGLWGL

SEQ ID NO: 91323 - protein, 9 aa, Homo sapiens
  misc_feature: Table A; Target 91323; HLA-A*02:04; TSPAN10; ENSG00000182612; TAA
ALAIGLWGL

SEQ ID NO: 91324 - protein, 9 aa, Homo sapiens
  misc_feature: Table A; Target 91324; HLA-A*02:07; TSPAN10; ENSG00000182612; TAA
ALAIGLWGL

SEQ ID NO: 91325 - protein, 11 aa, Homo sapiens
  misc_feature: Table A; Target 91325; HLA-A*02:04; TSPAN10; ENSG00000182612; TAA
ALAIGLWGLAV

SEQ ID NO: 91326 - protein, 9 aa, Homo sapiens
  misc_feature: Table A; Target 91326; HLA-A*02:01; TSPAN10; ENSG00000182612; TAA
ALCENTCLL

SEQ ID NO: 91327 - protein, 9 aa, Homo sapiens
  misc_feature: Table A; Target 91327; HLA-A*02:03; TSPAN10; ENSG00000182612; TAA
ALCENTCLL

SEQ ID NO: 91328 - protein, 9 aa, Homo sapiens
  misc_feature: Table A; Target 91328; HLA-A*02:04; TSPAN10; ENSG00000182612; TAA
ALCENTCLL

SEQ ID NO: 91329 - protein, 9 aa, Homo sapiens
  misc_feature: Table A; Target 91329; HLA-B*55:01; TSPAN10; ENSG00000182612; TAA
ALCENTCLL

SEQ ID NO: 91330 - protein, 9 aa, Homo sapiens
  misc_feature: Table A; Target 91330; HLA-A*02:01; TSPAN10; ENSG00000182612; TAA
ALGGLVVSA

SEQ ID NO: 91331 - protein, 9 aa, Homo sapiens
  misc_feature: Table A; Target 91331; HLA-A*02:03; TSPAN10; ENSG00000182612; TAA
ALGGLVVSA

SEQ ID NO: 91332 - protein, 9 aa, Homo sapiens
  misc_feature: Table A; Target 91332; HLA-A*02:04; TSPAN10; ENSG00000182612; TAA
ALGGLVVSA

SEQ ID NO: 91333 - protein, 9 aa, Homo sapiens
  misc_feature: Table A; Target 91333; HLA-A*02:07; TSPAN10; ENSG00000182612; TAA
ALGGLVVSA

SEQ ID NO: 91334 - protein, 9 aa, Homo sapiens
  misc_feature: Table A; Target 91334; HLA-A*03:02; TSPAN10; ENSG00000182612; TAA
ALGGLVVSA

SEQ ID NO: 91335 - protein, 9 aa, Homo sapiens
  misc_feature: Table A; Target 91335; HLA-B*13:02; TSPAN10; ENSG00000182612; TAA
ALGGLVVSA

SEQ ID NO: 91336 - protein, 9 aa, Homo sapiens
  misc_feature: Table A; Target 91336; HLA-B*55:01; TSPAN10; ENSG00000182612; TAA
ALGGLVVSA

SEQ ID NO: 91337 - protein, 9 aa, Homo sapiens
  misc_feature: Table A; Target 91337; HLA-B*56:01; TSPAN10; ENSG00000182612; TAA
ALGGLVVSA

SEQ ID NO: 91338 - protein, 9 aa, Homo sapiens
  misc_feature: Table A; Target 91338; HLA-C*06:02; TSPAN10; ENSG00000182612; TAA
ALGGLVVSA

SEQ ID NO: 91339 - protein, 10 aa, Homo sapiens
  misc_feature: Table A; Target 91339; HLA-A*02:01; TSPAN10; ENSG00000182612; TAA
ALGGLVVSAA

SEQ ID NO: 91340 - protein, 10 aa, Homo sapiens
  misc_feature: Table A; Target 91340; HLA-A*02:03; TSPAN10; ENSG00000182612; TAA
ALGGLVVSAA

SEQ ID NO: 91341 - protein, 10 aa, Homo sapiens
  misc_feature: Table A; Target 91341; HLA-B*55:01; TSPAN10; ENSG00000182612; TAA
ALGGLVVSAA

SEQ ID NO: 91342 - protein, 10 aa, Homo sapiens
  misc_feature: Table A; Target 91342; HLA-B*56:01; TSPAN10; ENSG00000182612; TAA
ALGGLVVSAA

SEQ ID NO: 91343 - protein, 8 aa, Homo sapiens
  misc_feature: Table A; Target 91343; HLA-A*03:02; TSPAN10; ENSG00000182612; TAA
ALSGTPKK

SEQ ID NO: 91344 - protein, 10 aa, Homo sapiens
  misc_feature: Table A; Target 91344; HLA-C*16:02; TSPAN10; ENSG00000182612; TAA
ALSGTPKKGP

SEQ ID NO: 91345 - protein, 10 aa, Homo sapiens
  misc_feature: Table A; Target 91345; HLA-A*02:07; TSPAN10; ENSG00000182612; TAA
ALWGPLQDSL

SEQ ID NO: 91346 - protein, 9 aa, Homo sapiens
  misc_feature: Table A; Target 91346; HLA-A*26:01; TSPAN10; ENSG00000182612; TAA
ANLAASGGY

SEQ ID NO: 91347 - protein, 9 aa, Homo sapiens
  misc_feature: Table A; Target 91347; HLA-A*29:02; TSPAN10; ENSG00000182612; TAA
ANLAASGGY

SEQ ID NO: 91348 - protein, 9 aa, Homo sapiens
  misc_feature: Table A; Target 91348; HLA-A*30:02; TSPAN10; ENSG00000182612; TAA
ANLAASGGY

SEQ ID NO: 91349 - protein, 9 aa, Homo sapiens
  misc_feature: Table A; Target 91349; HLA-B*15:01; TSPAN10; ENSG00000182612; TAA
ANLAASGGY

SEQ ID NO: 91350 - protein, 9 aa, Homo sapiens
  misc_feature: Table A; Target 91350; HLA-B*15:03; TSPAN10; ENSG00000182612; TAA
ANLAASGGY

SEQ ID NO: 91351 - protein, 9 aa, Homo sapiens
  misc_feature: Table A; Target 91351; HLA-B*39:01; TSPAN10; ENSG00000182612; TAA
ANLAASGGY

SEQ ID NO: 91352 - protein, 9 aa, Homo sapiens
  misc_feature: Table A; Target 91352; HLA-C*01:02; TSPAN10; ENSG00000182612; TAA
ANLAASGGY

SEQ ID NO: 91353 - protein, 9 aa, Homo sapiens
  misc_feature: Table A; Target 91353; HLA-C*14:02; TSPAN10; ENSG00000182612; TAA
ANLAASGGY

SEQ ID NO: 91354 - protein, 9 aa, Homo sapiens
  misc_feature: Table A; Target 91354; HLA-C*16:04; TSPAN10; ENSG00000182612; TAA
ANLAASGGY

SEQ ID NO: 91355 - protein, 10 aa, Homo sapiens
  misc_feature: Table A; Target 91355; HLA-B*07:02; TSPAN10; ENSG00000182612; TAA
APSLSPGSSC

SEQ ID NO: 91356 - protein, 10 aa, Homo sapiens
  misc_feature: Table A; Target 91356; HLA-B*56:01; TSPAN10; ENSG00000182612; TAA
APSLSPGSSC

SEQ ID NO: 91357 - protein, 10 aa, Homo sapiens
  misc_feature: Table A; Target 91357; HLA-C*07:02; TSPAN10; ENSG00000182612; TAA
APSLSPGSSC

SEQ ID NO: 91358 - protein, 11 aa, Homo sapiens
  misc_feature: Table A; Target 91358; HLA-B*56:01; TSPAN10; ENSG00000182612; TAA
APSLSPGSSCV

SEQ ID NO: 91359 - protein, 9 aa, Homo sapiens
  misc_feature: Table A; Target 91359; HLA-C*06:02; TSPAN10; ENSG00000182612; TAA
ARLLGALAA

SEQ ID NO: 91360 - protein, 10 aa, Homo sapiens
  misc_feature: Table A; Target 91360; HLA-B*27:02; TSPAN10; ENSG00000182612; TAA
ARLLGALAAR

SEQ ID NO: 91361 - protein, 10 aa, Homo sapiens
  misc_feature: Table A; Target 91361; HLA-B*27:05; TSPAN10; ENSG00000182612; TAA
ARLLGALAAR

SEQ ID NO: 91362 - protein, 9 aa, Homo sapiens
  misc_feature: Table A; Target 91362; HLA-B*27:05; TSPAN10; ENSG00000182612; TAA
ARSGAAYGP

SEQ ID NO: 91363 - protein, 9 aa, Homo sapiens
  misc_feature: Table A; Target 91363; HLA-C*06:02; TSPAN10; ENSG00000182612; TAA
ARSGAAYGP

SEQ ID NO: 91364 - protein, 9 aa, Homo sapiens
  misc_feature: Table A; Target 91364; HLA-A*03:02; TSPAN10; ENSG00000182612; TAA
ASGGYAIAV

SEQ ID NO: 91365 - protein, 9 aa, Homo sapiens
  misc_feature: Table A; Target 91365; HLA-A*11:01; TSPAN10; ENSG00000182612; TAA
ASGGYAIAV

SEQ ID NO: 91366 - protein, 9 aa, Homo sapiens
  misc_feature: Table A; Target 91366; HLA-B*13:02; TSPAN10; ENSG00000182612; TAA
ASGGYAIAV

SEQ ID NO: 91367 - protein, 9 aa, Homo sapiens
  misc_feature: Table A; Target 91367; HLA-B*40:02; TSPAN10; ENSG00000182612; TAA
ASGGYAIAV

SEQ ID NO: 91368 - protein, 9 aa, Homo sapiens
  misc_feature: Table A; Target 91368; HLA-B*56:01; TSPAN10; ENSG00000182612; TAA
ASGGYAIAV

SEQ ID NO: 91369 - protein, 9 aa, Homo sapiens
  misc_feature: Table A; Target 91369; HLA-C*01:02; TSPAN10; ENSG00000182612; TAA
ASGGYAIAV

SEQ ID NO: 91370 - protein, 9 aa, Homo sapiens
  misc_feature: Table A; Target 91370; HLA-C*06:02; TSPAN10; ENSG00000182612; TAA
ASGGYAIAV

SEQ ID NO: 91371 - protein, 9 aa, Homo sapiens
  misc_feature: Table A; Target 91371; HLA-C*12:03; TSPAN10; ENSG00000182612; TAA
ASGGYAIAV

SEQ ID NO: 91372 - protein, 9 aa, Homo sapiens
  misc_feature: Table A; Target 91372; HLA-C*16:02; TSPAN10; ENSG00000182612; TAA
ASGGYAIAV

SEQ ID NO: 91373 - protein, 9 aa, Homo sapiens
  misc_feature: Table A; Target 91373; HLA-C*16:04; TSPAN10; ENSG00000182612; TAA
ASGGYAIAV

SEQ ID NO: 91374 - protein, 9 aa, Homo sapiens
  misc_feature: Table A; Target 91374; HLA-B*58:01; TSPAN10; ENSG00000182612; TAA
ASVNDQCGF

SEQ ID NO: 91375 - protein, 9 aa, Homo sapiens
  misc_feature: Table A; Target 91375; HLA-C*16:04; TSPAN10; ENSG00000182612; TAA
ASVNDQCGF

SEQ ID NO: 91376 - protein, 11 aa, Homo sapiens
  misc_feature: Table A; Target 91376; HLA-A*01:01; TSPAN10; ENSG00000182612; TAA
ASYQDWQQNLY

SEQ ID NO: 91377 - protein, 8 aa, Homo sapiens
  misc_feature: Table A; Target 91377; HLA-B*13:02; TSPAN10; ENSG00000182612; TAA
AVAGALVV

SEQ ID NO: 91378 - protein, 8 aa, Homo sapiens
  misc_feature: Table A; Target 91378; HLA-B*37:01; TSPAN10; ENSG00000182612; TAA
AVAGALVV

SEQ ID NO: 91379 - protein, 8 aa, Homo sapiens
  misc_feature: Table A; Target 91379; HLA-B*56:01; TSPAN10; ENSG00000182612; TAA
AVAGALVV

SEQ ID NO: 91380 - protein, 8 aa, Homo sapiens
  misc_feature: Table A; Target 91380; HLA-C*02:02; TSPAN10; ENSG00000182612; TAA
AVAGALVV

SEQ ID NO: 91381 - protein, 8 aa, Homo sapiens
  misc_feature: Table A; Target 91381; HLA-C*06:02; TSPAN10; ENSG00000182612; TAA
AVAGALVV

SEQ ID NO: 91382 - protein, 8 aa, Homo sapiens
  misc_feature: Table A; Target 91382; HLA-C*12:03; TSPAN10; ENSG00000182612; TAA
AVAGALVV

SEQ ID NO: 91383 - protein, 9 aa, Homo sapiens
  misc_feature: Table A; Target 91383; HLA-B*15:01; TSPAN10; ENSG00000182612; TAA
AVAGALVVA

SEQ ID NO: 91384 - protein, 9 aa, Homo sapiens
  misc_feature: Table A; Target 91384; HLA-B*55:01; TSPAN10; ENSG00000182612; TAA
AVAGALVVA

SEQ ID NO: 91385 - protein, 9 aa, Homo sapiens
  misc_feature: Table A; Target 91385; HLA-B*56:01; TSPAN10; ENSG00000182612; TAA
AVAGALVVA

SEQ ID NO: 91386 - protein, 10 aa, Homo sapiens
  misc_feature: Table A; Target 91386; HLA-A*25:01; TSPAN10; ENSG00000182612; TAA
AVAGALVVAL

SEQ ID NO: 91387 - protein, 10 aa, Homo sapiens
  misc_feature: Table A; Target 91387; HLA-C*07:06; TSPAN10; ENSG00000182612; TAA
AVAGALVVAL

SEQ ID NO: 91388 - protein, 11 aa, Homo sapiens
  misc_feature: Table A; Target 91388; HLA-A*25:01; TSPAN10; ENSG00000182612; TAA
AVAGALVVALW

SEQ ID NO: 91389 - protein, 11 aa, Homo sapiens
  misc_feature: Table A; Target 91389; HLA-A*26:01; TSPAN10; ENSG00000182612; TAA
AVAGALVVALW

SEQ ID NO: 91390 - protein, 11 aa, Homo sapiens
  misc_feature: Table A; Target 91390; HLA-A*29:02; TSPAN10; ENSG00000182612; TAA
AVAGALVVALW

SEQ ID NO: 91391 - protein, 11 aa, Homo sapiens
  misc_feature: Table A; Target 91391; HLA-A*30:02; TSPAN10; ENSG00000182612; TAA
AVAGALVVALW

SEQ ID NO: 91392 - protein, 11 aa, Homo sapiens
  misc_feature: Table A; Target 91392; HLA-B*44:02; TSPAN10; ENSG00000182612; TAA
AVAGALVVALW

SEQ ID NO: 91393 - protein, 11 aa, Homo sapiens
  misc_feature: Table A; Target 91393; HLA-B*44:03; TSPAN10; ENSG00000182612; TAA
AVAGALVVALW

SEQ ID NO: 91394 - protein, 11 aa, Homo sapiens
  misc_feature: Table A; Target 91394; HLA-B*57:01; TSPAN10; ENSG00000182612; TAA
AVAGALVVALW

SEQ ID NO: 91395 - protein, 11 aa, Homo sapiens
  misc_feature: Table A; Target 91395; HLA-B*58:01; TSPAN10; ENSG00000182612; TAA
AVAGALVVALW

SEQ ID NO: 91396 - protein, 10 aa, Homo sapiens
  misc_feature: Table A; Target 91396; HLA-B*07:02; TSPAN10; ENSG00000182612; TAA
AVKGSLGSDL

SEQ ID NO: 91397 - protein, 10 aa, Homo sapiens
  misc_feature: Table A; Target 91397; HLA-C*01:02; TSPAN10; ENSG00000182612; TAA
AVKGSLGSDL

SEQ ID NO: 91398 - protein, 10 aa, Homo sapiens
  misc_feature: Table A; Target 91398; HLA-C*07:02; TSPAN10; ENSG00000182612; TAA
AVKGSLGSDL

SEQ ID NO: 91399 - protein, 9 aa, Homo sapiens
  misc_feature: Table A; Target 91399; HLA-C*14:02; TSPAN10; ENSG00000182612; TAA
AYGPGAHGE

SEQ ID NO: 91400 - protein, 9 aa, Homo sapiens
  misc_feature: Table A; Target 91400; HLA-B*54:01; TSPAN10; ENSG00000182612; TAA
CPPETKHQA

SEQ ID NO: 91401 - protein, 9 aa, Homo sapiens
  misc_feature: Table A; Target 91401; HLA-B*56:01; TSPAN10; ENSG00000182612; TAA
CPPETKHQA

SEQ ID NO: 91402 - protein, 10 aa, Homo sapiens
  misc_feature: Table A; Target 91402; HLA-B*07:02; TSPAN10; ENSG00000182612; TAA
CPPETKHQAL

SEQ ID NO: 91403 - protein, 10 aa, Homo sapiens
  misc_feature: Table A; Target 91403; HLA-B*08:01; TSPAN10; ENSG00000182612; TAA
CPPETKHQAL

SEQ ID NO: 91404 - protein, 10 aa, Homo sapiens
  misc_feature: Table A; Target 91404; HLA-B*35:03; TSPAN10; ENSG00000182612; TAA
CPPETKHQAL

SEQ ID NO: 91405 - protein, 10 aa, Homo sapiens
  misc_feature: Table A; Target 91405; HLA-C*01:02; TSPAN10; ENSG00000182612; TAA
CPPETKHQAL

SEQ ID NO: 91406 - protein, 10 aa, Homo sapiens
  misc_feature: Table A; Target 91406; HLA-C*07:02; TSPAN10; ENSG00000182612; TAA
CPPETKHQAL

SEQ ID NO: 91407 - protein, 9 aa, Homo sapiens
  misc_feature: Table A; Target 91407; HLA-C*16:02; TSPAN10; ENSG00000182612; TAA
CSSPGVQAC

SEQ ID NO: 91408 - protein, 8 aa, Homo sapiens
  misc_feature: Table A; Target 91408; HLA-A*25:01; TSPAN10; ENSG00000182612; TAA
DAAQRVVY

SEQ ID NO: 91409 - protein, 8 aa, Homo sapiens
  misc_feature: Table A; Target 91409; HLA-A*26:01; TSPAN10; ENSG00000182612; TAA
DAAQRVVY

SEQ ID NO: 91410 - protein, 8 aa, Homo sapiens
  misc_feature: Table A; Target 91410; HLA-B*08:01; TSPAN10; ENSG00000182612; TAA
DAAQRVVY

SEQ ID NO: 91411 - protein, 8 aa, Homo sapiens
  misc_feature: Table A; Target 91411; HLA-B*15:03; TSPAN10; ENSG00000182612; TAA
DAAQRVVY

SEQ ID NO: 91412 - protein, 8 aa, Homo sapiens
  misc_feature: Table A; Target 91412; HLA-B*18:01; TSPAN10; ENSG00000182612; TAA
DAAQRVVY

SEQ ID NO: 91413 - protein, 8 aa, Homo sapiens
  misc_feature: Table A; Target 91413; HLA-B*35:01; TSPAN10; ENSG00000182612; TAA
DAAQRVVY

SEQ ID NO: 91414 - protein, 8 aa, Homo sapiens
  misc_feature: Table A; Target 91414; HLA-B*51:01; TSPAN10; ENSG00000182612; TAA
DAAQRVVY

SEQ ID NO: 91415 - protein, 8 aa, Homo sapiens
  misc_feature: Table A; Target 91415; HLA-B*55:01; TSPAN10; ENSG00000182612; TAA
DAAQRVVY

SEQ ID NO: 91416 - protein, 8 aa, Homo sapiens
  misc_feature: Table A; Target 91416; HLA-C*03:03; TSPAN10; ENSG00000182612; TAA
DAAQRVVY

SEQ ID NO: 91417 - protein, 8 aa, Homo sapiens
  misc_feature: Table A; Target 91417; HLA-C*07:01; TSPAN10; ENSG00000182612; TAA
DAAQRVVY

SEQ ID NO: 91418 - protein, 8 aa, Homo sapiens
  misc_feature: Table A; Target 91418; HLA-C*12:03; TSPAN10; ENSG00000182612; TAA
DAAQRVVY

SEQ ID NO: 91419 - protein, 8 aa, Homo sapiens
  misc_feature: Table A; Target 91419; HLA-C*16:01; TSPAN10; ENSG00000182612; TAA
DAAQRVVY

SEQ ID NO: 91420 - protein, 8 aa, Homo sapiens
  misc_feature: Table A; Target 91420; HLA-C*16:02; TSPAN10; ENSG00000182612; TAA
DAAQRVVY

SEQ ID NO: 91421 - protein, 9 aa, Homo sapiens
  misc_feature: Table A; Target 91421; HLA-A*25:01; TSPAN10; ENSG00000182612; TAA
DAAQRVVYL

SEQ ID NO: 91422 - protein, 9 aa, Homo sapiens
  misc_feature: Table A; Target 91422; HLA-A*26:01; TSPAN10; ENSG00000182612; TAA
DAAQRVVYL

SEQ ID NO: 91423 - protein, 9 aa, Homo sapiens
  misc_feature: Table A; Target 91423; HLA-A*33:01; TSPAN10; ENSG00000182612; TAA
DAAQRVVYL

SEQ ID NO: 91424 - protein, 9 aa, Homo sapiens
  misc_feature: Table A; Target 91424; HLA-A*33:03; TSPAN10; ENSG00000182612; TAA
DAAQRVVYL

SEQ ID NO: 91425 - protein, 9 aa, Homo sapiens
  misc_feature: Table A; Target 91425; HLA-A*68:01; TSPAN10; ENSG00000182612; TAA
DAAQRVVYL

SEQ ID NO: 91426 - protein, 9 aa, Homo sapiens
  misc_feature: Table A; Target 91426; HLA-A*68:02; TSPAN10; ENSG00000182612; TAA
DAAQRVVYL

SEQ ID NO: 91427 - protein, 9 aa, Homo sapiens
  misc_feature: Table A; Target 91427; HLA-B*08:01; TSPAN10; ENSG00000182612; TAA
DAAQRVVYL

SEQ ID NO: 91428 - protein, 9 aa, Homo sapiens
  misc_feature: Table A; Target 91428; HLA-B*18:01; TSPAN10; ENSG00000182612; TAA
DAAQRVVYL

SEQ ID NO: 91429 - protein, 9 aa, Homo sapiens
  misc_feature: Table A; Target 91429; HLA-B*27:05; TSPAN10; ENSG00000182612; TAA
DAAQRVVYL

SEQ ID NO: 91430 - protein, 9 aa, Homo sapiens
  misc_feature: Table A; Target 91430; HLA-B*35:01; TSPAN10; ENSG00000182612; TAA
DAAQRVVYL

SEQ ID NO: 91431 - protein, 9 aa, Homo sapiens
  misc_feature: Table A; Target 91431; HLA-B*35:03; TSPAN10; ENSG00000182612; TAA
DAAQRVVYL

SEQ ID NO: 91432 - protein, 9 aa, Homo sapiens
  misc_feature: Table A; Target 91432; HLA-B*37:01; TSPAN10; ENSG00000182612; TAA
DAAQRVVYL

SEQ ID NO: 91433 - protein, 9 aa, Homo sapiens
  misc_feature: Table A; Target 91433; HLA-B*38:01; TSPAN10; ENSG00000182612; TAA
DAAQRVVYL

SEQ ID NO: 91434 - protein, 9 aa, Homo sapiens
  misc_feature: Table A; Target 91434; HLA-B*39:01; TSPAN10; ENSG00000182612; TAA
DAAQRVVYL

SEQ ID NO: 91435 - protein, 9 aa, Homo sapiens
  misc_feature: Table A; Target 91435; HLA-B*40:02; TSPAN10; ENSG00000182612; TAA
DAAQRVVYL

SEQ ID NO: 91436 - protein, 9 aa, Homo sapiens
  misc_feature: Table A; Target 91436; HLA-B*51:01; TSPAN10; ENSG00000182612; TAA
DAAQRVVYL

SEQ ID NO: 91437 - protein, 9 aa, Homo sapiens
  misc_feature: Table A; Target 91437; HLA-C*01:02; TSPAN10; ENSG00000182612; TAA
DAAQRVVYL

SEQ ID NO: 91438 - protein, 9 aa, Homo sapiens
  misc_feature: Table A; Target 91438; HLA-C*02:02; TSPAN10; ENSG00000182612; TAA
DAAQRVVYL

SEQ ID NO: 91439 - protein, 9 aa, Homo sapiens
  misc_feature: Table A; Target 91439; HLA-C*05:01; TSPAN10; ENSG00000182612; TAA
DAAQRVVYL

SEQ ID NO: 91440 - protein, 9 aa, Homo sapiens
  misc_feature: Table A; Target 91440; HLA-C*06:02; TSPAN10; ENSG00000182612; TAA
DAAQRVVYL

SEQ ID NO: 91441 - protein, 9 aa, Homo sapiens
  misc_feature: Table A; Target 91441; HLA-C*07:01; TSPAN10; ENSG00000182612; TAA
DAAQRVVYL

SEQ ID NO: 91442 - protein, 9 aa, Homo sapiens
  misc_feature: Table A; Target 91442; HLA-C*07:04; TSPAN10; ENSG00000182612; TAA
DAAQRVVYL

SEQ ID NO: 91443 - protein, 9 aa, Homo sapiens
  misc_feature: Table A; Target 91443; HLA-C*07:06; TSPAN10; ENSG00000182612; TAA
DAAQRVVYL

SEQ ID NO: 91444 - protein, 9 aa, Homo sapiens
  misc_feature: Table A; Target 91444; HLA-C*12:03; TSPAN10; ENSG00000182612; TAA
DAAQRVVYL

SEQ ID NO: 91445 - protein, 9 aa, Homo sapiens
  misc_feature: Table A; Target 91445; HLA-C*16:01; TSPAN10; ENSG00000182612; TAA
DAAQRVVYL

SEQ ID NO: 91446 - protein, 9 aa, Homo sapiens
  misc_feature: Table A; Target 91446; HLA-C*16:02; TSPAN10; ENSG00000182612; TAA
DAAQRVVYL

SEQ ID NO: 91447 - protein, 8 aa, Homo sapiens
  misc_feature: Table A; Target 91447; HLA-B*51:01; TSPAN10; ENSG00000182612; TAA
DADAAQRV

SEQ ID NO: 91448 - protein, 8 aa, Homo sapiens
  misc_feature: Table A; Target 91448; HLA-C*05:01; TSPAN10; ENSG00000182612; TAA
DADAAQRV

SEQ ID NO: 91449 - protein, 9 aa, Homo sapiens
  misc_feature: Table A; Target 91449; HLA-A*68:02; TSPAN10; ENSG00000182612; TAA
DADAAQRVV

SEQ ID NO: 91450 - protein, 9 aa, Homo sapiens
  misc_feature: Table A; Target 91450; HLA-B*07:02; TSPAN10; ENSG00000182612; TAA
DADAAQRVV

SEQ ID NO: 91451 - protein, 9 aa, Homo sapiens
  misc_feature: Table A; Target 91451; HLA-B*08:01; TSPAN10; ENSG00000182612; TAA
DADAAQRVV

SEQ ID NO: 91452 - protein, 9 aa, Homo sapiens
  misc_feature: Table A; Target 91452; HLA-B*35:01; TSPAN10; ENSG00000182612; TAA
DADAAQRVV

SEQ ID NO: 91453 - protein, 9 aa, Homo sapiens
  misc_feature: Table A; Target 91453; HLA-B*35:03; TSPAN10; ENSG00000182612; TAA
DADAAQRVV

SEQ ID NO: 91454 - protein, 9 aa, Homo sapiens
  misc_feature: Table A; Target 91454; HLA-B*38:01; TSPAN10; ENSG00000182612; TAA
DADAAQRVV

SEQ ID NO: 91455 - protein, 9 aa, Homo sapiens
  misc_feature: Table A; Target 91455; HLA-B*39:01; TSPAN10; ENSG00000182612; TAA
DADAAQRVV

SEQ ID NO: 91456 - protein, 9 aa, Homo sapiens
  misc_feature: Table A; Target 91456; HLA-B*51:01; TSPAN10; ENSG00000182612; TAA
DADAAQRVV

SEQ ID NO: 91457 - protein, 9 aa, Homo sapiens
  misc_feature: Table A; Target 91457; HLA-B*54:01; TSPAN10; ENSG00000182612; TAA
DADAAQRVV

SEQ ID NO: 91458 - protein, 9 aa, Homo sapiens
  misc_feature: Table A; Target 91458; HLA-B*55:01; TSPAN10; ENSG00000182612; TAA
DADAAQRVV

SEQ ID NO: 91459 - protein, 9 aa, Homo sapiens
  misc_feature: Table A; Target 91459; HLA-C*01:02; TSPAN10; ENSG00000182612; TAA
DADAAQRVV

SEQ ID NO: 91460 - protein, 9 aa, Homo sapiens
  misc_feature: Table A; Target 91460; HLA-C*02:02; TSPAN10; ENSG00000182612; TAA
DADAAQRVV

SEQ ID NO: 91461 - protein, 9 aa, Homo sapiens
  misc_feature: Table A; Target 91461; HLA-C*03:03; TSPAN10; ENSG00000182612; TAA
DADAAQRVV

SEQ ID NO: 91462 - protein, 9 aa, Homo sapiens
  misc_feature: Table A; Target 91462; HLA-C*03:04; TSPAN10; ENSG00000182612; TAA
DADAAQRVV

SEQ ID NO: 91463 - protein, 9 aa, Homo sapiens
  misc_feature: Table A; Target 91463; HLA-C*05:01; TSPAN10; ENSG00000182612; TAA
DADAAQRVV

SEQ ID NO: 91464 - protein, 9 aa, Homo sapiens
  misc_feature: Table A; Target 91464; HLA-C*06:02; TSPAN10; ENSG00000182612; TAA
DADAAQRVV

SEQ ID NO: 91465 - protein, 9 aa, Homo sapiens
  misc_feature: Table A; Target 91465; HLA-C*07:01; TSPAN10; ENSG00000182612; TAA
DADAAQRVV

SEQ ID NO: 91466 - protein, 9 aa, Homo sapiens
  misc_feature: Table A; Target 91466; HLA-C*07:06; TSPAN10; ENSG00000182612; TAA
DADAAQRVV

SEQ ID NO: 91467 - protein, 9 aa, Homo sapiens
  misc_feature: Table A; Target 91467; HLA-C*12:03; TSPAN10; ENSG00000182612; TAA
DADAAQRVV

SEQ ID NO: 91468 - protein, 9 aa, Homo sapiens
  misc_feature: Table A; Target 91468; HLA-C*16:01; TSPAN10; ENSG00000182612; TAA
DADAAQRVV

SEQ ID NO: 91469 - protein, 9 aa, Homo sapiens
  misc_feature: Table A; Target 91469; HLA-C*16:02; TSPAN10; ENSG00000182612; TAA
DADAAQRVV

SEQ ID NO: 91470 - protein, 10 aa, Homo sapiens
  misc_feature: Table A; Target 91470; HLA-A*01:01; TSPAN10; ENSG00000182612; TAA
DADAAQRVVY

SEQ ID NO: 91471 - protein, 10 aa, Homo sapiens
  misc_feature: Table A; Target 91471; HLA-A*25:01; TSPAN10; ENSG00000182612; TAA
DADAAQRVVY

SEQ ID NO: 91472 - protein, 10 aa, Homo sapiens
  misc_feature: Table A; Target 91472; HLA-A*26:01; TSPAN10; ENSG00000182612; TAA
DADAAQRVVY

SEQ ID NO: 91473 - protein, 10 aa, Homo sapiens
  misc_feature: Table A; Target 91473; HLA-A*33:01; TSPAN10; ENSG00000182612; TAA
DADAAQRVVY

SEQ ID NO: 91474 - protein, 10 aa, Homo sapiens
  misc_feature: Table A; Target 91474; HLA-A*33:03; TSPAN10; ENSG00000182612; TAA
DADAAQRVVY

SEQ ID NO: 91475 - protein, 10 aa, Homo sapiens
  misc_feature: Table A; Target 91475; HLA-A*68:01; TSPAN10; ENSG00000182612; TAA
DADAAQRVVY

SEQ ID NO: 91476 - protein, 10 aa, Homo sapiens
  misc_feature: Table A; Target 91476; HLA-B*15:01; TSPAN10; ENSG00000182612; TAA
DADAAQRVVY

SEQ ID NO: 91477 - protein, 10 aa, Homo sapiens
  misc_feature: Table A; Target 91477; HLA-B*15:03; TSPAN10; ENSG00000182612; TAA
DADAAQRVVY

SEQ ID NO: 91478 - protein, 10 aa, Homo sapiens
  misc_feature: Table A; Target 91478; HLA-B*18:01; TSPAN10; ENSG00000182612; TAA
DADAAQRVVY

SEQ ID NO: 91479 - protein, 10 aa, Homo sapiens
  misc_feature: Table A; Target 91479; HLA-B*35:01; TSPAN10; ENSG00000182612; TAA
DADAAQRVVY

SEQ ID NO: 91480 - protein, 10 aa, Homo sapiens
  misc_feature: Table A; Target 91480; HLA-B*35:03; TSPAN10; ENSG00000182612; TAA
DADAAQRVVY

SEQ ID NO: 91481 - protein, 10 aa, Homo sapiens
  misc_feature: Table A; Target 91481; HLA-B*38:01; TSPAN10; ENSG00000182612; TAA
DADAAQRVVY

SEQ ID NO: 91482 - protein, 10 aa, Homo sapiens
  misc_feature: Table A; Target 91482; HLA-B*39:01; TSPAN10; ENSG00000182612; TAA
DADAAQRVVY

SEQ ID NO: 91483 - protein, 10 aa, Homo sapiens
  misc_feature: Table A; Target 91483; HLA-B*44:02; TSPAN10; ENSG00000182612; TAA
DADAAQRVVY

SEQ ID NO: 91484 - protein, 10 aa, Homo sapiens
  misc_feature: Table A; Target 91484; HLA-B*44:03; TSPAN10; ENSG00000182612; TAA
DADAAQRVVY

SEQ ID NO: 91485 - protein, 10 aa, Homo sapiens
  misc_feature: Table A; Target 91485; HLA-B*46:01; TSPAN10; ENSG00000182612; TAA
DADAAQRVVY

SEQ ID NO: 91486 - protein, 10 aa, Homo sapiens
  misc_feature: Table A; Target 91486; HLA-B*51:01; TSPAN10; ENSG00000182612; TAA
DADAAQRVVY

SEQ ID NO: 91487 - protein, 10 aa, Homo sapiens
  misc_feature: Table A; Target 91487; HLA-B*55:01; TSPAN10; ENSG00000182612; TAA
DADAAQRVVY

SEQ ID NO: 91488 - protein, 10 aa, Homo sapiens
  misc_feature: Table A; Target 91488; HLA-C*02:02; TSPAN10; ENSG00000182612; TAA
DADAAQRVVY

SEQ ID NO: 91489 - protein, 10 aa, Homo sapiens
  misc_feature: Table A; Target 91489; HLA-C*03:03; TSPAN10; ENSG00000182612; TAA
DADAAQRVVY

SEQ ID NO: 91490 - protein, 10 aa, Homo sapiens
  misc_feature: Table A; Target 91490; HLA-C*03:04; TSPAN10; ENSG00000182612; TAA
DADAAQRVVY

SEQ ID NO: 91491 - protein, 10 aa, Homo sapiens
  misc_feature: Table A; Target 91491; HLA-C*04:01; TSPAN10; ENSG00000182612; TAA
DADAAQRVVY

SEQ ID NO: 91492 - protein, 10 aa, Homo sapiens
  misc_feature: Table A; Target 91492; HLA-C*05:01; TSPAN10; ENSG00000182612; TAA
DADAAQRVVY

SEQ ID NO: 91493 - protein, 10 aa, Homo sapiens
  misc_feature: Table A; Target 91493; HLA-C*07:01; TSPAN10; ENSG00000182612; TAA
DADAAQRVVY

SEQ ID NO: 91494 - protein, 10 aa, Homo sapiens
  misc_feature: Table A; Target 91494; HLA-C*07:04; TSPAN10; ENSG00000182612; TAA
DADAAQRVVY

SEQ ID NO: 91495 - protein, 10 aa, Homo sapiens
  misc_feature: Table A; Target 91495; HLA-C*07:06; TSPAN10; ENSG00000182612; TAA
DADAAQRVVY

SEQ ID NO: 91496 - protein, 10 aa, Homo sapiens
  misc_feature: Table A; Target 91496; HLA-C*12:03; TSPAN10; ENSG00000182612; TAA
DADAAQRVVY

SEQ ID NO: 91497 - protein, 10 aa, Homo sapiens
  misc_feature: Table A; Target 91497; HLA-C*16:01; TSPAN10; ENSG00000182612; TAA
DADAAQRVVY

SEQ ID NO: 91498 - protein, 10 aa, Homo sapiens
  misc_feature: Table A; Target 91498; HLA-C*16:02; TSPAN10; ENSG00000182612; TAA
DADAAQRVVY

SEQ ID NO: 91499 - protein, 10 aa, Homo sapiens
  misc_feature: Table A; Target 91499; HLA-C*16:04; TSPAN10; ENSG00000182612; TAA
DADAAQRVVY

SEQ ID NO: 91500 - protein, 11 aa, Homo sapiens
  misc_feature: Table A; Target 91500; HLA-A*33:01; TSPAN10; ENSG00000182612; TAA
DADAAQRVVYL

SEQ ID NO: 91501 - protein, 11 aa, Homo sapiens
  misc_feature: Table A; Target 91501; HLA-A*68:01; TSPAN10; ENSG00000182612; TAA
DADAAQRVVYL

SEQ ID NO: 91502 - protein, 11 aa, Homo sapiens
  misc_feature: Table A; Target 91502; HLA-B*38:01; TSPAN10; ENSG00000182612; TAA
DADAAQRVVYL

SEQ ID NO: 91503 - protein, 11 aa, Homo sapiens
  misc_feature: Table A; Target 91503; HLA-C*05:01; TSPAN10; ENSG00000182612; TAA
DADAAQRVVYL

SEQ ID NO: 91504 - protein, 8 aa, Homo sapiens
  misc_feature: Table A; Target 91504; HLA-B*08:01; TSPAN10; ENSG00000182612; TAA
DPDLRFLL

SEQ ID NO: 91505 - protein, 8 aa, Homo sapiens
  misc_feature: Table A; Target 91505; HLA-B*07:02; TSPAN10; ENSG00000182612; TAA
DPMLGLAL

SEQ ID NO: 91506 - protein, 8 aa, Homo sapiens
  misc_feature: Table A; Target 91506; HLA-B*08:01; TSPAN10; ENSG00000182612; TAA
DPMLGLAL

SEQ ID NO: 91507 - protein, 8 aa, Homo sapiens
  misc_feature: Table A; Target 91507; HLA-B*35:01; TSPAN10; ENSG00000182612; TAA
DPMLGLAL

SEQ ID NO: 91508 - protein, 8 aa, Homo sapiens
  misc_feature: Table A; Target 91508; HLA-B*35:03; TSPAN10; ENSG00000182612; TAA
DPMLGLAL

SEQ ID NO: 91509 - protein, 8 aa, Homo sapiens
  misc_feature: Table A; Target 91509; HLA-B*51:01; TSPAN10; ENSG00000182612; TAA
DPMLGLAL

SEQ ID NO: 91510 - protein, 9 aa, Homo sapiens
  misc_feature: Table A; Target 91510; HLA-B*07:02; TSPAN10; ENSG00000182612; TAA
DPREDGASV

SEQ ID NO: 91511 - protein, 9 aa, Homo sapiens
  misc_feature: Table A; Target 91511; HLA-B*35:03; TSPAN10; ENSG00000182612; TAA
DPREDGASV

SEQ ID NO: 91512 - protein, 9 aa, Homo sapiens
  misc_feature: Table A; Target 91512; HLA-B*51:01; TSPAN10; ENSG00000182612; TAA
DPREDGASV

SEQ ID NO: 91513 - protein, 9 aa, Homo sapiens
  misc_feature: Table A; Target 91513; HLA-C*07:02; TSPAN10; ENSG00000182612; TAA
DPREDGASV

SEQ ID NO: 91514 - protein, 8 aa, Homo sapiens
  misc_feature: Table A; Target 91514; HLA-C*07:01; TSPAN10; ENSG00000182612; TAA
DQCGFGVL

SEQ ID NO: 91515 - protein, 9 aa, Homo sapiens
  misc_feature: Table A; Target 91515; HLA-A*33:01; TSPAN10; ENSG00000182612; TAA
DQCGFGVLR

SEQ ID NO: 91516 - protein, 9 aa, Homo sapiens
  misc_feature: Table A; Target 91516; HLA-A*33:03; TSPAN10; ENSG00000182612; TAA
DQCGFGVLR

SEQ ID NO: 91517 - protein, 9 aa, Homo sapiens
  misc_feature: Table A; Target 91517; HLA-A*68:01; TSPAN10; ENSG00000182612; TAA
DQCGFGVLR

SEQ ID NO: 91518 - protein, 9 aa, Homo sapiens
  misc_feature: Table A; Target 91518; HLA-C*07:06; TSPAN10; ENSG00000182612; TAA
DQCGFGVLR

SEQ ID NO: 91519 - protein, 8 aa, Homo sapiens
  misc_feature: Table A; Target 91519; HLA-A*33:01; TSPAN10; ENSG00000182612; TAA
DSLEHTLR

SEQ ID NO: 91520 - protein, 8 aa, Homo sapiens
  misc_feature: Table A; Target 91520; HLA-A*33:03; TSPAN10; ENSG00000182612; TAA
DSLEHTLR

SEQ ID NO: 91521 - protein, 9 aa, Homo sapiens
  misc_feature: Table A; Target 91521; HLA-A*68:02; TSPAN10; ENSG00000182612; TAA
DSLEHTLRV

SEQ ID NO: 91522 - protein, 9 aa, Homo sapiens
  misc_feature: Table A; Target 91522; HLA-B*51:01; TSPAN10; ENSG00000182612; TAA
DSLEHTLRV

SEQ ID NO: 91523 - protein, 8 aa, Homo sapiens
  misc_feature: Table A; Target 91523; HLA-B*51:01; TSPAN10; ENSG00000182612; TAA
EAVAGALV

SEQ ID NO: 91524 - protein, 9 aa, Homo sapiens
  misc_feature: Table A; Target 91524; HLA-A*23:01; TSPAN10; ENSG00000182612; TAA
EAVAGALVV

SEQ ID NO: 91525 - protein, 9 aa, Homo sapiens
  misc_feature: Table A; Target 91525; HLA-A*25:01; TSPAN10; ENSG00000182612; TAA
EAVAGALVV

SEQ ID NO: 91526 - protein, 9 aa, Homo sapiens
  misc_feature: Table A; Target 91526; HLA-A*26:01; TSPAN10; ENSG00000182612; TAA
EAVAGALVV

SEQ ID NO: 91527 - protein, 9 aa, Homo sapiens
  misc_feature: Table A; Target 91527; HLA-A*33:03; TSPAN10; ENSG00000182612; TAA
EAVAGALVV

SEQ ID NO: 91528 - protein, 9 aa, Homo sapiens
  misc_feature: Table A; Target 91528; HLA-A*68:01; TSPAN10; ENSG00000182612; TAA
EAVAGALVV

SEQ ID NO: 91529 - protein, 9 aa, Homo sapiens
  misc_feature: Table A; Target 91529; HLA-A*68:02; TSPAN10; ENSG00000182612; TAA
EAVAGALVV

SEQ ID NO: 91530 - protein, 9 aa, Homo sapiens
  misc_feature: Table A; Target 91530; HLA-B*13:02; TSPAN10; ENSG00000182612; TAA
EAVAGALVV

SEQ ID NO: 91531 - protein, 9 aa, Homo sapiens
  misc_feature: Table A; Target 91531; HLA-B*35:01; TSPAN10; ENSG00000182612; TAA
EAVAGALVV

SEQ ID NO: 91532 - protein, 9 aa, Homo sapiens
  misc_feature: Table A; Target 91532; HLA-B*35:03; TSPAN10; ENSG00000182612; TAA
EAVAGALVV

SEQ ID NO: 91533 - protein, 9 aa, Homo sapiens
  misc_feature: Table A; Target 91533; HLA-B*38:01; TSPAN10; ENSG00000182612; TAA
EAVAGALVV

SEQ ID NO: 91534 - protein, 9 aa, Homo sapiens
  misc_feature: Table A; Target 91534; HLA-B*39:01; TSPAN10; ENSG00000182612; TAA
EAVAGALVV

SEQ ID NO: 91535 - protein, 9 aa, Homo sapiens
  misc_feature: Table A; Target 91535; HLA-B*40:02; TSPAN10; ENSG00000182612; TAA
EAVAGALVV

SEQ ID NO: 91536 - protein, 9 aa, Homo sapiens
  misc_feature: Table A; Target 91536; HLA-B*49:01; TSPAN10; ENSG00000182612; TAA
EAVAGALVV

SEQ ID NO: 91537 - protein, 9 aa, Homo sapiens
  misc_feature: Table A; Target 91537; HLA-B*51:01; TSPAN10; ENSG00000182612; TAA
EAVAGALVV

SEQ ID NO: 91538 - protein, 9 aa, Homo sapiens
  misc_feature: Table A; Target 91538; HLA-B*54:01; TSPAN10; ENSG00000182612; TAA
EAVAGALVV

SEQ ID NO: 91539 - protein, 9 aa, Homo sapiens
  misc_feature: Table A; Target 91539; HLA-B*56:01; TSPAN10; ENSG00000182612; TAA
EAVAGALVV

SEQ ID NO: 91540 - protein, 9 aa, Homo sapiens
  misc_feature: Table A; Target 91540; HLA-C*02:02; TSPAN10; ENSG00000182612; TAA
EAVAGALVV

SEQ ID NO: 91541 - protein, 9 aa, Homo sapiens
  misc_feature: Table A; Target 91541; HLA-C*03:03; TSPAN10; ENSG00000182612; TAA
EAVAGALVV

SEQ ID NO: 91542 - protein, 9 aa, Homo sapiens
  misc_feature: Table A; Target 91542; HLA-C*03:04; TSPAN10; ENSG00000182612; TAA
EAVAGALVV

SEQ ID NO: 91543 - protein, 9 aa, Homo sapiens
  misc_feature: Table A; Target 91543; HLA-C*05:01; TSPAN10; ENSG00000182612; TAA
EAVAGALVV

SEQ ID NO: 91544 - protein, 9 aa, Homo sapiens
  misc_feature: Table A; Target 91544; HLA-C*06:02; TSPAN10; ENSG00000182612; TAA
EAVAGALVV

SEQ ID NO: 91545 - protein, 9 aa, Homo sapiens
  misc_feature: Table A; Target 91545; HLA-C*07:01; TSPAN10; ENSG00000182612; TAA
EAVAGALVV

SEQ ID NO: 91546 - protein, 9 aa, Homo sapiens
  misc_feature: Table A; Target 91546; HLA-C*07:06; TSPAN10; ENSG00000182612; TAA
EAVAGALVV

SEQ ID NO: 91547 - protein, 9 aa, Homo sapiens
  misc_feature: Table A; Target 91547; HLA-C*12:03; TSPAN10; ENSG00000182612; TAA
EAVAGALVV

SEQ ID NO: 91548 - protein, 9 aa, Homo sapiens
  misc_feature: Table A; Target 91548; HLA-C*16:02; TSPAN10; ENSG00000182612; TAA
EAVAGALVV

SEQ ID NO: 91549 - protein, 9 aa, Homo sapiens
  misc_feature: Table A; Target 91549; HLA-C*16:04; TSPAN10; ENSG00000182612; TAA
EAVAGALVV

SEQ ID NO: 91550 - protein, 10 aa, Homo sapiens
  misc_feature: Table A; Target 91550; HLA-A*25:01; TSPAN10; ENSG00000182612; TAA
EAVAGALVVA

SEQ ID NO: 91551 - protein, 10 aa, Homo sapiens
  misc_feature: Table A; Target 91551; HLA-A*26:01; TSPAN10; ENSG00000182612; TAA
EAVAGALVVA

SEQ ID NO: 91552 - protein, 10 aa, Homo sapiens
  misc_feature: Table A; Target 91552; HLA-A*68:01; TSPAN10; ENSG00000182612; TAA
EAVAGALVVA

SEQ ID NO: 91553 - protein, 10 aa, Homo sapiens
  misc_feature: Table A; Target 91553; HLA-A*68:02; TSPAN10; ENSG00000182612; TAA
EAVAGALVVA

SEQ ID NO: 91554 - protein, 10 aa, Homo sapiens
  misc_feature: Table A; Target 91554; HLA-B*35:03; TSPAN10; ENSG00000182612; TAA
EAVAGALVVA

SEQ ID NO: 91555 - protein, 10 aa, Homo sapiens
  misc_feature: Table A; Target 91555; HLA-B*54:01; TSPAN10; ENSG00000182612; TAA
EAVAGALVVA

SEQ ID NO: 91556 - protein, 10 aa, Homo sapiens
  misc_feature: Table A; Target 91556; HLA-B*56:01; TSPAN10; ENSG00000182612; TAA
EAVAGALVVA

SEQ ID NO: 91557 - protein, 11 aa, Homo sapiens
  misc_feature: Table A; Target 91557; HLA-A*25:01; TSPAN10; ENSG00000182612; TAA
EAVAGALVVAL

SEQ ID NO: 91558 - protein, 11 aa, Homo sapiens
  misc_feature: Table A; Target 91558; HLA-A*26:01; TSPAN10; ENSG00000182612; TAA
EAVAGALVVAL

SEQ ID NO: 91559 - protein, 11 aa, Homo sapiens
  misc_feature: Table A; Target 91559; HLA-A*33:03; TSPAN10; ENSG00000182612; TAA
EAVAGALVVAL

SEQ ID NO: 91560 - protein, 11 aa, Homo sapiens
  misc_feature: Table A; Target 91560; HLA-A*68:01; TSPAN10; ENSG00000182612; TAA
EAVAGALVVAL

SEQ ID NO: 91561 - protein, 11 aa, Homo sapiens
  misc_feature: Table A; Target 91561; HLA-A*68:02; TSPAN10; ENSG00000182612; TAA
EAVAGALVVAL

SEQ ID NO: 91562 - protein, 11 aa, Homo sapiens
  misc_feature: Table A; Target 91562; HLA-B*35:03; TSPAN10; ENSG00000182612; TAA
EAVAGALVVAL

SEQ ID NO: 91563 - protein, 11 aa, Homo sapiens
  misc_feature: Table A; Target 91563; HLA-C*07:06; TSPAN10; ENSG00000182612; TAA
EAVAGALVVAL

SEQ ID NO: 91564 - protein, 9 aa, Homo sapiens
  misc_feature: Table A; Target 91564; HLA-A*30:01; TSPAN10; ENSG00000182612; TAA
EEGERSPLL

SEQ ID NO: 91565 - protein, 9 aa, Homo sapiens
  misc_feature: Table A; Target 91565; HLA-B*18:01; TSPAN10; ENSG00000182612; TAA
EEGERSPLL

SEQ ID NO: 91566 - protein, 9 aa, Homo sapiens
  misc_feature: Table A; Target 91566; HLA-B*37:01; TSPAN10; ENSG00000182612; TAA
EEGERSPLL

SEQ ID NO: 91567 - protein, 9 aa, Homo sapiens
  misc_feature: Table A; Target 91567; HLA-B*38:01; TSPAN10; ENSG00000182612; TAA
EEGERSPLL

SEQ ID NO: 91568 - protein, 9 aa, Homo sapiens
  misc_feature: Table A; Target 91568; HLA-B*40:01; TSPAN10; ENSG00000182612; TAA
EEGERSPLL

SEQ ID NO: 91569 - protein, 9 aa, Homo sapiens
  misc_feature: Table A; Target 91569; HLA-B*40:02; TSPAN10; ENSG00000182612; TAA
EEGERSPLL

SEQ ID NO: 91570 - protein, 9 aa, Homo sapiens
  misc_feature: Table A; Target 91570; HLA-B*44:02; TSPAN10; ENSG00000182612; TAA
EEGERSPLL

SEQ ID NO: 91571 - protein, 9 aa, Homo sapiens
  misc_feature: Table A; Target 91571; HLA-B*44:03; TSPAN10; ENSG00000182612; TAA
EEGERSPLL

SEQ ID NO: 91572 - protein, 9 aa, Homo sapiens
  misc_feature: Table A; Target 91572; HLA-B*49:01; TSPAN10; ENSG00000182612; TAA
EEGERSPLL

SEQ ID NO: 91573 - protein, 9 aa, Homo sapiens
  misc_feature: Table A; Target 91573; HLA-C*16:04; TSPAN10; ENSG00000182612; TAA
EEGERSPLL

SEQ ID NO: 91574 - protein, 9 aa, Homo sapiens
  misc_feature: Table A; Target 91574; HLA-A*33:03; TSPAN10; ENSG00000182612; TAA
EGCGPPLRR

SEQ ID NO: 91575 - protein, 8 aa, Homo sapiens
  misc_feature: Table A; Target 91575; HLA-B*38:01; TSPAN10; ENSG00000182612; TAA
EHTLRVAI

SEQ ID NO: 91576 - protein, 8 aa, Homo sapiens
  misc_feature: Table A; Target 91576; HLA-B*08:01; TSPAN10; ENSG00000182612; TAA
ELLLAARL

SEQ ID NO: 91577 - protein, 10 aa, Homo sapiens
  misc_feature: Table A; Target 91577; HLA-A*25:01; TSPAN10; ENSG00000182612; TAA
ETAGQKPLSV

SEQ ID NO: 91578 - protein, 10 aa, Homo sapiens
  misc_feature: Table A; Target 91578; HLA-A*26:01; TSPAN10; ENSG00000182612; TAA
ETAGQKPLSV

SEQ ID NO: 91579 - protein, 10 aa, Homo sapiens
  misc_feature: Table A; Target 91579; HLA-A*33:03; TSPAN10; ENSG00000182612; TAA
ETAGQKPLSV

SEQ ID NO: 91580 - protein, 10 aa, Homo sapiens
  misc_feature: Table A; Target 91580; HLA-A*68:01; TSPAN10; ENSG00000182612; TAA
ETAGQKPLSV

SEQ ID NO: 91581 - protein, 10 aa, Homo sapiens
  misc_feature: Table A; Target 91581; HLA-A*68:02; TSPAN10; ENSG00000182612; TAA
ETAGQKPLSV

SEQ ID NO: 91582 - protein, 8 aa, Homo sapiens
  misc_feature: Table A; Target 91582; HLA-A*02:01; TSPAN10; ENSG00000182612; TAA
FLLDQVQL

SEQ ID NO: 91583 - protein, 8 aa, Homo sapiens
  misc_feature: Table A; Target 91583; HLA-A*02:04; TSPAN10; ENSG00000182612; TAA
FLLDQVQL

SEQ ID NO: 91584 - protein, 9 aa, Homo sapiens
  misc_feature: Table A; Target 91584; HLA-A*02:01; TSPAN10; ENSG00000182612; TAA
FLLDQVQLG

SEQ ID NO: 91585 - protein, 9 aa, Homo sapiens
  misc_feature: Table A; Target 91585; HLA-A*02:04; TSPAN10; ENSG00000182612; TAA
FLLDQVQLG

SEQ ID NO: 91586 - protein, 10 aa, Homo sapiens
  misc_feature: Table A; Target 91586; HLA-A*02:01; TSPAN10; ENSG00000182612; TAA
FLLDQVQLGL

SEQ ID NO: 91587 - protein, 10 aa, Homo sapiens
  misc_feature: Table A; Target 91587; HLA-A*02:03; TSPAN10; ENSG00000182612; TAA
FLLDQVQLGL

SEQ ID NO: 91588 - protein, 10 aa, Homo sapiens
  misc_feature: Table A; Target 91588; HLA-A*02:04; TSPAN10; ENSG00000182612; TAA
FLLDQVQLGL

SEQ ID NO: 91589 - protein, 10 aa, Homo sapiens
  misc_feature: Table A; Target 91589; HLA-A*02:07; TSPAN10; ENSG00000182612; TAA
FLLDQVQLGL

SEQ ID NO: 91590 - protein, 10 aa, Homo sapiens
  misc_feature: Table A; Target 91590; HLA-A*03:01; TSPAN10; ENSG00000182612; TAA
FLLDQVQLGL

SEQ ID NO: 91591 - protein, 11 aa, Homo sapiens
  misc_feature: Table A; Target 91591; HLA-A*33:01; TSPAN10; ENSG00000182612; TAA
FLLDQVQLGLR

SEQ ID NO: 91592 - protein, 9 aa, Homo sapiens
  misc_feature: Table A; Target 91592; HLA-A*02:01; TSPAN10; ENSG00000182612; TAA
FLSNFPFSL

SEQ ID NO: 91593 - protein, 9 aa, Homo sapiens
  misc_feature: Table A; Target 91593; HLA-A*02:03; TSPAN10; ENSG00000182612; TAA
FLSNFPFSL

SEQ ID NO: 91594 - protein, 9 aa, Homo sapiens
  misc_feature: Table A; Target 91594; HLA-A*02:04; TSPAN10; ENSG00000182612; TAA
FLSNFPFSL

SEQ ID NO: 91595 - protein, 9 aa, Homo sapiens
  misc_feature: Table A; Target 91595; HLA-A*02:07; TSPAN10; ENSG00000182612; TAA
FLSNFPFSL

SEQ ID NO: 91596 - protein, 9 aa, Homo sapiens
  misc_feature: Table A; Target 91596; HLA-A*30:01; TSPAN10; ENSG00000182612; TAA
FLSNFPFSL

SEQ ID NO: 91597 - protein, 9 aa, Homo sapiens
  misc_feature: Table A; Target 91597; HLA-A*68:02; TSPAN10; ENSG00000182612; TAA
FLSNFPFSL

SEQ ID NO: 91598 - protein, 10 aa, Homo sapiens
  misc_feature: Table A; Target 91598; HLA-A*02:01; TSPAN10; ENSG00000182612; TAA
FLSNFPFSLL

SEQ ID NO: 91599 - protein, 10 aa, Homo sapiens
  misc_feature: Table A; Target 91599; HLA-A*02:03; TSPAN10; ENSG00000182612; TAA
FLSNFPFSLL

SEQ ID NO: 91600 - protein, 10 aa, Homo sapiens
  misc_feature: Table A; Target 91600; HLA-A*02:04; TSPAN10; ENSG00000182612; TAA
FLSNFPFSLL

SEQ ID NO: 91601 - protein, 10 aa, Homo sapiens
  misc_feature: Table A; Target 91601; HLA-A*02:07; TSPAN10; ENSG00000182612; TAA
FLSNFPFSLL

SEQ ID NO: 91602 - protein, 10 aa, Homo sapiens
  misc_feature: Table A; Target 91602; HLA-A*68:02; TSPAN10; ENSG00000182612; TAA
FLSNFPFSLL

SEQ ID NO: 91603 - protein, 10 aa, Homo sapiens
  misc_feature: Table A; Target 91603; HLA-A*02:03; TSPAN10; ENSG00000182612; TAA
FLVLEAVAGA

SEQ ID NO: 91604 - protein, 8 aa, Homo sapiens
  misc_feature: Table A; Target 91604; HLA-B*35:01; TSPAN10; ENSG00000182612; TAA
FPFSLLGL

SEQ ID NO: 91605 - protein, 8 aa, Homo sapiens
  misc_feature: Table A; Target 91605; HLA-B*51:01; TSPAN10; ENSG00000182612; TAA
FPFSLLGL

SEQ ID NO: 91606 - protein, 8 aa, Homo sapiens
  misc_feature: Table A; Target 91606; HLA-B*54:01; TSPAN10; ENSG00000182612; TAA
FPFSLLGL

SEQ ID NO: 91607 - protein, 9 aa, Homo sapiens
  misc_feature: Table A; Target 91607; HLA-B*35:01; TSPAN10; ENSG00000182612; TAA
FPFSLLGLL

SEQ ID NO: 91608 - protein, 9 aa, Homo sapiens
  misc_feature: Table A; Target 91608; HLA-B*51:01; TSPAN10; ENSG00000182612; TAA
FPFSLLGLL

SEQ ID NO: 91609 - protein, 9 aa, Homo sapiens
  misc_feature: Table A; Target 91609; HLA-B*54:01; TSPAN10; ENSG00000182612; TAA
FPFSLLGLL

SEQ ID NO: 91610 - protein, 10 aa, Homo sapiens
  misc_feature: Table A; Target 91610; HLA-B*54:01; TSPAN10; ENSG00000182612; TAA
FPFSLLGLLA

SEQ ID NO: 91611 - protein, 10 aa, Homo sapiens
  misc_feature: Table A; Target 91611; HLA-B*56:01; TSPAN10; ENSG00000182612; TAA
FPFSLLGLLA

SEQ ID NO: 91612 - protein, 11 aa, Homo sapiens
  misc_feature: Table A; Target 91612; HLA-B*54:01; TSPAN10; ENSG00000182612; TAA
FPFSLLGLLAL

SEQ ID NO: 91613 - protein, 8 aa, Homo sapiens
  misc_feature: Table A; Target 91613; HLA-C*12:03; TSPAN10; ENSG00000182612; TAA
FSGGILAF

SEQ ID NO: 91614 - protein, 9 aa, Homo sapiens
  misc_feature: Table A; Target 91614; HLA-A*68:02; TSPAN10; ENSG00000182612; TAA
FSGGILAFL

SEQ ID NO: 91615 - protein, 9 aa, Homo sapiens
  misc_feature: Table A; Target 91615; HLA-C*03:04; TSPAN10; ENSG00000182612; TAA
FSLLGLLAL

SEQ ID NO: 91616 - protein, 9 aa, Homo sapiens
  misc_feature: Table A; Target 91616; HLA-C*07:06; TSPAN10; ENSG00000182612; TAA
GAELLLAAR

SEQ ID NO: 91617 - protein, 11 aa, Homo sapiens
  misc_feature: Table A; Target 91617; HLA-A*26:01; TSPAN10; ENSG00000182612; TAA
GALAARSGAAY

SEQ ID NO: 91618 - protein, 11 aa, Homo sapiens
  misc_feature: Table A; Target 91618; HLA-A*29:02; TSPAN10; ENSG00000182612; TAA
GALAARSGAAY

SEQ ID NO: 91619 - protein, 11 aa, Homo sapiens
  misc_feature: Table A; Target 91619; HLA-A*30:02; TSPAN10; ENSG00000182612; TAA
GALAARSGAAY

SEQ ID NO: 91620 - protein, 11 aa, Homo sapiens
  misc_feature: Table A; Target 91620; HLA-A*32:01; TSPAN10; ENSG00000182612; TAA
GALAARSGAAY

SEQ ID NO: 91621 - protein, 11 aa, Homo sapiens
  misc_feature: Table A; Target 91621; HLA-B*15:01; TSPAN10; ENSG00000182612; TAA
GALAARSGAAY

SEQ ID NO: 91622 - protein, 11 aa, Homo sapiens
  misc_feature: Table A; Target 91622; HLA-B*15:03; TSPAN10; ENSG00000182612; TAA
GALAARSGAAY

SEQ ID NO: 91623 - protein, 11 aa, Homo sapiens
  misc_feature: Table A; Target 91623; HLA-B*35:01; TSPAN10; ENSG00000182612; TAA
GALAARSGAAY

SEQ ID NO: 91624 - protein, 11 aa, Homo sapiens
  misc_feature: Table A; Target 91624; HLA-B*39:01; TSPAN10; ENSG00000182612; TAA
GALAARSGAAY

SEQ ID NO: 91625 - protein, 11 aa, Homo sapiens
  misc_feature: Table A; Target 91625; HLA-B*46:01; TSPAN10; ENSG00000182612; TAA
GALAARSGAAY

SEQ ID NO: 91626 - protein, 11 aa, Homo sapiens
  misc_feature: Table A; Target 91626; HLA-B*58:01; TSPAN10; ENSG00000182612; TAA
GALAARSGAAY

SEQ ID NO: 91627 - protein, 11 aa, Homo sapiens
  misc_feature: Table A; Target 91627; HLA-C*01:02; TSPAN10; ENSG00000182612; TAA
GALAARSGAAY

SEQ ID NO: 91628 - protein, 11 aa, Homo sapiens
  misc_feature: Table A; Target 91628; HLA-C*02:02; TSPAN10; ENSG00000182612; TAA
GALAARSGAAY

SEQ ID NO: 91629 - protein, 11 aa, Homo sapiens
  misc_feature: Table A; Target 91629; HLA-C*07:01; TSPAN10; ENSG00000182612; TAA
GALAARSGAAY

SEQ ID NO: 91630 - protein, 11 aa, Homo sapiens
  misc_feature: Table A; Target 91630; HLA-C*07:02; TSPAN10; ENSG00000182612; TAA
GALAARSGAAY

SEQ ID NO: 91631 - protein, 11 aa, Homo sapiens
  misc_feature: Table A; Target 91631; HLA-C*07:04; TSPAN10; ENSG00000182612; TAA
GALAARSGAAY

SEQ ID NO: 91632 - protein, 11 aa, Homo sapiens
  misc_feature: Table A; Target 91632; HLA-C*14:02; TSPAN10; ENSG00000182612; TAA
GALAARSGAAY

SEQ ID NO: 91633 - protein, 11 aa, Homo sapiens
  misc_feature: Table A; Target 91633; HLA-C*16:01; TSPAN10; ENSG00000182612; TAA
GALAARSGAAY

SEQ ID NO: 91634 - protein, 11 aa, Homo sapiens
  misc_feature: Table A; Target 91634; HLA-C*16:04; TSPAN10; ENSG00000182612; TAA
GALAARSGAAY

SEQ ID NO: 91635 - protein, 8 aa, Homo sapiens
  misc_feature: Table A; Target 91635; HLA-B*57:01; TSPAN10; ENSG00000182612; TAA
GALVVALW

SEQ ID NO: 91636 - protein, 9 aa, Homo sapiens
  misc_feature: Table A; Target 91636; HLA-B*57:01; TSPAN10; ENSG00000182612; TAA
GCGPPLRRW

SEQ ID NO: 91637 - protein, 10 aa, Homo sapiens
  misc_feature: Table A; Target 91637; HLA-B*49:01; TSPAN10; ENSG00000182612; TAA
GEDRAGPQSP

SEQ ID NO: 91638 - protein, 9 aa, Homo sapiens
  misc_feature: Table A; Target 91638; HLA-A*23:01; TSPAN10; ENSG00000182612; TAA
GFSGGILAF

SEQ ID NO: 91639 - protein, 9 aa, Homo sapiens
  misc_feature: Table A; Target 91639; HLA-A*29:02; TSPAN10; ENSG00000182612; TAA
GFSGGILAF

SEQ ID NO: 91640 - protein, 9 aa, Homo sapiens
  misc_feature: Table A; Target 91640; HLA-B*15:01; TSPAN10; ENSG00000182612; TAA
GFSGGILAF

SEQ ID NO: 91641 - protein, 9 aa, Homo sapiens
  misc_feature: Table A; Target 91641; HLA-C*14:02; TSPAN10; ENSG00000182612; TAA
GFSGGILAF

SEQ ID NO: 91642 - protein, 10 aa, Homo sapiens
  misc_feature: Table A; Target 91642; HLA-B*40:01; TSPAN10; ENSG00000182612; TAA
GGLVVSAASL

SEQ ID NO: 91643 - protein, 9 aa, Homo sapiens
  misc_feature: Table A; Target 91643; HLA-C*01:02; TSPAN10; ENSG00000182612; TAA
GGPLPTDPM

SEQ ID NO: 91644 - protein, 8 aa, Homo sapiens
  misc_feature: Table A; Target 91644; HLA-B*13:02; TSPAN10; ENSG00000182612; TAA
GGYAIAVV

SEQ ID NO: 91645 - protein, 9 aa, Homo sapiens
  misc_feature: Table A; Target 91645; HLA-A*30:01; TSPAN10; ENSG00000182612; TAA
GGYAIAVVL

SEQ ID NO: 91646 - protein, 9 aa, Homo sapiens
  misc_feature: Table A; Target 91646; HLA-B*13:02; TSPAN10; ENSG00000182612; TAA
GGYAIAVVL

SEQ ID NO: 91647 - protein, 9 aa, Homo sapiens
  misc_feature: Table A; Target 91647; HLA-B*15:03; TSPAN10; ENSG00000182612; TAA
GGYAIAVVL

SEQ ID NO: 91648 - protein, 9 aa, Homo sapiens
  misc_feature: Table A; Target 91648; HLA-B*27:05; TSPAN10; ENSG00000182612; TAA
GGYAIAVVL

SEQ ID NO: 91649 - protein, 9 aa, Homo sapiens
  misc_feature: Table A; Target 91649; HLA-B*39:01; TSPAN10; ENSG00000182612; TAA
GGYAIAVVL

SEQ ID NO: 91650 - protein, 9 aa, Homo sapiens
  misc_feature: Table A; Target 91650; HLA-B*40:01; TSPAN10; ENSG00000182612; TAA
GGYAIAVVL

SEQ ID NO: 91651 - protein, 9 aa, Homo sapiens
  misc_feature: Table A; Target 91651; HLA-B*40:02; TSPAN10; ENSG00000182612; TAA
GGYAIAVVL

SEQ ID NO: 91652 - protein, 9 aa, Homo sapiens
  misc_feature: Table A; Target 91652; HLA-C*02:02; TSPAN10; ENSG00000182612; TAA
GGYAIAVVL

SEQ ID NO: 91653 - protein, 9 aa, Homo sapiens
  misc_feature: Table A; Target 91653; HLA-C*03:04; TSPAN10; ENSG00000182612; TAA
GGYAIAVVL

SEQ ID NO: 91654 - protein, 9 aa, Homo sapiens
  misc_feature: Table A; Target 91654; HLA-C*06:02; TSPAN10; ENSG00000182612; TAA
GGYAIAVVL

SEQ ID NO: 91655 - protein, 9 aa, Homo sapiens
  misc_feature: Table A; Target 91655; HLA-C*07:04; TSPAN10; ENSG00000182612; TAA
GGYAIAVVL

SEQ ID NO: 91656 - protein, 9 aa, Homo sapiens
  misc_feature: Table A; Target 91656; HLA-C*12:03; TSPAN10; ENSG00000182612; TAA
GGYAIAVVL

SEQ ID NO: 91657 - protein, 9 aa, Homo sapiens
  misc_feature: Table A; Target 91657; HLA-C*16:04; TSPAN10; ENSG00000182612; TAA
GGYAIAVVL

SEQ ID NO: 91658 - protein, 9 aa, Homo sapiens
  misc_feature: Table A; Target 91658; HLA-A*02:01; TSPAN10; ENSG00000182612; TAA
GLALGGLVV

SEQ ID NO: 91659 - protein, 9 aa, Homo sapiens
  misc_feature: Table A; Target 91659; HLA-A*02:03; TSPAN10; ENSG00000182612; TAA
GLALGGLVV

SEQ ID NO: 91660 - protein, 9 aa, Homo sapiens
  misc_feature: Table A; Target 91660; HLA-B*13:02; TSPAN10; ENSG00000182612; TAA
GLALGGLVV

SEQ ID NO: 91661 - protein, 9 aa, Homo sapiens
  misc_feature: Table A; Target 91661; HLA-B*55:01; TSPAN10; ENSG00000182612; TAA
GLALGGLVV

SEQ ID NO: 91662 - protein, 11 aa, Homo sapiens
  misc_feature: Table A; Target 91662; HLA-A*02:01; TSPAN10; ENSG00000182612; TAA
GLALGGLVVSA

SEQ ID NO: 91663 - protein, 11 aa, Homo sapiens
  misc_feature: Table A; Target 91663; HLA-A*02:03; TSPAN10; ENSG00000182612; TAA
GLALGGLVVSA

SEQ ID NO: 91664 - protein, 11 aa, Homo sapiens
  misc_feature: Table A; Target 91664; HLA-B*55:01; TSPAN10; ENSG00000182612; TAA
GLALGGLVVSA

SEQ ID NO: 91665 - protein, 8 aa, Homo sapiens
  misc_feature: Table A; Target 91665; HLA-B*08:01; TSPAN10; ENSG00000182612; TAA
GLAVKGSL

SEQ ID NO: 91666 - protein, 9 aa, Homo sapiens
  misc_feature: Table A; Target 91666; HLA-A*02:01; TSPAN10; ENSG00000182612; TAA
GLLALAIGL

SEQ ID NO: 91667 - protein, 9 aa, Homo sapiens
  misc_feature: Table A; Target 91667; HLA-A*02:04; TSPAN10; ENSG00000182612; TAA
GLLALAIGL

SEQ ID NO: 91668 - protein, 9 aa, Homo sapiens
  misc_feature: Table A; Target 91668; HLA-A*02:01; TSPAN10; ENSG00000182612; TAA
GLVVSAASL

SEQ ID NO: 91669 - protein, 9 aa, Homo sapiens
  misc_feature: Table A; Target 91669; HLA-A*02:03; TSPAN10; ENSG00000182612; TAA
GLVVSAASL

SEQ ID NO: 91670 - protein, 9 aa, Homo sapiens
  misc_feature: Table A; Target 91670; HLA-A*02:04; TSPAN10; ENSG00000182612; TAA
GLVVSAASL

SEQ ID NO: 91671 - protein, 9 aa, Homo sapiens
  misc_feature: Table A; Target 91671; HLA-A*30:01; TSPAN10; ENSG00000182612; TAA
GLVVSAASL

SEQ ID NO: 91672 - protein, 9 aa, Homo sapiens
  misc_feature: Table A; Target 91672; HLA-B*07:02; TSPAN10; ENSG00000182612; TAA
GLVVSAASL

SEQ ID NO: 91673 - protein, 9 aa, Homo sapiens
  misc_feature: Table A; Target 91673; HLA-B*13:02; TSPAN10; ENSG00000182612; TAA
GLVVSAASL

SEQ ID NO: 91674 - protein, 9 aa, Homo sapiens
  misc_feature: Table A; Target 91674; HLA-B*15:01; TSPAN10; ENSG00000182612; TAA
GLVVSAASL

SEQ ID NO: 91675 - protein, 9 aa, Homo sapiens
  misc_feature: Table A; Target 91675; HLA-B*15:03; TSPAN10; ENSG00000182612; TAA
GLVVSAASL

SEQ ID NO: 91676 - protein, 9 aa, Homo sapiens
  misc_feature: Table A; Target 91676; HLA-B*40:01; TSPAN10; ENSG00000182612; TAA
GLVVSAASL

SEQ ID NO: 91677 - protein, 9 aa, Homo sapiens
  misc_feature: Table A; Target 91677; HLA-B*40:02; TSPAN10; ENSG00000182612; TAA
GLVVSAASL

SEQ ID NO: 91678 - protein, 9 aa, Homo sapiens
  misc_feature: Table A; Target 91678; HLA-B*46:01; TSPAN10; ENSG00000182612; TAA
GLVVSAASL

SEQ ID NO: 91679 - protein, 9 aa, Homo sapiens
  misc_feature: Table A; Target 91679; HLA-B*55:01; TSPAN10; ENSG00000182612; TAA
GLVVSAASL

SEQ ID NO: 91680 - protein, 9 aa, Homo sapiens
  misc_feature: Table A; Target 91680; HLA-C*01:02; TSPAN10; ENSG00000182612; TAA
GLVVSAASL

SEQ ID NO: 91681 - protein, 9 aa, Homo sapiens
  misc_feature: Table A; Target 91681; HLA-C*03:03; TSPAN10; ENSG00000182612; TAA
GLVVSAASL

SEQ ID NO: 91682 - protein, 9 aa, Homo sapiens
  misc_feature: Table A; Target 91682; HLA-C*14:02; TSPAN10; ENSG00000182612; TAA
GLVVSAASL

SEQ ID NO: 91683 - protein, 9 aa, Homo sapiens
  misc_feature: Table A; Target 91683; HLA-B*07:02; TSPAN10; ENSG00000182612; TAA
GPLPTDPML

SEQ ID NO: 91684 - protein, 9 aa, Homo sapiens
  misc_feature: Table A; Target 91684; HLA-B*35:01; TSPAN10; ENSG00000182612; TAA
GPLPTDPML

SEQ ID NO: 91685 - protein, 9 aa, Homo sapiens
  misc_feature: Table A; Target 91685; HLA-B*35:03; TSPAN10; ENSG00000182612; TAA
GPLPTDPML

SEQ ID NO: 91686 - protein, 9 aa, Homo sapiens
  misc_feature: Table A; Target 91686; HLA-B*55:01; TSPAN10; ENSG00000182612; TAA
GPLPTDPML

SEQ ID NO: 91687 - protein, 9 aa, Homo sapiens
  misc_feature: Table A; Target 91687; HLA-B*56:01; TSPAN10; ENSG00000182612; TAA
GPLPTDPML

SEQ ID NO: 91688 - protein, 9 aa, Homo sapiens
  misc_feature: Table A; Target 91688; HLA-C*03:03; TSPAN10; ENSG00000182612; TAA
GPLPTDPML

SEQ ID NO: 91689 - protein, 9 aa, Homo sapiens
  misc_feature: Table A; Target 91689; HLA-C*07:02; TSPAN10; ENSG00000182612; TAA
GPLPTDPML

SEQ ID NO: 91690 - protein, 11 aa, Homo sapiens
  misc_feature: Table A; Target 91690; HLA-C*07:02; TSPAN10; ENSG00000182612; TAA
GPLPTDPMLGL

SEQ ID NO: 91691 - protein, 9 aa, Homo sapiens
  misc_feature: Table A; Target 91691; HLA-B*35:01; TSPAN10; ENSG00000182612; TAA
GPLQDSLEH

SEQ ID NO: 91692 - protein, 11 aa, Homo sapiens
  misc_feature: Table A; Target 91692; HLA-B*07:02; TSPAN10; ENSG00000182612; TAA
GPLQDSLEHTL

SEQ ID NO: 91693 - protein, 11 aa, Homo sapiens
  misc_feature: Table A; Target 91693; HLA-B*35:01; TSPAN10; ENSG00000182612; TAA
GPLQDSLEHTL

SEQ ID NO: 91694 - protein, 11 aa, Homo sapiens
  misc_feature: Table A; Target 91694; HLA-B*35:03; TSPAN10; ENSG00000182612; TAA
GPLQDSLEHTL

SEQ ID NO: 91695 - protein, 11 aa, Homo sapiens
  misc_feature: Table A; Target 91695; HLA-B*40:01; TSPAN10; ENSG00000182612; TAA
GPLQDSLEHTL

SEQ ID NO: 91696 - protein, 11 aa, Homo sapiens
  misc_feature: Table A; Target 91696; HLA-B*55:01; TSPAN10; ENSG00000182612; TAA
GPLQDSLEHTL

SEQ ID NO: 91697 - protein, 11 aa, Homo sapiens
  misc_feature: Table A; Target 91697; HLA-B*56:01; TSPAN10; ENSG00000182612; TAA
GPLQDSLEHTL

SEQ ID NO: 91698 - protein, 11 aa, Homo sapiens
  misc_feature: Table A; Target 91698; HLA-C*03:03; TSPAN10; ENSG00000182612; TAA
GPLQDSLEHTL

SEQ ID NO: 91699 - protein, 9 aa, Homo sapiens
  misc_feature: Table A; Target 91699; HLA-B*54:01; TSPAN10; ENSG00000182612; TAA
GPQSPSPGA

SEQ ID NO: 91700 - protein, 9 aa, Homo sapiens
  misc_feature: Table A; Target 91700; HLA-B*55:01; TSPAN10; ENSG00000182612; TAA
GPQSPSPGA

SEQ ID NO: 91701 - protein, 9 aa, Homo sapiens
  misc_feature: Table A; Target 91701; HLA-B*56:01; TSPAN10; ENSG00000182612; TAA
GPQSPSPGA

SEQ ID NO: 91702 - protein, 11 aa, Homo sapiens
  misc_feature: Table A; Target 91702; HLA-C*04:01; TSPAN10; ENSG00000182612; TAA
GPQSPSPGAPP

SEQ ID NO: 91703 - protein, 9 aa, Homo sapiens
  misc_feature: Table A; Target 91703; HLA-B*55:01; TSPAN10; ENSG00000182612; TAA
GPVPREDQA

SEQ ID NO: 91704 - protein, 9 aa, Homo sapiens
  misc_feature: Table A; Target 91704; HLA-B*56:01; TSPAN10; ENSG00000182612; TAA
GPVPREDQA

SEQ ID NO: 91705 - protein, 11 aa, Homo sapiens
  misc_feature: Table A; Target 91705; HLA-B*56:01; TSPAN10; ENSG00000182612; TAA
GPVPREDQAEA

SEQ ID NO: 91706 - protein, 8 aa, Homo sapiens
  misc_feature: Table A; Target 91706; HLA-B*15:01; TSPAN10; ENSG00000182612; TAA
GQKPLSVH

SEQ ID NO: 91707 - protein, 9 aa, Homo sapiens
  misc_feature: Table A; Target 91707; HLA-A*31:01; TSPAN10; ENSG00000182612; TAA
GQKPLSVHR

SEQ ID NO: 91708 - protein, 9 aa, Homo sapiens
  misc_feature: Table A; Target 91708; HLA-A*33:03; TSPAN10; ENSG00000182612; TAA
GQKPLSVHR

SEQ ID NO: 91709 - protein, 11 aa, Homo sapiens
  misc_feature: Table A; Target 91709; HLA-A*31:01; TSPAN10; ENSG00000182612; TAA
GQKPLSVHRPP

SEQ ID NO: 91710 - protein, 8 aa, Homo sapiens
  misc_feature: Table A; Target 91710; HLA-C*05:01; TSPAN10; ENSG00000182612; TAA
GSDLGGPL

SEQ ID NO: 91711 - protein, 11 aa, Homo sapiens
  misc_feature: Table A; Target 91711; HLA-C*06:02; TSPAN10; ENSG00000182612; TAA
GTPKKGPAPSL

SEQ ID NO: 91712 - protein, 8 aa, Homo sapiens
  misc_feature: Table A; Target 91712; HLA-A*23:01; TSPAN10; ENSG00000182612; TAA
GYAIAVVL

SEQ ID NO: 91713 - protein, 8 aa, Homo sapiens
  misc_feature: Table A; Target 91713; HLA-C*14:02; TSPAN10; ENSG00000182612; TAA
GYAIAVVL

SEQ ID NO: 91714 - protein, 9 aa, Homo sapiens
  misc_feature: Table A; Target 91714; HLA-A*23:01; TSPAN10; ENSG00000182612; TAA
GYAIAVVLL

SEQ ID NO: 91715 - protein, 9 aa, Homo sapiens
  misc_feature: Table A; Target 91715; HLA-A*24:02; TSPAN10; ENSG00000182612; TAA
GYAIAVVLL

SEQ ID NO: 91716 - protein, 8 aa, Homo sapiens
  misc_feature: Table A; Target 91716; HLA-C*07:04; TSPAN10; ENSG00000182612; TAA
HQALSGTP

SEQ ID NO: 91717 - protein, 9 aa, Homo sapiens
  misc_feature: Table A; Target 91717; HLA-A*03:01; TSPAN10; ENSG00000182612; TAA
HQALSGTPK

SEQ ID NO: 91718 - protein, 9 aa, Homo sapiens
  misc_feature: Table A; Target 91718; HLA-A*03:02; TSPAN10; ENSG00000182612; TAA
HQALSGTPK

SEQ ID NO: 91719 - protein, 9 aa, Homo sapiens
  misc_feature: Table A; Target 91719; HLA-A*11:01; TSPAN10; ENSG00000182612; TAA
HQALSGTPK

SEQ ID NO: 91720 - protein, 9 aa, Homo sapiens
  misc_feature: Table A; Target 91720; HLA-A*68:01; TSPAN10; ENSG00000182612; TAA
HQALSGTPK

SEQ ID NO: 91721 - protein, 9 aa, Homo sapiens
  misc_feature: Table A; Target 91721; HLA-B*15:03; TSPAN10; ENSG00000182612; TAA
HQALSGTPK

SEQ ID NO: 91722 - protein, 9 aa, Homo sapiens
  misc_feature: Table A; Target 91722; HLA-B*27:05; TSPAN10; ENSG00000182612; TAA
HQALSGTPK

SEQ ID NO: 91723 - protein, 9 aa, Homo sapiens
  misc_feature: Table A; Target 91723; HLA-B*39:01; TSPAN10; ENSG00000182612; TAA
HQALSGTPK

SEQ ID NO: 91724 - protein, 9 aa, Homo sapiens
  misc_feature: Table A; Target 91724; HLA-C*04:01; TSPAN10; ENSG00000182612; TAA
HQALSGTPK

SEQ ID NO: 91725 - protein, 9 aa, Homo sapiens
  misc_feature: Table A; Target 91725; HLA-C*06:02; TSPAN10; ENSG00000182612; TAA
HQALSGTPK

SEQ ID NO: 91726 - protein, 9 aa, Homo sapiens
  misc_feature: Table A; Target 91726; HLA-C*07:01; TSPAN10; ENSG00000182612; TAA
HQALSGTPK

SEQ ID NO: 91727 - protein, 9 aa, Homo sapiens
  misc_feature: Table A; Target 91727; HLA-C*07:04; TSPAN10; ENSG00000182612; TAA
HQALSGTPK

SEQ ID NO: 91728 - protein, 9 aa, Homo sapiens
  misc_feature: Table A; Target 91728; HLA-C*07:06; TSPAN10; ENSG00000182612; TAA
HQALSGTPK

SEQ ID NO: 91729 - protein, 9 aa, Homo sapiens
  misc_feature: Table A; Target 91729; HLA-B*27:05; TSPAN10; ENSG00000182612; TAA
HRPPTSGCL

SEQ ID NO: 91730 - protein, 9 aa, Homo sapiens
  misc_feature: Table A; Target 91730; HLA-C*06:02; TSPAN10; ENSG00000182612; TAA
HRPPTSGCL

SEQ ID NO: 91731 - protein, 9 aa, Homo sapiens
  misc_feature: Table A; Target 91731; HLA-C*07:02; TSPAN10; ENSG00000182612; TAA
HRPPTSGCL

SEQ ID NO: 91732 - protein, 10 aa, Homo sapiens
  misc_feature: Table A; Target 91732; HLA-A*29:02; TSPAN10; ENSG00000182612; TAA
HTLRVAIAHY

SEQ ID NO: 91733 - protein, 10 aa, Homo sapiens
  misc_feature: Table A; Target 91733; HLA-A*30:02; TSPAN10; ENSG00000182612; TAA
HTLRVAIAHY

SEQ ID NO: 91734 - protein, 10 aa, Homo sapiens
  misc_feature: Table A; Target 91734; HLA-B*57:01; TSPAN10; ENSG00000182612; TAA
HTLRVAIAHY

SEQ ID NO: 91735 - protein, 8 aa, Homo sapiens
  misc_feature: Table A; Target 91735; HLA-C*14:02; TSPAN10; ENSG00000182612; TAA
HYQDDPDL

SEQ ID NO: 91736 - protein, 9 aa, Homo sapiens
  misc_feature: Table A; Target 91736; HLA-A*31:01; TSPAN10; ENSG00000182612; TAA
HYQDDPDLR

SEQ ID NO: 91737 - protein, 9 aa, Homo sapiens
  misc_feature: Table A; Target 91737; HLA-A*33:01; TSPAN10; ENSG00000182612; TAA
HYQDDPDLR

SEQ ID NO: 91738 - protein, 9 aa, Homo sapiens
  misc_feature: Table A; Target 91738; HLA-A*33:03; TSPAN10; ENSG00000182612; TAA
HYQDDPDLR

SEQ ID NO: 91739 - protein, 10 aa, Homo sapiens
  misc_feature: Table A; Target 91739; HLA-A*23:01; TSPAN10; ENSG00000182612; TAA
HYQDDPDLRF

SEQ ID NO: 91740 - protein, 10 aa, Homo sapiens
  misc_feature: Table A; Target 91740; HLA-A*24:02; TSPAN10; ENSG00000182612; TAA
HYQDDPDLRF

SEQ ID NO: 91741 - protein, 10 aa, Homo sapiens
  misc_feature: Table A; Target 91741; HLA-A*29:02; TSPAN10; ENSG00000182612; TAA
HYQDDPDLRF

SEQ ID NO: 91742 - protein, 10 aa, Homo sapiens
  misc_feature: Table A; Target 91742; HLA-B*35:01; TSPAN10; ENSG00000182612; TAA
HYQDDPDLRF

SEQ ID NO: 91743 - protein, 11 aa, Homo sapiens
  misc_feature: Table A; Target 91743; HLA-A*24:02; TSPAN10; ENSG00000182612; TAA
HYQDDPDLRFL

SEQ ID NO: 91744 - protein, 9 aa, Homo sapiens
  misc_feature: Table A; Target 91744; HLA-B*54:01; TSPAN10; ENSG00000182612; TAA
IAVVLLQGA

SEQ ID NO: 91745 - protein, 11 aa, Homo sapiens
  misc_feature: Table A; Target 91745; HLA-C*03:03; TSPAN10; ENSG00000182612; TAA
IAVVLLQGAEL

SEQ ID NO: 91746 - protein, 9 aa, Homo sapiens
  misc_feature: Table A; Target 91746; HLA-A*02:01; TSPAN10; ENSG00000182612; TAA
ILAFLVLEA

SEQ ID NO: 91747 - protein, 9 aa, Homo sapiens
  misc_feature: Table A; Target 91747; HLA-A*02:03; TSPAN10; ENSG00000182612; TAA
ILAFLVLEA

SEQ ID NO: 91748 - protein, 9 aa, Homo sapiens
  misc_feature: Table A; Target 91748; HLA-B*13:02; TSPAN10; ENSG00000182612; TAA
ILAFLVLEA

SEQ ID NO: 91749 - protein, 10 aa, Homo sapiens
  misc_feature: Table A; Target 91749; HLA-A*02:01; TSPAN10; ENSG00000182612; TAA
ILAFLVLEAV

SEQ ID NO: 91750 - protein, 10 aa, Homo sapiens
  misc_feature: Table A; Target 91750; HLA-A*02:03; TSPAN10; ENSG00000182612; TAA
ILAFLVLEAV

SEQ ID NO: 91751 - protein, 10 aa, Homo sapiens
  misc_feature: Table A; Target 91751; HLA-A*02:04; TSPAN10; ENSG00000182612; TAA
ILAFLVLEAV

SEQ ID NO: 91752 - protein, 9 aa, Homo sapiens
  misc_feature: Table A; Target 91752; HLA-C*01:02; TSPAN10; ENSG00000182612; TAA
KGPAPSLSP

SEQ ID NO: 91753 - protein, 10 aa, Homo sapiens
  misc_feature: Table A; Target 91753; HLA-A*03:01; TSPAN10; ENSG00000182612; TAA
KHQALSGTPK

SEQ ID NO: 91754 - protein, 10 aa, Homo sapiens
  misc_feature: Table A; Target 91754; HLA-A*03:02; TSPAN10; ENSG00000182612; TAA
KHQALSGTPK

SEQ ID NO: 91755 - protein, 10 aa, Homo sapiens
  misc_feature: Table A; Target 91755; HLA-B*27:05; TSPAN10; ENSG00000182612; TAA
KHQALSGTPK

SEQ ID NO: 91756 - protein, 10 aa, Homo sapiens
  misc_feature: Table A; Target 91756; HLA-C*06:02; TSPAN10; ENSG00000182612; TAA
KHQALSGTPK

SEQ ID NO: 91757 - protein, 10 aa, Homo sapiens
  misc_feature: Table A; Target 91757; HLA-C*07:01; TSPAN10; ENSG00000182612; TAA
KHQALSGTPK

SEQ ID NO: 91758 - protein, 8 aa, Homo sapiens
  misc_feature: Table A; Target 91758; HLA-B*15:03; TSPAN10; ENSG00000182612; TAA
KKGPAPSL

SEQ ID NO: 91759 - protein, 9 aa, Homo sapiens
  misc_feature: Table A; Target 91759; HLA-A*23:01; TSPAN10; ENSG00000182612; TAA
KYLIFLSNF

SEQ ID NO: 91760 - protein, 9 aa, Homo sapiens
  misc_feature: Table A; Target 91760; HLA-A*24:02; TSPAN10; ENSG00000182612; TAA
KYLIFLSNF

SEQ ID NO: 91761 - protein, 8 aa, Homo sapiens
  misc_feature: Table A; Target 91761; HLA-B*54:01; TSPAN10; ENSG00000182612; TAA
LAARLLGA

SEQ ID NO: 91762 - protein, 9 aa, Homo sapiens
  misc_feature: Table A; Target 91762; HLA-B*07:02; TSPAN10; ENSG00000182612; TAA
LAARLLGAL

SEQ ID NO: 91763 - protein, 9 aa, Homo sapiens
  misc_feature: Table A; Target 91763; HLA-B*40:02; TSPAN10; ENSG00000182612; TAA
LAARLLGAL

SEQ ID NO: 91764 - protein, 9 aa, Homo sapiens
  misc_feature: Table A; Target 91764; HLA-B*46:01; TSPAN10; ENSG00000182612; TAA
LAARLLGAL

SEQ ID NO: 91765 - protein, 9 aa, Homo sapiens
  misc_feature: Table A; Target 91765; HLA-B*54:01; TSPAN10; ENSG00000182612; TAA
LAARLLGAL

SEQ ID NO: 91766 - protein, 9 aa, Homo sapiens
  misc_feature: Table A; Target 91766; HLA-C*02:02; TSPAN10; ENSG00000182612; TAA
LAARLLGAL

SEQ ID NO: 91767 - protein, 9 aa, Homo sapiens
  misc_feature: Table A; Target 91767; HLA-C*03:03; TSPAN10; ENSG00000182612; TAA
LAARLLGAL

SEQ ID NO: 91768 - protein, 9 aa, Homo sapiens
  misc_feature: Table A; Target 91768; HLA-C*03:04; TSPAN10; ENSG00000182612; TAA
LAARLLGAL

SEQ ID NO: 91769 - protein, 9 aa, Homo sapiens
  misc_feature: Table A; Target 91769; HLA-C*06:02; TSPAN10; ENSG00000182612; TAA
LAARLLGAL

SEQ ID NO: 91770 - protein, 9 aa, Homo sapiens
  misc_feature: Table A; Target 91770; HLA-C*07:01; TSPAN10; ENSG00000182612; TAA
LAARLLGAL

SEQ ID NO: 91771 - protein, 9 aa, Homo sapiens
  misc_feature: Table A; Target 91771; HLA-C*07:02; TSPAN10; ENSG00000182612; TAA
LAARLLGAL

SEQ ID NO: 91772 - protein, 9 aa, Homo sapiens
  misc_feature: Table A; Target 91772; HLA-C*12:03; TSPAN10; ENSG00000182612; TAA
LAARLLGAL

SEQ ID NO: 91773 - protein, 9 aa, Homo sapiens
  misc_feature: Table A; Target 91773; HLA-C*16:01; TSPAN10; ENSG00000182612; TAA
LAARLLGAL

SEQ ID NO: 91774 - protein, 9 aa, Homo sapiens
  misc_feature: Table A; Target 91774; HLA-C*16:02; TSPAN10; ENSG00000182612; TAA
LAARLLGAL

SEQ ID NO: 91775 - protein, 10 aa, Homo sapiens
  misc_feature: Table A; Target 91775; HLA-B*54:01; TSPAN10; ENSG00000182612; TAA
LAARLLGALA

SEQ ID NO: 91776 - protein, 11 aa, Homo sapiens
  misc_feature: Table A; Target 91776; HLA-B*54:01; TSPAN10; ENSG00000182612; TAA
LAARLLGALAA

SEQ ID NO: 91777 - protein, 9 aa, Homo sapiens
  misc_feature: Table A; Target 91777; HLA-A*01:01; TSPAN10; ENSG00000182612; TAA
LAARSGAAY

SEQ ID NO: 91778 - protein, 9 aa, Homo sapiens
  misc_feature: Table A; Target 91778; HLA-A*23:01; TSPAN10; ENSG00000182612; TAA
LAARSGAAY

SEQ ID NO: 91779 - protein, 9 aa, Homo sapiens
  misc_feature: Table A; Target 91779; HLA-A*25:01; TSPAN10; ENSG00000182612; TAA
LAARSGAAY

SEQ ID NO: 91780 - protein, 9 aa, Homo sapiens
  misc_feature: Table A; Target 91780; HLA-A*26:01; TSPAN10; ENSG00000182612; TAA
LAARSGAAY

SEQ ID NO: 91781 - protein, 9 aa, Homo sapiens
  misc_feature: Table A; Target 91781; HLA-A*29:02; TSPAN10; ENSG00000182612; TAA
LAARSGAAY

SEQ ID NO: 91782 - protein, 9 aa, Homo sapiens
  misc_feature: Table A; Target 91782; HLA-A*30:02; TSPAN10; ENSG00000182612; TAA
LAARSGAAY

SEQ ID NO: 91783 - protein, 9 aa, Homo sapiens
  misc_feature: Table A; Target 91783; HLA-A*32:01; TSPAN10; ENSG00000182612; TAA
LAARSGAAY

SEQ ID NO: 91784 - protein, 9 aa, Homo sapiens
  misc_feature: Table A; Target 91784; HLA-B*15:01; TSPAN10; ENSG00000182612; TAA
LAARSGAAY

SEQ ID NO: 91785 - protein, 9 aa, Homo sapiens
  misc_feature: Table A; Target 91785; HLA-B*15:03; TSPAN10; ENSG00000182612; TAA
LAARSGAAY

SEQ ID NO: 91786 - protein, 9 aa, Homo sapiens
  misc_feature: Table A; Target 91786; HLA-B*27:05; TSPAN10; ENSG00000182612; TAA
LAARSGAAY

SEQ ID NO: 91787 - protein, 9 aa, Homo sapiens
  misc_feature: Table A; Target 91787; HLA-B*35:01; TSPAN10; ENSG00000182612; TAA
LAARSGAAY

SEQ ID NO: 91788 - protein, 9 aa, Homo sapiens
  misc_feature: Table A; Target 91788; HLA-B*39:01; TSPAN10; ENSG00000182612; TAA
LAARSGAAY

SEQ ID NO: 91789 - protein, 9 aa, Homo sapiens
  misc_feature: Table A; Target 91789; HLA-B*46:01; TSPAN10; ENSG00000182612; TAA
LAARSGAAY

SEQ ID NO: 91790 - protein, 9 aa, Homo sapiens
  misc_feature: Table A; Target 91790; HLA-B*55:01; TSPAN10; ENSG00000182612; TAA
LAARSGAAY

SEQ ID NO: 91791 - protein, 9 aa, Homo sapiens
  misc_feature: Table A; Target 91791; HLA-B*57:01; TSPAN10; ENSG00000182612; TAA
LAARSGAAY

SEQ ID NO: 91792 - protein, 9 aa, Homo sapiens
  misc_feature: Table A; Target 91792; HLA-B*58:01; TSPAN10; ENSG00000182612; TAA
LAARSGAAY

SEQ ID NO: 91793 - protein, 9 aa, Homo sapiens
  misc_feature: Table A; Target 91793; HLA-C*01:02; TSPAN10; ENSG00000182612; TAA
LAARSGAAY

SEQ ID NO: 91794 - protein, 9 aa, Homo sapiens
  misc_feature: Table A; Target 91794; HLA-C*02:02; TSPAN10; ENSG00000182612; TAA
LAARSGAAY

SEQ ID NO: 91795 - protein, 9 aa, Homo sapiens
  misc_feature: Table A; Target 91795; HLA-C*03:03; TSPAN10; ENSG00000182612; TAA
LAARSGAAY

SEQ ID NO: 91796 - protein, 9 aa, Homo sapiens
  misc_feature: Table A; Target 91796; HLA-C*03:04; TSPAN10; ENSG00000182612; TAA
LAARSGAAY

SEQ ID NO: 91797 - protein, 9 aa, Homo sapiens
  misc_feature: Table A; Target 91797; HLA-C*04:01; TSPAN10; ENSG00000182612; TAA
LAARSGAAY

SEQ ID NO: 91798 - protein, 9 aa, Homo sapiens
  misc_feature: Table A; Target 91798; HLA-C*05:01; TSPAN10; ENSG00000182612; TAA
LAARSGAAY

SEQ ID NO: 91799 - protein, 9 aa, Homo sapiens
  misc_feature: Table A; Target 91799; HLA-C*07:01; TSPAN10; ENSG00000182612; TAA
LAARSGAAY

SEQ ID NO: 91800 - protein, 9 aa, Homo sapiens
  misc_feature: Table A; Target 91800; HLA-C*07:04; TSPAN10; ENSG00000182612; TAA
LAARSGAAY

SEQ ID NO: 91801 - protein, 9 aa, Homo sapiens
  misc_feature: Table A; Target 91801; HLA-C*07:06; TSPAN10; ENSG00000182612; TAA
LAARSGAAY

SEQ ID NO: 91802 - protein, 9 aa, Homo sapiens
  misc_feature: Table A; Target 91802; HLA-C*12:03; TSPAN10; ENSG00000182612; TAA
LAARSGAAY

SEQ ID NO: 91803 - protein, 9 aa, Homo sapiens
  misc_feature: Table A; Target 91803; HLA-C*14:02; TSPAN10; ENSG00000182612; TAA
LAARSGAAY

SEQ ID NO: 91804 - protein, 9 aa, Homo sapiens
  misc_feature: Table A; Target 91804; HLA-C*16:01; TSPAN10; ENSG00000182612; TAA
LAARSGAAY

SEQ ID NO: 91805 - protein, 9 aa, Homo sapiens
  misc_feature: Table A; Target 91805; HLA-C*16:02; TSPAN10; ENSG00000182612; TAA
LAARSGAAY

SEQ ID NO: 91806 - protein, 9 aa, Homo sapiens
  misc_feature: Table A; Target 91806; HLA-C*16:04; TSPAN10; ENSG00000182612; TAA
LAARSGAAY

SEQ ID NO: 91807 - protein, 8 aa, Homo sapiens
  misc_feature: Table A; Target 91807; HLA-B*39:01; TSPAN10; ENSG00000182612; TAA
LAASGGYA

SEQ ID NO: 91808 - protein, 9 aa, Homo sapiens
  misc_feature: Table A; Target 91808; HLA-A*23:01; TSPAN10; ENSG00000182612; TAA
LAASGGYAI

SEQ ID NO: 91809 - protein, 9 aa, Homo sapiens
  misc_feature: Table A; Target 91809; HLA-A*24:02; TSPAN10; ENSG00000182612; TAA
LAASGGYAI

SEQ ID NO: 91810 - protein, 9 aa, Homo sapiens
  misc_feature: Table A; Target 91810; HLA-A*30:01; TSPAN10; ENSG00000182612; TAA
LAASGGYAI

SEQ ID NO: 91811 - protein, 9 aa, Homo sapiens
  misc_feature: Table A; Target 91811; HLA-A*32:01; TSPAN10; ENSG00000182612; TAA
LAASGGYAI

SEQ ID NO: 91812 - protein, 9 aa, Homo sapiens
  misc_feature: Table A; Target 91812; HLA-A*68:02; TSPAN10; ENSG00000182612; TAA
LAASGGYAI

SEQ ID NO: 91813 - protein, 9 aa, Homo sapiens
  misc_feature: Table A; Target 91813; HLA-B*07:02; TSPAN10; ENSG00000182612; TAA
LAASGGYAI

SEQ ID NO: 91814 - protein, 9 aa, Homo sapiens
  misc_feature: Table A; Target 91814; HLA-B*08:01; TSPAN10; ENSG00000182612; TAA
LAASGGYAI

SEQ ID NO: 91815 - protein, 9 aa, Homo sapiens
  misc_feature: Table A; Target 91815; HLA-B*13:02; TSPAN10; ENSG00000182612; TAA
LAASGGYAI

SEQ ID NO: 91816 - protein, 9 aa, Homo sapiens
  misc_feature: Table A; Target 91816; HLA-B*15:03; TSPAN10; ENSG00000182612; TAA
LAASGGYAI

SEQ ID NO: 91817 - protein, 9 aa, Homo sapiens
  misc_feature: Table A; Target 91817; HLA-B*27:05; TSPAN10; ENSG00000182612; TAA
LAASGGYAI

SEQ ID NO: 91818 - protein, 9 aa, Homo sapiens
  misc_feature: Table A; Target 91818; HLA-B*35:01; TSPAN10; ENSG00000182612; TAA
LAASGGYAI

SEQ ID NO: 91819 - protein, 9 aa, Homo sapiens
  misc_feature: Table A; Target 91819; HLA-B*35:03; TSPAN10; ENSG00000182612; TAA
LAASGGYAI

SEQ ID NO: 91820 - protein, 9 aa, Homo sapiens
  misc_feature: Table A; Target 91820; HLA-B*38:01; TSPAN10; ENSG00000182612; TAA
LAASGGYAI

SEQ ID NO: 91821 - protein, 9 aa, Homo sapiens
  misc_feature: Table A; Target 91821; HLA-B*39:01; TSPAN10; ENSG00000182612; TAA
LAASGGYAI

SEQ ID NO: 91822 - protein, 9 aa, Homo sapiens
  misc_feature: Table A; Target 91822; HLA-B*40:01; TSPAN10; ENSG00000182612; TAA
LAASGGYAI

SEQ ID NO: 91823 - protein, 9 aa, Homo sapiens
  misc_feature: Table A; Target 91823; HLA-B*40:02; TSPAN10; ENSG00000182612; TAA
LAASGGYAI

SEQ ID NO: 91824 - protein, 9 aa, Homo sapiens
  misc_feature: Table A; Target 91824; HLA-B*46:01; TSPAN10; ENSG00000182612; TAA
LAASGGYAI

SEQ ID NO: 91825 - protein, 9 aa, Homo sapiens
  misc_feature: Table A; Target 91825; HLA-B*51:01; TSPAN10; ENSG00000182612; TAA
LAASGGYAI

SEQ ID NO: 91826 - protein, 9 aa, Homo sapiens
  misc_feature: Table A; Target 91826; HLA-B*54:01; TSPAN10; ENSG00000182612; TAA
LAASGGYAI

SEQ ID NO: 91827 - protein, 9 aa, Homo sapiens
  misc_feature: Table A; Target 91827; HLA-B*55:01; TSPAN10; ENSG00000182612; TAA
LAASGGYAI

SEQ ID NO: 91828 - protein, 9 aa, Homo sapiens
  misc_feature: Table A; Target 91828; HLA-B*56:01; TSPAN10; ENSG00000182612; TAA
LAASGGYAI

SEQ ID NO: 91829 - protein, 9 aa, Homo sapiens
  misc_feature: Table A; Target 91829; HLA-B*58:01; TSPAN10; ENSG00000182612; TAA
LAASGGYAI

SEQ ID NO: 91830 - protein, 9 aa, Homo sapiens
  misc_feature: Table A; Target 91830; HLA-C*01:02; TSPAN10; ENSG00000182612; TAA
LAASGGYAI

SEQ ID NO: 91831 - protein, 9 aa, Homo sapiens
  misc_feature: Table A; Target 91831; HLA-C*02:02; TSPAN10; ENSG00000182612; TAA
LAASGGYAI

SEQ ID NO: 91832 - protein, 9 aa, Homo sapiens
  misc_feature: Table A; Target 91832; HLA-C*03:03; TSPAN10; ENSG00000182612; TAA
LAASGGYAI

SEQ ID NO: 91833 - protein, 9 aa, Homo sapiens
  misc_feature: Table A; Target 91833; HLA-C*03:04; TSPAN10; ENSG00000182612; TAA
LAASGGYAI

SEQ ID NO: 91834 - protein, 9 aa, Homo sapiens
  misc_feature: Table A; Target 91834; HLA-C*05:01; TSPAN10; ENSG00000182612; TAA
LAASGGYAI

SEQ ID NO: 91835 - protein, 9 aa, Homo sapiens
  misc_feature: Table A; Target 91835; HLA-C*06:02; TSPAN10; ENSG00000182612; TAA
LAASGGYAI

SEQ ID NO: 91836 - protein, 9 aa, Homo sapiens
  misc_feature: Table A; Target 91836; HLA-C*07:01; TSPAN10; ENSG00000182612; TAA
LAASGGYAI

SEQ ID NO: 91837 - protein, 9 aa, Homo sapiens
  misc_feature: Table A; Target 91837; HLA-C*07:02; TSPAN10; ENSG00000182612; TAA
LAASGGYAI

SEQ ID NO: 91838 - protein, 9 aa, Homo sapiens
  misc_feature: Table A; Target 91838; HLA-C*07:04; TSPAN10; ENSG00000182612; TAA
LAASGGYAI

SEQ ID NO: 91839 - protein, 9 aa, Homo sapiens
  misc_feature: Table A; Target 91839; HLA-C*12:03; TSPAN10; ENSG00000182612; TAA
LAASGGYAI

SEQ ID NO: 91840 - protein, 9 aa, Homo sapiens
  misc_feature: Table A; Target 91840; HLA-C*14:02; TSPAN10; ENSG00000182612; TAA
LAASGGYAI

SEQ ID NO: 91841 - protein, 9 aa, Homo sapiens
  misc_feature: Table A; Target 91841; HLA-C*16:01; TSPAN10; ENSG00000182612; TAA
LAASGGYAI

SEQ ID NO: 91842 - protein, 9 aa, Homo sapiens
  misc_feature: Table A; Target 91842; HLA-C*16:02; TSPAN10; ENSG00000182612; TAA
LAASGGYAI

SEQ ID NO: 91843 - protein, 9 aa, Homo sapiens
  misc_feature: Table A; Target 91843; HLA-C*16:04; TSPAN10; ENSG00000182612; TAA
LAASGGYAI

SEQ ID NO: 91844 - protein, 8 aa, Homo sapiens
  misc_feature: Table A; Target 91844; HLA-B*54:01; TSPAN10; ENSG00000182612; TAA
LAFLVLEA

SEQ ID NO: 91845 - protein, 8 aa, Homo sapiens
  misc_feature: Table A; Target 91845; HLA-B*56:01; TSPAN10; ENSG00000182612; TAA
LAFLVLEA

SEQ ID NO: 91846 - protein, 9 aa, Homo sapiens
  misc_feature: Table A; Target 91846; HLA-A*68:02; TSPAN10; ENSG00000182612; TAA
LAFLVLEAV

SEQ ID NO: 91847 - protein, 9 aa, Homo sapiens
  misc_feature: Table A; Target 91847; HLA-B*18:01; TSPAN10; ENSG00000182612; TAA
LAFLVLEAV

SEQ ID NO: 91848 - protein, 9 aa, Homo sapiens
  misc_feature: Table A; Target 91848; HLA-B*40:02; TSPAN10; ENSG00000182612; TAA
LAFLVLEAV

SEQ ID NO: 91849 - protein, 9 aa, Homo sapiens
  misc_feature: Table A; Target 91849; HLA-B*46:01; TSPAN10; ENSG00000182612; TAA
LAFLVLEAV

SEQ ID NO: 91850 - protein, 9 aa, Homo sapiens
  misc_feature: Table A; Target 91850; HLA-B*51:01; TSPAN10; ENSG00000182612; TAA
LAFLVLEAV

SEQ ID NO: 91851 - protein, 9 aa, Homo sapiens
  misc_feature: Table A; Target 91851; HLA-B*54:01; TSPAN10; ENSG00000182612; TAA
LAFLVLEAV

SEQ ID NO: 91852 - protein, 9 aa, Homo sapiens
  misc_feature: Table A; Target 91852; HLA-B*56:01; TSPAN10; ENSG00000182612; TAA
LAFLVLEAV

SEQ ID NO: 91853 - protein, 9 aa, Homo sapiens
  misc_feature: Table A; Target 91853; HLA-C*02:02; TSPAN10; ENSG00000182612; TAA
LAFLVLEAV

SEQ ID NO: 91854 - protein, 10 aa, Homo sapiens
  misc_feature: Table A; Target 91854; HLA-A*02:04; TSPAN10; ENSG00000182612; TAA
LAIGLWGLAV

SEQ ID NO: 91855 - protein, 8 aa, Homo sapiens
  misc_feature: Table A; Target 91855; HLA-B*57:01; TSPAN10; ENSG00000182612; TAA
LALAIGLW

SEQ ID NO: 91856 - protein, 10 aa, Homo sapiens
  misc_feature: Table A; Target 91856; HLA-A*02:04; TSPAN10; ENSG00000182612; TAA
LALAIGLWGL

SEQ ID NO: 91857 - protein, 8 aa, Homo sapiens
  misc_feature: Table A; Target 91857; HLA-B*51:01; TSPAN10; ENSG00000182612; TAA
LALGGLVV

SEQ ID NO: 91858 - protein, 8 aa, Homo sapiens
  misc_feature: Table A; Target 91858; HLA-C*03:03; TSPAN10; ENSG00000182612; TAA
LALGGLVV

SEQ ID NO: 91859 - protein, 8 aa, Homo sapiens
  misc_feature: Table A; Target 91859; HLA-C*03:04; TSPAN10; ENSG00000182612; TAA
LALGGLVV

SEQ ID NO: 91860 - protein, 10 aa, Homo sapiens
  misc_feature: Table A; Target 91860; HLA-B*54:01; TSPAN10; ENSG00000182612; TAA
LALGGLVVSA

SEQ ID NO: 91861 - protein, 10 aa, Homo sapiens
  misc_feature: Table A; Target 91861; HLA-B*56:01; TSPAN10; ENSG00000182612; TAA
LALGGLVVSA

SEQ ID NO: 91862 - protein, 11 aa, Homo sapiens
  misc_feature: Table A; Target 91862; HLA-B*54:01; TSPAN10; ENSG00000182612; TAA
LALGGLVVSAA

SEQ ID NO: 91863 - protein, 11 aa, Homo sapiens
  misc_feature: Table A; Target 91863; HLA-B*56:01; TSPAN10; ENSG00000182612; TAA
LALGGLVVSAA

SEQ ID NO: 91864 - protein, 11 aa, Homo sapiens
  misc_feature: Table A; Target 91864; HLA-C*03:03; TSPAN10; ENSG00000182612; TAA
LAVKGSLGSDL

SEQ ID NO: 91865 - protein, 8 aa, Homo sapiens
  misc_feature: Table A; Target 91865; HLA-B*27:02; TSPAN10; ENSG00000182612; TAA
LDADAAQR

SEQ ID NO: 91866 - protein, 9 aa, Homo sapiens
  misc_feature: Table A; Target 91866; HLA-B*13:02; TSPAN10; ENSG00000182612; TAA
LDADAAQRV

SEQ ID NO: 91867 - protein, 9 aa, Homo sapiens
  misc_feature: Table A; Target 91867; HLA-B*37:01; TSPAN10; ENSG00000182612; TAA
LDADAAQRV

SEQ ID NO: 91868 - protein, 9 aa, Homo sapiens
  misc_feature: Table A; Target 91868; HLA-C*06:02; TSPAN10; ENSG00000182612; TAA
LDADAAQRV

SEQ ID NO: 91869 - protein, 9 aa, Homo sapiens
  misc_feature: Table A; Target 91869; HLA-C*12:03; TSPAN10; ENSG00000182612; TAA
LDADAAQRV

SEQ ID NO: 91870 - protein, 10 aa, Homo sapiens
  misc_feature: Table A; Target 91870; HLA-A*30:01; TSPAN10; ENSG00000182612; TAA
LDADAAQRVV

SEQ ID NO: 91871 - protein, 10 aa, Homo sapiens
  misc_feature: Table A; Target 91871; HLA-B*40:02; TSPAN10; ENSG00000182612; TAA
LDADAAQRVV

SEQ ID NO: 91872 - protein, 10 aa, Homo sapiens
  misc_feature: Table A; Target 91872; HLA-C*06:02; TSPAN10; ENSG00000182612; TAA
LDADAAQRVV

SEQ ID NO: 91873 - protein, 10 aa, Homo sapiens
  misc_feature: Table A; Target 91873; HLA-C*07:02; TSPAN10; ENSG00000182612; TAA
LDADAAQRVV

SEQ ID NO: 91874 - protein, 10 aa, Homo sapiens
  misc_feature: Table A; Target 91874; HLA-C*16:01; TSPAN10; ENSG00000182612; TAA
LDADAAQRVV

SEQ ID NO: 91875 - protein, 10 aa, Homo sapiens
  misc_feature: Table A; Target 91875; HLA-C*16:02; TSPAN10; ENSG00000182612; TAA
LDADAAQRVV

SEQ ID NO: 91876 - protein, 11 aa, Homo sapiens
  misc_feature: Table A; Target 91876; HLA-A*25:01; TSPAN10; ENSG00000182612; TAA
LDADAAQRVVY

SEQ ID NO: 91877 - protein, 11 aa, Homo sapiens
  misc_feature: Table A; Target 91877; HLA-A*29:02; TSPAN10; ENSG00000182612; TAA
LDADAAQRVVY

SEQ ID NO: 91878 - protein, 11 aa, Homo sapiens
  misc_feature: Table A; Target 91878; HLA-A*30:02; TSPAN10; ENSG00000182612; TAA
LDADAAQRVVY

SEQ ID NO: 91879 - protein, 11 aa, Homo sapiens
  misc_feature: Table A; Target 91879; HLA-A*32:01; TSPAN10; ENSG00000182612; TAA
LDADAAQRVVY

SEQ ID NO: 91880 - protein, 11 aa, Homo sapiens
  misc_feature: Table A; Target 91880; HLA-B*15:01; TSPAN10; ENSG00000182612; TAA
LDADAAQRVVY

SEQ ID NO: 91881 - protein, 11 aa, Homo sapiens
  misc_feature: Table A; Target 91881; HLA-B*15:03; TSPAN10; ENSG00000182612; TAA
LDADAAQRVVY

SEQ ID NO: 91882 - protein, 11 aa, Homo sapiens
  misc_feature: Table A; Target 91882; HLA-B*18:01; TSPAN10; ENSG00000182612; TAA
LDADAAQRVVY

SEQ ID NO: 91883 - protein, 11 aa, Homo sapiens
  misc_feature: Table A; Target 91883; HLA-B*27:02; TSPAN10; ENSG00000182612; TAA
LDADAAQRVVY

SEQ ID NO: 91884 - protein, 11 aa, Homo sapiens
  misc_feature: Table A; Target 91884; HLA-B*35:01; TSPAN10; ENSG00000182612; TAA
LDADAAQRVVY

SEQ ID NO: 91885 - protein, 11 aa, Homo sapiens
  misc_feature: Table A; Target 91885; HLA-B*44:02; TSPAN10; ENSG00000182612; TAA
LDADAAQRVVY

SEQ ID NO: 91886 - protein, 11 aa, Homo sapiens
  misc_feature: Table A; Target 91886; HLA-B*44:03; TSPAN10; ENSG00000182612; TAA
LDADAAQRVVY

SEQ ID NO: 91887 - protein, 11 aa, Homo sapiens
  misc_feature: Table A; Target 91887; HLA-B*57:01; TSPAN10; ENSG00000182612; TAA
LDADAAQRVVY

SEQ ID NO: 91888 - protein, 11 aa, Homo sapiens
  misc_feature: Table A; Target 91888; HLA-C*04:01; TSPAN10; ENSG00000182612; TAA
LDADAAQRVVY

SEQ ID NO: 91889 - protein, 11 aa, Homo sapiens
  misc_feature: Table A; Target 91889; HLA-C*07:01; TSPAN10; ENSG00000182612; TAA
LDADAAQRVVY

SEQ ID NO: 91890 - protein, 11 aa, Homo sapiens
  misc_feature: Table A; Target 91890; HLA-C*07:04; TSPAN10; ENSG00000182612; TAA
LDADAAQRVVY

SEQ ID NO: 91891 - protein, 11 aa, Homo sapiens
  misc_feature: Table A; Target 91891; HLA-C*12:03; TSPAN10; ENSG00000182612; TAA
LDADAAQRVVY

SEQ ID NO: 91892 - protein, 11 aa, Homo sapiens
  misc_feature: Table A; Target 91892; HLA-C*16:01; TSPAN10; ENSG00000182612; TAA
LDADAAQRVVY

SEQ ID NO: 91893 - protein, 11 aa, Homo sapiens
  misc_feature: Table A; Target 91893; HLA-C*16:04; TSPAN10; ENSG00000182612; TAA
LDADAAQRVVY

SEQ ID NO: 91894 - protein, 8 aa, Homo sapiens
  misc_feature: Table A; Target 91894; HLA-A*30:01; TSPAN10; ENSG00000182612; TAA
LEAVAGAL

SEQ ID NO: 91895 - protein, 8 aa, Homo sapiens
  misc_feature: Table A; Target 91895; HLA-B*18:01; TSPAN10; ENSG00000182612; TAA
LEAVAGAL

SEQ ID NO: 91896 - protein, 8 aa, Homo sapiens
  misc_feature: Table A; Target 91896; HLA-B*37:01; TSPAN10; ENSG00000182612; TAA
LEAVAGAL

SEQ ID NO: 91897 - protein, 8 aa, Homo sapiens
  misc_feature: Table A; Target 91897; HLA-B*40:01; TSPAN10; ENSG00000182612; TAA
LEAVAGAL

SEQ ID NO: 91898 - protein, 8 aa, Homo sapiens
  misc_feature: Table A; Target 91898; HLA-B*40:02; TSPAN10; ENSG00000182612; TAA
LEAVAGAL

SEQ ID NO: 91899 - protein, 8 aa, Homo sapiens
  misc_feature: Table A; Target 91899; HLA-B*49:01; TSPAN10; ENSG00000182612; TAA
LEAVAGAL

SEQ ID NO: 91900 - protein, 9 aa, Homo sapiens
  misc_feature: Table A; Target 91900; HLA-A*30:01; TSPAN10; ENSG00000182612; TAA
LEAVAGALV

SEQ ID NO: 91901 - protein, 9 aa, Homo sapiens
  misc_feature: Table A; Target 91901; HLA-B*18:01; TSPAN10; ENSG00000182612; TAA
LEAVAGALV

SEQ ID NO: 91902 - protein, 9 aa, Homo sapiens
  misc_feature: Table A; Target 91902; HLA-B*40:01; TSPAN10; ENSG00000182612; TAA
LEAVAGALV

SEQ ID NO: 91903 - protein, 9 aa, Homo sapiens
  misc_feature: Table A; Target 91903; HLA-B*40:02; TSPAN10; ENSG00000182612; TAA
LEAVAGALV

SEQ ID NO: 91904 - protein, 9 aa, Homo sapiens
  misc_feature: Table A; Target 91904; HLA-B*49:01; TSPAN10; ENSG00000182612; TAA
LEAVAGALV

SEQ ID NO: 91905 - protein, 10 aa, Homo sapiens
  misc_feature: Table A; Target 91905; HLA-A*30:01; TSPAN10; ENSG00000182612; TAA
LEAVAGALVV

SEQ ID NO: 91906 - protein, 10 aa, Homo sapiens
  misc_feature: Table A; Target 91906; HLA-B*40:01; TSPAN10; ENSG00000182612; TAA
LEAVAGALVV

SEQ ID NO: 91907 - protein, 10 aa, Homo sapiens
  misc_feature: Table A; Target 91907; HLA-B*40:02; TSPAN10; ENSG00000182612; TAA
LEAVAGALVV

SEQ ID NO: 91908 - protein, 10 aa, Homo sapiens
  misc_feature: Table A; Target 91908; HLA-B*49:01; TSPAN10; ENSG00000182612; TAA
LEAVAGALVV

SEQ ID NO: 91909 - protein, 11 aa, Homo sapiens
  misc_feature: Table A; Target 91909; HLA-A*30:01; TSPAN10; ENSG00000182612; TAA
LEAVAGALVVA

SEQ ID NO: 91910 - protein, 11 aa, Homo sapiens
  misc_feature: Table A; Target 91910; HLA-B*40:01; TSPAN10; ENSG00000182612; TAA
LEAVAGALVVA

SEQ ID NO: 91911 - protein, 11 aa, Homo sapiens
  misc_feature: Table A; Target 91911; HLA-B*49:01; TSPAN10; ENSG00000182612; TAA
LEAVAGALVVA

SEQ ID NO: 91912 - protein, 8 aa, Homo sapiens
  misc_feature: Table A; Target 91912; HLA-B*40:02; TSPAN10; ENSG00000182612; TAA
LEHTLRVA

SEQ ID NO: 91913 - protein, 9 aa, Homo sapiens
  misc_feature: Table A; Target 91913; HLA-A*30:01; TSPAN10; ENSG00000182612; TAA
LEHTLRVAI

SEQ ID NO: 91914 - protein, 9 aa, Homo sapiens
  misc_feature: Table A; Target 91914; HLA-B*18:01; TSPAN10; ENSG00000182612; TAA
LEHTLRVAI

SEQ ID NO: 91915 - protein, 9 aa, Homo sapiens
  misc_feature: Table A; Target 91915; HLA-B*37:01; TSPAN10; ENSG00000182612; TAA
LEHTLRVAI

SEQ ID NO: 91916 - protein, 9 aa, Homo sapiens
  misc_feature: Table A; Target 91916; HLA-B*40:01; TSPAN10; ENSG00000182612; TAA
LEHTLRVAI

SEQ ID NO: 91917 - protein, 9 aa, Homo sapiens
  misc_feature: Table A; Target 91917; HLA-B*40:02; TSPAN10; ENSG00000182612; TAA
LEHTLRVAI

SEQ ID NO: 91918 - protein, 9 aa, Homo sapiens
  misc_feature: Table A; Target 91918; HLA-B*44:02; TSPAN10; ENSG00000182612; TAA
LEHTLRVAI

SEQ ID NO: 91919 - protein, 9 aa, Homo sapiens
  misc_feature: Table A; Target 91919; HLA-B*44:03; TSPAN10; ENSG00000182612; TAA
LEHTLRVAI

SEQ ID NO: 91920 - protein, 9 aa, Homo sapiens
  misc_feature: Table A; Target 91920; HLA-B*49:01; TSPAN10; ENSG00000182612; TAA
LEHTLRVAI

SEQ ID NO: 91921 - protein, 8 aa, Homo sapiens
  misc_feature: Table A; Target 91921; HLA-B*54:01; TSPAN10; ENSG00000182612; TAA
LGGLVVSA

SEQ ID NO: 91922 - protein, 9 aa, Homo sapiens
  misc_feature: Table A; Target 91922; HLA-B*54:01; TSPAN10; ENSG00000182612; TAA
LGGLVVSAA

SEQ ID NO: 91923 - protein, 11 aa, Homo sapiens
  misc_feature: Table A; Target 91923; HLA-C*07:02; TSPAN10; ENSG00000182612; TAA
LGGLVVSAASL

SEQ ID NO: 91924 - protein, 9 aa, Homo sapiens
  misc_feature: Table A; Target 91924; HLA-C*03:04; TSPAN10; ENSG00000182612; TAA
LGSDLGGPL

SEQ ID NO: 91925 - protein, 9 aa, Homo sapiens
  misc_feature: Table A; Target 91925; HLA-B*57:01; TSPAN10; ENSG00000182612; TAA
LIFLSNFPF

SEQ ID NO: 91926 - protein, 9 aa, Homo sapiens
  misc_feature: Table A; Target 91926; HLA-A*02:01; TSPAN10; ENSG00000182612; TAA
LLAARLLGA

SEQ ID NO: 91927 - protein, 9 aa, Homo sapiens
  misc_feature: Table A; Target 91927; HLA-A*02:03; TSPAN10; ENSG00000182612; TAA
LLAARLLGA

SEQ ID NO: 91928 - protein, 9 aa, Homo sapiens
  misc_feature: Table A; Target 91928; HLA-A*02:04; TSPAN10; ENSG00000182612; TAA
LLAARLLGA

SEQ ID NO: 91929 - protein, 9 aa, Homo sapiens
  misc_feature: Table A; Target 91929; HLA-B*08:01; TSPAN10; ENSG00000182612; TAA
LLAARLLGA

SEQ ID NO: 91930 - protein, 9 aa, Homo sapiens
  misc_feature: Table A; Target 91930; HLA-B*55:01; TSPAN10; ENSG00000182612; TAA
LLAARLLGA

SEQ ID NO: 91931 - protein, 10 aa, Homo sapiens
  misc_feature: Table A; Target 91931; HLA-A*02:03; TSPAN10; ENSG00000182612; TAA
LLAARLLGAL

SEQ ID NO: 91932 - protein, 11 aa, Homo sapiens
  misc_feature: Table A; Target 91932; HLA-A*02:04; TSPAN10; ENSG00000182612; TAA
LLALAIGLWGL

SEQ ID NO: 91933 - protein, 9 aa, Homo sapiens
  misc_feature: Table A; Target 91933; HLA-A*01:01; TSPAN10; ENSG00000182612; TAA
LLDQVQLGL

SEQ ID NO: 91934 - protein, 9 aa, Homo sapiens
  misc_feature: Table A; Target 91934; HLA-A*02:01; TSPAN10; ENSG00000182612; TAA
LLDQVQLGL

SEQ ID NO: 91935 - protein, 9 aa, Homo sapiens
  misc_feature: Table A; Target 91935; HLA-A*02:04; TSPAN10; ENSG00000182612; TAA
LLDQVQLGL

SEQ ID NO: 91936 - protein, 9 aa, Homo sapiens
  misc_feature: Table A; Target 91936; HLA-A*02:07; TSPAN10; ENSG00000182612; TAA
LLDQVQLGL

SEQ ID NO: 91937 - protein, 9 aa, Homo sapiens
  misc_feature: Table A; Target 91937; HLA-A*68:02; TSPAN10; ENSG00000182612; TAA
LLDQVQLGL

SEQ ID NO: 91938 - protein, 9 aa, Homo sapiens
  misc_feature: Table A; Target 91938; HLA-B*13:02; TSPAN10; ENSG00000182612; TAA
LLDQVQLGL

SEQ ID NO: 91939 - protein, 9 aa, Homo sapiens
  misc_feature: Table A; Target 91939; HLA-B*38:01; TSPAN10; ENSG00000182612; TAA
LLDQVQLGL

SEQ ID NO: 91940 - protein, 9 aa, Homo sapiens
  misc_feature: Table A; Target 91940; HLA-C*05:01; TSPAN10; ENSG00000182612; TAA
LLDQVQLGL

SEQ ID NO: 91941 - protein, 8 aa, Homo sapiens
  misc_feature: Table A; Target 91941; HLA-B*27:02; TSPAN10; ENSG00000182612; TAA
LLGALAAR

SEQ ID NO: 91942 - protein, 10 aa, Homo sapiens
  misc_feature: Table A; Target 91942; HLA-A*02:01; TSPAN10; ENSG00000182612; TAA
LLLAARLLGA

SEQ ID NO: 91943 - protein, 10 aa, Homo sapiens
  misc_feature: Table A; Target 91943; HLA-A*02:03; TSPAN10; ENSG00000182612; TAA
LLLAARLLGA

SEQ ID NO: 91944 - protein, 10 aa, Homo sapiens
  misc_feature: Table A; Target 91944; HLA-A*02:04; TSPAN10; ENSG00000182612; TAA
LLLAARLLGA

SEQ ID NO: 91945 - protein, 9 aa, Homo sapiens
  misc_feature: Table A; Target 91945; HLA-A*02:01; TSPAN10; ENSG00000182612; TAA
LLQGAELLL

SEQ ID NO: 91946 - protein, 9 aa, Homo sapiens
  misc_feature: Table A; Target 91946; HLA-A*02:04; TSPAN10; ENSG00000182612; TAA
LLQGAELLL

SEQ ID NO: 91947 - protein, 10 aa, Homo sapiens
  misc_feature: Table A; Target 91947; HLA-A*02:03; TSPAN10; ENSG00000182612; TAA
LLQGAELLLA

SEQ ID NO: 91948 - protein, 10 aa, Homo sapiens
  misc_feature: Table A; Target 91948; HLA-A*02:04; TSPAN10; ENSG00000182612; TAA
LLQGAELLLA

SEQ ID NO: 91949 - protein, 9 aa, Homo sapiens
  misc_feature: Table A; Target 91949; HLA-B*07:02; TSPAN10; ENSG00000182612; TAA
LPTDPMLGL

SEQ ID NO: 91950 - protein, 9 aa, Homo sapiens
  misc_feature: Table A; Target 91950; HLA-B*35:01; TSPAN10; ENSG00000182612; TAA
LPTDPMLGL

SEQ ID NO: 91951 - protein, 9 aa, Homo sapiens
  misc_feature: Table A; Target 91951; HLA-B*35:03; TSPAN10; ENSG00000182612; TAA
LPTDPMLGL

SEQ ID NO: 91952 - protein, 9 aa, Homo sapiens
  misc_feature: Table A; Target 91952; HLA-B*51:01; TSPAN10; ENSG00000182612; TAA
LPTDPMLGL

SEQ ID NO: 91953 - protein, 9 aa, Homo sapiens
  misc_feature: Table A; Target 91953; HLA-B*54:01; TSPAN10; ENSG00000182612; TAA
LPTDPMLGL

SEQ ID NO: 91954 - protein, 9 aa, Homo sapiens
  misc_feature: Table A; Target 91954; HLA-B*55:01; TSPAN10; ENSG00000182612; TAA
LPTDPMLGL

SEQ ID NO: 91955 - protein, 9 aa, Homo sapiens
  misc_feature: Table A; Target 91955; HLA-B*56:01; TSPAN10; ENSG00000182612; TAA
LPTDPMLGL

SEQ ID NO: 91956 - protein, 9 aa, Homo sapiens
  misc_feature: Table A; Target 91956; HLA-C*03:04; TSPAN10; ENSG00000182612; TAA
LPTDPMLGL

SEQ ID NO: 91957 - protein, 9 aa, Homo sapiens
  misc_feature: Table A; Target 91957; HLA-C*07:02; TSPAN10; ENSG00000182612; TAA
LPTDPMLGL

SEQ ID NO: 91958 - protein, 10 aa, Homo sapiens
  misc_feature: Table A; Target 91958; HLA-B*56:01; TSPAN10; ENSG00000182612; TAA
LPTDPMLGLA

SEQ ID NO: 91959 - protein, 11 aa, Homo sapiens
  misc_feature: Table A; Target 91959; HLA-B*35:03; TSPAN10; ENSG00000182612; TAA
LPTDPMLGLAL

SEQ ID NO: 91960 - protein, 9 aa, Homo sapiens
  misc_feature: Table A; Target 91960; HLA-A*02:01; TSPAN10; ENSG00000182612; TAA
LQDSLEHTL

SEQ ID NO: 91961 - protein, 9 aa, Homo sapiens
  misc_feature: Table A; Target 91961; HLA-A*02:07; TSPAN10; ENSG00000182612; TAA
LQDSLEHTL

SEQ ID NO: 91962 - protein, 9 aa, Homo sapiens
  misc_feature: Table A; Target 91962; HLA-B*13:02; TSPAN10; ENSG00000182612; TAA
LQDSLEHTL

SEQ ID NO: 91963 - protein, 9 aa, Homo sapiens
  misc_feature: Table A; Target 91963; HLA-B*27:05; TSPAN10; ENSG00000182612; TAA
LQDSLEHTL

SEQ ID NO: 91964 - protein, 9 aa, Homo sapiens
  misc_feature: Table A; Target 91964; HLA-B*35:03; TSPAN10; ENSG00000182612; TAA
LQDSLEHTL

SEQ ID NO: 91965 - protein, 9 aa, Homo sapiens
  misc_feature: Table A; Target 91965; HLA-B*38:01; TSPAN10; ENSG00000182612; TAA
LQDSLEHTL

SEQ ID NO: 91966 - protein, 9 aa, Homo sapiens
  misc_feature: Table A; Target 91966; HLA-B*39:01; TSPAN10; ENSG00000182612; TAA
LQDSLEHTL

SEQ ID NO: 91967 - protein, 9 aa, Homo sapiens
  misc_feature: Table A; Target 91967; HLA-B*40:01; TSPAN10; ENSG00000182612; TAA
LQDSLEHTL

SEQ ID NO: 91968 - protein, 9 aa, Homo sapiens
  misc_feature: Table A; Target 91968; HLA-C*05:01; TSPAN10; ENSG00000182612; TAA
LQDSLEHTL

SEQ ID NO: 91969 - protein, 11 aa, Homo sapiens
  misc_feature: Table A; Target 91969; HLA-A*30:02; TSPAN10; ENSG00000182612; TAA
LRANLAASGGY

SEQ ID NO: 91970 - protein, 11 aa, Homo sapiens
  misc_feature: Table A; Target 91970; HLA-B*27:02; TSPAN10; ENSG00000182612; TAA
LRANLAASGGY

SEQ ID NO: 91971 - protein, 11 aa, Homo sapiens
  misc_feature: Table A; Target 91971; HLA-C*16:04; TSPAN10; ENSG00000182612; TAA
LRANLAASGGY

SEQ ID NO: 91972 - protein, 10 aa, Homo sapiens
  misc_feature: Table A; Target 91972; HLA-B*27:02; TSPAN10; ENSG00000182612; TAA
LRLDADAAQR

SEQ ID NO: 91973 - protein, 10 aa, Homo sapiens
  misc_feature: Table A; Target 91973; HLA-B*27:05; TSPAN10; ENSG00000182612; TAA
LRLDADAAQR

SEQ ID NO: 91974 - protein, 8 aa, Homo sapiens
  misc_feature: Table A; Target 91974; HLA-C*07:01; TSPAN10; ENSG00000182612; TAA
LRVAIAHY

SEQ ID NO: 91975 - protein, 9 aa, Homo sapiens
  misc_feature: Table A; Target 91975; HLA-B*57:01; TSPAN10; ENSG00000182612; TAA
LSNFPFSLL

SEQ ID NO: 91976 - protein, 9 aa, Homo sapiens
  misc_feature: Table A; Target 91976; HLA-A*03:02; TSPAN10; ENSG00000182612; TAA
LSQETAGQK

SEQ ID NO: 91977 - protein, 9 aa, Homo sapiens
  misc_feature: Table A; Target 91977; HLA-A*11:01; TSPAN10; ENSG00000182612; TAA
LSQETAGQK

SEQ ID NO: 91978 - protein, 8 aa, Homo sapiens
  misc_feature: Table A; Target 91978; HLA-B*39:01; TSPAN10; ENSG00000182612; TAA
LVLEAVAG

SEQ ID NO: 91979 - protein, 9 aa, Homo sapiens
  misc_feature: Table A; Target 91979; HLA-A*02:01; TSPAN10; ENSG00000182612; TAA
LVLEAVAGA

SEQ ID NO: 91980 - protein, 9 aa, Homo sapiens
  misc_feature: Table A; Target 91980; HLA-A*02:03; TSPAN10; ENSG00000182612; TAA
LVLEAVAGA

SEQ ID NO: 91981 - protein, 9 aa, Homo sapiens
  misc_feature: Table A; Target 91981; HLA-A*02:04; TSPAN10; ENSG00000182612; TAA
LVLEAVAGA

SEQ ID NO: 91982 - protein, 9 aa, Homo sapiens
  misc_feature: Table A; Target 91982; HLA-A*02:07; TSPAN10; ENSG00000182612; TAA
LVLEAVAGA

SEQ ID NO: 91983 - protein, 9 aa, Homo sapiens
  misc_feature: Table A; Target 91983; HLA-B*54:01; TSPAN10; ENSG00000182612; TAA
LVLEAVAGA

SEQ ID NO: 91984 - protein, 9 aa, Homo sapiens
  misc_feature: Table A; Target 91984; HLA-B*55:01; TSPAN10; ENSG00000182612; TAA
LVLEAVAGA

SEQ ID NO: 91985 - protein, 9 aa, Homo sapiens
  misc_feature: Table A; Target 91985; HLA-B*56:01; TSPAN10; ENSG00000182612; TAA
LVLEAVAGA

SEQ ID NO: 91986 - protein, 10 aa, Homo sapiens
  misc_feature: Table A; Target 91986; HLA-C*03:03; TSPAN10; ENSG00000182612; TAA
LVLEAVAGAL

SEQ ID NO: 91987 - protein, 10 aa, Homo sapiens
  misc_feature: Table A; Target 91987; HLA-C*03:04; TSPAN10; ENSG00000182612; TAA
LVLEAVAGAL

SEQ ID NO: 91988 - protein, 11 aa, Homo sapiens
  misc_feature: Table A; Target 91988; HLA-A*02:01; TSPAN10; ENSG00000182612; TAA
LVLEAVAGALV

SEQ ID NO: 91989 - protein, 8 aa, Homo sapiens
  misc_feature: Table A; Target 91989; HLA-B*35:03; TSPAN10; ENSG00000182612; TAA
LVVSAASL

SEQ ID NO: 91990 - protein, 8 aa, Homo sapiens
  misc_feature: Table A; Target 91990; HLA-C*01:02; TSPAN10; ENSG00000182612; TAA
LVVSAASL

SEQ ID NO: 91991 - protein, 8 aa, Homo sapiens
  misc_feature: Table A; Target 91991; HLA-C*03:03; TSPAN10; ENSG00000182612; TAA
LVVSAASL

SEQ ID NO: 91992 - protein, 8 aa, Homo sapiens
  misc_feature: Table A; Target 91992; HLA-C*03:04; TSPAN10; ENSG00000182612; TAA
LVVSAASL

SEQ ID NO: 91993 - protein, 8 aa, Homo sapiens
  misc_feature: Table A; Target 91993; HLA-C*14:02; TSPAN10; ENSG00000182612; TAA
LVVSAASL

SEQ ID NO: 91994 - protein, 9 aa, Homo sapiens
  misc_feature: Table A; Target 91994; HLA-B*40:01; TSPAN10; ENSG00000182612; TAA
MEEGERSPL

SEQ ID NO: 91995 - protein, 10 aa, Homo sapiens
  misc_feature: Table A; Target 91995; HLA-A*30:01; TSPAN10; ENSG00000182612; TAA
MEEGERSPLL

SEQ ID NO: 91996 - protein, 10 aa, Homo sapiens
  misc_feature: Table A; Target 91996; HLA-B*37:01; TSPAN10; ENSG00000182612; TAA
MEEGERSPLL

SEQ ID NO: 91997 - protein, 10 aa, Homo sapiens
  misc_feature: Table A; Target 91997; HLA-B*40:01; TSPAN10; ENSG00000182612; TAA
MEEGERSPLL

SEQ ID NO: 91998 - protein, 10 aa, Homo sapiens
  misc_feature: Table A; Target 91998; HLA-B*44:02; TSPAN10; ENSG00000182612; TAA
MEEGERSPLL

SEQ ID NO: 91999 - protein, 10 aa, Homo sapiens
  misc_feature: Table A; Target 91999; HLA-B*49:01; TSPAN10; ENSG00000182612; TAA
MEEGERSPLL

SEQ ID NO: 92000 - protein, 9 aa, Homo sapiens
  misc_feature: Table A; Target 92000; HLA-C*01:02; TSPAN10; ENSG00000182612; TAA
NFPFSLLGL

SEQ ID NO: 92001 - protein, 8 aa, Homo sapiens
  misc_feature: Table A; Target 92001; HLA-A*32:01; TSPAN10; ENSG00000182612; TAA
NLAASGGY

SEQ ID NO: 92002 - protein, 8 aa, Homo sapiens
  misc_feature: Table A; Target 92002; HLA-B*15:03; TSPAN10; ENSG00000182612; TAA
NLAASGGY

SEQ ID NO: 92003 - protein, 8 aa, Homo sapiens
  misc_feature: Table A; Target 92003; HLA-B*39:01; TSPAN10; ENSG00000182612; TAA
NLAASGGY

SEQ ID NO: 92004 - protein, 10 aa, Homo sapiens
  misc_feature: Table A; Target 92004; HLA-B*38:01; TSPAN10; ENSG00000182612; TAA
NLAASGGYAI

SEQ ID NO: 92005 - protein, 10 aa, Homo sapiens
  misc_feature: Table A; Target 92005; HLA-B*39:01; TSPAN10; ENSG00000182612; TAA
NLAASGGYAI

SEQ ID NO: 92006 - protein, 8 aa, Homo sapiens
  misc_feature: Table A; Target 92006; HLA-B*37:01; TSPAN10; ENSG00000182612; TAA
PETKHQAL

SEQ ID NO: 92007 - protein, 8 aa, Homo sapiens
  misc_feature: Table A; Target 92007; HLA-B*40:02; TSPAN10; ENSG00000182612; TAA
PETKHQAL

SEQ ID NO: 92008 - protein, 8 aa, Homo sapiens
  misc_feature: Table A; Target 92008; HLA-C*07:02; TSPAN10; ENSG00000182612; TAA
PETKHQAL

SEQ ID NO: 92009 - protein, 9 aa, Homo sapiens
  misc_feature: Table A; Target 92009; HLA-B*07:02; TSPAN10; ENSG00000182612; TAA
PGAPPAAKP

SEQ ID NO: 92010 - protein, 9 aa, Homo sapiens
  misc_feature: Table A; Target 92010; HLA-C*06:02; TSPAN10; ENSG00000182612; TAA
PGAPPAAKP

SEQ ID NO: 92011 - protein, 9 aa, Homo sapiens
  misc_feature: Table A; Target 92011; HLA-C*07:02; TSPAN10; ENSG00000182612; TAA
PGAPPAAKP

SEQ ID NO: 92012 - protein, 8 aa, Homo sapiens
  misc_feature: Table A; Target 92012; HLA-C*07:01; TSPAN10; ENSG00000182612; TAA
PGSSCVKY

SEQ ID NO: 92013 - protein, 9 aa, Homo sapiens
  misc_feature: Table A; Target 92013; HLA-B*07:02; TSPAN10; ENSG00000182612; TAA
PKKGPAPSL

SEQ ID NO: 92014 - protein, 9 aa, Homo sapiens
  misc_feature: Table A; Target 92014; HLA-B*15:03; TSPAN10; ENSG00000182612; TAA
PKKGPAPSL

SEQ ID NO: 92015 - protein, 9 aa, Homo sapiens
  misc_feature: Table A; Target 92015; HLA-C*07:02; TSPAN10; ENSG00000182612; TAA
PKKGPAPSL

SEQ ID NO: 92016 - protein, 11 aa, Homo sapiens
  misc_feature: Table A; Target 92016; HLA-C*07:01; TSPAN10; ENSG00000182612; TAA
PLLSQETAGQK

SEQ ID NO: 92017 - protein, 10 aa, Homo sapiens
  misc_feature: Table A; Target 92017; HLA-C*06:02; TSPAN10; ENSG00000182612; TAA
PLQDSLEHTL

SEQ ID NO: 92018 - protein, 10 aa, Homo sapiens
  misc_feature: Table A; Target 92018; HLA-C*07:02; TSPAN10; ENSG00000182612; TAA
PLQDSLEHTL

SEQ ID NO: 92019 - protein, 9 aa, Homo sapiens
  misc_feature: Table A; Target 92019; HLA-B*07:02; TSPAN10; ENSG00000182612; TAA
PPETKHQAL

SEQ ID NO: 92020 - protein, 10 aa, Homo sapiens
  misc_feature: Table A; Target 92020; HLA-C*07:02; TSPAN10; ENSG00000182612; TAA
PSPGAPPAAK

SEQ ID NO: 92021 - protein, 11 aa, Homo sapiens
  misc_feature: Table A; Target 92021; HLA-C*07:02; TSPAN10; ENSG00000182612; TAA
PSPGAPPAAKP

SEQ ID NO: 92022 - protein, 8 aa, Homo sapiens
  misc_feature: Table A; Target 92022; HLA-A*03:01; TSPAN10; ENSG00000182612; TAA
QALSGTPK

SEQ ID NO: 92023 - protein, 8 aa, Homo sapiens
  misc_feature: Table A; Target 92023; HLA-A*03:02; TSPAN10; ENSG00000182612; TAA
QALSGTPK

SEQ ID NO: 92024 - protein, 8 aa, Homo sapiens
  misc_feature: Table A; Target 92024; HLA-A*11:01; TSPAN10; ENSG00000182612; TAA
QALSGTPK

SEQ ID NO: 92025 - protein, 8 aa, Homo sapiens
  misc_feature: Table A; Target 92025; HLA-A*33:01; TSPAN10; ENSG00000182612; TAA
QALSGTPK

SEQ ID NO: 92026 - protein, 9 aa, Homo sapiens
  misc_feature: Table A; Target 92026; HLA-A*03:02; TSPAN10; ENSG00000182612; TAA
QALSGTPKK

SEQ ID NO: 92027 - protein, 9 aa, Homo sapiens
  misc_feature: Table A; Target 92027; HLA-A*11:01; TSPAN10; ENSG00000182612; TAA
QALSGTPKK

SEQ ID NO: 92028 - protein, 9 aa, Homo sapiens
  misc_feature: Table A; Target 92028; HLA-B*38:01; TSPAN10; ENSG00000182612; TAA
QDDPDLRFL

SEQ ID NO: 92029 - protein, 9 aa, Homo sapiens
  misc_feature: Table A; Target 92029; HLA-B*40:01; TSPAN10; ENSG00000182612; TAA
QDDPDLRFL

SEQ ID NO: 92030 - protein, 10 aa, Homo sapiens
  misc_feature: Table A; Target 92030; HLA-B*38:01; TSPAN10; ENSG00000182612; TAA
QDDPDLRFLL

SEQ ID NO: 92031 - protein, 8 aa, Homo sapiens
  misc_feature: Table A; Target 92031; HLA-B*37:01; TSPAN10; ENSG00000182612; TAA
QDSLEHTL

SEQ ID NO: 92032 - protein, 8 aa, Homo sapiens
  misc_feature: Table A; Target 92032; HLA-B*38:01; TSPAN10; ENSG00000182612; TAA
QDSLEHTL

SEQ ID NO: 92033 - protein, 9 aa, Homo sapiens
  misc_feature: Table A; Target 92033; HLA-B*44:02; TSPAN10; ENSG00000182612; TAA
QDWQQNLYF

SEQ ID NO: 92034 - protein, 9 aa, Homo sapiens
  misc_feature: Table A; Target 92034; HLA-B*44:03; TSPAN10; ENSG00000182612; TAA
QDWQQNLYF

SEQ ID NO: 92035 - protein, 9 aa, Homo sapiens
  misc_feature: Table A; Target 92035; HLA-A*30:01; TSPAN10; ENSG00000182612; TAA
QETAGQKPL

SEQ ID NO: 92036 - protein, 9 aa, Homo sapiens
  misc_feature: Table A; Target 92036; HLA-B*37:01; TSPAN10; ENSG00000182612; TAA
QETAGQKPL

SEQ ID NO: 92037 - protein, 9 aa, Homo sapiens
  misc_feature: Table A; Target 92037; HLA-B*40:01; TSPAN10; ENSG00000182612; TAA
QETAGQKPL

SEQ ID NO: 92038 - protein, 9 aa, Homo sapiens
  misc_feature: Table A; Target 92038; HLA-B*40:02; TSPAN10; ENSG00000182612; TAA
QETAGQKPL

SEQ ID NO: 92039 - protein, 9 aa, Homo sapiens
  misc_feature: Table A; Target 92039; HLA-B*44:02; TSPAN10; ENSG00000182612; TAA
QETAGQKPL

SEQ ID NO: 92040 - protein, 9 aa, Homo sapiens
  misc_feature: Table A; Target 92040; HLA-B*44:03; TSPAN10; ENSG00000182612; TAA
QETAGQKPL

SEQ ID NO: 92041 - protein, 9 aa, Homo sapiens
  misc_feature: Table A; Target 92041; HLA-B*49:01; TSPAN10; ENSG00000182612; TAA
QETAGQKPL

SEQ ID NO: 92042 - protein, 9 aa, Homo sapiens
  misc_feature: Table A; Target 92042; HLA-C*07:01; TSPAN10; ENSG00000182612; TAA
QETAGQKPL

SEQ ID NO: 92043 - protein, 9 aa, Homo sapiens
  misc_feature: Table A; Target 92043; HLA-C*16:02; TSPAN10; ENSG00000182612; TAA
QETAGQKPL

SEQ ID NO: 92044 - protein, 9 aa, Homo sapiens
  misc_feature: Table A; Target 92044; HLA-C*16:04; TSPAN10; ENSG00000182612; TAA
QETAGQKPL

SEQ ID NO: 92045 - protein, 11 aa, Homo sapiens
  misc_feature: Table A; Target 92045; HLA-B*49:01; TSPAN10; ENSG00000182612; TAA
QETAGQKPLSV

SEQ ID NO: 92046 - protein, 9 aa, Homo sapiens
  misc_feature: Table A; Target 92046; HLA-B*54:01; TSPAN10; ENSG00000182612; TAA
QGAELLLAA

SEQ ID NO: 92047 - protein, 9 aa, Homo sapiens
  misc_feature: Table A; Target 92047; HLA-B*56:01; TSPAN10; ENSG00000182612; TAA
QGAELLLAA

SEQ ID NO: 92048 - protein, 10 aa, Homo sapiens
  misc_feature: Table A; Target 92048; HLA-A*31:01; TSPAN10; ENSG00000182612; TAA
QGAELLLAAR

SEQ ID NO: 92049 - protein, 10 aa, Homo sapiens
  misc_feature: Table A; Target 92049; HLA-A*33:03; TSPAN10; ENSG00000182612; TAA
QGAELLLAAR

SEQ ID NO: 92050 - protein, 10 aa, Homo sapiens
  misc_feature: Table A; Target 92050; HLA-A*68:01; TSPAN10; ENSG00000182612; TAA
QGAELLLAAR

SEQ ID NO: 92051 - protein, 10 aa, Homo sapiens
  misc_feature: Table A; Target 92051; HLA-B*27:02; TSPAN10; ENSG00000182612; TAA
QGAELLLAAR

SEQ ID NO: 92052 - protein, 10 aa, Homo sapiens
  misc_feature: Table A; Target 92052; HLA-C*07:06; TSPAN10; ENSG00000182612; TAA
QGAELLLAAR

SEQ ID NO: 92053 - protein, 10 aa, Homo sapiens
  misc_feature: Table A; Target 92053; HLA-A*30:02; TSPAN10; ENSG00000182612; TAA
RANLAASGGY

SEQ ID NO: 92054 - protein, 10 aa, Homo sapiens
  misc_feature: Table A; Target 92054; HLA-B*15:01; TSPAN10; ENSG00000182612; TAA
RANLAASGGY

SEQ ID NO: 92055 - protein, 10 aa, Homo sapiens
  misc_feature: Table A; Target 92055; HLA-B*15:03; TSPAN10; ENSG00000182612; TAA
RANLAASGGY

SEQ ID NO: 92056 - protein, 10 aa, Homo sapiens
  misc_feature: Table A; Target 92056; HLA-B*27:02; TSPAN10; ENSG00000182612; TAA
RANLAASGGY

SEQ ID NO: 92057 - protein, 10 aa, Homo sapiens
  misc_feature: Table A; Target 92057; HLA-B*46:01; TSPAN10; ENSG00000182612; TAA
RANLAASGGY

SEQ ID NO: 92058 - protein, 10 aa, Homo sapiens
  misc_feature: Table A; Target 92058; HLA-B*58:01; TSPAN10; ENSG00000182612; TAA
RANLAASGGY

SEQ ID NO: 92059 - protein, 10 aa, Homo sapiens
  misc_feature: Table A; Target 92059; HLA-C*16:04; TSPAN10; ENSG00000182612; TAA
RANLAASGGY

SEQ ID NO: 92060 - protein, 9 aa, Homo sapiens
  misc_feature: Table A; Target 92060; HLA-A*23:01; TSPAN10; ENSG00000182612; TAA
RFLLDQVQL

SEQ ID NO: 92061 - protein, 9 aa, Homo sapiens
  misc_feature: Table A; Target 92061; HLA-A*24:02; TSPAN10; ENSG00000182612; TAA
RFLLDQVQL

SEQ ID NO: 92062 - protein, 8 aa, Homo sapiens
  misc_feature: Table A; Target 92062; HLA-C*03:04; TSPAN10; ENSG00000182612; TAA
RGFSGGIL

SEQ ID NO: 92063 - protein, 9 aa, Homo sapiens
  misc_feature: Table A; Target 92063; HLA-B*56:01; TSPAN10; ENSG00000182612; TAA
RGFSGGILA

SEQ ID NO: 92064 - protein, 10 aa, Homo sapiens
  misc_feature: Table A; Target 92064; HLA-A*23:01; TSPAN10; ENSG00000182612; TAA
RGFSGGILAF

SEQ ID NO: 92065 - protein, 10 aa, Homo sapiens
  misc_feature: Table A; Target 92065; HLA-B*46:01; TSPAN10; ENSG00000182612; TAA
RGFSGGILAF

SEQ ID NO: 92066 - protein, 10 aa, Homo sapiens
  misc_feature: Table A; Target 92066; HLA-B*57:01; TSPAN10; ENSG00000182612; TAA
RGFSGGILAF

SEQ ID NO: 92067 - protein, 10 aa, Homo sapiens
  misc_feature: Table A; Target 92067; HLA-B*58:01; TSPAN10; ENSG00000182612; TAA
RGFSGGILAF

SEQ ID NO: 92068 - protein, 10 aa, Homo sapiens
  misc_feature: Table A; Target 92068; HLA-C*02:02; TSPAN10; ENSG00000182612; TAA
RGFSGGILAF

SEQ ID NO: 92069 - protein, 11 aa, Homo sapiens
  misc_feature: Table A; Target 92069; HLA-A*02:04; TSPAN10; ENSG00000182612; TAA
RGFSGGILAFL

SEQ ID NO: 92070 - protein, 11 aa, Homo sapiens
  misc_feature: Table A; Target 92070; HLA-A*31:01; TSPAN10; ENSG00000182612; TAA
RGFSGGILAFL

SEQ ID NO: 92071 - protein, 9 aa, Homo sapiens
  misc_feature: Table A; Target 92071; HLA-A*03:02; TSPAN10; ENSG00000182612; TAA
RLDADAAQR

SEQ ID NO: 92072 - protein, 10 aa, Homo sapiens
  misc_feature: Table A; Target 92072; HLA-A*02:01; TSPAN10; ENSG00000182612; TAA
RLDADAAQRV

SEQ ID NO: 92073 - protein, 10 aa, Homo sapiens
  misc_feature: Table A; Target 92073; HLA-A*02:07; TSPAN10; ENSG00000182612; TAA
RLDADAAQRV

SEQ ID NO: 92074 - protein, 11 aa, Homo sapiens
  misc_feature: Table A; Target 92074; HLA-A*02:01; TSPAN10; ENSG00000182612; TAA
RLDADAAQRVV

SEQ ID NO: 92075 - protein, 11 aa, Homo sapiens
  misc_feature: Table A; Target 92075; HLA-A*02:03; TSPAN10; ENSG00000182612; TAA
RLDADAAQRVV

SEQ ID NO: 92076 - protein, 11 aa, Homo sapiens
  misc_feature: Table A; Target 92076; HLA-A*02:07; TSPAN10; ENSG00000182612; TAA
RLDADAAQRVV

SEQ ID NO: 92077 - protein, 11 aa, Homo sapiens
  misc_feature: Table A; Target 92077; HLA-A*30:01; TSPAN10; ENSG00000182612; TAA
RLDADAAQRVV

SEQ ID NO: 92078 - protein, 11 aa, Homo sapiens
  misc_feature: Table A; Target 92078; HLA-B*55:01; TSPAN10; ENSG00000182612; TAA
RLDADAAQRVV

SEQ ID NO: 92079 - protein, 9 aa, Homo sapiens
  misc_feature: Table A; Target 92079; HLA-A*02:04; TSPAN10; ENSG00000182612; TAA
RLLGALAAR

SEQ ID NO: 92080 - protein, 9 aa, Homo sapiens
  misc_feature: Table A; Target 92080; HLA-A*02:07; TSPAN10; ENSG00000182612; TAA
RLLGALAAR

SEQ ID NO: 92081 - protein, 9 aa, Homo sapiens
  misc_feature: Table A; Target 92081; HLA-A*03:01; TSPAN10; ENSG00000182612; TAA
RLLGALAAR

SEQ ID NO: 92082 - protein, 9 aa, Homo sapiens
  misc_feature: Table A; Target 92082; HLA-A*03:02; TSPAN10; ENSG00000182612; TAA
RLLGALAAR

SEQ ID NO: 92083 - protein, 9 aa, Homo sapiens
  misc_feature: Table A; Target 92083; HLA-A*11:01; TSPAN10; ENSG00000182612; TAA
RLLGALAAR

SEQ ID NO: 92084 - protein, 9 aa, Homo sapiens
  misc_feature: Table A; Target 92084; HLA-A*29:02; TSPAN10; ENSG00000182612; TAA
RLLGALAAR

SEQ ID NO: 92085 - protein, 9 aa, Homo sapiens
  misc_feature: Table A; Target 92085; HLA-A*31:01; TSPAN10; ENSG00000182612; TAA
RLLGALAAR

SEQ ID NO: 92086 - protein, 9 aa, Homo sapiens
  misc_feature: Table A; Target 92086; HLA-A*33:01; TSPAN10; ENSG00000182612; TAA
RLLGALAAR

SEQ ID NO: 92087 - protein, 9 aa, Homo sapiens
  misc_feature: Table A; Target 92087; HLA-A*33:03; TSPAN10; ENSG00000182612; TAA
RLLGALAAR

SEQ ID NO: 92088 - protein, 9 aa, Homo sapiens
  misc_feature: Table A; Target 92088; HLA-B*57:01; TSPAN10; ENSG00000182612; TAA
RLLGALAAR

SEQ ID NO: 92089 - protein, 8 aa, Homo sapiens
  misc_feature: Table A; Target 92089; HLA-B*07:02; TSPAN10; ENSG00000182612; TAA
RPPTSGCL

SEQ ID NO: 92090 - protein, 8 aa, Homo sapiens
  misc_feature: Table A; Target 92090; HLA-C*07:02; TSPAN10; ENSG00000182612; TAA
RPPTSGCL

SEQ ID NO: 92091 - protein, 9 aa, Homo sapiens
  misc_feature: Table A; Target 92091; HLA-B*58:01; TSPAN10; ENSG00000182612; TAA
RSPLLSQET

SEQ ID NO: 92092 - protein, 9 aa, Homo sapiens
  misc_feature: Table A; Target 92092; HLA-B*07:02; TSPAN10; ENSG00000182612; TAA
SAASLAGCL

SEQ ID NO: 92093 - protein, 9 aa, Homo sapiens
  misc_feature: Table A; Target 92093; HLA-B*27:05; TSPAN10; ENSG00000182612; TAA
SAASLAGCL

SEQ ID NO: 92094 - protein, 9 aa, Homo sapiens
  misc_feature: Table A; Target 92094; HLA-B*35:03; TSPAN10; ENSG00000182612; TAA
SAASLAGCL

SEQ ID NO: 92095 - protein, 9 aa, Homo sapiens
  misc_feature: Table A; Target 92095; HLA-B*39:01; TSPAN10; ENSG00000182612; TAA
SAASLAGCL

SEQ ID NO: 92096 - protein, 9 aa, Homo sapiens
  misc_feature: Table A; Target 92096; HLA-B*40:01; TSPAN10; ENSG00000182612; TAA
SAASLAGCL

SEQ ID NO: 92097 - protein, 9 aa, Homo sapiens
  misc_feature: Table A; Target 92097; HLA-C*02:02; TSPAN10; ENSG00000182612; TAA
SAASLAGCL

SEQ ID NO: 92098 - protein, 9 aa, Homo sapiens
  misc_feature: Table A; Target 92098; HLA-C*03:03; TSPAN10; ENSG00000182612; TAA
SAASLAGCL

SEQ ID NO: 92099 - protein, 9 aa, Homo sapiens
  misc_feature: Table A; Target 92099; HLA-C*03:04; TSPAN10; ENSG00000182612; TAA
SAASLAGCL

SEQ ID NO: 92100 - protein, 9 aa, Homo sapiens
  misc_feature: Table A; Target 92100; HLA-C*06:02; TSPAN10; ENSG00000182612; TAA
SAASLAGCL

SEQ ID NO: 92101 - protein, 9 aa, Homo sapiens
  misc_feature: Table A; Target 92101; HLA-C*07:06; TSPAN10; ENSG00000182612; TAA
SAASLAGCL

SEQ ID NO: 92102 - protein, 9 aa, Homo sapiens
  misc_feature: Table A; Target 92102; HLA-C*12:03; TSPAN10; ENSG00000182612; TAA
SAASLAGCL

SEQ ID NO: 92103 - protein, 9 aa, Homo sapiens
  misc_feature: Table A; Target 92103; HLA-C*16:01; TSPAN10; ENSG00000182612; TAA
SAASLAGCL

SEQ ID NO: 92104 - protein, 9 aa, Homo sapiens
  misc_feature: Table A; Target 92104; HLA-C*16:02; TSPAN10; ENSG00000182612; TAA
SAASLAGCL

SEQ ID NO: 92105 - protein, 8 aa, Homo sapiens
  misc_feature: Table A; Target 92105; HLA-C*06:02; TSPAN10; ENSG00000182612; TAA
SGGYAIAV

SEQ ID NO: 92106 - protein, 8 aa, Homo sapiens
  misc_feature: Table A; Target 92106; HLA-C*07:04; TSPAN10; ENSG00000182612; TAA
SGGYAIAV

SEQ ID NO: 92107 - protein, 9 aa, Homo sapiens
  misc_feature: Table A; Target 92107; HLA-A*02:03; TSPAN10; ENSG00000182612; TAA
SLAGCLGAL

SEQ ID NO: 92108 - protein, 9 aa, Homo sapiens
  misc_feature: Table A; Target 92108; HLA-B*07:02; TSPAN10; ENSG00000182612; TAA
SLAGCLGAL

SEQ ID NO: 92109 - protein, 9 aa, Homo sapiens
  misc_feature: Table A; Target 92109; HLA-C*01:02; TSPAN10; ENSG00000182612; TAA
SLAGCLGAL

SEQ ID NO: 92110 - protein, 9 aa, Homo sapiens
  misc_feature: Table A; Target 92110; HLA-C*07:02; TSPAN10; ENSG00000182612; TAA
SLAGCLGAL

SEQ ID NO: 92111 - protein, 8 aa, Homo sapiens
  misc_feature: Table A; Target 92111; HLA-A*02:04; TSPAN10; ENSG00000182612; TAA
SLLGLLAL

SEQ ID NO: 92112 - protein, 9 aa, Homo sapiens
  misc_feature: Table A; Target 92112; HLA-A*02:01; TSPAN10; ENSG00000182612; TAA
SLLGLLALA

SEQ ID NO: 92113 - protein, 9 aa, Homo sapiens
  misc_feature: Table A; Target 92113; HLA-A*02:04; TSPAN10; ENSG00000182612; TAA
SLLGLLALA

SEQ ID NO: 92114 - protein, 9 aa, Homo sapiens
  misc_feature: Table A; Target 92114; HLA-A*02:03; TSPAN10; ENSG00000182612; TAA
SLSPGSSCV

SEQ ID NO: 92115 - protein, 9 aa, Homo sapiens
  misc_feature: Table A; Target 92115; HLA-B*13:02; TSPAN10; ENSG00000182612; TAA
SLSPGSSCV

SEQ ID NO: 92116 - protein, 10 aa, Homo sapiens
  misc_feature: Table A; Target 92116; HLA-A*03:01; TSPAN10; ENSG00000182612; TAA
SLSPGSSCVK

SEQ ID NO: 92117 - protein, 10 aa, Homo sapiens
  misc_feature: Table A; Target 92117; HLA-A*03:02; TSPAN10; ENSG00000182612; TAA
SLSPGSSCVK

SEQ ID NO: 92118 - protein, 11 aa, Homo sapiens
  misc_feature: Table A; Target 92118; HLA-A*29:02; TSPAN10; ENSG00000182612; TAA
SLSPGSSCVKY

SEQ ID NO: 92119 - protein, 11 aa, Homo sapiens
  misc_feature: Table A; Target 92119; HLA-A*30:02; TSPAN10; ENSG00000182612; TAA
SLSPGSSCVKY

SEQ ID NO: 92120 - protein, 8 aa, Homo sapiens
  misc_feature: Table A; Target 92120; HLA-B*55:01; TSPAN10; ENSG00000182612; TAA
SPGAPPAA

SEQ ID NO: 92121 - protein, 8 aa, Homo sapiens
  misc_feature: Table A; Target 92121; HLA-B*56:01; TSPAN10; ENSG00000182612; TAA
SPGAPPAA

SEQ ID NO: 92122 - protein, 9 aa, Homo sapiens
  misc_feature: Table A; Target 92122; HLA-A*03:02; TSPAN10; ENSG00000182612; TAA
SPGAPPAAK

SEQ ID NO: 92123 - protein, 10 aa, Homo sapiens
  misc_feature: Table A; Target 92123; HLA-B*07:02; TSPAN10; ENSG00000182612; TAA
SPGAPPAAKP

SEQ ID NO: 92124 - protein, 9 aa, Homo sapiens
  misc_feature: Table A; Target 92124; HLA-B*35:01; TSPAN10; ENSG00000182612; TAA
SPGSSCVKY

SEQ ID NO: 92125 - protein, 9 aa, Homo sapiens
  misc_feature: Table A; Target 92125; HLA-B*55:01; TSPAN10; ENSG00000182612; TAA
SPGSSCVKY

SEQ ID NO: 92126 - protein, 9 aa, Homo sapiens
  misc_feature: Table A; Target 92126; HLA-C*03:03; TSPAN10; ENSG00000182612; TAA
SPGSSCVKY

SEQ ID NO: 92127 - protein, 9 aa, Homo sapiens
  misc_feature: Table A; Target 92127; HLA-C*07:01; TSPAN10; ENSG00000182612; TAA
SPGSSCVKY

SEQ ID NO: 92128 - protein, 9 aa, Homo sapiens
  misc_feature: Table A; Target 92128; HLA-B*07:02; TSPAN10; ENSG00000182612; TAA
SPGVQACSL

SEQ ID NO: 92129 - protein, 9 aa, Homo sapiens
  misc_feature: Table A; Target 92129; HLA-B*08:01; TSPAN10; ENSG00000182612; TAA
SPGVQACSL

SEQ ID NO: 92130 - protein, 9 aa, Homo sapiens
  misc_feature: Table A; Target 92130; HLA-B*35:03; TSPAN10; ENSG00000182612; TAA
SPGVQACSL

SEQ ID NO: 92131 - protein, 9 aa, Homo sapiens
  misc_feature: Table A; Target 92131; HLA-C*07:02; TSPAN10; ENSG00000182612; TAA
SPGVQACSL

SEQ ID NO: 92132 - protein, 9 aa, Homo sapiens
  misc_feature: Table A; Target 92132; HLA-B*54:01; TSPAN10; ENSG00000182612; TAA
SPLLSQETA

SEQ ID NO: 92133 - protein, 9 aa, Homo sapiens
  misc_feature: Table A; Target 92133; HLA-B*55:01; TSPAN10; ENSG00000182612; TAA
SPLLSQETA

SEQ ID NO: 92134 - protein, 9 aa, Homo sapiens
  misc_feature: Table A; Target 92134; HLA-B*56:01; TSPAN10; ENSG00000182612; TAA
SPLLSQETA

SEQ ID NO: 92135 - protein, 10 aa, Homo sapiens
  misc_feature: Table A; Target 92135; HLA-B*56:01; TSPAN10; ENSG00000182612; TAA
SPLLSQETAG

SEQ ID NO: 92136 - protein, 9 aa, Homo sapiens
  misc_feature: Table A; Target 92136; HLA-B*07:02; TSPAN10; ENSG00000182612; TAA
SPSPGAPPA

SEQ ID NO: 92137 - protein, 9 aa, Homo sapiens
  misc_feature: Table A; Target 92137; HLA-B*35:03; TSPAN10; ENSG00000182612; TAA
SPSPGAPPA

SEQ ID NO: 92138 - protein, 9 aa, Homo sapiens
  misc_feature: Table A; Target 92138; HLA-B*54:01; TSPAN10; ENSG00000182612; TAA
SPSPGAPPA

SEQ ID NO: 92139 - protein, 9 aa, Homo sapiens
  misc_feature: Table A; Target 92139; HLA-B*55:01; TSPAN10; ENSG00000182612; TAA
SPSPGAPPA

SEQ ID NO: 92140 - protein, 9 aa, Homo sapiens
  misc_feature: Table A; Target 92140; HLA-B*56:01; TSPAN10; ENSG00000182612; TAA
SPSPGAPPA

SEQ ID NO: 92141 - protein, 10 aa, Homo sapiens
  misc_feature: Table A; Target 92141; HLA-B*07:02; TSPAN10; ENSG00000182612; TAA
SPSPGAPPAA

SEQ ID NO: 92142 - protein, 10 aa, Homo sapiens
  misc_feature: Table A; Target 92142; HLA-B*54:01; TSPAN10; ENSG00000182612; TAA
SPSPGAPPAA

SEQ ID NO: 92143 - protein, 10 aa, Homo sapiens
  misc_feature: Table A; Target 92143; HLA-B*55:01; TSPAN10; ENSG00000182612; TAA
SPSPGAPPAA

SEQ ID NO: 92144 - protein, 10 aa, Homo sapiens
  misc_feature: Table A; Target 92144; HLA-B*56:01; TSPAN10; ENSG00000182612; TAA
SPSPGAPPAA

SEQ ID NO: 92145 - protein, 10 aa, Homo sapiens
  misc_feature: Table A; Target 92145; HLA-B*38:01; TSPAN10; ENSG00000182612; TAA
SQETAGQKPL

SEQ ID NO: 92146 - protein, 10 aa, Homo sapiens
  misc_feature: Table A; Target 92146; HLA-C*01:02; TSPAN10; ENSG00000182612; TAA
SSPGVQACSL

SEQ ID NO: 92147 - protein, 9 aa, Homo sapiens
  misc_feature: Table A; Target 92147; HLA-A*02:04; TSPAN10; ENSG00000182612; TAA
SYQDWQQNL

SEQ ID NO: 92148 - protein, 9 aa, Homo sapiens
  misc_feature: Table A; Target 92148; HLA-A*23:01; TSPAN10; ENSG00000182612; TAA
SYQDWQQNL

SEQ ID NO: 92149 - protein, 9 aa, Homo sapiens
  misc_feature: Table A; Target 92149; HLA-A*24:02; TSPAN10; ENSG00000182612; TAA
SYQDWQQNL

SEQ ID NO: 92150 - protein, 9 aa, Homo sapiens
  misc_feature: Table A; Target 92150; HLA-A*31:01; TSPAN10; ENSG00000182612; TAA
SYQDWQQNL

SEQ ID NO: 92151 - protein, 9 aa, Homo sapiens
  misc_feature: Table A; Target 92151; HLA-C*01:02; TSPAN10; ENSG00000182612; TAA
SYQDWQQNL

SEQ ID NO: 92152 - protein, 9 aa, Homo sapiens
  misc_feature: Table A; Target 92152; HLA-C*14:02; TSPAN10; ENSG00000182612; TAA
SYQDWQQNL

SEQ ID NO: 92153 - protein, 9 aa, Homo sapiens
  misc_feature: Table A; Target 92153; HLA-C*16:02; TSPAN10; ENSG00000182612; TAA
SYQDWQQNL

SEQ ID NO: 92154 - protein, 10 aa, Homo sapiens
  misc_feature: Table A; Target 92154; HLA-A*23:01; TSPAN10; ENSG00000182612; TAA
SYQDWQQNLY

SEQ ID NO: 92155 - protein, 10 aa, Homo sapiens
  misc_feature: Table A; Target 92155; HLA-A*24:02; TSPAN10; ENSG00000182612; TAA
SYQDWQQNLY

SEQ ID NO: 92156 - protein, 10 aa, Homo sapiens
  misc_feature: Table A; Target 92156; HLA-A*29:02; TSPAN10; ENSG00000182612; TAA
SYQDWQQNLY

SEQ ID NO: 92157 - protein, 10 aa, Homo sapiens
  misc_feature: Table A; Target 92157; HLA-A*30:02; TSPAN10; ENSG00000182612; TAA
SYQDWQQNLY

SEQ ID NO: 92158 - protein, 10 aa, Homo sapiens
  misc_feature: Table A; Target 92158; HLA-C*04:01; TSPAN10; ENSG00000182612; TAA
SYQDWQQNLY

SEQ ID NO: 92159 - protein, 10 aa, Homo sapiens
  misc_feature: Table A; Target 92159; HLA-C*07:01; TSPAN10; ENSG00000182612; TAA
SYQDWQQNLY

SEQ ID NO: 92160 - protein, 10 aa, Homo sapiens
  misc_feature: Table A; Target 92160; HLA-C*14:02; TSPAN10; ENSG00000182612; TAA
SYQDWQQNLY

SEQ ID NO: 92161 - protein, 10 aa, Homo sapiens
  misc_feature: Table A; Target 92161; HLA-C*16:02; TSPAN10; ENSG00000182612; TAA
SYQDWQQNLY

SEQ ID NO: 92162 - protein, 11 aa, Homo sapiens
  misc_feature: Table A; Target 92162; HLA-A*24:02; TSPAN10; ENSG00000182612; TAA
SYQDWQQNLYF

SEQ ID NO: 92163 - protein, 11 aa, Homo sapiens
  misc_feature: Table A; Target 92163; HLA-A*29:02; TSPAN10; ENSG00000182612; TAA
SYQDWQQNLYF

SEQ ID NO: 92164 - protein, 9 aa, Homo sapiens
  misc_feature: Table A; Target 92164; HLA-A*02:03; TSPAN10; ENSG00000182612; TAA
TAGQKPLSV

SEQ ID NO: 92165 - protein, 9 aa, Homo sapiens
  misc_feature: Table A; Target 92165; HLA-B*08:01; TSPAN10; ENSG00000182612; TAA
TAGQKPLSV

SEQ ID NO: 92166 - protein, 9 aa, Homo sapiens
  misc_feature: Table A; Target 92166; HLA-B*13:02; TSPAN10; ENSG00000182612; TAA
TAGQKPLSV

SEQ ID NO: 92167 - protein, 9 aa, Homo sapiens
  misc_feature: Table A; Target 92167; HLA-B*35:03; TSPAN10; ENSG00000182612; TAA
TAGQKPLSV

SEQ ID NO: 92168 - protein, 9 aa, Homo sapiens
  misc_feature: Table A; Target 92168; HLA-B*39:01; TSPAN10; ENSG00000182612; TAA
TAGQKPLSV

SEQ ID NO: 92169 - protein, 9 aa, Homo sapiens
  misc_feature: Table A; Target 92169; HLA-B*51:01; TSPAN10; ENSG00000182612; TAA
TAGQKPLSV

SEQ ID NO: 92170 - protein, 9 aa, Homo sapiens
  misc_feature: Table A; Target 92170; HLA-B*54:01; TSPAN10; ENSG00000182612; TAA
TAGQKPLSV

SEQ ID NO: 92171 - protein, 9 aa, Homo sapiens
  misc_feature: Table A; Target 92171; HLA-B*56:01; TSPAN10; ENSG00000182612; TAA
TAGQKPLSV

SEQ ID NO: 92172 - protein, 9 aa, Homo sapiens
  misc_feature: Table A; Target 92172; HLA-C*02:02; TSPAN10; ENSG00000182612; TAA
TAGQKPLSV

SEQ ID NO: 92173 - protein, 9 aa, Homo sapiens
  misc_feature: Table A; Target 92173; HLA-C*03:03; TSPAN10; ENSG00000182612; TAA
TAGQKPLSV

SEQ ID NO: 92174 - protein, 9 aa, Homo sapiens
  misc_feature: Table A; Target 92174; HLA-C*03:04; TSPAN10; ENSG00000182612; TAA
TAGQKPLSV

SEQ ID NO: 92175 - protein, 9 aa, Homo sapiens
  misc_feature: Table A; Target 92175; HLA-C*05:01; TSPAN10; ENSG00000182612; TAA
TAGQKPLSV

SEQ ID NO: 92176 - protein, 9 aa, Homo sapiens
  misc_feature: Table A; Target 92176; HLA-C*07:01; TSPAN10; ENSG00000182612; TAA
TAGQKPLSV

SEQ ID NO: 92177 - protein, 9 aa, Homo sapiens
  misc_feature: Table A; Target 92177; HLA-C*12:03; TSPAN10; ENSG00000182612; TAA
TAGQKPLSV

SEQ ID NO: 92178 - protein, 9 aa, Homo sapiens
  misc_feature: Table A; Target 92178; HLA-C*16:01; TSPAN10; ENSG00000182612; TAA
TAGQKPLSV

SEQ ID NO: 92179 - protein, 9 aa, Homo sapiens
  misc_feature: Table A; Target 92179; HLA-C*16:02; TSPAN10; ENSG00000182612; TAA
TAGQKPLSV

SEQ ID NO: 92180 - protein, 11 aa, Homo sapiens
  misc_feature: Table A; Target 92180; HLA-C*04:01; TSPAN10; ENSG00000182612; TAA
TKHQALSGTPK

SEQ ID NO: 92181 - protein, 9 aa, Homo sapiens
  misc_feature: Table A; Target 92181; HLA-A*03:01; TSPAN10; ENSG00000182612; TAA
TLRVAIAHY

SEQ ID NO: 92182 - protein, 9 aa, Homo sapiens
  misc_feature: Table A; Target 92182; HLA-A*29:02; TSPAN10; ENSG00000182612; TAA
TLRVAIAHY

SEQ ID NO: 92183 - protein, 9 aa, Homo sapiens
  misc_feature: Table A; Target 92183; HLA-A*30:02; TSPAN10; ENSG00000182612; TAA
TLRVAIAHY

SEQ ID NO: 92184 - protein, 9 aa, Homo sapiens
  misc_feature: Table A; Target 92184; HLA-A*32:01; TSPAN10; ENSG00000182612; TAA
TLRVAIAHY

SEQ ID NO: 92185 - protein, 9 aa, Homo sapiens
  misc_feature: Table A; Target 92185; HLA-B*15:01; TSPAN10; ENSG00000182612; TAA
TLRVAIAHY

SEQ ID NO: 92186 - protein, 9 aa, Homo sapiens
  misc_feature: Table A; Target 92186; HLA-B*15:03; TSPAN10; ENSG00000182612; TAA
TLRVAIAHY

SEQ ID NO: 92187 - protein, 9 aa, Homo sapiens
  misc_feature: Table A; Target 92187; HLA-B*46:01; TSPAN10; ENSG00000182612; TAA
TLRVAIAHY

SEQ ID NO: 92188 - protein, 9 aa, Homo sapiens
  misc_feature: Table A; Target 92188; HLA-C*07:04; TSPAN10; ENSG00000182612; TAA
TLRVAIAHY

SEQ ID NO: 92189 - protein, 8 aa, Homo sapiens
  misc_feature: Table A; Target 92189; HLA-B*07:02; TSPAN10; ENSG00000182612; TAA
TPKKGPAP

SEQ ID NO: 92190 - protein, 8 aa, Homo sapiens
  misc_feature: Table A; Target 92190; HLA-B*55:01; TSPAN10; ENSG00000182612; TAA
TPKKGPAP

SEQ ID NO: 92191 - protein, 10 aa, Homo sapiens
  misc_feature: Table A; Target 92191; HLA-B*07:02; TSPAN10; ENSG00000182612; TAA
TPKKGPAPSL

SEQ ID NO: 92192 - protein, 10 aa, Homo sapiens
  misc_feature: Table A; Target 92192; HLA-B*08:01; TSPAN10; ENSG00000182612; TAA
TPKKGPAPSL

SEQ ID NO: 92193 - protein, 10 aa, Homo sapiens
  misc_feature: Table A; Target 92193; HLA-B*35:03; TSPAN10; ENSG00000182612; TAA
TPKKGPAPSL

SEQ ID NO: 92194 - protein, 10 aa, Homo sapiens
  misc_feature: Table A; Target 92194; HLA-B*40:02; TSPAN10; ENSG00000182612; TAA
TPKKGPAPSL

SEQ ID NO: 92195 - protein, 10 aa, Homo sapiens
  misc_feature: Table A; Target 92195; HLA-B*51:01; TSPAN10; ENSG00000182612; TAA
TPKKGPAPSL

SEQ ID NO: 92196 - protein, 10 aa, Homo sapiens
  misc_feature: Table A; Target 92196; HLA-B*55:01; TSPAN10; ENSG00000182612; TAA
TPKKGPAPSL

SEQ ID NO: 92197 - protein, 10 aa, Homo sapiens
  misc_feature: Table A; Target 92197; HLA-B*56:01; TSPAN10; ENSG00000182612; TAA
TPKKGPAPSL

SEQ ID NO: 92198 - protein, 10 aa, Homo sapiens
  misc_feature: Table A; Target 92198; HLA-C*07:02; TSPAN10; ENSG00000182612; TAA
TPKKGPAPSL

SEQ ID NO: 92199 - protein, 8 aa, Homo sapiens
  misc_feature: Table A; Target 92199; HLA-C*12:03; TSPAN10; ENSG00000182612; TAA
VAGALVVA

SEQ ID NO: 92200 - protein, 9 aa, Homo sapiens
  misc_feature: Table A; Target 92200; HLA-A*23:01; TSPAN10; ENSG00000182612; TAA
VAGALVVAL

SEQ ID NO: 92201 - protein, 9 aa, Homo sapiens
  misc_feature: Table A; Target 92201; HLA-A*30:01; TSPAN10; ENSG00000182612; TAA
VAGALVVAL

SEQ ID NO: 92202 - protein, 9 aa, Homo sapiens
  misc_feature: Table A; Target 92202; HLA-A*68:01; TSPAN10; ENSG00000182612; TAA
VAGALVVAL

SEQ ID NO: 92203 - protein, 9 aa, Homo sapiens
  misc_feature: Table A; Target 92203; HLA-B*08:01; TSPAN10; ENSG00000182612; TAA
VAGALVVAL

SEQ ID NO: 92204 - protein, 9 aa, Homo sapiens
  misc_feature: Table A; Target 92204; HLA-B*15:03; TSPAN10; ENSG00000182612; TAA
VAGALVVAL

SEQ ID NO: 92205 - protein, 9 aa, Homo sapiens
  misc_feature: Table A; Target 92205; HLA-B*18:01; TSPAN10; ENSG00000182612; TAA
VAGALVVAL

SEQ ID NO: 92206 - protein, 9 aa, Homo sapiens
  misc_feature: Table A; Target 92206; HLA-B*27:05; TSPAN10; ENSG00000182612; TAA
VAGALVVAL

SEQ ID NO: 92207 - protein, 9 aa, Homo sapiens
  misc_feature: Table A; Target 92207; HLA-B*35:01; TSPAN10; ENSG00000182612; TAA
VAGALVVAL

SEQ ID NO: 92208 - protein, 9 aa, Homo sapiens
  misc_feature: Table A; Target 92208; HLA-B*35:03; TSPAN10; ENSG00000182612; TAA
VAGALVVAL

SEQ ID NO: 92209 - protein, 9 aa, Homo sapiens
  misc_feature: Table A; Target 92209; HLA-B*39:01; TSPAN10; ENSG00000182612; TAA
VAGALVVAL

SEQ ID NO: 92210 - protein, 9 aa, Homo sapiens
  misc_feature: Table A; Target 92210; HLA-B*40:01; TSPAN10; ENSG00000182612; TAA
VAGALVVAL

SEQ ID NO: 92211 - protein, 9 aa, Homo sapiens
  misc_feature: Table A; Target 92211; HLA-B*46:01; TSPAN10; ENSG00000182612; TAA
VAGALVVAL

SEQ ID NO: 92212 - protein, 9 aa, Homo sapiens
  misc_feature: Table A; Target 92212; HLA-C*01:02; TSPAN10; ENSG00000182612; TAA
VAGALVVAL

SEQ ID NO: 92213 - protein, 9 aa, Homo sapiens
  misc_feature: Table A; Target 92213; HLA-C*02:02; TSPAN10; ENSG00000182612; TAA
VAGALVVAL

SEQ ID NO: 92214 - protein, 9 aa, Homo sapiens
  misc_feature: Table A; Target 92214; HLA-C*03:03; TSPAN10; ENSG00000182612; TAA
VAGALVVAL

SEQ ID NO: 92215 - protein, 9 aa, Homo sapiens
  misc_feature: Table A; Target 92215; HLA-C*03:04; TSPAN10; ENSG00000182612; TAA
VAGALVVAL

SEQ ID NO: 92216 - protein, 9 aa, Homo sapiens
  misc_feature: Table A; Target 92216; HLA-C*05:01; TSPAN10; ENSG00000182612; TAA
VAGALVVAL

SEQ ID NO: 92217 - protein, 9 aa, Homo sapiens
  misc_feature: Table A; Target 92217; HLA-C*07:04; TSPAN10; ENSG00000182612; TAA
VAGALVVAL

SEQ ID NO: 92218 - protein, 9 aa, Homo sapiens
  misc_feature: Table A; Target 92218; HLA-C*07:06; TSPAN10; ENSG00000182612; TAA
VAGALVVAL

SEQ ID NO: 92219 - protein, 9 aa, Homo sapiens
  misc_feature: Table A; Target 92219; HLA-C*12:03; TSPAN10; ENSG00000182612; TAA
VAGALVVAL

SEQ ID NO: 92220 - protein, 9 aa, Homo sapiens
  misc_feature: Table A; Target 92220; HLA-C*14:02; TSPAN10; ENSG00000182612; TAA
VAGALVVAL

SEQ ID NO: 92221 - protein, 9 aa, Homo sapiens
  misc_feature: Table A; Target 92221; HLA-C*16:02; TSPAN10; ENSG00000182612; TAA
VAGALVVAL

SEQ ID NO: 92222 - protein, 9 aa, Homo sapiens
  misc_feature: Table A; Target 92222; HLA-C*16:04; TSPAN10; ENSG00000182612; TAA
VAGALVVAL

SEQ ID NO: 92223 - protein, 10 aa, Homo sapiens
  misc_feature: Table A; Target 92223; HLA-B*44:02; TSPAN10; ENSG00000182612; TAA
VAGALVVALW

SEQ ID NO: 92224 - protein, 10 aa, Homo sapiens
  misc_feature: Table A; Target 92224; HLA-B*57:01; TSPAN10; ENSG00000182612; TAA
VAGALVVALW

SEQ ID NO: 92225 - protein, 9 aa, Homo sapiens
  misc_feature: Table A; Target 92225; HLA-B*15:03; TSPAN10; ENSG00000182612; TAA
VKGSLGSDL

SEQ ID NO: 92226 - protein, 9 aa, Homo sapiens
  misc_feature: Table A; Target 92226; HLA-A*02:07; TSPAN10; ENSG00000182612; TAA
VLEAVAGAL

SEQ ID NO: 92227 - protein, 9 aa, Homo sapiens
  misc_feature: Table A; Target 92227; HLA-B*39:01; TSPAN10; ENSG00000182612; TAA
VLEAVAGAL

SEQ ID NO: 92228 - protein, 9 aa, Homo sapiens
  misc_feature: Table A; Target 92228; HLA-B*40:01; TSPAN10; ENSG00000182612; TAA
VLEAVAGAL

SEQ ID NO: 92229 - protein, 9 aa, Homo sapiens
  misc_feature: Table A; Target 92229; HLA-C*01:02; TSPAN10; ENSG00000182612; TAA
VLEAVAGAL

SEQ ID NO: 92230 - protein, 9 aa, Homo sapiens
  misc_feature: Table A; Target 92230; HLA-C*05:01; TSPAN10; ENSG00000182612; TAA
VLEAVAGAL

SEQ ID NO: 92231 - protein, 9 aa, Homo sapiens
  misc_feature: Table A; Target 92231; HLA-C*07:02; TSPAN10; ENSG00000182612; TAA
VLEAVAGAL

SEQ ID NO: 92232 - protein, 10 aa, Homo sapiens
  misc_feature: Table A; Target 92232; HLA-A*01:01; TSPAN10; ENSG00000182612; TAA
VLEAVAGALV

SEQ ID NO: 92233 - protein, 10 aa, Homo sapiens
  misc_feature: Table A; Target 92233; HLA-A*02:07; TSPAN10; ENSG00000182612; TAA
VLEAVAGALV

SEQ ID NO: 92234 - protein, 11 aa, Homo sapiens
  misc_feature: Table A; Target 92234; HLA-A*01:01; TSPAN10; ENSG00000182612; TAA
VLEAVAGALVV

SEQ ID NO: 92235 - protein, 11 aa, Homo sapiens
  misc_feature: Table A; Target 92235; HLA-A*02:01; TSPAN10; ENSG00000182612; TAA
VLEAVAGALVV

SEQ ID NO: 92236 - protein, 11 aa, Homo sapiens
  misc_feature: Table A; Target 92236; HLA-A*02:07; TSPAN10; ENSG00000182612; TAA
VLEAVAGALVV

SEQ ID NO: 92237 - protein, 11 aa, Homo sapiens
  misc_feature: Table A; Target 92237; HLA-C*06:02; TSPAN10; ENSG00000182612; TAA
VLEAVAGALVV

SEQ ID NO: 92238 - protein, 11 aa, Homo sapiens
  misc_feature: Table A; Target 92238; HLA-C*07:01; TSPAN10; ENSG00000182612; TAA
VLEAVAGALVV

SEQ ID NO: 92239 - protein, 8 aa, Homo sapiens
  misc_feature: Table A; Target 92239; HLA-C*01:02; TSPAN10; ENSG00000182612; TAA
VLLQGAEL

SEQ ID NO: 92240 - protein, 8 aa, Homo sapiens
  misc_feature: Table A; Target 92240; HLA-C*03:03; TSPAN10; ENSG00000182612; TAA
VLLQGAEL

SEQ ID NO: 92241 - protein, 8 aa, Homo sapiens
  misc_feature: Table A; Target 92241; HLA-C*03:04; TSPAN10; ENSG00000182612; TAA
VLLQGAEL

SEQ ID NO: 92242 - protein, 8 aa, Homo sapiens
  misc_feature: Table A; Target 92242; HLA-C*14:02; TSPAN10; ENSG00000182612; TAA
VLLQGAEL

SEQ ID NO: 92243 - protein, 9 aa, Homo sapiens
  misc_feature: Table A; Target 92243; HLA-A*02:01; TSPAN10; ENSG00000182612; TAA
VLLQGAELL

SEQ ID NO: 92244 - protein, 9 aa, Homo sapiens
  misc_feature: Table A; Target 92244; HLA-A*02:04; TSPAN10; ENSG00000182612; TAA
VLLQGAELL

SEQ ID NO: 92245 - protein, 9 aa, Homo sapiens
  misc_feature: Table A; Target 92245; HLA-A*23:01; TSPAN10; ENSG00000182612; TAA
VLLQGAELL

SEQ ID NO: 92246 - protein, 9 aa, Homo sapiens
  misc_feature: Table A; Target 92246; HLA-A*24:02; TSPAN10; ENSG00000182612; TAA
VLLQGAELL

SEQ ID NO: 92247 - protein, 10 aa, Homo sapiens
  misc_feature: Table A; Target 92247; HLA-A*02:01; TSPAN10; ENSG00000182612; TAA
VLLQGAELLL

SEQ ID NO: 92248 - protein, 10 aa, Homo sapiens
  misc_feature: Table A; Target 92248; HLA-A*02:04; TSPAN10; ENSG00000182612; TAA
VLLQGAELLL

SEQ ID NO: 92249 - protein, 10 aa, Homo sapiens
  misc_feature: Table A; Target 92249; HLA-A*23:01; TSPAN10; ENSG00000182612; TAA
VLLQGAELLL

SEQ ID NO: 92250 - protein, 11 aa, Homo sapiens
  misc_feature: Table A; Target 92250; HLA-A*02:01; TSPAN10; ENSG00000182612; TAA
VLLQGAELLLA

SEQ ID NO: 92251 - protein, 11 aa, Homo sapiens
  misc_feature: Table A; Target 92251; HLA-A*02:04; TSPAN10; ENSG00000182612; TAA
VLLQGAELLLA

SEQ ID NO: 92252 - protein, 9 aa, Homo sapiens
  misc_feature: Table A; Target 92252; HLA-B*07:02; TSPAN10; ENSG00000182612; TAA
VPREDQAEA

SEQ ID NO: 92253 - protein, 9 aa, Homo sapiens
  misc_feature: Table A; Target 92253; HLA-B*54:01; TSPAN10; ENSG00000182612; TAA
VPREDQAEA

SEQ ID NO: 92254 - protein, 9 aa, Homo sapiens
  misc_feature: Table A; Target 92254; HLA-B*55:01; TSPAN10; ENSG00000182612; TAA
VPREDQAEA

SEQ ID NO: 92255 - protein, 9 aa, Homo sapiens
  misc_feature: Table A; Target 92255; HLA-B*56:01; TSPAN10; ENSG00000182612; TAA
VPREDQAEA

SEQ ID NO: 92256 - protein, 10 aa, Homo sapiens
  misc_feature: Table A; Target 92256; HLA-B*07:02; TSPAN10; ENSG00000182612; TAA
VPREDQAEAW

SEQ ID NO: 92257 - protein, 10 aa, Homo sapiens
  misc_feature: Table A; Target 92257; HLA-B*57:01; TSPAN10; ENSG00000182612; TAA
VPREDQAEAW

SEQ ID NO: 92258 - protein, 10 aa, Homo sapiens
  misc_feature: Table A; Target 92258; HLA-C*07:02; TSPAN10; ENSG00000182612; TAA
VPREDQAEAW

SEQ ID NO: 92259 - protein, 10 aa, Homo sapiens
  misc_feature: Table A; Target 92259; HLA-C*07:02; TSPAN10; ENSG00000182612; TAA
VSAASLAGCL

SEQ ID NO: 92260 - protein, 9 aa, Homo sapiens
  misc_feature: Table A; Target 92260; HLA-A*23:01; TSPAN10; ENSG00000182612; TAA
VVLLQGAEL

SEQ ID NO: 92261 - protein, 9 aa, Homo sapiens
  misc_feature: Table A; Target 92261; HLA-B*07:02; TSPAN10; ENSG00000182612; TAA
VVLLQGAEL

SEQ ID NO: 92262 - protein, 9 aa, Homo sapiens
  misc_feature: Table A; Target 92262; HLA-B*46:01; TSPAN10; ENSG00000182612; TAA
VVLLQGAEL

SEQ ID NO: 92263 - protein, 9 aa, Homo sapiens
  misc_feature: Table A; Target 92263; HLA-C*01:02; TSPAN10; ENSG00000182612; TAA
VVLLQGAEL

SEQ ID NO: 92264 - protein, 9 aa, Homo sapiens
  misc_feature: Table A; Target 92264; HLA-C*03:03; TSPAN10; ENSG00000182612; TAA
VVLLQGAEL

SEQ ID NO: 92265 - protein, 9 aa, Homo sapiens
  misc_feature: Table A; Target 92265; HLA-C*03:04; TSPAN10; ENSG00000182612; TAA
VVLLQGAEL

SEQ ID NO: 92266 - protein, 9 aa, Homo sapiens
  misc_feature: Table A; Target 92266; HLA-C*14:02; TSPAN10; ENSG00000182612; TAA
VVLLQGAEL

SEQ ID NO: 92267 - protein, 11 aa, Homo sapiens
  misc_feature: Table A; Target 92267; HLA-A*23:01; TSPAN10; ENSG00000182612; TAA
VVLLQGAELLL

SEQ ID NO: 92268 - protein, 9 aa, Homo sapiens
  misc_feature: Table A; Target 92268; HLA-C*01:02; TSPAN10; ENSG00000182612; TAA
VVSAASLAG

SEQ ID NO: 92269 - protein, 10 aa, Homo sapiens
  misc_feature: Table A; Target 92269; HLA-A*23:01; TSPAN10; ENSG00000182612; TAA
VYLEGCGPPL

SEQ ID NO: 92270 - protein, 10 aa, Homo sapiens
  misc_feature: Table A; Target 92270; HLA-A*24:02; TSPAN10; ENSG00000182612; TAA
VYLEGCGPPL

SEQ ID NO: 92271 - protein, 10 aa, Homo sapiens
  misc_feature: Table A; Target 92271; HLA-C*14:02; TSPAN10; ENSG00000182612; TAA
VYLEGCGPPL

SEQ ID NO: 92272 - protein, 8 aa, Homo sapiens
  misc_feature: Table A; Target 92272; HLA-A*23:01; TSPAN10; ENSG00000182612; TAA
YAIAVVLL

SEQ ID NO: 92273 - protein, 8 aa, Homo sapiens
  misc_feature: Table A; Target 92273; HLA-B*08:01; TSPAN10; ENSG00000182612; TAA
YAIAVVLL

SEQ ID NO: 92274 - protein, 8 aa, Homo sapiens
  misc_feature: Table A; Target 92274; HLA-B*35:03; TSPAN10; ENSG00000182612; TAA
YAIAVVLL

SEQ ID NO: 92275 - protein, 8 aa, Homo sapiens
  misc_feature: Table A; Target 92275; HLA-B*51:01; TSPAN10; ENSG00000182612; TAA
YAIAVVLL

SEQ ID NO: 92276 - protein, 8 aa, Homo sapiens
  misc_feature: Table A; Target 92276; HLA-C*02:02; TSPAN10; ENSG00000182612; TAA
YAIAVVLL

SEQ ID NO: 92277 - protein, 8 aa, Homo sapiens
  misc_feature: Table A; Target 92277; HLA-C*03:03; TSPAN10; ENSG00000182612; TAA
YAIAVVLL

SEQ ID NO: 92278 - protein, 8 aa, Homo sapiens
  misc_feature: Table A; Target 92278; HLA-C*03:04; TSPAN10; ENSG00000182612; TAA
YAIAVVLL

SEQ ID NO: 92279 - protein, 8 aa, Homo sapiens
  misc_feature: Table A; Target 92279; HLA-C*05:01; TSPAN10; ENSG00000182612; TAA
YAIAVVLL

SEQ ID NO: 92280 - protein, 8 aa, Homo sapiens
  misc_feature: Table A; Target 92280; HLA-C*12:03; TSPAN10; ENSG00000182612; TAA
YAIAVVLL

SEQ ID NO: 92281 - protein, 11 aa, Homo sapiens
  misc_feature: Table A; Target 92281; HLA-B*54:01; TSPAN10; ENSG00000182612; TAA
YAIAVVLLQGA

SEQ ID NO: 92282 - protein, 9 aa, Homo sapiens
  misc_feature: Table A; Target 92282; HLA-C*14:02; TSPAN10; ENSG00000182612; TAA
YFNCSSPGV

SEQ ID NO: 92283 - protein, 8 aa, Homo sapiens
  misc_feature: Table A; Target 92283; HLA-C*05:01; TSPAN10; ENSG00000182612; TAA
YQDDPDLR

SEQ ID NO: 92284 - protein, 9 aa, Homo sapiens
  misc_feature: Table A; Target 92284; HLA-A*01:01; TSPAN10; ENSG00000182612; TAA
YQDDPDLRF

SEQ ID NO: 92285 - protein, 9 aa, Homo sapiens
  misc_feature: Table A; Target 92285; HLA-A*02:01; TSPAN10; ENSG00000182612; TAA
YQDDPDLRF

SEQ ID NO: 92286 - protein, 9 aa, Homo sapiens
  misc_feature: Table A; Target 92286; HLA-A*02:04; TSPAN10; ENSG00000182612; TAA
YQDDPDLRF

SEQ ID NO: 92287 - protein, 9 aa, Homo sapiens
  misc_feature: Table A; Target 92287; HLA-A*02:07; TSPAN10; ENSG00000182612; TAA
YQDDPDLRF

SEQ ID NO: 92288 - protein, 9 aa, Homo sapiens
  misc_feature: Table A; Target 92288; HLA-A*23:01; TSPAN10; ENSG00000182612; TAA
YQDDPDLRF

SEQ ID NO: 92289 - protein, 9 aa, Homo sapiens
  misc_feature: Table A; Target 92289; HLA-A*24:02; TSPAN10; ENSG00000182612; TAA
YQDDPDLRF

SEQ ID NO: 92290 - protein, 9 aa, Homo sapiens
  misc_feature: Table A; Target 92290; HLA-A*26:01; TSPAN10; ENSG00000182612; TAA
YQDDPDLRF

SEQ ID NO: 92291 - protein, 9 aa, Homo sapiens
  misc_feature: Table A; Target 92291; HLA-B*13:02; TSPAN10; ENSG00000182612; TAA
YQDDPDLRF

SEQ ID NO: 92292 - protein, 9 aa, Homo sapiens
  misc_feature: Table A; Target 92292; HLA-B*15:01; TSPAN10; ENSG00000182612; TAA
YQDDPDLRF

SEQ ID NO: 92293 - protein, 9 aa, Homo sapiens
  misc_feature: Table A; Target 92293; HLA-B*27:05; TSPAN10; ENSG00000182612; TAA
YQDDPDLRF

SEQ ID NO: 92294 - protein, 9 aa, Homo sapiens
  misc_feature: Table A; Target 92294; HLA-B*35:03; TSPAN10; ENSG00000182612; TAA
YQDDPDLRF

SEQ ID NO: 92295 - protein, 9 aa, Homo sapiens
  misc_feature: Table A; Target 92295; HLA-B*38:01; TSPAN10; ENSG00000182612; TAA
YQDDPDLRF

SEQ ID NO: 92296 - protein, 9 aa, Homo sapiens
  misc_feature: Table A; Target 92296; HLA-B*39:01; TSPAN10; ENSG00000182612; TAA
YQDDPDLRF

SEQ ID NO: 92297 - protein, 9 aa, Homo sapiens
  misc_feature: Table A; Target 92297; HLA-B*55:01; TSPAN10; ENSG00000182612; TAA
YQDDPDLRF

SEQ ID NO: 92298 - protein, 9 aa, Homo sapiens
  misc_feature: Table A; Target 92298; HLA-B*58:01; TSPAN10; ENSG00000182612; TAA
YQDDPDLRF

SEQ ID NO: 92299 - protein, 9 aa, Homo sapiens
  misc_feature: Table A; Target 92299; HLA-C*02:02; TSPAN10; ENSG00000182612; TAA
YQDDPDLRF

SEQ ID NO: 92300 - protein, 9 aa, Homo sapiens
  misc_feature: Table A; Target 92300; HLA-C*03:03; TSPAN10; ENSG00000182612; TAA
YQDDPDLRF

SEQ ID NO: 92301 - protein, 9 aa, Homo sapiens
  misc_feature: Table A; Target 92301; HLA-C*03:04; TSPAN10; ENSG00000182612; TAA
YQDDPDLRF

SEQ ID NO: 92302 - protein, 9 aa, Homo sapiens
  misc_feature: Table A; Target 92302; HLA-C*04:01; TSPAN10; ENSG00000182612; TAA
YQDDPDLRF

SEQ ID NO: 92303 - protein, 9 aa, Homo sapiens
  misc_feature: Table A; Target 92303; HLA-C*05:01; TSPAN10; ENSG00000182612; TAA
YQDDPDLRF

SEQ ID NO: 92304 - protein, 9 aa, Homo sapiens
  misc_feature: Table A; Target 92304; HLA-C*07:04; TSPAN10; ENSG00000182612; TAA
YQDDPDLRF

SEQ ID NO: 92305 - protein, 10 aa, Homo sapiens
  misc_feature: Table A; Target 92305; HLA-A*02:01; TSPAN10; ENSG00000182612; TAA
YQDDPDLRFL

SEQ ID NO: 92306 - protein, 10 aa, Homo sapiens
  misc_feature: Table A; Target 92306; HLA-A*02:03; TSPAN10; ENSG00000182612; TAA
YQDDPDLRFL

SEQ ID NO: 92307 - protein, 10 aa, Homo sapiens
  misc_feature: Table A; Target 92307; HLA-A*02:04; TSPAN10; ENSG00000182612; TAA
YQDDPDLRFL

SEQ ID NO: 92308 - protein, 10 aa, Homo sapiens
  misc_feature: Table A; Target 92308; HLA-A*02:07; TSPAN10; ENSG00000182612; TAA
YQDDPDLRFL

SEQ ID NO: 92309 - protein, 10 aa, Homo sapiens
  misc_feature: Table A; Target 92309; HLA-B*27:05; TSPAN10; ENSG00000182612; TAA
YQDDPDLRFL

SEQ ID NO: 92310 - protein, 10 aa, Homo sapiens
  misc_feature: Table A; Target 92310; HLA-B*38:01; TSPAN10; ENSG00000182612; TAA
YQDDPDLRFL

SEQ ID NO: 92311 - protein, 10 aa, Homo sapiens
  misc_feature: Table A; Target 92311; HLA-C*05:01; TSPAN10; ENSG00000182612; TAA
YQDDPDLRFL

SEQ ID NO: 92312 - protein, 11 aa, Homo sapiens
  misc_feature: Table A; Target 92312; HLA-A*02:01; TSPAN10; ENSG00000182612; TAA
YQDDPDLRFLL

SEQ ID NO: 92313 - protein, 11 aa, Homo sapiens
  misc_feature: Table A; Target 92313; HLA-A*02:04; TSPAN10; ENSG00000182612; TAA
YQDDPDLRFLL

SEQ ID NO: 92314 - protein, 11 aa, Homo sapiens
  misc_feature: Table A; Target 92314; HLA-A*02:07; TSPAN10; ENSG00000182612; TAA
YQDDPDLRFLL

SEQ ID NO: 92315 - protein, 11 aa, Homo sapiens
  misc_feature: Table A; Target 92315; HLA-A*30:01; TSPAN10; ENSG00000182612; TAA
YQDDPDLRFLL

SEQ ID NO: 92316 - protein, 11 aa, Homo sapiens
  misc_feature: Table A; Target 92316; HLA-B*38:01; TSPAN10; ENSG00000182612; TAA
YQDDPDLRFLL

SEQ ID NO: 92317 - protein, 8 aa, Homo sapiens
  misc_feature: Table A; Target 92317; HLA-B*13:02; TSPAN10; ENSG00000182612; TAA
YQDWQQNL

SEQ ID NO: 92318 - protein, 8 aa, Homo sapiens
  misc_feature: Table A; Target 92318; HLA-B*38:01; TSPAN10; ENSG00000182612; TAA
YQDWQQNL

SEQ ID NO: 92319 - protein, 8 aa, Homo sapiens
  misc_feature: Table A; Target 92319; HLA-B*39:01; TSPAN10; ENSG00000182612; TAA
YQDWQQNL

SEQ ID NO: 92320 - protein, 8 aa, Homo sapiens
  misc_feature: Table A; Target 92320; HLA-C*05:01; TSPAN10; ENSG00000182612; TAA
YQDWQQNL

SEQ ID NO: 92321 - protein, 9 aa, Homo sapiens
  misc_feature: Table A; Target 92321; HLA-A*01:01; TSPAN10; ENSG00000182612; TAA
YQDWQQNLY

SEQ ID NO: 92322 - protein, 9 aa, Homo sapiens
  misc_feature: Table A; Target 92322; HLA-A*29:02; TSPAN10; ENSG00000182612; TAA
YQDWQQNLY

SEQ ID NO: 92323 - protein, 9 aa, Homo sapiens
  misc_feature: Table A; Target 92323; HLA-B*15:01; TSPAN10; ENSG00000182612; TAA
YQDWQQNLY

SEQ ID NO: 92324 - protein, 9 aa, Homo sapiens
  misc_feature: Table A; Target 92324; HLA-B*15:03; TSPAN10; ENSG00000182612; TAA
YQDWQQNLY

SEQ ID NO: 92325 - protein, 9 aa, Homo sapiens
  misc_feature: Table A; Target 92325; HLA-B*38:01; TSPAN10; ENSG00000182612; TAA
YQDWQQNLY

SEQ ID NO: 92326 - protein, 9 aa, Homo sapiens
  misc_feature: Table A; Target 92326; HLA-B*39:01; TSPAN10; ENSG00000182612; TAA
YQDWQQNLY

SEQ ID NO: 92327 - protein, 9 aa, Homo sapiens
  misc_feature: Table A; Target 92327; HLA-C*05:01; TSPAN10; ENSG00000182612; TAA
YQDWQQNLY

SEQ ID NO: 92328 - protein, 9 aa, Homo sapiens
  misc_feature: Table A; Target 92328; HLA-C*07:04; TSPAN10; ENSG00000182612; TAA
YQDWQQNLY

SEQ ID NO: 92329 - protein, 10 aa, Homo sapiens
  misc_feature: Table A; Target 92329; HLA-A*02:07; TSPAN10; ENSG00000182612; TAA
YQDWQQNLYF

SEQ ID NO: 92330 - protein, 10 aa, Homo sapiens
  misc_feature: Table A; Target 92330; HLA-B*38:01; TSPAN10; ENSG00000182612; TAA
YQDWQQNLYF

SEQ ID NO: 92331 - protein, 8 aa, Homo sapiens
  misc_feature: Table A; Target 92331; HLA-B*40:02; TUBA3C; ENSG00000198033; TAA
AAIATIKT

SEQ ID NO: 92332 - protein, 8 aa, Homo sapiens
  misc_feature: Table A; Target 92332; HLA-B*58:01; TUBA3C; ENSG00000198033; TAA
AAIATIKT

SEQ ID NO: 92333 - protein, 8 aa, Homo sapiens
  misc_feature: Table A; Target 92333; HLA-C*06:02; TUBA3C; ENSG00000198033; TAA
AAIATIKT

SEQ ID NO: 92334 - protein, 8 aa, Homo sapiens
  misc_feature: Table A; Target 92334; HLA-C*12:03; TUBA3C; ENSG00000198033; TAA
AAIATIKT

SEQ ID NO: 92335 - protein, 8 aa, Homo sapiens
  misc_feature: Table A; Target 92335; HLA-C*16:02; TUBA3C; ENSG00000198033; TAA
AAIATIKT

SEQ ID NO: 92336 - protein, 9 aa, Homo sapiens
  misc_feature: Table A; Target 92336; HLA-A*02:03; TUBA3C; ENSG00000198033; TAA
AAIATIKTK

SEQ ID NO: 92337 - protein, 9 aa, Homo sapiens
  misc_feature: Table A; Target 92337; HLA-A*03:01; TUBA3C; ENSG00000198033; TAA
AAIATIKTK

SEQ ID NO: 92338 - protein, 9 aa, Homo sapiens
  misc_feature: Table A; Target 92338; HLA-A*03:02; TUBA3C; ENSG00000198033; TAA
AAIATIKTK

SEQ ID NO: 92339 - protein, 9 aa, Homo sapiens
  misc_feature: Table A; Target 92339; HLA-A*11:01; TUBA3C; ENSG00000198033; TAA
AAIATIKTK

SEQ ID NO: 92340 - protein, 9 aa, Homo sapiens
  misc_feature: Table A; Target 92340; HLA-A*25:01; TUBA3C; ENSG00000198033; TAA
AAIATIKTK

SEQ ID NO: 92341 - protein, 9 aa, Homo sapiens
  misc_feature: Table A; Target 92341; HLA-A*31:01; TUBA3C; ENSG00000198033; TAA
AAIATIKTK

SEQ ID NO: 92342 - protein, 9 aa, Homo sapiens
  misc_feature: Table A; Target 92342; HLA-A*32:01; TUBA3C; ENSG00000198033; TAA
AAIATIKTK

SEQ ID NO: 92343 - protein, 9 aa, Homo sapiens
  misc_feature: Table A; Target 92343; HLA-A*33:03; TUBA3C; ENSG00000198033; TAA
AAIATIKTK

SEQ ID NO: 92344 - protein, 9 aa, Homo sapiens
  misc_feature: Table A; Target 92344; HLA-A*68:01; TUBA3C; ENSG00000198033; TAA
AAIATIKTK

SEQ ID NO: 92345 - protein, 9 aa, Homo sapiens
  misc_feature: Table A; Target 92345; HLA-B*13:02; TUBA3C; ENSG00000198033; TAA
AAIATIKTK

SEQ ID NO: 92346 - protein, 9 aa, Homo sapiens
  misc_feature: Table A; Target 92346; HLA-B*15:03; TUBA3C; ENSG00000198033; TAA
AAIATIKTK

SEQ ID NO: 92347 - protein, 9 aa, Homo sapiens
  misc_feature: Table A; Target 92347; HLA-B*27:02; TUBA3C; ENSG00000198033; TAA
AAIATIKTK

SEQ ID NO: 92348 - protein, 9 aa, Homo sapiens
  misc_feature: Table A; Target 92348; HLA-B*27:05; TUBA3C; ENSG00000198033; TAA
AAIATIKTK

SEQ ID NO: 92349 - protein, 9 aa, Homo sapiens
  misc_feature: Table A; Target 92349; HLA-B*40:02; TUBA3C; ENSG00000198033; TAA
AAIATIKTK

SEQ ID NO: 92350 - protein, 9 aa, Homo sapiens
  misc_feature: Table A; Target 92350; HLA-B*44:03; TUBA3C; ENSG00000198033; TAA
AAIATIKTK

SEQ ID NO: 92351 - protein, 9 aa, Homo sapiens
  misc_feature: Table A; Target 92351; HLA-B*46:01; TUBA3C; ENSG00000198033; TAA
AAIATIKTK

SEQ ID NO: 92352 - protein, 9 aa, Homo sapiens
  misc_feature: Table A; Target 92352; HLA-B*54:01; TUBA3C; ENSG00000198033; TAA
AAIATIKTK

SEQ ID NO: 92353 - protein, 9 aa, Homo sapiens
  misc_feature: Table A; Target 92353; HLA-B*57:01; TUBA3C; ENSG00000198033; TAA
AAIATIKTK

SEQ ID NO: 92354 - protein, 9 aa, Homo sapiens
  misc_feature: Table A; Target 92354; HLA-B*58:01; TUBA3C; ENSG00000198033; TAA
AAIATIKTK

SEQ ID NO: 92355 - protein, 9 aa, Homo sapiens
  misc_feature: Table A; Target 92355; HLA-C*01:02; TUBA3C; ENSG00000198033; TAA
AAIATIKTK

SEQ ID NO: 92356 - protein, 9 aa, Homo sapiens
  misc_feature: Table A; Target 92356; HLA-C*02:02; TUBA3C; ENSG00000198033; TAA
AAIATIKTK

SEQ ID NO: 92357 - protein, 9 aa, Homo sapiens
  misc_feature: Table A; Target 92357; HLA-C*03:03; TUBA3C; ENSG00000198033; TAA
AAIATIKTK

SEQ ID NO: 92358 - protein, 9 aa, Homo sapiens
  misc_feature: Table A; Target 92358; HLA-C*03:04; TUBA3C; ENSG00000198033; TAA
AAIATIKTK

SEQ ID NO: 92359 - protein, 9 aa, Homo sapiens
  misc_feature: Table A; Target 92359; HLA-C*04:01; TUBA3C; ENSG00000198033; TAA
AAIATIKTK

SEQ ID NO: 92360 - protein, 9 aa, Homo sapiens
  misc_feature: Table A; Target 92360; HLA-C*06:02; TUBA3C; ENSG00000198033; TAA
AAIATIKTK

SEQ ID NO: 92361 - protein, 9 aa, Homo sapiens
  misc_feature: Table A; Target 92361; HLA-C*07:01; TUBA3C; ENSG00000198033; TAA
AAIATIKTK

SEQ ID NO: 92362 - protein, 9 aa, Homo sapiens
  misc_feature: Table A; Target 92362; HLA-C*07:06; TUBA3C; ENSG00000198033; TAA
AAIATIKTK

SEQ ID NO: 92363 - protein, 9 aa, Homo sapiens
  misc_feature: Table A; Target 92363; HLA-C*12:03; TUBA3C; ENSG00000198033; TAA
AAIATIKTK

SEQ ID NO: 92364 - protein, 9 aa, Homo sapiens
  misc_feature: Table A; Target 92364; HLA-C*16:01; TUBA3C; ENSG00000198033; TAA
AAIATIKTK

SEQ ID NO: 92365 - protein, 9 aa, Homo sapiens
  misc_feature: Table A; Target 92365; HLA-C*16:02; TUBA3C; ENSG00000198033; TAA
AAIATIKTK

SEQ ID NO: 92366 - protein, 9 aa, Homo sapiens
  misc_feature: Table A; Target 92366; HLA-C*16:04; TUBA3C; ENSG00000198033; TAA
AAIATIKTK

SEQ ID NO: 92367 - protein, 10 aa, Homo sapiens
  misc_feature: Table A; Target 92367; HLA-A*11:01; TUBA3C; ENSG00000198033; TAA
AAIATIKTKR

SEQ ID NO: 92368 - protein, 10 aa, Homo sapiens
  misc_feature: Table A; Target 92368; HLA-A*26:01; TUBA3C; ENSG00000198033; TAA
AAIATIKTKR

SEQ ID NO: 92369 - protein, 10 aa, Homo sapiens
  misc_feature: Table A; Target 92369; HLA-A*31:01; TUBA3C; ENSG00000198033; TAA
AAIATIKTKR

SEQ ID NO: 92370 - protein, 10 aa, Homo sapiens
  misc_feature: Table A; Target 92370; HLA-A*33:01; TUBA3C; ENSG00000198033; TAA
AAIATIKTKR

SEQ ID NO: 92371 - protein, 10 aa, Homo sapiens
  misc_feature: Table A; Target 92371; HLA-A*33:03; TUBA3C; ENSG00000198033; TAA
AAIATIKTKR

SEQ ID NO: 92372 - protein, 10 aa, Homo sapiens
  misc_feature: Table A; Target 92372; HLA-A*68:01; TUBA3C; ENSG00000198033; TAA
AAIATIKTKR

SEQ ID NO: 92373 - protein, 10 aa, Homo sapiens
  misc_feature: Table A; Target 92373; HLA-B*57:01; TUBA3C; ENSG00000198033; TAA
AAIATIKTKR

SEQ ID NO: 92374 - protein, 10 aa, Homo sapiens
  misc_feature: Table A; Target 92374; HLA-C*07:06; TUBA3C; ENSG00000198033; TAA
AAIATIKTKR

SEQ ID NO: 92375 - protein, 10 aa, Homo sapiens
  misc_feature: Table A; Target 92375; HLA-A*02:01; TUBA3C; ENSG00000198033; TAA
AALEKDYEEV

SEQ ID NO: 92376 - protein, 10 aa, Homo sapiens
  misc_feature: Table A; Target 92376; HLA-B*40:02; TUBA3C; ENSG00000198033; TAA
AALEKDYEEV

SEQ ID NO: 92377 - protein, 10 aa, Homo sapiens
  misc_feature: Table A; Target 92377; HLA-C*16:04; TUBA3C; ENSG00000198033; TAA
AALEKDYEEV

SEQ ID NO: 92378 - protein, 9 aa, Homo sapiens
  misc_feature: Table A; Target 92378; HLA-C*16:01; TUBA3C; ENSG00000198033; TAA
AANNYARGH

SEQ ID NO: 92379 - protein, 9 aa, Homo sapiens
  misc_feature: Table A; Target 92379; HLA-C*16:02; TUBA3C; ENSG00000198033; TAA
AANNYARGH

SEQ ID NO: 92380 - protein, 10 aa, Homo sapiens
  misc_feature: Table A; Target 92380; HLA-A*30:02; TUBA3C; ENSG00000198033; TAA
AANNYARGHY

SEQ ID NO: 92381 - protein, 10 aa, Homo sapiens
  misc_feature: Table A; Target 92381; HLA-A*32:01; TUBA3C; ENSG00000198033; TAA
AANNYARGHY

SEQ ID NO: 92382 - protein, 10 aa, Homo sapiens
  misc_feature: Table A; Target 92382; HLA-B*15:01; TUBA3C; ENSG00000198033; TAA
AANNYARGHY

SEQ ID NO: 92383 - protein, 10 aa, Homo sapiens
  misc_feature: Table A; Target 92383; HLA-B*15:03; TUBA3C; ENSG00000198033; TAA
AANNYARGHY

SEQ ID NO: 92384 - protein, 10 aa, Homo sapiens
  misc_feature: Table A; Target 92384; HLA-C*16:01; TUBA3C; ENSG00000198033; TAA
AANNYARGHY

SEQ ID NO: 92385 - protein, 10 aa, Homo sapiens
  misc_feature: Table A; Target 92385; HLA-C*16:02; TUBA3C; ENSG00000198033; TAA
AANNYARGHY

SEQ ID NO: 92386 - protein, 10 aa, Homo sapiens
  misc_feature: Table A; Target 92386; HLA-C*16:04; TUBA3C; ENSG00000198033; TAA
AANNYARGHY

SEQ ID NO: 92387 - protein, 9 aa, Homo sapiens
  misc_feature: Table A; Target 92387; HLA-A*11:01; TUBA3C; ENSG00000198033; TAA
ACFEPANQM

SEQ ID NO: 92388 - protein, 9 aa, Homo sapiens
  misc_feature: Table A; Target 92388; HLA-A*30:01; TUBA3C; ENSG00000198033; TAA
ACFEPANQM

SEQ ID NO: 92389 - protein, 9 aa, Homo sapiens
  misc_feature: Table A; Target 92389; HLA-A*31:01; TUBA3C; ENSG00000198033; TAA
ACFEPANQM

SEQ ID NO: 92390 - protein, 9 aa, Homo sapiens
  misc_feature: Table A; Target 92390; HLA-A*32:01; TUBA3C; ENSG00000198033; TAA
ACFEPANQM

SEQ ID NO: 92391 - protein, 9 aa, Homo sapiens
  misc_feature: Table A; Target 92391; HLA-B*07:02; TUBA3C; ENSG00000198033; TAA
ACFEPANQM

SEQ ID NO: 92392 - protein, 9 aa, Homo sapiens
  misc_feature: Table A; Target 92392; HLA-B*15:01; TUBA3C; ENSG00000198033; TAA
ACFEPANQM

SEQ ID NO: 92393 - protein, 9 aa, Homo sapiens
  misc_feature: Table A; Target 92393; HLA-B*15:03; TUBA3C; ENSG00000198033; TAA
ACFEPANQM

SEQ ID NO: 92394 - protein, 9 aa, Homo sapiens
  misc_feature: Table A; Target 92394; HLA-B*27:05; TUBA3C; ENSG00000198033; TAA
ACFEPANQM

SEQ ID NO: 92395 - protein, 9 aa, Homo sapiens
  misc_feature: Table A; Target 92395; HLA-B*35:01; TUBA3C; ENSG00000198033; TAA
ACFEPANQM

SEQ ID NO: 92396 - protein, 9 aa, Homo sapiens
  misc_feature: Table A; Target 92396; HLA-B*35:03; TUBA3C; ENSG00000198033; TAA
ACFEPANQM

SEQ ID NO: 92397 - protein, 9 aa, Homo sapiens
  misc_feature: Table A; Target 92397; HLA-B*37:01; TUBA3C; ENSG00000198033; TAA
ACFEPANQM

SEQ ID NO: 92398 - protein, 9 aa, Homo sapiens
  misc_feature: Table A; Target 92398; HLA-B*39:01; TUBA3C; ENSG00000198033; TAA
ACFEPANQM

SEQ ID NO: 92399 - protein, 9 aa, Homo sapiens
  misc_feature: Table A; Target 92399; HLA-B*40:02; TUBA3C; ENSG00000198033; TAA
ACFEPANQM

SEQ ID NO: 92400 - protein, 9 aa, Homo sapiens
  misc_feature: Table A; Target 92400; HLA-B*46:01; TUBA3C; ENSG00000198033; TAA
ACFEPANQM

SEQ ID NO: 92401 - protein, 9 aa, Homo sapiens
  misc_feature: Table A; Target 92401; HLA-B*55:01; TUBA3C; ENSG00000198033; TAA
ACFEPANQM

SEQ ID NO: 92402 - protein, 9 aa, Homo sapiens
  misc_feature: Table A; Target 92402; HLA-B*58:01; TUBA3C; ENSG00000198033; TAA
ACFEPANQM

SEQ ID NO: 92403 - protein, 9 aa, Homo sapiens
  misc_feature: Table A; Target 92403; HLA-C*01:02; TUBA3C; ENSG00000198033; TAA
ACFEPANQM

SEQ ID NO: 92404 - protein, 9 aa, Homo sapiens
  misc_feature: Table A; Target 92404; HLA-C*02:02; TUBA3C; ENSG00000198033; TAA
ACFEPANQM

SEQ ID NO: 92405 - protein, 9 aa, Homo sapiens
  misc_feature: Table A; Target 92405; HLA-C*03:03; TUBA3C; ENSG00000198033; TAA
ACFEPANQM

SEQ ID NO: 92406 - protein, 9 aa, Homo sapiens
  misc_feature: Table A; Target 92406; HLA-C*03:04; TUBA3C; ENSG00000198033; TAA
ACFEPANQM

SEQ ID NO: 92407 - protein, 9 aa, Homo sapiens
  misc_feature: Table A; Target 92407; HLA-C*04:01; TUBA3C; ENSG00000198033; TAA
ACFEPANQM

SEQ ID NO: 92408 - protein, 9 aa, Homo sapiens
  misc_feature: Table A; Target 92408; HLA-C*05:01; TUBA3C; ENSG00000198033; TAA
ACFEPANQM

SEQ ID NO: 92409 - protein, 9 aa, Homo sapiens
  misc_feature: Table A; Target 92409; HLA-C*06:02; TUBA3C; ENSG00000198033; TAA
ACFEPANQM

SEQ ID NO: 92410 - protein, 9 aa, Homo sapiens
  misc_feature: Table A; Target 92410; HLA-C*07:02; TUBA3C; ENSG00000198033; TAA
ACFEPANQM

SEQ ID NO: 92411 - protein, 9 aa, Homo sapiens
  misc_feature: Table A; Target 92411; HLA-C*07:04; TUBA3C; ENSG00000198033; TAA
ACFEPANQM

SEQ ID NO: 92412 - protein, 9 aa, Homo sapiens
  misc_feature: Table A; Target 92412; HLA-C*07:06; TUBA3C; ENSG00000198033; TAA
ACFEPANQM

SEQ ID NO: 92413 - protein, 9 aa, Homo sapiens
  misc_feature: Table A; Target 92413; HLA-C*12:03; TUBA3C; ENSG00000198033; TAA
ACFEPANQM

SEQ ID NO: 92414 - protein, 9 aa, Homo sapiens
  misc_feature: Table A; Target 92414; HLA-C*14:02; TUBA3C; ENSG00000198033; TAA
ACFEPANQM

SEQ ID NO: 92415 - protein, 9 aa, Homo sapiens
  misc_feature: Table A; Target 92415; HLA-C*16:01; TUBA3C; ENSG00000198033; TAA
ACFEPANQM

SEQ ID NO: 92416 - protein, 9 aa, Homo sapiens
  misc_feature: Table A; Target 92416; HLA-C*16:02; TUBA3C; ENSG00000198033; TAA
ACFEPANQM

SEQ ID NO: 92417 - protein, 9 aa, Homo sapiens
  misc_feature: Table A; Target 92417; HLA-C*16:04; TUBA3C; ENSG00000198033; TAA
ACFEPANQM

SEQ ID NO: 92418 - protein, 10 aa, Homo sapiens
  misc_feature: Table A; Target 92418; HLA-A*02:01; TUBA3C; ENSG00000198033; TAA
ACFEPANQMV

SEQ ID NO: 92419 - protein, 10 aa, Homo sapiens
  misc_feature: Table A; Target 92419; HLA-A*02:03; TUBA3C; ENSG00000198033; TAA
ACFEPANQMV

SEQ ID NO: 92420 - protein, 10 aa, Homo sapiens
  misc_feature: Table A; Target 92420; HLA-A*02:07; TUBA3C; ENSG00000198033; TAA
ACFEPANQMV

SEQ ID NO: 92421 - protein, 10 aa, Homo sapiens
  misc_feature: Table A; Target 92421; HLA-A*30:01; TUBA3C; ENSG00000198033; TAA
ACFEPANQMV

SEQ ID NO: 92422 - protein, 10 aa, Homo sapiens
  misc_feature: Table A; Target 92422; HLA-A*68:02; TUBA3C; ENSG00000198033; TAA
ACFEPANQMV

SEQ ID NO: 92423 - protein, 10 aa, Homo sapiens
  misc_feature: Table A; Target 92423; HLA-B*13:02; TUBA3C; ENSG00000198033; TAA
ACFEPANQMV

SEQ ID NO: 92424 - protein, 10 aa, Homo sapiens
  misc_feature: Table A; Target 92424; HLA-B*27:05; TUBA3C; ENSG00000198033; TAA
ACFEPANQMV

SEQ ID NO: 92425 - protein, 10 aa, Homo sapiens
  misc_feature: Table A; Target 92425; HLA-B*39:01; TUBA3C; ENSG00000198033; TAA
ACFEPANQMV

SEQ ID NO: 92426 - protein, 10 aa, Homo sapiens
  misc_feature: Table A; Target 92426; HLA-B*40:02; TUBA3C; ENSG00000198033; TAA
ACFEPANQMV

SEQ ID NO: 92427 - protein, 10 aa, Homo sapiens
  misc_feature: Table A; Target 92427; HLA-B*55:01; TUBA3C; ENSG00000198033; TAA
ACFEPANQMV

SEQ ID NO: 92428 - protein, 10 aa, Homo sapiens
  misc_feature: Table A; Target 92428; HLA-C*04:01; TUBA3C; ENSG00000198033; TAA
ACFEPANQMV

SEQ ID NO: 92429 - protein, 10 aa, Homo sapiens
  misc_feature: Table A; Target 92429; HLA-C*06:02; TUBA3C; ENSG00000198033; TAA
ACFEPANQMV

SEQ ID NO: 92430 - protein, 10 aa, Homo sapiens
  misc_feature: Table A; Target 92430; HLA-C*12:03; TUBA3C; ENSG00000198033; TAA
ACFEPANQMV

SEQ ID NO: 92431 - protein, 11 aa, Homo sapiens
  misc_feature: Table A; Target 92431; HLA-A*03:01; TUBA3C; ENSG00000198033; TAA
ACFEPANQMVK

SEQ ID NO: 92432 - protein, 11 aa, Homo sapiens
  misc_feature: Table A; Target 92432; HLA-A*03:02; TUBA3C; ENSG00000198033; TAA
ACFEPANQMVK

SEQ ID NO: 92433 - protein, 11 aa, Homo sapiens
  misc_feature: Table A; Target 92433; HLA-A*11:01; TUBA3C; ENSG00000198033; TAA
ACFEPANQMVK

SEQ ID NO: 92434 - protein, 11 aa, Homo sapiens
  misc_feature: Table A; Target 92434; HLA-A*31:01; TUBA3C; ENSG00000198033; TAA
ACFEPANQMVK

SEQ ID NO: 92435 - protein, 11 aa, Homo sapiens
  misc_feature: Table A; Target 92435; HLA-A*68:01; TUBA3C; ENSG00000198033; TAA
ACFEPANQMVK

SEQ ID NO: 92436 - protein, 11 aa, Homo sapiens
  misc_feature: Table A; Target 92436; HLA-B*27:02; TUBA3C; ENSG00000198033; TAA
ACFEPANQMVK

SEQ ID NO: 92437 - protein, 11 aa, Homo sapiens
  misc_feature: Table A; Target 92437; HLA-B*27:05; TUBA3C; ENSG00000198033; TAA
ACFEPANQMVK

SEQ ID NO: 92438 - protein, 11 aa, Homo sapiens
  misc_feature: Table A; Target 92438; HLA-B*57:01; TUBA3C; ENSG00000198033; TAA
ACFEPANQMVK

SEQ ID NO: 92439 - protein, 11 aa, Homo sapiens
  misc_feature: Table A; Target 92439; HLA-C*04:01; TUBA3C; ENSG00000198033; TAA
ACFEPANQMVK

SEQ ID NO: 92440 - protein, 11 aa, Homo sapiens
  misc_feature: Table A; Target 92440; HLA-C*06:02; TUBA3C; ENSG00000198033; TAA
ACFEPANQMVK

SEQ ID NO: 92441 - protein, 11 aa, Homo sapiens
  misc_feature: Table A; Target 92441; HLA-C*07:01; TUBA3C; ENSG00000198033; TAA
ACFEPANQMVK

SEQ ID NO: 92442 - protein, 11 aa, Homo sapiens
  misc_feature: Table A; Target 92442; HLA-C*07:06; TUBA3C; ENSG00000198033; TAA
ACFEPANQMVK

SEQ ID NO: 92443 - protein, 11 aa, Homo sapiens
  misc_feature: Table A; Target 92443; HLA-C*12:03; TUBA3C; ENSG00000198033; TAA
ACFEPANQMVK

SEQ ID NO: 92444 - protein, 11 aa, Homo sapiens
  misc_feature: Table A; Target 92444; HLA-C*16:04; TUBA3C; ENSG00000198033; TAA
ACFEPANQMVK

SEQ ID NO: 92445 - protein, 10 aa, Homo sapiens
  misc_feature: Table A; Target 92445; HLA-B*37:01; TUBA3C; ENSG00000198033; TAA
ADLCTGLQGF

SEQ ID NO: 92446 - protein, 10 aa, Homo sapiens
  misc_feature: Table A; Target 92446; HLA-C*04:01; TUBA3C; ENSG00000198033; TAA
ADLCTGLQGF

SEQ ID NO: 92447 - protein, 10 aa, Homo sapiens
  misc_feature: Table A; Target 92447; HLA-C*07:01; TUBA3C; ENSG00000198033; TAA
ADLCTGLQGF

SEQ ID NO: 92448 - protein, 9 aa, Homo sapiens
  misc_feature: Table A; Target 92448; HLA-A*01:01; TUBA3C; ENSG00000198033; TAA
AEAEEGEEY

SEQ ID NO: 92449 - protein, 9 aa, Homo sapiens
  misc_feature: Table A; Target 92449; HLA-A*25:01; TUBA3C; ENSG00000198033; TAA
AEAEEGEEY

SEQ ID NO: 92450 - protein, 9 aa, Homo sapiens
  misc_feature: Table A; Target 92450; HLA-A*26:01; TUBA3C; ENSG00000198033; TAA
AEAEEGEEY

SEQ ID NO: 92451 - protein, 9 aa, Homo sapiens
  misc_feature: Table A; Target 92451; HLA-A*29:02; TUBA3C; ENSG00000198033; TAA
AEAEEGEEY

SEQ ID NO: 92452 - protein, 9 aa, Homo sapiens
  misc_feature: Table A; Target 92452; HLA-A*30:01; TUBA3C; ENSG00000198033; TAA
AEAEEGEEY

SEQ ID NO: 92453 - protein, 9 aa, Homo sapiens
  misc_feature: Table A; Target 92453; HLA-A*30:02; TUBA3C; ENSG00000198033; TAA
AEAEEGEEY

SEQ ID NO: 92454 - protein, 9 aa, Homo sapiens
  misc_feature: Table A; Target 92454; HLA-A*32:01; TUBA3C; ENSG00000198033; TAA
AEAEEGEEY

SEQ ID NO: 92455 - protein, 9 aa, Homo sapiens
  misc_feature: Table A; Target 92455; HLA-B*15:01; TUBA3C; ENSG00000198033; TAA
AEAEEGEEY

SEQ ID NO: 92456 - protein, 9 aa, Homo sapiens
  misc_feature: Table A; Target 92456; HLA-B*15:03; TUBA3C; ENSG00000198033; TAA
AEAEEGEEY

SEQ ID NO: 92457 - protein, 9 aa, Homo sapiens
  misc_feature: Table A; Target 92457; HLA-B*18:01; TUBA3C; ENSG00000198033; TAA
AEAEEGEEY

SEQ ID NO: 92458 - protein, 9 aa, Homo sapiens
  misc_feature: Table A; Target 92458; HLA-B*27:02; TUBA3C; ENSG00000198033; TAA
AEAEEGEEY

SEQ ID NO: 92459 - protein, 9 aa, Homo sapiens
  misc_feature: Table A; Target 92459; HLA-B*27:05; TUBA3C; ENSG00000198033; TAA
AEAEEGEEY

SEQ ID NO: 92460 - protein, 9 aa, Homo sapiens
  misc_feature: Table A; Target 92460; HLA-B*35:01; TUBA3C; ENSG00000198033; TAA
AEAEEGEEY

SEQ ID NO: 92461 - protein, 9 aa, Homo sapiens
  misc_feature: Table A; Target 92461; HLA-B*37:01; TUBA3C; ENSG00000198033; TAA
AEAEEGEEY

SEQ ID NO: 92462 - protein, 9 aa, Homo sapiens
  misc_feature: Table A; Target 92462; HLA-B*38:01; TUBA3C; ENSG00000198033; TAA
AEAEEGEEY

SEQ ID NO: 92463 - protein, 9 aa, Homo sapiens
  misc_feature: Table A; Target 92463; HLA-B*39:01; TUBA3C; ENSG00000198033; TAA
AEAEEGEEY

SEQ ID NO: 92464 - protein, 9 aa, Homo sapiens
  misc_feature: Table A; Target 92464; HLA-B*40:01; TUBA3C; ENSG00000198033; TAA
AEAEEGEEY

SEQ ID NO: 92465 - protein, 9 aa, Homo sapiens
  misc_feature: Table A; Target 92465; HLA-B*40:02; TUBA3C; ENSG00000198033; TAA
AEAEEGEEY

SEQ ID NO: 92466 - protein, 9 aa, Homo sapiens
  misc_feature: Table A; Target 92466; HLA-B*44:02; TUBA3C; ENSG00000198033; TAA
AEAEEGEEY

SEQ ID NO: 92467 - protein, 9 aa, Homo sapiens
  misc_feature: Table A; Target 92467; HLA-B*44:03; TUBA3C; ENSG00000198033; TAA
AEAEEGEEY

SEQ ID NO: 92468 - protein, 9 aa, Homo sapiens
  misc_feature: Table A; Target 92468; HLA-B*46:01; TUBA3C; ENSG00000198033; TAA
AEAEEGEEY

SEQ ID NO: 92469 - protein, 9 aa, Homo sapiens
  misc_feature: Table A; Target 92469; HLA-B*49:01; TUBA3C; ENSG00000198033; TAA
AEAEEGEEY

SEQ ID NO: 92470 - protein, 9 aa, Homo sapiens
  misc_feature: Table A; Target 92470; HLA-B*55:01; TUBA3C; ENSG00000198033; TAA
AEAEEGEEY

SEQ ID NO: 92471 - protein, 9 aa, Homo sapiens
  misc_feature: Table A; Target 92471; HLA-B*57:01; TUBA3C; ENSG00000198033; TAA
AEAEEGEEY

SEQ ID NO: 92472 - protein, 9 aa, Homo sapiens
  misc_feature: Table A; Target 92472; HLA-B*58:01; TUBA3C; ENSG00000198033; TAA
AEAEEGEEY

SEQ ID NO: 92473 - protein, 9 aa, Homo sapiens
  misc_feature: Table A; Target 92473; HLA-C*01:02; TUBA3C; ENSG00000198033; TAA
AEAEEGEEY

SEQ ID NO: 92474 - protein, 9 aa, Homo sapiens
  misc_feature: Table A; Target 92474; HLA-C*02:02; TUBA3C; ENSG00000198033; TAA
AEAEEGEEY

SEQ ID NO: 92475 - protein, 9 aa, Homo sapiens
  misc_feature: Table A; Target 92475; HLA-C*03:03; TUBA3C; ENSG00000198033; TAA
AEAEEGEEY

SEQ ID NO: 92476 - protein, 9 aa, Homo sapiens
  misc_feature: Table A; Target 92476; HLA-C*03:04; TUBA3C; ENSG00000198033; TAA
AEAEEGEEY

SEQ ID NO: 92477 - protein, 9 aa, Homo sapiens
  misc_feature: Table A; Target 92477; HLA-C*04:01; TUBA3C; ENSG00000198033; TAA
AEAEEGEEY

SEQ ID NO: 92478 - protein, 9 aa, Homo sapiens
  misc_feature: Table A; Target 92478; HLA-C*05:01; TUBA3C; ENSG00000198033; TAA
AEAEEGEEY

SEQ ID NO: 92479 - protein, 9 aa, Homo sapiens
  misc_feature: Table A; Target 92479; HLA-C*07:01; TUBA3C; ENSG00000198033; TAA
AEAEEGEEY

SEQ ID NO: 92480 - protein, 9 aa, Homo sapiens
  misc_feature: Table A; Target 92480; HLA-C*07:04; TUBA3C; ENSG00000198033; TAA
AEAEEGEEY

SEQ ID NO: 92481 - protein, 9 aa, Homo sapiens
  misc_feature: Table A; Target 92481; HLA-C*07:06; TUBA3C; ENSG00000198033; TAA
AEAEEGEEY

SEQ ID NO: 92482 - protein, 9 aa, Homo sapiens
  misc_feature: Table A; Target 92482; HLA-C*12:03; TUBA3C; ENSG00000198033; TAA
AEAEEGEEY

SEQ ID NO: 92483 - protein, 9 aa, Homo sapiens
  misc_feature: Table A; Target 92483; HLA-C*14:02; TUBA3C; ENSG00000198033; TAA
AEAEEGEEY

SEQ ID NO: 92484 - protein, 9 aa, Homo sapiens
  misc_feature: Table A; Target 92484; HLA-C*16:01; TUBA3C; ENSG00000198033; TAA
AEAEEGEEY

SEQ ID NO: 92485 - protein, 9 aa, Homo sapiens
  misc_feature: Table A; Target 92485; HLA-C*16:02; TUBA3C; ENSG00000198033; TAA
AEAEEGEEY

SEQ ID NO: 92486 - protein, 9 aa, Homo sapiens
  misc_feature: Table A; Target 92486; HLA-C*16:04; TUBA3C; ENSG00000198033; TAA
AEAEEGEEY

SEQ ID NO: 92487 - protein, 11 aa, Homo sapiens
  misc_feature: Table A; Target 92487; HLA-B*44:02; TUBA3C; ENSG00000198033; TAA
AEAWARLDHKF

SEQ ID NO: 92488 - protein, 11 aa, Homo sapiens
  misc_feature: Table A; Target 92488; HLA-B*44:03; TUBA3C; ENSG00000198033; TAA
AEAWARLDHKF

SEQ ID NO: 92489 - protein, 8 aa, Homo sapiens
  misc_feature: Table A; Target 92489; HLA-A*23:01; TUBA3C; ENSG00000198033; TAA
AEITNACF

SEQ ID NO: 92490 - protein, 8 aa, Homo sapiens
  misc_feature: Table A; Target 92490; HLA-A*30:01; TUBA3C; ENSG00000198033; TAA
AEITNACF

SEQ ID NO: 92491 - protein, 8 aa, Homo sapiens
  misc_feature: Table A; Target 92491; HLA-B*18:01; TUBA3C; ENSG00000198033; TAA
AEITNACF

SEQ ID NO: 92492 - protein, 8 aa, Homo sapiens
  misc_feature: Table A; Target 92492; HLA-B*27:02; TUBA3C; ENSG00000198033; TAA
AEITNACF

SEQ ID NO: 92493 - protein, 8 aa, Homo sapiens
  misc_feature: Table A; Target 92493; HLA-B*37:01; TUBA3C; ENSG00000198033; TAA
AEITNACF

SEQ ID NO: 92494 - protein, 8 aa, Homo sapiens
  misc_feature: Table A; Target 92494; HLA-B*40:01; TUBA3C; ENSG00000198033; TAA
AEITNACF

SEQ ID NO: 92495 - protein, 8 aa, Homo sapiens
  misc_feature: Table A; Target 92495; HLA-B*40:02; TUBA3C; ENSG00000198033; TAA
AEITNACF

SEQ ID NO: 92496 - protein, 8 aa, Homo sapiens
  misc_feature: Table A; Target 92496; HLA-B*44:02; TUBA3C; ENSG00000198033; TAA
AEITNACF

SEQ ID NO: 92497 - protein, 8 aa, Homo sapiens
  misc_feature: Table A; Target 92497; HLA-B*44:03; TUBA3C; ENSG00000198033; TAA
AEITNACF

SEQ ID NO: 92498 - protein, 8 aa, Homo sapiens
  misc_feature: Table A; Target 92498; HLA-B*49:01; TUBA3C; ENSG00000198033; TAA
AEITNACF

SEQ ID NO: 92499 - protein, 8 aa, Homo sapiens
  misc_feature: Table A; Target 92499; HLA-C*16:04; TUBA3C; ENSG00000198033; TAA
AEITNACF

SEQ ID NO: 92500 - protein, 9 aa, Homo sapiens
  misc_feature: Table A; Target 92500; HLA-A*30:01; TUBA3C; ENSG00000198033; TAA
AEKAYHEQL

SEQ ID NO: 92501 - protein, 9 aa, Homo sapiens
  misc_feature: Table A; Target 92501; HLA-B*07:02; TUBA3C; ENSG00000198033; TAA
AEKAYHEQL

SEQ ID NO: 92502 - protein, 9 aa, Homo sapiens
  misc_feature: Table A; Target 92502; HLA-B*08:01; TUBA3C; ENSG00000198033; TAA
AEKAYHEQL

SEQ ID NO: 92503 - protein, 9 aa, Homo sapiens
  misc_feature: Table A; Target 92503; HLA-B*18:01; TUBA3C; ENSG00000198033; TAA
AEKAYHEQL

SEQ ID NO: 92504 - protein, 9 aa, Homo sapiens
  misc_feature: Table A; Target 92504; HLA-B*27:02; TUBA3C; ENSG00000198033; TAA
AEKAYHEQL

SEQ ID NO: 92505 - protein, 9 aa, Homo sapiens
  misc_feature: Table A; Target 92505; HLA-B*27:05; TUBA3C; ENSG00000198033; TAA
AEKAYHEQL

SEQ ID NO: 92506 - protein, 9 aa, Homo sapiens
  misc_feature: Table A; Target 92506; HLA-B*37:01; TUBA3C; ENSG00000198033; TAA
AEKAYHEQL

SEQ ID NO: 92507 - protein, 9 aa, Homo sapiens
  misc_feature: Table A; Target 92507; HLA-B*40:01; TUBA3C; ENSG00000198033; TAA
AEKAYHEQL

SEQ ID NO: 92508 - protein, 9 aa, Homo sapiens
  misc_feature: Table A; Target 92508; HLA-B*40:02; TUBA3C; ENSG00000198033; TAA
AEKAYHEQL

SEQ ID NO: 92509 - protein, 9 aa, Homo sapiens
  misc_feature: Table A; Target 92509; HLA-B*44:02; TUBA3C; ENSG00000198033; TAA
AEKAYHEQL

SEQ ID NO: 92510 - protein, 9 aa, Homo sapiens
  misc_feature: Table A; Target 92510; HLA-B*44:03; TUBA3C; ENSG00000198033; TAA
AEKAYHEQL

SEQ ID NO: 92511 - protein, 9 aa, Homo sapiens
  misc_feature: Table A; Target 92511; HLA-B*49:01; TUBA3C; ENSG00000198033; TAA
AEKAYHEQL

SEQ ID NO: 92512 - protein, 9 aa, Homo sapiens
  misc_feature: Table A; Target 92512; HLA-C*02:02; TUBA3C; ENSG00000198033; TAA
AEKAYHEQL

SEQ ID NO: 92513 - protein, 9 aa, Homo sapiens
  misc_feature: Table A; Target 92513; HLA-C*04:01; TUBA3C; ENSG00000198033; TAA
AEKAYHEQL

SEQ ID NO: 92514 - protein, 9 aa, Homo sapiens
  misc_feature: Table A; Target 92514; HLA-C*06:02; TUBA3C; ENSG00000198033; TAA
AEKAYHEQL

SEQ ID NO: 92515 - protein, 9 aa, Homo sapiens
  misc_feature: Table A; Target 92515; HLA-C*07:01; TUBA3C; ENSG00000198033; TAA
AEKAYHEQL

SEQ ID NO: 92516 - protein, 9 aa, Homo sapiens
  misc_feature: Table A; Target 92516; HLA-C*07:02; TUBA3C; ENSG00000198033; TAA
AEKAYHEQL

SEQ ID NO: 92517 - protein, 9 aa, Homo sapiens
  misc_feature: Table A; Target 92517; HLA-C*07:04; TUBA3C; ENSG00000198033; TAA
AEKAYHEQL

SEQ ID NO: 92518 - protein, 9 aa, Homo sapiens
  misc_feature: Table A; Target 92518; HLA-C*12:03; TUBA3C; ENSG00000198033; TAA
AEKAYHEQL

SEQ ID NO: 92519 - protein, 9 aa, Homo sapiens
  misc_feature: Table A; Target 92519; HLA-C*16:02; TUBA3C; ENSG00000198033; TAA
AEKAYHEQL

SEQ ID NO: 92520 - protein, 9 aa, Homo sapiens
  misc_feature: Table A; Target 92520; HLA-C*16:04; TUBA3C; ENSG00000198033; TAA
AEKAYHEQL

SEQ ID NO: 92521 - protein, 11 aa, Homo sapiens
  misc_feature: Table A; Target 92521; HLA-A*30:01; TUBA3C; ENSG00000198033; TAA
AEKAYHEQLSV

SEQ ID NO: 92522 - protein, 11 aa, Homo sapiens
  misc_feature: Table A; Target 92522; HLA-B*40:02; TUBA3C; ENSG00000198033; TAA
AEKAYHEQLSV

SEQ ID NO: 92523 - protein, 11 aa, Homo sapiens
  misc_feature: Table A; Target 92523; HLA-B*49:01; TUBA3C; ENSG00000198033; TAA
AEKAYHEQLSV

SEQ ID NO: 92524 - protein, 9 aa, Homo sapiens
  misc_feature: Table A; Target 92524; HLA-A*23:01; TUBA3C; ENSG00000198033; TAA
AFMVDNEAI

SEQ ID NO: 92525 - protein, 9 aa, Homo sapiens
  misc_feature: Table A; Target 92525; HLA-A*24:02; TUBA3C; ENSG00000198033; TAA
AFMVDNEAI

SEQ ID NO: 92526 - protein, 9 aa, Homo sapiens
  misc_feature: Table A; Target 92526; HLA-B*55:01; TUBA3C; ENSG00000198033; TAA
AFMVDNEAI

SEQ ID NO: 92527 - protein, 9 aa, Homo sapiens
  misc_feature: Table A; Target 92527; HLA-C*01:02; TUBA3C; ENSG00000198033; TAA
AFMVDNEAI

SEQ ID NO: 92528 - protein, 9 aa, Homo sapiens
  misc_feature: Table A; Target 92528; HLA-C*04:01; TUBA3C; ENSG00000198033; TAA
AFMVDNEAI

SEQ ID NO: 92529 - protein, 9 aa, Homo sapiens
  misc_feature: Table A; Target 92529; HLA-C*14:02; TUBA3C; ENSG00000198033; TAA
AFMVDNEAI

SEQ ID NO: 92530 - protein, 10 aa, Homo sapiens
  misc_feature: Table A; Target 92530; HLA-A*23:01; TUBA3C; ENSG00000198033; TAA
AFMVDNEAIY

SEQ ID NO: 92531 - protein, 10 aa, Homo sapiens
  misc_feature: Table A; Target 92531; HLA-A*29:02; TUBA3C; ENSG00000198033; TAA
AFMVDNEAIY

SEQ ID NO: 92532 - protein, 10 aa, Homo sapiens
  misc_feature: Table A; Target 92532; HLA-A*30:02; TUBA3C; ENSG00000198033; TAA
AFMVDNEAIY

SEQ ID NO: 92533 - protein, 10 aa, Homo sapiens
  misc_feature: Table A; Target 92533; HLA-B*15:01; TUBA3C; ENSG00000198033; TAA
AFMVDNEAIY

SEQ ID NO: 92534 - protein, 10 aa, Homo sapiens
  misc_feature: Table A; Target 92534; HLA-C*14:02; TUBA3C; ENSG00000198033; TAA
AFMVDNEAIY

SEQ ID NO: 92535 - protein, 9 aa, Homo sapiens
  misc_feature: Table A; Target 92535; HLA-B*08:01; TUBA3C; ENSG00000198033; TAA
AGKHVPRAV

SEQ ID NO: 92536 - protein, 9 aa, Homo sapiens
  misc_feature: Table A; Target 92536; HLA-C*06:02; TUBA3C; ENSG00000198033; TAA
AGKHVPRAV

SEQ ID NO: 92537 - protein, 9 aa, Homo sapiens
  misc_feature: Table A; Target 92537; HLA-C*07:02; TUBA3C; ENSG00000198033; TAA
AGKHVPRAV

SEQ ID NO: 92538 - protein, 10 aa, Homo sapiens
  misc_feature: Table A; Target 92538; HLA-B*27:02; TUBA3C; ENSG00000198033; TAA
AGVQIGNACW

SEQ ID NO: 92539 - protein, 10 aa, Homo sapiens
  misc_feature: Table A; Target 92539; HLA-B*44:02; TUBA3C; ENSG00000198033; TAA
AGVQIGNACW

SEQ ID NO: 92540 - protein, 10 aa, Homo sapiens
  misc_feature: Table A; Target 92540; HLA-B*44:03; TUBA3C; ENSG00000198033; TAA
AGVQIGNACW

SEQ ID NO: 92541 - protein, 10 aa, Homo sapiens
  misc_feature: Table A; Target 92541; HLA-B*57:01; TUBA3C; ENSG00000198033; TAA
AGVQIGNACW

SEQ ID NO: 92542 - protein, 10 aa, Homo sapiens
  misc_feature: Table A; Target 92542; HLA-B*58:01; TUBA3C; ENSG00000198033; TAA
AGVQIGNACW

SEQ ID NO: 92543 - protein, 10 aa, Homo sapiens
  misc_feature: Table A; Target 92543; HLA-C*16:04; TUBA3C; ENSG00000198033; TAA
AGVQIGNACW

SEQ ID NO: 92544 - protein, 9 aa, Homo sapiens
  misc_feature: Table A; Target 92544; HLA-A*02:01; TUBA3C; ENSG00000198033; TAA
AIAEAWARL

SEQ ID NO: 92545 - protein, 9 aa, Homo sapiens
  misc_feature: Table A; Target 92545; HLA-A*02:03; TUBA3C; ENSG00000198033; TAA
AIAEAWARL

SEQ ID NO: 92546 - protein, 9 aa, Homo sapiens
  misc_feature: Table A; Target 92546; HLA-A*02:04; TUBA3C; ENSG00000198033; TAA
AIAEAWARL

SEQ ID NO: 92547 - protein, 9 aa, Homo sapiens
  misc_feature: Table A; Target 92547; HLA-A*02:07; TUBA3C; ENSG00000198033; TAA
AIAEAWARL

SEQ ID NO: 92548 - protein, 9 aa, Homo sapiens
  misc_feature: Table A; Target 92548; HLA-A*68:02; TUBA3C; ENSG00000198033; TAA
AIAEAWARL

SEQ ID NO: 92549 - protein, 9 aa, Homo sapiens
  misc_feature: Table A; Target 92549; HLA-B*07:02; TUBA3C; ENSG00000198033; TAA
AIAEAWARL

SEQ ID NO: 92550 - protein, 9 aa, Homo sapiens
  misc_feature: Table A; Target 92550; HLA-B*27:05; TUBA3C; ENSG00000198033; TAA
AIAEAWARL

SEQ ID NO: 92551 - protein, 9 aa, Homo sapiens
  misc_feature: Table A; Target 92551; HLA-C*01:02; TUBA3C; ENSG00000198033; TAA
AIAEAWARL

SEQ ID NO: 92552 - protein, 8 aa, Homo sapiens
  misc_feature: Table A; Target 92552; HLA-A*03:01; TUBA3C; ENSG00000198033; TAA
AIATIKTK

SEQ ID NO: 92553 - protein, 8 aa, Homo sapiens
  misc_feature: Table A; Target 92553; HLA-A*03:02; TUBA3C; ENSG00000198033; TAA
AIATIKTK

SEQ ID NO: 92554 - protein, 8 aa, Homo sapiens
  misc_feature: Table A; Target 92554; HLA-A*11:01; TUBA3C; ENSG00000198033; TAA
AIATIKTK

SEQ ID NO: 92555 - protein, 8 aa, Homo sapiens
  misc_feature: Table A; Target 92555; HLA-B*27:02; TUBA3C; ENSG00000198033; TAA
AIATIKTK

SEQ ID NO: 92556 - protein, 8 aa, Homo sapiens
  misc_feature: Table A; Target 92556; HLA-B*27:05; TUBA3C; ENSG00000198033; TAA
AIATIKTK

SEQ ID NO: 92557 - protein, 8 aa, Homo sapiens
  misc_feature: Table A; Target 92557; HLA-B*40:02; TUBA3C; ENSG00000198033; TAA
AIATIKTK

SEQ ID NO: 92558 - protein, 8 aa, Homo sapiens
  misc_feature: Table A; Target 92558; HLA-B*58:01; TUBA3C; ENSG00000198033; TAA
AIATIKTK

SEQ ID NO: 92559 - protein, 8 aa, Homo sapiens
  misc_feature: Table A; Target 92559; HLA-C*04:01; TUBA3C; ENSG00000198033; TAA
AIATIKTK

SEQ ID NO: 92560 - protein, 8 aa, Homo sapiens
  misc_feature: Table A; Target 92560; HLA-C*06:02; TUBA3C; ENSG00000198033; TAA
AIATIKTK

SEQ ID NO: 92561 - protein, 8 aa, Homo sapiens
  misc_feature: Table A; Target 92561; HLA-C*07:01; TUBA3C; ENSG00000198033; TAA
AIATIKTK

SEQ ID NO: 92562 - protein, 8 aa, Homo sapiens
  misc_feature: Table A; Target 92562; HLA-C*07:02; TUBA3C; ENSG00000198033; TAA
AIATIKTK

SEQ ID NO: 92563 - protein, 8 aa, Homo sapiens
  misc_feature: Table A; Target 92563; HLA-C*12:03; TUBA3C; ENSG00000198033; TAA
AIATIKTK

SEQ ID NO: 92564 - protein, 8 aa, Homo sapiens
  misc_feature: Table A; Target 92564; HLA-C*16:01; TUBA3C; ENSG00000198033; TAA
AIATIKTK

SEQ ID NO: 92565 - protein, 8 aa, Homo sapiens
  misc_feature: Table A; Target 92565; HLA-C*16:02; TUBA3C; ENSG00000198033; TAA
AIATIKTK

SEQ ID NO: 92566 - protein, 9 aa, Homo sapiens
  misc_feature: Table A; Target 92566; HLA-A*03:01; TUBA3C; ENSG00000198033; TAA
AIATIKTKR

SEQ ID NO: 92567 - protein, 9 aa, Homo sapiens
  misc_feature: Table A; Target 92567; HLA-A*03:02; TUBA3C; ENSG00000198033; TAA
AIATIKTKR

SEQ ID NO: 92568 - protein, 9 aa, Homo sapiens
  misc_feature: Table A; Target 92568; HLA-A*11:01; TUBA3C; ENSG00000198033; TAA
AIATIKTKR

SEQ ID NO: 92569 - protein, 9 aa, Homo sapiens
  misc_feature: Table A; Target 92569; HLA-A*31:01; TUBA3C; ENSG00000198033; TAA
AIATIKTKR

SEQ ID NO: 92570 - protein, 9 aa, Homo sapiens
  misc_feature: Table A; Target 92570; HLA-A*32:01; TUBA3C; ENSG00000198033; TAA
AIATIKTKR

SEQ ID NO: 92571 - protein, 9 aa, Homo sapiens
  misc_feature: Table A; Target 92571; HLA-A*33:01; TUBA3C; ENSG00000198033; TAA
AIATIKTKR

SEQ ID NO: 92572 - protein, 9 aa, Homo sapiens
  misc_feature: Table A; Target 92572; HLA-A*33:03; TUBA3C; ENSG00000198033; TAA
AIATIKTKR

SEQ ID NO: 92573 - protein, 9 aa, Homo sapiens
  misc_feature: Table A; Target 92573; HLA-A*68:01; TUBA3C; ENSG00000198033; TAA
AIATIKTKR

SEQ ID NO: 92574 - protein, 9 aa, Homo sapiens
  misc_feature: Table A; Target 92574; HLA-A*68:02; TUBA3C; ENSG00000198033; TAA
AIATIKTKR

SEQ ID NO: 92575 - protein, 9 aa, Homo sapiens
  misc_feature: Table A; Target 92575; HLA-B*27:05; TUBA3C; ENSG00000198033; TAA
AIATIKTKR

SEQ ID NO: 92576 - protein, 9 aa, Homo sapiens
  misc_feature: Table A; Target 92576; HLA-C*06:02; TUBA3C; ENSG00000198033; TAA
AIATIKTKR

SEQ ID NO: 92577 - protein, 9 aa, Homo sapiens
  misc_feature: Table A; Target 92577; HLA-C*07:06; TUBA3C; ENSG00000198033; TAA
AIATIKTKR

SEQ ID NO: 92578 - protein, 8 aa, Homo sapiens
  misc_feature: Table A; Target 92578; HLA-A*31:01; TUBA3C; ENSG00000198033; TAA
AIYDICRR

SEQ ID NO: 92579 - protein, 10 aa, Homo sapiens
  misc_feature: Table A; Target 92579; HLA-A*03:01; TUBA3C; ENSG00000198033; TAA
AIYDICRRNL

SEQ ID NO: 92580 - protein, 8 aa, Homo sapiens
  misc_feature: Table A; Target 92580; HLA-A*02:01; TUBA3C; ENSG00000198033; TAA
AIYPAPQV

SEQ ID NO: 92581 - protein, 8 aa, Homo sapiens
  misc_feature: Table A; Target 92581; HLA-A*02:03; TUBA3C; ENSG00000198033; TAA
AIYPAPQV

SEQ ID NO: 92582 - protein, 8 aa, Homo sapiens
  misc_feature: Table A; Target 92582; HLA-A*02:04; TUBA3C; ENSG00000198033; TAA
AIYPAPQV

SEQ ID NO: 92583 - protein, 8 aa, Homo sapiens
  misc_feature: Table A; Target 92583; HLA-A*02:07; TUBA3C; ENSG00000198033; TAA
AIYPAPQV

SEQ ID NO: 92584 - protein, 8 aa, Homo sapiens
  misc_feature: Table A; Target 92584; HLA-A*30:01; TUBA3C; ENSG00000198033; TAA
AIYPAPQV

SEQ ID NO: 92585 - protein, 8 aa, Homo sapiens
  misc_feature: Table A; Target 92585; HLA-A*32:01; TUBA3C; ENSG00000198033; TAA
AIYPAPQV

SEQ ID NO: 92586 - protein, 8 aa, Homo sapiens
  misc_feature: Table A; Target 92586; HLA-A*68:02; TUBA3C; ENSG00000198033; TAA
AIYPAPQV

SEQ ID NO: 92587 - protein, 8 aa, Homo sapiens
  misc_feature: Table A; Target 92587; HLA-B*08:01; TUBA3C; ENSG00000198033; TAA
AIYPAPQV

SEQ ID NO: 92588 - protein, 8 aa, Homo sapiens
  misc_feature: Table A; Target 92588; HLA-B*13:02; TUBA3C; ENSG00000198033; TAA
AIYPAPQV

SEQ ID NO: 92589 - protein, 8 aa, Homo sapiens
  misc_feature: Table A; Target 92589; HLA-B*15:03; TUBA3C; ENSG00000198033; TAA
AIYPAPQV

SEQ ID NO: 92590 - protein, 8 aa, Homo sapiens
  misc_feature: Table A; Target 92590; HLA-B*27:05; TUBA3C; ENSG00000198033; TAA
AIYPAPQV

SEQ ID NO: 92591 - protein, 8 aa, Homo sapiens
  misc_feature: Table A; Target 92591; HLA-B*37:01; TUBA3C; ENSG00000198033; TAA
AIYPAPQV

SEQ ID NO: 92592 - protein, 8 aa, Homo sapiens
  misc_feature: Table A; Target 92592; HLA-B*39:01; TUBA3C; ENSG00000198033; TAA
AIYPAPQV

SEQ ID NO: 92593 - protein, 8 aa, Homo sapiens
  misc_feature: Table A; Target 92593; HLA-B*40:02; TUBA3C; ENSG00000198033; TAA
AIYPAPQV

SEQ ID NO: 92594 - protein, 8 aa, Homo sapiens
  misc_feature: Table A; Target 92594; HLA-B*46:01; TUBA3C; ENSG00000198033; TAA
AIYPAPQV

SEQ ID NO: 92595 - protein, 8 aa, Homo sapiens
  misc_feature: Table A; Target 92595; HLA-B*49:01; TUBA3C; ENSG00000198033; TAA
AIYPAPQV

SEQ ID NO: 92596 - protein, 8 aa, Homo sapiens
  misc_feature: Table A; Target 92596; HLA-B*51:01; TUBA3C; ENSG00000198033; TAA
AIYPAPQV

SEQ ID NO: 92597 - protein, 8 aa, Homo sapiens
  misc_feature: Table A; Target 92597; HLA-B*54:01; TUBA3C; ENSG00000198033; TAA
AIYPAPQV

SEQ ID NO: 92598 - protein, 8 aa, Homo sapiens
  misc_feature: Table A; Target 92598; HLA-B*55:01; TUBA3C; ENSG00000198033; TAA
AIYPAPQV

SEQ ID NO: 92599 - protein, 8 aa, Homo sapiens
  misc_feature: Table A; Target 92599; HLA-B*56:01; TUBA3C; ENSG00000198033; TAA
AIYPAPQV

SEQ ID NO: 92600 - protein, 8 aa, Homo sapiens
  misc_feature: Table A; Target 92600; HLA-B*58:01; TUBA3C; ENSG00000198033; TAA
AIYPAPQV

SEQ ID NO: 92601 - protein, 8 aa, Homo sapiens
  misc_feature: Table A; Target 92601; HLA-C*01:02; TUBA3C; ENSG00000198033; TAA
AIYPAPQV

SEQ ID NO: 92602 - protein, 8 aa, Homo sapiens
  misc_feature: Table A; Target 92602; HLA-C*02:02; TUBA3C; ENSG00000198033; TAA
AIYPAPQV

SEQ ID NO: 92603 - protein, 8 aa, Homo sapiens
  misc_feature: Table A; Target 92603; HLA-C*03:03; TUBA3C; ENSG00000198033; TAA
AIYPAPQV

SEQ ID NO: 92604 - protein, 8 aa, Homo sapiens
  misc_feature: Table A; Target 92604; HLA-C*03:04; TUBA3C; ENSG00000198033; TAA
AIYPAPQV

SEQ ID NO: 92605 - protein, 8 aa, Homo sapiens
  misc_feature: Table A; Target 92605; HLA-C*04:01; TUBA3C; ENSG00000198033; TAA
AIYPAPQV

SEQ ID NO: 92606 - protein, 8 aa, Homo sapiens
  misc_feature: Table A; Target 92606; HLA-C*05:01; TUBA3C; ENSG00000198033; TAA
AIYPAPQV

SEQ ID NO: 92607 - protein, 8 aa, Homo sapiens
  misc_feature: Table A; Target 92607; HLA-C*06:02; TUBA3C; ENSG00000198033; TAA
AIYPAPQV

SEQ ID NO: 92608 - protein, 8 aa, Homo sapiens
  misc_feature: Table A; Target 92608; HLA-C*07:01; TUBA3C; ENSG00000198033; TAA
AIYPAPQV

SEQ ID NO: 92609 - protein, 8 aa, Homo sapiens
  misc_feature: Table A; Target 92609; HLA-C*07:02; TUBA3C; ENSG00000198033; TAA
AIYPAPQV

SEQ ID NO: 92610 - protein, 8 aa, Homo sapiens
  misc_feature: Table A; Target 92610; HLA-C*12:03; TUBA3C; ENSG00000198033; TAA
AIYPAPQV

SEQ ID NO: 92611 - protein, 8 aa, Homo sapiens
  misc_feature: Table A; Target 92611; HLA-C*16:01; TUBA3C; ENSG00000198033; TAA
AIYPAPQV

SEQ ID NO: 92612 - protein, 8 aa, Homo sapiens
  misc_feature: Table A; Target 92612; HLA-C*16:02; TUBA3C; ENSG00000198033; TAA
AIYPAPQV

SEQ ID NO: 92613 - protein, 8 aa, Homo sapiens
  misc_feature: Table A; Target 92613; HLA-C*16:04; TUBA3C; ENSG00000198033; TAA
AIYPAPQV

SEQ ID NO: 92614 - protein, 9 aa, Homo sapiens
  misc_feature: Table A; Target 92614; HLA-A*02:01; TUBA3C; ENSG00000198033; TAA
AIYPAPQVS

SEQ ID NO: 92615 - protein, 9 aa, Homo sapiens
  misc_feature: Table A; Target 92615; HLA-A*02:03; TUBA3C; ENSG00000198033; TAA
AIYPAPQVS

SEQ ID NO: 92616 - protein, 9 aa, Homo sapiens
  misc_feature: Table A; Target 92616; HLA-A*03:01; TUBA3C; ENSG00000198033; TAA
AIYPAPQVS

SEQ ID NO: 92617 - protein, 9 aa, Homo sapiens
  misc_feature: Table A; Target 92617; HLA-A*03:02; TUBA3C; ENSG00000198033; TAA
AIYPAPQVS

SEQ ID NO: 92618 - protein, 9 aa, Homo sapiens
  misc_feature: Table A; Target 92618; HLA-A*31:01; TUBA3C; ENSG00000198033; TAA
AIYPAPQVS

SEQ ID NO: 92619 - protein, 9 aa, Homo sapiens
  misc_feature: Table A; Target 92619; HLA-A*32:01; TUBA3C; ENSG00000198033; TAA
AIYPAPQVS

SEQ ID NO: 92620 - protein, 9 aa, Homo sapiens
  misc_feature: Table A; Target 92620; HLA-B*13:02; TUBA3C; ENSG00000198033; TAA
AIYPAPQVS

SEQ ID NO: 92621 - protein, 9 aa, Homo sapiens
  misc_feature: Table A; Target 92621; HLA-B*15:01; TUBA3C; ENSG00000198033; TAA
AIYPAPQVS

SEQ ID NO: 92622 - protein, 9 aa, Homo sapiens
  misc_feature: Table A; Target 92622; HLA-B*15:03; TUBA3C; ENSG00000198033; TAA
AIYPAPQVS

SEQ ID NO: 92623 - protein, 9 aa, Homo sapiens
  misc_feature: Table A; Target 92623; HLA-B*27:05; TUBA3C; ENSG00000198033; TAA
AIYPAPQVS

SEQ ID NO: 92624 - protein, 9 aa, Homo sapiens
  misc_feature: Table A; Target 92624; HLA-B*39:01; TUBA3C; ENSG00000198033; TAA
AIYPAPQVS

SEQ ID NO: 92625 - protein, 9 aa, Homo sapiens
  misc_feature: Table A; Target 92625; HLA-B*40:02; TUBA3C; ENSG00000198033; TAA
AIYPAPQVS

SEQ ID NO: 92626 - protein, 9 aa, Homo sapiens
  misc_feature: Table A; Target 92626; HLA-C*04:01; TUBA3C; ENSG00000198033; TAA
AIYPAPQVS

SEQ ID NO: 92627 - protein, 9 aa, Homo sapiens
  misc_feature: Table A; Target 92627; HLA-C*06:02; TUBA3C; ENSG00000198033; TAA
AIYPAPQVS

SEQ ID NO: 92628 - protein, 9 aa, Homo sapiens
  misc_feature: Table A; Target 92628; HLA-C*07:04; TUBA3C; ENSG00000198033; TAA
AIYPAPQVS

SEQ ID NO: 92629 - protein, 9 aa, Homo sapiens
  misc_feature: Table A; Target 92629; HLA-C*12:03; TUBA3C; ENSG00000198033; TAA
AIYPAPQVS

SEQ ID NO: 92630 - protein, 9 aa, Homo sapiens
  misc_feature: Table A; Target 92630; HLA-C*16:02; TUBA3C; ENSG00000198033; TAA
AIYPAPQVS

SEQ ID NO: 92631 - protein, 10 aa, Homo sapiens
  misc_feature: Table A; Target 92631; HLA-A*02:01; TUBA3C; ENSG00000198033; TAA
AIYPAPQVST

SEQ ID NO: 92632 - protein, 10 aa, Homo sapiens
  misc_feature: Table A; Target 92632; HLA-A*02:03; TUBA3C; ENSG00000198033; TAA
AIYPAPQVST

SEQ ID NO: 92633 - protein, 10 aa, Homo sapiens
  misc_feature: Table A; Target 92633; HLA-A*03:01; TUBA3C; ENSG00000198033; TAA
AIYPAPQVST

SEQ ID NO: 92634 - protein, 10 aa, Homo sapiens
  misc_feature: Table A; Target 92634; HLA-A*03:02; TUBA3C; ENSG00000198033; TAA
AIYPAPQVST

SEQ ID NO: 92635 - protein, 10 aa, Homo sapiens
  misc_feature: Table A; Target 92635; HLA-A*11:01; TUBA3C; ENSG00000198033; TAA
AIYPAPQVST

SEQ ID NO: 92636 - protein, 10 aa, Homo sapiens
  misc_feature: Table A; Target 92636; HLA-A*31:01; TUBA3C; ENSG00000198033; TAA
AIYPAPQVST

SEQ ID NO: 92637 - protein, 10 aa, Homo sapiens
  misc_feature: Table A; Target 92637; HLA-A*32:01; TUBA3C; ENSG00000198033; TAA
AIYPAPQVST

SEQ ID NO: 92638 - protein, 10 aa, Homo sapiens
  misc_feature: Table A; Target 92638; HLA-B*07:02; TUBA3C; ENSG00000198033; TAA
AIYPAPQVST

SEQ ID NO: 92639 - protein, 10 aa, Homo sapiens
  misc_feature: Table A; Target 92639; HLA-B*13:02; TUBA3C; ENSG00000198033; TAA
AIYPAPQVST

SEQ ID NO: 92640 - protein, 10 aa, Homo sapiens
  misc_feature: Table A; Target 92640; HLA-B*15:01; TUBA3C; ENSG00000198033; TAA
AIYPAPQVST

SEQ ID NO: 92641 - protein, 10 aa, Homo sapiens
  misc_feature: Table A; Target 92641; HLA-B*27:05; TUBA3C; ENSG00000198033; TAA
AIYPAPQVST

SEQ ID NO: 92642 - protein, 10 aa, Homo sapiens
  misc_feature: Table A; Target 92642; HLA-B*40:02; TUBA3C; ENSG00000198033; TAA
AIYPAPQVST

SEQ ID NO: 92643 - protein, 10 aa, Homo sapiens
  misc_feature: Table A; Target 92643; HLA-B*46:01; TUBA3C; ENSG00000198033; TAA
AIYPAPQVST

SEQ ID NO: 92644 - protein, 10 aa, Homo sapiens
  misc_feature: Table A; Target 92644; HLA-B*54:01; TUBA3C; ENSG00000198033; TAA
AIYPAPQVST

SEQ ID NO: 92645 - protein, 10 aa, Homo sapiens
  misc_feature: Table A; Target 92645; HLA-B*56:01; TUBA3C; ENSG00000198033; TAA
AIYPAPQVST

SEQ ID NO: 92646 - protein, 10 aa, Homo sapiens
  misc_feature: Table A; Target 92646; HLA-B*57:01; TUBA3C; ENSG00000198033; TAA
AIYPAPQVST

SEQ ID NO: 92647 - protein, 10 aa, Homo sapiens
  misc_feature: Table A; Target 92647; HLA-B*58:01; TUBA3C; ENSG00000198033; TAA
AIYPAPQVST

SEQ ID NO: 92648 - protein, 10 aa, Homo sapiens
  misc_feature: Table A; Target 92648; HLA-C*01:02; TUBA3C; ENSG00000198033; TAA
AIYPAPQVST

SEQ ID NO: 92649 - protein, 10 aa, Homo sapiens
  misc_feature: Table A; Target 92649; HLA-C*03:03; TUBA3C; ENSG00000198033; TAA
AIYPAPQVST

SEQ ID NO: 92650 - protein, 10 aa, Homo sapiens
  misc_feature: Table A; Target 92650; HLA-C*03:04; TUBA3C; ENSG00000198033; TAA
AIYPAPQVST

SEQ ID NO: 92651 - protein, 10 aa, Homo sapiens
  misc_feature: Table A; Target 92651; HLA-C*04:01; TUBA3C; ENSG00000198033; TAA
AIYPAPQVST

SEQ ID NO: 92652 - protein, 10 aa, Homo sapiens
  misc_feature: Table A; Target 92652; HLA-C*06:02; TUBA3C; ENSG00000198033; TAA
AIYPAPQVST

SEQ ID NO: 92653 - protein, 10 aa, Homo sapiens
  misc_feature: Table A; Target 92653; HLA-C*16:04; TUBA3C; ENSG00000198033; TAA
AIYPAPQVST

SEQ ID NO: 92654 - protein, 11 aa, Homo sapiens
  misc_feature: Table A; Target 92654; HLA-A*02:01; TUBA3C; ENSG00000198033; TAA
AIYPAPQVSTA

SEQ ID NO: 92655 - protein, 11 aa, Homo sapiens
  misc_feature: Table A; Target 92655; HLA-A*02:03; TUBA3C; ENSG00000198033; TAA
AIYPAPQVSTA

SEQ ID NO: 92656 - protein, 11 aa, Homo sapiens
  misc_feature: Table A; Target 92656; HLA-A*02:04; TUBA3C; ENSG00000198033; TAA
AIYPAPQVSTA

SEQ ID NO: 92657 - protein, 11 aa, Homo sapiens
  misc_feature: Table A; Target 92657; HLA-A*02:07; TUBA3C; ENSG00000198033; TAA
AIYPAPQVSTA

SEQ ID NO: 92658 - protein, 11 aa, Homo sapiens
  misc_feature: Table A; Target 92658; HLA-A*03:01; TUBA3C; ENSG00000198033; TAA
AIYPAPQVSTA

SEQ ID NO: 92659 - protein, 11 aa, Homo sapiens
  misc_feature: Table A; Target 92659; HLA-A*03:02; TUBA3C; ENSG00000198033; TAA
AIYPAPQVSTA

SEQ ID NO: 92660 - protein, 11 aa, Homo sapiens
  misc_feature: Table A; Target 92660; HLA-A*26:01; TUBA3C; ENSG00000198033; TAA
AIYPAPQVSTA

SEQ ID NO: 92661 - protein, 11 aa, Homo sapiens
  misc_feature: Table A; Target 92661; HLA-B*13:02; TUBA3C; ENSG00000198033; TAA
AIYPAPQVSTA

SEQ ID NO: 92662 - protein, 11 aa, Homo sapiens
  misc_feature: Table A; Target 92662; HLA-B*15:01; TUBA3C; ENSG00000198033; TAA
AIYPAPQVSTA

SEQ ID NO: 92663 - protein, 11 aa, Homo sapiens
  misc_feature: Table A; Target 92663; HLA-B*46:01; TUBA3C; ENSG00000198033; TAA
AIYPAPQVSTA

SEQ ID NO: 92664 - protein, 11 aa, Homo sapiens
  misc_feature: Table A; Target 92664; HLA-B*55:01; TUBA3C; ENSG00000198033; TAA
AIYPAPQVSTA

SEQ ID NO: 92665 - protein, 11 aa, Homo sapiens
  misc_feature: Table A; Target 92665; HLA-B*56:01; TUBA3C; ENSG00000198033; TAA
AIYPAPQVSTA

SEQ ID NO: 92666 - protein, 11 aa, Homo sapiens
  misc_feature: Table A; Target 92666; HLA-B*58:01; TUBA3C; ENSG00000198033; TAA
AIYPAPQVSTA

SEQ ID NO: 92667 - protein, 11 aa, Homo sapiens
  misc_feature: Table A; Target 92667; HLA-C*12:03; TUBA3C; ENSG00000198033; TAA
AIYPAPQVSTA

SEQ ID NO: 92668 - protein, 9 aa, Homo sapiens
  misc_feature: Table A; Target 92668; HLA-B*15:03; TUBA3C; ENSG00000198033; TAA
AKVQRAVCM

SEQ ID NO: 92669 - protein, 9 aa, Homo sapiens
  misc_feature: Table A; Target 92669; HLA-A*02:01; TUBA3C; ENSG00000198033; TAA
ALEKDYEEV

SEQ ID NO: 92670 - protein, 9 aa, Homo sapiens
  misc_feature: Table A; Target 92670; HLA-A*02:07; TUBA3C; ENSG00000198033; TAA
ALEKDYEEV

SEQ ID NO: 92671 - protein, 9 aa, Homo sapiens
  misc_feature: Table A; Target 92671; HLA-B*55:01; TUBA3C; ENSG00000198033; TAA
ALEKDYEEV

SEQ ID NO: 92672 - protein, 9 aa, Homo sapiens
  misc_feature: Table A; Target 92672; HLA-A*02:01; TUBA3C; ENSG00000198033; TAA
ALNVDLTEF

SEQ ID NO: 92673 - protein, 9 aa, Homo sapiens
  misc_feature: Table A; Target 92673; HLA-A*02:03; TUBA3C; ENSG00000198033; TAA
ALNVDLTEF

SEQ ID NO: 92674 - protein, 9 aa, Homo sapiens
  misc_feature: Table A; Target 92674; HLA-A*02:04; TUBA3C; ENSG00000198033; TAA
ALNVDLTEF

SEQ ID NO: 92675 - protein, 9 aa, Homo sapiens
  misc_feature: Table A; Target 92675; HLA-A*02:07; TUBA3C; ENSG00000198033; TAA
ALNVDLTEF

SEQ ID NO: 92676 - protein, 9 aa, Homo sapiens
  misc_feature: Table A; Target 92676; HLA-A*03:01; TUBA3C; ENSG00000198033; TAA
ALNVDLTEF

SEQ ID NO: 92677 - protein, 9 aa, Homo sapiens
  misc_feature: Table A; Target 92677; HLA-A*03:02; TUBA3C; ENSG00000198033; TAA
ALNVDLTEF

SEQ ID NO: 92678 - protein, 9 aa, Homo sapiens
  misc_feature: Table A; Target 92678; HLA-A*23:01; TUBA3C; ENSG00000198033; TAA
ALNVDLTEF

SEQ ID NO: 92679 - protein, 9 aa, Homo sapiens
  misc_feature: Table A; Target 92679; HLA-A*24:02; TUBA3C; ENSG00000198033; TAA
ALNVDLTEF

SEQ ID NO: 92680 - protein, 9 aa, Homo sapiens
  misc_feature: Table A; Target 92680; HLA-A*25:01; TUBA3C; ENSG00000198033; TAA
ALNVDLTEF

SEQ ID NO: 92681 - protein, 9 aa, Homo sapiens
  misc_feature: Table A; Target 92681; HLA-A*26:01; TUBA3C; ENSG00000198033; TAA
ALNVDLTEF

SEQ ID NO: 92682 - protein, 9 aa, Homo sapiens
  misc_feature: Table A; Target 92682; HLA-A*29:02; TUBA3C; ENSG00000198033; TAA
ALNVDLTEF

SEQ ID NO: 92683 - protein, 9 aa, Homo sapiens
  misc_feature: Table A; Target 92683; HLA-A*30:02; TUBA3C; ENSG00000198033; TAA
ALNVDLTEF

SEQ ID NO: 92684 - protein, 9 aa, Homo sapiens
  misc_feature: Table A; Target 92684; HLA-A*31:01; TUBA3C; ENSG00000198033; TAA
ALNVDLTEF

SEQ ID NO: 92685 - protein, 9 aa, Homo sapiens
  misc_feature: Table A; Target 92685; HLA-A*32:01; TUBA3C; ENSG00000198033; TAA
ALNVDLTEF

SEQ ID NO: 92686 - protein, 9 aa, Homo sapiens
  misc_feature: Table A; Target 92686; HLA-B*07:02; TUBA3C; ENSG00000198033; TAA
ALNVDLTEF

SEQ ID NO: 92687 - protein, 9 aa, Homo sapiens
  misc_feature: Table A; Target 92687; HLA-B*13:02; TUBA3C; ENSG00000198033; TAA
ALNVDLTEF

SEQ ID NO: 92688 - protein, 9 aa, Homo sapiens
  misc_feature: Table A; Target 92688; HLA-B*15:01; TUBA3C; ENSG00000198033; TAA
ALNVDLTEF

SEQ ID NO: 92689 - protein, 9 aa, Homo sapiens
  misc_feature: Table A; Target 92689; HLA-B*15:03; TUBA3C; ENSG00000198033; TAA
ALNVDLTEF

SEQ ID NO: 92690 - protein, 9 aa, Homo sapiens
  misc_feature: Table A; Target 92690; HLA-B*27:02; TUBA3C; ENSG00000198033; TAA
ALNVDLTEF

SEQ ID NO: 92691 - protein, 9 aa, Homo sapiens
  misc_feature: Table A; Target 92691; HLA-B*27:05; TUBA3C; ENSG00000198033; TAA
ALNVDLTEF

SEQ ID NO: 92692 - protein, 9 aa, Homo sapiens
  misc_feature: Table A; Target 92692; HLA-B*35:01; TUBA3C; ENSG00000198033; TAA
ALNVDLTEF

SEQ ID NO: 92693 - protein, 9 aa, Homo sapiens
  misc_feature: Table A; Target 92693; HLA-B*37:01; TUBA3C; ENSG00000198033; TAA
ALNVDLTEF

SEQ ID NO: 92694 - protein, 9 aa, Homo sapiens
  misc_feature: Table A; Target 92694; HLA-B*38:01; TUBA3C; ENSG00000198033; TAA
ALNVDLTEF

SEQ ID NO: 92695 - protein, 9 aa, Homo sapiens
  misc_feature: Table A; Target 92695; HLA-B*39:01; TUBA3C; ENSG00000198033; TAA
ALNVDLTEF

SEQ ID NO: 92696 - protein, 9 aa, Homo sapiens
  misc_feature: Table A; Target 92696; HLA-B*40:02; TUBA3C; ENSG00000198033; TAA
ALNVDLTEF

SEQ ID NO: 92697 - protein, 9 aa, Homo sapiens
  misc_feature: Table A; Target 92697; HLA-B*44:02; TUBA3C; ENSG00000198033; TAA
ALNVDLTEF

SEQ ID NO: 92698 - protein, 9 aa, Homo sapiens
  misc_feature: Table A; Target 92698; HLA-B*44:03; TUBA3C; ENSG00000198033; TAA
ALNVDLTEF

SEQ ID NO: 92699 - protein, 9 aa, Homo sapiens
  misc_feature: Table A; Target 92699; HLA-B*46:01; TUBA3C; ENSG00000198033; TAA
ALNVDLTEF

SEQ ID NO: 92700 - protein, 9 aa, Homo sapiens
  misc_feature: Table A; Target 92700; HLA-B*55:01; TUBA3C; ENSG00000198033; TAA
ALNVDLTEF

SEQ ID NO: 92701 - protein, 9 aa, Homo sapiens
  misc_feature: Table A; Target 92701; HLA-B*57:01; TUBA3C; ENSG00000198033; TAA
ALNVDLTEF

SEQ ID NO: 92702 - protein, 9 aa, Homo sapiens
  misc_feature: Table A; Target 92702; HLA-B*58:01; TUBA3C; ENSG00000198033; TAA
ALNVDLTEF

SEQ ID NO: 92703 - protein, 9 aa, Homo sapiens
  misc_feature: Table A; Target 92703; HLA-C*01:02; TUBA3C; ENSG00000198033; TAA
ALNVDLTEF

SEQ ID NO: 92704 - protein, 9 aa, Homo sapiens
  misc_feature: Table A; Target 92704; HLA-C*02:02; TUBA3C; ENSG00000198033; TAA
ALNVDLTEF

SEQ ID NO: 92705 - protein, 9 aa, Homo sapiens
  misc_feature: Table A; Target 92705; HLA-C*03:03; TUBA3C; ENSG00000198033; TAA
ALNVDLTEF

SEQ ID NO: 92706 - protein, 9 aa, Homo sapiens
  misc_feature: Table A; Target 92706; HLA-C*04:01; TUBA3C; ENSG00000198033; TAA
ALNVDLTEF

SEQ ID NO: 92707 - protein, 9 aa, Homo sapiens
  misc_feature: Table A; Target 92707; HLA-C*05:01; TUBA3C; ENSG00000198033; TAA
ALNVDLTEF

SEQ ID NO: 92708 - protein, 9 aa, Homo sapiens
  misc_feature: Table A; Target 92708; HLA-C*07:02; TUBA3C; ENSG00000198033; TAA
ALNVDLTEF

SEQ ID NO: 92709 - protein, 9 aa, Homo sapiens
  misc_feature: Table A; Target 92709; HLA-C*07:04; TUBA3C; ENSG00000198033; TAA
ALNVDLTEF

SEQ ID NO: 92710 - protein, 9 aa, Homo sapiens
  misc_feature: Table A; Target 92710; HLA-C*12:03; TUBA3C; ENSG00000198033; TAA
ALNVDLTEF

SEQ ID NO: 92711 - protein, 9 aa, Homo sapiens
  misc_feature: Table A; Target 92711; HLA-C*14:02; TUBA3C; ENSG00000198033; TAA
ALNVDLTEF

SEQ ID NO: 92712 - protein, 9 aa, Homo sapiens
  misc_feature: Table A; Target 92712; HLA-C*16:01; TUBA3C; ENSG00000198033; TAA
ALNVDLTEF

SEQ ID NO: 92713 - protein, 9 aa, Homo sapiens
  misc_feature: Table A; Target 92713; HLA-C*16:04; TUBA3C; ENSG00000198033; TAA
ALNVDLTEF

SEQ ID NO: 92714 - protein, 9 aa, Homo sapiens
  misc_feature: Table A; Target 92714; HLA-A*29:02; TUBA3C; ENSG00000198033; TAA
ANNYARGHY

SEQ ID NO: 92715 - protein, 9 aa, Homo sapiens
  misc_feature: Table A; Target 92715; HLA-A*30:02; TUBA3C; ENSG00000198033; TAA
ANNYARGHY

SEQ ID NO: 92716 - protein, 9 aa, Homo sapiens
  misc_feature: Table A; Target 92716; HLA-A*32:01; TUBA3C; ENSG00000198033; TAA
ANNYARGHY

SEQ ID NO: 92717 - protein, 9 aa, Homo sapiens
  misc_feature: Table A; Target 92717; HLA-C*04:01; TUBA3C; ENSG00000198033; TAA
ANNYARGHY

SEQ ID NO: 92718 - protein, 9 aa, Homo sapiens
  misc_feature: Table A; Target 92718; HLA-C*16:01; TUBA3C; ENSG00000198033; TAA
ANNYARGHY

SEQ ID NO: 92719 - protein, 8 aa, Homo sapiens
  misc_feature: Table A; Target 92719; HLA-B*07:02; TUBA3C; ENSG00000198033; TAA
APQVSTAV

SEQ ID NO: 92720 - protein, 8 aa, Homo sapiens
  misc_feature: Table A; Target 92720; HLA-B*56:01; TUBA3C; ENSG00000198033; TAA
APQVSTAV

SEQ ID NO: 92721 - protein, 8 aa, Homo sapiens
  misc_feature: Table A; Target 92721; HLA-C*07:02; TUBA3C; ENSG00000198033; TAA
APQVSTAV

SEQ ID NO: 92722 - protein, 9 aa, Homo sapiens
  misc_feature: Table A; Target 92722; HLA-B*07:02; TUBA3C; ENSG00000198033; TAA
APQVSTAVV

SEQ ID NO: 92723 - protein, 9 aa, Homo sapiens
  misc_feature: Table A; Target 92723; HLA-B*35:01; TUBA3C; ENSG00000198033; TAA
APQVSTAVV

SEQ ID NO: 92724 - protein, 9 aa, Homo sapiens
  misc_feature: Table A; Target 92724; HLA-B*35:03; TUBA3C; ENSG00000198033; TAA
APQVSTAVV

SEQ ID NO: 92725 - protein, 9 aa, Homo sapiens
  misc_feature: Table A; Target 92725; HLA-B*49:01; TUBA3C; ENSG00000198033; TAA
APQVSTAVV

SEQ ID NO: 92726 - protein, 9 aa, Homo sapiens
  misc_feature: Table A; Target 92726; HLA-B*51:01; TUBA3C; ENSG00000198033; TAA
APQVSTAVV

SEQ ID NO: 92727 - protein, 9 aa, Homo sapiens
  misc_feature: Table A; Target 92727; HLA-B*54:01; TUBA3C; ENSG00000198033; TAA
APQVSTAVV

SEQ ID NO: 92728 - protein, 9 aa, Homo sapiens
  misc_feature: Table A; Target 92728; HLA-B*55:01; TUBA3C; ENSG00000198033; TAA
APQVSTAVV

SEQ ID NO: 92729 - protein, 9 aa, Homo sapiens
  misc_feature: Table A; Target 92729; HLA-B*56:01; TUBA3C; ENSG00000198033; TAA
APQVSTAVV

SEQ ID NO: 92730 - protein, 9 aa, Homo sapiens
  misc_feature: Table A; Target 92730; HLA-C*01:02; TUBA3C; ENSG00000198033; TAA
APQVSTAVV

SEQ ID NO: 92731 - protein, 9 aa, Homo sapiens
  misc_feature: Table A; Target 92731; HLA-C*04:01; TUBA3C; ENSG00000198033; TAA
APQVSTAVV

SEQ ID NO: 92732 - protein, 9 aa, Homo sapiens
  misc_feature: Table A; Target 92732; HLA-C*07:02; TUBA3C; ENSG00000198033; TAA
APQVSTAVV

SEQ ID NO: 92733 - protein, 9 aa, Homo sapiens
  misc_feature: Table A; Target 92733; HLA-C*14:02; TUBA3C; ENSG00000198033; TAA
APQVSTAVV

SEQ ID NO: 92734 - protein, 11 aa, Homo sapiens
  misc_feature: Table A; Target 92734; HLA-B*56:01; TUBA3C; ENSG00000198033; TAA
APQVSTAVVEP

SEQ ID NO: 92735 - protein, 8 aa, Homo sapiens
  misc_feature: Table A; Target 92735; HLA-B*07:02; TUBA3C; ENSG00000198033; TAA
APVISAEK

SEQ ID NO: 92736 - protein, 8 aa, Homo sapiens
  misc_feature: Table A; Target 92736; HLA-B*27:02; TUBA3C; ENSG00000198033; TAA
APVISAEK

SEQ ID NO: 92737 - protein, 8 aa, Homo sapiens
  misc_feature: Table A; Target 92737; HLA-B*35:01; TUBA3C; ENSG00000198033; TAA
APVISAEK

SEQ ID NO: 92738 - protein, 8 aa, Homo sapiens
  misc_feature: Table A; Target 92738; HLA-B*51:01; TUBA3C; ENSG00000198033; TAA
APVISAEK

SEQ ID NO: 92739 - protein, 8 aa, Homo sapiens
  misc_feature: Table A; Target 92739; HLA-B*55:01; TUBA3C; ENSG00000198033; TAA
APVISAEK

SEQ ID NO: 92740 - protein, 8 aa, Homo sapiens
  misc_feature: Table A; Target 92740; HLA-B*56:01; TUBA3C; ENSG00000198033; TAA
APVISAEK

SEQ ID NO: 92741 - protein, 8 aa, Homo sapiens
  misc_feature: Table A; Target 92741; HLA-C*07:01; TUBA3C; ENSG00000198033; TAA
APVISAEK

SEQ ID NO: 92742 - protein, 8 aa, Homo sapiens
  misc_feature: Table A; Target 92742; HLA-C*07:02; TUBA3C; ENSG00000198033; TAA
APVISAEK

SEQ ID NO: 92743 - protein, 9 aa, Homo sapiens
  misc_feature: Table A; Target 92743; HLA-B*07:02; TUBA3C; ENSG00000198033; TAA
APVISAEKA

SEQ ID NO: 92744 - protein, 9 aa, Homo sapiens
  misc_feature: Table A; Target 92744; HLA-B*35:03; TUBA3C; ENSG00000198033; TAA
APVISAEKA

SEQ ID NO: 92745 - protein, 9 aa, Homo sapiens
  misc_feature: Table A; Target 92745; HLA-B*54:01; TUBA3C; ENSG00000198033; TAA
APVISAEKA

SEQ ID NO: 92746 - protein, 9 aa, Homo sapiens
  misc_feature: Table A; Target 92746; HLA-B*55:01; TUBA3C; ENSG00000198033; TAA
APVISAEKA

SEQ ID NO: 92747 - protein, 9 aa, Homo sapiens
  misc_feature: Table A; Target 92747; HLA-B*56:01; TUBA3C; ENSG00000198033; TAA
APVISAEKA

SEQ ID NO: 92748 - protein, 9 aa, Homo sapiens
  misc_feature: Table A; Target 92748; HLA-C*06:02; TUBA3C; ENSG00000198033; TAA
APVISAEKA

SEQ ID NO: 92749 - protein, 9 aa, Homo sapiens
  misc_feature: Table A; Target 92749; HLA-C*07:02; TUBA3C; ENSG00000198033; TAA
APVISAEKA

SEQ ID NO: 92750 - protein, 10 aa, Homo sapiens
  misc_feature: Table A; Target 92750; HLA-A*30:02; TUBA3C; ENSG00000198033; TAA
APVISAEKAY

SEQ ID NO: 92751 - protein, 10 aa, Homo sapiens
  misc_feature: Table A; Target 92751; HLA-B*07:02; TUBA3C; ENSG00000198033; TAA
APVISAEKAY

SEQ ID NO: 92752 - protein, 10 aa, Homo sapiens
  misc_feature: Table A; Target 92752; HLA-B*15:01; TUBA3C; ENSG00000198033; TAA
APVISAEKAY

SEQ ID NO: 92753 - protein, 10 aa, Homo sapiens
  misc_feature: Table A; Target 92753; HLA-B*15:03; TUBA3C; ENSG00000198033; TAA
APVISAEKAY

SEQ ID NO: 92754 - protein, 10 aa, Homo sapiens
  misc_feature: Table A; Target 92754; HLA-B*35:01; TUBA3C; ENSG00000198033; TAA
APVISAEKAY

SEQ ID NO: 92755 - protein, 10 aa, Homo sapiens
  misc_feature: Table A; Target 92755; HLA-B*44:02; TUBA3C; ENSG00000198033; TAA
APVISAEKAY

SEQ ID NO: 92756 - protein, 10 aa, Homo sapiens
  misc_feature: Table A; Target 92756; HLA-B*44:03; TUBA3C; ENSG00000198033; TAA
APVISAEKAY

SEQ ID NO: 92757 - protein, 10 aa, Homo sapiens
  misc_feature: Table A; Target 92757; HLA-B*55:01; TUBA3C; ENSG00000198033; TAA
APVISAEKAY

SEQ ID NO: 92758 - protein, 10 aa, Homo sapiens
  misc_feature: Table A; Target 92758; HLA-B*56:01; TUBA3C; ENSG00000198033; TAA
APVISAEKAY

SEQ ID NO: 92759 - protein, 10 aa, Homo sapiens
  misc_feature: Table A; Target 92759; HLA-C*01:02; TUBA3C; ENSG00000198033; TAA
APVISAEKAY

SEQ ID NO: 92760 - protein, 10 aa, Homo sapiens
  misc_feature: Table A; Target 92760; HLA-C*03:03; TUBA3C; ENSG00000198033; TAA
APVISAEKAY

SEQ ID NO: 92761 - protein, 10 aa, Homo sapiens
  misc_feature: Table A; Target 92761; HLA-C*04:01; TUBA3C; ENSG00000198033; TAA
APVISAEKAY

SEQ ID NO: 92762 - protein, 10 aa, Homo sapiens
  misc_feature: Table A; Target 92762; HLA-C*07:01; TUBA3C; ENSG00000198033; TAA
APVISAEKAY

SEQ ID NO: 92763 - protein, 10 aa, Homo sapiens
  misc_feature: Table A; Target 92763; HLA-C*07:02; TUBA3C; ENSG00000198033; TAA
APVISAEKAY

SEQ ID NO: 92764 - protein, 10 aa, Homo sapiens
  misc_feature: Table A; Target 92764; HLA-C*16:01; TUBA3C; ENSG00000198033; TAA
APVISAEKAY

SEQ ID NO: 92765 - protein, 10 aa, Homo sapiens
  misc_feature: Table A; Target 92765; HLA-C*16:02; TUBA3C; ENSG00000198033; TAA
APVISAEKAY

SEQ ID NO: 92766 - protein, 10 aa, Homo sapiens
  misc_feature: Table A; Target 92766; HLA-B*27:02; TUBA3C; ENSG00000198033; TAA
AREDLAALEK

SEQ ID NO: 92767 - protein, 10 aa, Homo sapiens
  misc_feature: Table A; Target 92767; HLA-B*27:05; TUBA3C; ENSG00000198033; TAA
AREDLAALEK

SEQ ID NO: 92768 - protein, 9 aa, Homo sapiens
  misc_feature: Table A; Target 92768; HLA-A*03:02; TUBA3C; ENSG00000198033; TAA
ARGHYTIGK

SEQ ID NO: 92769 - protein, 9 aa, Homo sapiens
  misc_feature: Table A; Target 92769; HLA-A*11:01; TUBA3C; ENSG00000198033; TAA
ARGHYTIGK

SEQ ID NO: 92770 - protein, 9 aa, Homo sapiens
  misc_feature: Table A; Target 92770; HLA-B*27:02; TUBA3C; ENSG00000198033; TAA
ARGHYTIGK

SEQ ID NO: 92771 - protein, 9 aa, Homo sapiens
  misc_feature: Table A; Target 92771; HLA-B*27:05; TUBA3C; ENSG00000198033; TAA
ARGHYTIGK

SEQ ID NO: 92772 - protein, 9 aa, Homo sapiens
  misc_feature: Table A; Target 92772; HLA-C*06:02; TUBA3C; ENSG00000198033; TAA
ARGHYTIGK

SEQ ID NO: 92773 - protein, 9 aa, Homo sapiens
  misc_feature: Table A; Target 92773; HLA-C*07:01; TUBA3C; ENSG00000198033; TAA
ARGHYTIGK

SEQ ID NO: 92774 - protein, 9 aa, Homo sapiens
  misc_feature: Table A; Target 92774; HLA-C*07:02; TUBA3C; ENSG00000198033; TAA
ARGHYTIGK

SEQ ID NO: 92775 - protein, 9 aa, Homo sapiens
  misc_feature: Table A; Target 92775; HLA-B*27:05; TUBA3C; ENSG00000198033; TAA
ARLDHKFDL

SEQ ID NO: 92776 - protein, 9 aa, Homo sapiens
  misc_feature: Table A; Target 92776; HLA-C*06:02; TUBA3C; ENSG00000198033; TAA
ARLDHKFDL

SEQ ID NO: 92777 - protein, 8 aa, Homo sapiens
  misc_feature: Table A; Target 92777; HLA-B*40:02; TUBA3C; ENSG00000198033; TAA
ASLLMERL

SEQ ID NO: 92778 - protein, 8 aa, Homo sapiens
  misc_feature: Table A; Target 92778; HLA-B*58:01; TUBA3C; ENSG00000198033; TAA
ASLLMERL

SEQ ID NO: 92779 - protein, 8 aa, Homo sapiens
  misc_feature: Table A; Target 92779; HLA-C*06:02; TUBA3C; ENSG00000198033; TAA
ASLLMERL

SEQ ID NO: 92780 - protein, 8 aa, Homo sapiens
  misc_feature: Table A; Target 92780; HLA-C*07:01; TUBA3C; ENSG00000198033; TAA
ASLLMERL

SEQ ID NO: 92781 - protein, 9 aa, Homo sapiens
  misc_feature: Table A; Target 92781; HLA-B*40:02; TUBA3C; ENSG00000198033; TAA
ASLRFDGAL

SEQ ID NO: 92782 - protein, 9 aa, Homo sapiens
  misc_feature: Table A; Target 92782; HLA-A*32:01; TUBA3C; ENSG00000198033; TAA
ATIKTKRTI

SEQ ID NO: 92783 - protein, 9 aa, Homo sapiens
  misc_feature: Table A; Target 92783; HLA-B*57:01; TUBA3C; ENSG00000198033; TAA
ATIKTKRTI

SEQ ID NO: 92784 - protein, 9 aa, Homo sapiens
  misc_feature: Table A; Target 92784; HLA-B*58:01; TUBA3C; ENSG00000198033; TAA
ATIKTKRTI

SEQ ID NO: 92785 - protein, 11 aa, Homo sapiens
  misc_feature: Table A; Target 92785; HLA-B*57:01; TUBA3C; ENSG00000198033; TAA
ATIKTKRTIQF

SEQ ID NO: 92786 - protein, 9 aa, Homo sapiens
  misc_feature: Table A; Target 92786; HLA-A*02:01; TUBA3C; ENSG00000198033; TAA
ATYAPVISA

SEQ ID NO: 92787 - protein, 9 aa, Homo sapiens
  misc_feature: Table A; Target 92787; HLA-A*02:03; TUBA3C; ENSG00000198033; TAA
ATYAPVISA

SEQ ID NO: 92788 - protein, 9 aa, Homo sapiens
  misc_feature: Table A; Target 92788; HLA-A*02:07; TUBA3C; ENSG00000198033; TAA
ATYAPVISA

SEQ ID NO: 92789 - protein, 9 aa, Homo sapiens
  misc_feature: Table A; Target 92789; HLA-A*03:01; TUBA3C; ENSG00000198033; TAA
ATYAPVISA

SEQ ID NO: 92790 - protein, 9 aa, Homo sapiens
  misc_feature: Table A; Target 92790; HLA-A*03:02; TUBA3C; ENSG00000198033; TAA
ATYAPVISA

SEQ ID NO: 92791 - protein, 9 aa, Homo sapiens
  misc_feature: Table A; Target 92791; HLA-A*11:01; TUBA3C; ENSG00000198033; TAA
ATYAPVISA

SEQ ID NO: 92792 - protein, 9 aa, Homo sapiens
  misc_feature: Table A; Target 92792; HLA-A*25:01; TUBA3C; ENSG00000198033; TAA
ATYAPVISA

SEQ ID NO: 92793 - protein, 9 aa, Homo sapiens
  misc_feature: Table A; Target 92793; HLA-A*30:01; TUBA3C; ENSG00000198033; TAA
ATYAPVISA

SEQ ID NO: 92794 - protein, 9 aa, Homo sapiens
  misc_feature: Table A; Target 92794; HLA-A*31:01; TUBA3C; ENSG00000198033; TAA
ATYAPVISA

SEQ ID NO: 92795 - protein, 9 aa, Homo sapiens
  misc_feature: Table A; Target 92795; HLA-A*32:01; TUBA3C; ENSG00000198033; TAA
ATYAPVISA

SEQ ID NO: 92796 - protein, 9 aa, Homo sapiens
  misc_feature: Table A; Target 92796; HLA-A*68:02; TUBA3C; ENSG00000198033; TAA
ATYAPVISA

SEQ ID NO: 92797 - protein, 9 aa, Homo sapiens
  misc_feature: Table A; Target 92797; HLA-B*13:02; TUBA3C; ENSG00000198033; TAA
ATYAPVISA

SEQ ID NO: 92798 - protein, 9 aa, Homo sapiens
  misc_feature: Table A; Target 92798; HLA-B*15:01; TUBA3C; ENSG00000198033; TAA
ATYAPVISA

SEQ ID NO: 92799 - protein, 9 aa, Homo sapiens
  misc_feature: Table A; Target 92799; HLA-B*27:05; TUBA3C; ENSG00000198033; TAA
ATYAPVISA

SEQ ID NO: 92800 - protein, 9 aa, Homo sapiens
  misc_feature: Table A; Target 92800; HLA-B*40:02; TUBA3C; ENSG00000198033; TAA
ATYAPVISA

SEQ ID NO: 92801 - protein, 9 aa, Homo sapiens
  misc_feature: Table A; Target 92801; HLA-B*46:01; TUBA3C; ENSG00000198033; TAA
ATYAPVISA

SEQ ID NO: 92802 - protein, 9 aa, Homo sapiens
  misc_feature: Table A; Target 92802; HLA-B*54:01; TUBA3C; ENSG00000198033; TAA
ATYAPVISA

SEQ ID NO: 92803 - protein, 9 aa, Homo sapiens
  misc_feature: Table A; Target 92803; HLA-B*55:01; TUBA3C; ENSG00000198033; TAA
ATYAPVISA

SEQ ID NO: 92804 - protein, 9 aa, Homo sapiens
  misc_feature: Table A; Target 92804; HLA-B*56:01; TUBA3C; ENSG00000198033; TAA
ATYAPVISA

SEQ ID NO: 92805 - protein, 9 aa, Homo sapiens
  misc_feature: Table A; Target 92805; HLA-B*58:01; TUBA3C; ENSG00000198033; TAA
ATYAPVISA

SEQ ID NO: 92806 - protein, 9 aa, Homo sapiens
  misc_feature: Table A; Target 92806; HLA-C*02:02; TUBA3C; ENSG00000198033; TAA
ATYAPVISA

SEQ ID NO: 92807 - protein, 9 aa, Homo sapiens
  misc_feature: Table A; Target 92807; HLA-C*03:03; TUBA3C; ENSG00000198033; TAA
ATYAPVISA

SEQ ID NO: 92808 - protein, 9 aa, Homo sapiens
  misc_feature: Table A; Target 92808; HLA-C*03:04; TUBA3C; ENSG00000198033; TAA
ATYAPVISA

SEQ ID NO: 92809 - protein, 9 aa, Homo sapiens
  misc_feature: Table A; Target 92809; HLA-C*06:02; TUBA3C; ENSG00000198033; TAA
ATYAPVISA

SEQ ID NO: 92810 - protein, 9 aa, Homo sapiens
  misc_feature: Table A; Target 92810; HLA-C*12:03; TUBA3C; ENSG00000198033; TAA
ATYAPVISA

SEQ ID NO: 92811 - protein, 9 aa, Homo sapiens
  misc_feature: Table A; Target 92811; HLA-C*16:04; TUBA3C; ENSG00000198033; TAA
ATYAPVISA

SEQ ID NO: 92812 - protein, 10 aa, Homo sapiens
  misc_feature: Table A; Target 92812; HLA-A*03:01; TUBA3C; ENSG00000198033; TAA
ATYAPVISAE

SEQ ID NO: 92813 - protein, 10 aa, Homo sapiens
  misc_feature: Table A; Target 92813; HLA-C*06:02; TUBA3C; ENSG00000198033; TAA
ATYAPVISAE

SEQ ID NO: 92814 - protein, 11 aa, Homo sapiens
  misc_feature: Table A; Target 92814; HLA-A*01:01; TUBA3C; ENSG00000198033; TAA
ATYAPVISAEK

SEQ ID NO: 92815 - protein, 11 aa, Homo sapiens
  misc_feature: Table A; Target 92815; HLA-A*02:03; TUBA3C; ENSG00000198033; TAA
ATYAPVISAEK

SEQ ID NO: 92816 - protein, 11 aa, Homo sapiens
  misc_feature: Table A; Target 92816; HLA-A*03:01; TUBA3C; ENSG00000198033; TAA
ATYAPVISAEK

SEQ ID NO: 92817 - protein, 11 aa, Homo sapiens
  misc_feature: Table A; Target 92817; HLA-A*03:02; TUBA3C; ENSG00000198033; TAA
ATYAPVISAEK

SEQ ID NO: 92818 - protein, 11 aa, Homo sapiens
  misc_feature: Table A; Target 92818; HLA-A*11:01; TUBA3C; ENSG00000198033; TAA
ATYAPVISAEK

SEQ ID NO: 92819 - protein, 11 aa, Homo sapiens
  misc_feature: Table A; Target 92819; HLA-A*29:02; TUBA3C; ENSG00000198033; TAA
ATYAPVISAEK

SEQ ID NO: 92820 - protein, 11 aa, Homo sapiens
  misc_feature: Table A; Target 92820; HLA-A*30:02; TUBA3C; ENSG00000198033; TAA
ATYAPVISAEK

SEQ ID NO: 92821 - protein, 11 aa, Homo sapiens
  misc_feature: Table A; Target 92821; HLA-A*31:01; TUBA3C; ENSG00000198033; TAA
ATYAPVISAEK

SEQ ID NO: 92822 - protein, 11 aa, Homo sapiens
  misc_feature: Table A; Target 92822; HLA-A*33:03; TUBA3C; ENSG00000198033; TAA
ATYAPVISAEK

SEQ ID NO: 92823 - protein, 11 aa, Homo sapiens
  misc_feature: Table A; Target 92823; HLA-A*68:01; TUBA3C; ENSG00000198033; TAA
ATYAPVISAEK

SEQ ID NO: 92824 - protein, 11 aa, Homo sapiens
  misc_feature: Table A; Target 92824; HLA-A*68:02; TUBA3C; ENSG00000198033; TAA
ATYAPVISAEK

SEQ ID NO: 92825 - protein, 11 aa, Homo sapiens
  misc_feature: Table A; Target 92825; HLA-B*27:02; TUBA3C; ENSG00000198033; TAA
ATYAPVISAEK

SEQ ID NO: 92826 - protein, 11 aa, Homo sapiens
  misc_feature: Table A; Target 92826; HLA-B*27:05; TUBA3C; ENSG00000198033; TAA
ATYAPVISAEK

SEQ ID NO: 92827 - protein, 11 aa, Homo sapiens
  misc_feature: Table A; Target 92827; HLA-B*57:01; TUBA3C; ENSG00000198033; TAA
ATYAPVISAEK

SEQ ID NO: 92828 - protein, 11 aa, Homo sapiens
  misc_feature: Table A; Target 92828; HLA-C*06:02; TUBA3C; ENSG00000198033; TAA
ATYAPVISAEK

SEQ ID NO: 92829 - protein, 11 aa, Homo sapiens
  misc_feature: Table A; Target 92829; HLA-C*07:06; TUBA3C; ENSG00000198033; TAA
ATYAPVISAEK

SEQ ID NO: 92830 - protein, 11 aa, Homo sapiens
  misc_feature: Table A; Target 92830; HLA-C*16:04; TUBA3C; ENSG00000198033; TAA
ATYAPVISAEK

SEQ ID NO: 92831 - protein, 9 aa, Homo sapiens
  misc_feature: Table A; Target 92831; HLA-C*07:01; TUBA3C; ENSG00000198033; TAA
AVCMLSNTT

SEQ ID NO: 92832 - protein, 10 aa, Homo sapiens
  misc_feature: Table A; Target 92832; HLA-A*02:01; TUBA3C; ENSG00000198033; TAA
AVFVDLEPTV

SEQ ID NO: 92833 - protein, 10 aa, Homo sapiens
  misc_feature: Table A; Target 92833; HLA-A*02:03; TUBA3C; ENSG00000198033; TAA
AVFVDLEPTV

SEQ ID NO: 92834 - protein, 10 aa, Homo sapiens
  misc_feature: Table A; Target 92834; HLA-A*02:04; TUBA3C; ENSG00000198033; TAA
AVFVDLEPTV

SEQ ID NO: 92835 - protein, 10 aa, Homo sapiens
  misc_feature: Table A; Target 92835; HLA-A*02:07; TUBA3C; ENSG00000198033; TAA
AVFVDLEPTV

SEQ ID NO: 92836 - protein, 10 aa, Homo sapiens
  misc_feature: Table A; Target 92836; HLA-B*13:02; TUBA3C; ENSG00000198033; TAA
AVFVDLEPTV

SEQ ID NO: 92837 - protein, 10 aa, Homo sapiens
  misc_feature: Table A; Target 92837; HLA-C*06:02; TUBA3C; ENSG00000198033; TAA
AVFVDLEPTV

SEQ ID NO: 92838 - protein, 11 aa, Homo sapiens
  misc_feature: Table A; Target 92838; HLA-A*02:01; TUBA3C; ENSG00000198033; TAA
AVFVDLEPTVV

SEQ ID NO: 92839 - protein, 11 aa, Homo sapiens
  misc_feature: Table A; Target 92839; HLA-A*02:03; TUBA3C; ENSG00000198033; TAA
AVFVDLEPTVV

SEQ ID NO: 92840 - protein, 11 aa, Homo sapiens
  misc_feature: Table A; Target 92840; HLA-A*68:02; TUBA3C; ENSG00000198033; TAA
AVFVDLEPTVV

SEQ ID NO: 92841 - protein, 11 aa, Homo sapiens
  misc_feature: Table A; Target 92841; HLA-B*13:02; TUBA3C; ENSG00000198033; TAA
AVFVDLEPTVV

SEQ ID NO: 92842 - protein, 11 aa, Homo sapiens
  misc_feature: Table A; Target 92842; HLA-B*55:01; TUBA3C; ENSG00000198033; TAA
AVFVDLEPTVV

SEQ ID NO: 92843 - protein, 9 aa, Homo sapiens
  misc_feature: Table A; Target 92843; HLA-A*02:01; TUBA3C; ENSG00000198033; TAA
AVVEPYNSI

SEQ ID NO: 92844 - protein, 9 aa, Homo sapiens
  misc_feature: Table A; Target 92844; HLA-A*02:03; TUBA3C; ENSG00000198033; TAA
AVVEPYNSI

SEQ ID NO: 92845 - protein, 9 aa, Homo sapiens
  misc_feature: Table A; Target 92845; HLA-A*02:07; TUBA3C; ENSG00000198033; TAA
AVVEPYNSI

SEQ ID NO: 92846 - protein, 9 aa, Homo sapiens
  misc_feature: Table A; Target 92846; HLA-A*23:01; TUBA3C; ENSG00000198033; TAA
AVVEPYNSI

SEQ ID NO: 92847 - protein, 9 aa, Homo sapiens
  misc_feature: Table A; Target 92847; HLA-A*24:02; TUBA3C; ENSG00000198033; TAA
AVVEPYNSI

SEQ ID NO: 92848 - protein, 9 aa, Homo sapiens
  misc_feature: Table A; Target 92848; HLA-A*25:01; TUBA3C; ENSG00000198033; TAA
AVVEPYNSI

SEQ ID NO: 92849 - protein, 9 aa, Homo sapiens
  misc_feature: Table A; Target 92849; HLA-A*26:01; TUBA3C; ENSG00000198033; TAA
AVVEPYNSI

SEQ ID NO: 92850 - protein, 9 aa, Homo sapiens
  misc_feature: Table A; Target 92850; HLA-A*30:01; TUBA3C; ENSG00000198033; TAA
AVVEPYNSI

SEQ ID NO: 92851 - protein, 9 aa, Homo sapiens
  misc_feature: Table A; Target 92851; HLA-A*32:01; TUBA3C; ENSG00000198033; TAA
AVVEPYNSI

SEQ ID NO: 92852 - protein, 9 aa, Homo sapiens
  misc_feature: Table A; Target 92852; HLA-A*68:02; TUBA3C; ENSG00000198033; TAA
AVVEPYNSI

SEQ ID NO: 92853 - protein, 9 aa, Homo sapiens
  misc_feature: Table A; Target 92853; HLA-B*07:02; TUBA3C; ENSG00000198033; TAA
AVVEPYNSI

SEQ ID NO: 92854 - protein, 9 aa, Homo sapiens
  misc_feature: Table A; Target 92854; HLA-B*13:02; TUBA3C; ENSG00000198033; TAA
AVVEPYNSI

SEQ ID NO: 92855 - protein, 9 aa, Homo sapiens
  misc_feature: Table A; Target 92855; HLA-B*15:01; TUBA3C; ENSG00000198033; TAA
AVVEPYNSI

SEQ ID NO: 92856 - protein, 9 aa, Homo sapiens
  misc_feature: Table A; Target 92856; HLA-B*15:03; TUBA3C; ENSG00000198033; TAA
AVVEPYNSI

SEQ ID NO: 92857 - protein, 9 aa, Homo sapiens
  misc_feature: Table A; Target 92857; HLA-B*27:05; TUBA3C; ENSG00000198033; TAA
AVVEPYNSI

SEQ ID NO: 92858 - protein, 9 aa, Homo sapiens
  misc_feature: Table A; Target 92858; HLA-B*35:03; TUBA3C; ENSG00000198033; TAA
AVVEPYNSI

SEQ ID NO: 92859 - protein, 9 aa, Homo sapiens
  misc_feature: Table A; Target 92859; HLA-B*38:01; TUBA3C; ENSG00000198033; TAA
AVVEPYNSI

SEQ ID NO: 92860 - protein, 9 aa, Homo sapiens
  misc_feature: Table A; Target 92860; HLA-B*39:01; TUBA3C; ENSG00000198033; TAA
AVVEPYNSI

SEQ ID NO: 92861 - protein, 9 aa, Homo sapiens
  misc_feature: Table A; Target 92861; HLA-B*40:02; TUBA3C; ENSG00000198033; TAA
AVVEPYNSI

SEQ ID NO: 92862 - protein, 9 aa, Homo sapiens
  misc_feature: Table A; Target 92862; HLA-B*44:03; TUBA3C; ENSG00000198033; TAA
AVVEPYNSI

SEQ ID NO: 92863 - protein, 9 aa, Homo sapiens
  misc_feature: Table A; Target 92863; HLA-B*46:01; TUBA3C; ENSG00000198033; TAA
AVVEPYNSI

SEQ ID NO: 92864 - protein, 9 aa, Homo sapiens
  misc_feature: Table A; Target 92864; HLA-B*49:01; TUBA3C; ENSG00000198033; TAA
AVVEPYNSI

SEQ ID NO: 92865 - protein, 9 aa, Homo sapiens
  misc_feature: Table A; Target 92865; HLA-B*51:01; TUBA3C; ENSG00000198033; TAA
AVVEPYNSI

SEQ ID NO: 92866 - protein, 9 aa, Homo sapiens
  misc_feature: Table A; Target 92866; HLA-B*54:01; TUBA3C; ENSG00000198033; TAA
AVVEPYNSI

SEQ ID NO: 92867 - protein, 9 aa, Homo sapiens
  misc_feature: Table A; Target 92867; HLA-B*55:01; TUBA3C; ENSG00000198033; TAA
AVVEPYNSI

SEQ ID NO: 92868 - protein, 9 aa, Homo sapiens
  misc_feature: Table A; Target 92868; HLA-B*56:01; TUBA3C; ENSG00000198033; TAA
AVVEPYNSI

SEQ ID NO: 92869 - protein, 9 aa, Homo sapiens
  misc_feature: Table A; Target 92869; HLA-B*57:01; TUBA3C; ENSG00000198033; TAA
AVVEPYNSI

SEQ ID NO: 92870 - protein, 9 aa, Homo sapiens
  misc_feature: Table A; Target 92870; HLA-B*58:01; TUBA3C; ENSG00000198033; TAA
AVVEPYNSI

SEQ ID NO: 92871 - protein, 9 aa, Homo sapiens
  misc_feature: Table A; Target 92871; HLA-C*01:02; TUBA3C; ENSG00000198033; TAA
AVVEPYNSI

SEQ ID NO: 92872 - protein, 9 aa, Homo sapiens
  misc_feature: Table A; Target 92872; HLA-C*02:02; TUBA3C; ENSG00000198033; TAA
AVVEPYNSI

SEQ ID NO: 92873 - protein, 9 aa, Homo sapiens
  misc_feature: Table A; Target 92873; HLA-C*03:03; TUBA3C; ENSG00000198033; TAA
AVVEPYNSI

SEQ ID NO: 92874 - protein, 9 aa, Homo sapiens
  misc_feature: Table A; Target 92874; HLA-C*03:04; TUBA3C; ENSG00000198033; TAA
AVVEPYNSI

SEQ ID NO: 92875 - protein, 9 aa, Homo sapiens
  misc_feature: Table A; Target 92875; HLA-C*05:01; TUBA3C; ENSG00000198033; TAA
AVVEPYNSI

SEQ ID NO: 92876 - protein, 9 aa, Homo sapiens
  misc_feature: Table A; Target 92876; HLA-C*06:02; TUBA3C; ENSG00000198033; TAA
AVVEPYNSI

SEQ ID NO: 92877 - protein, 9 aa, Homo sapiens
  misc_feature: Table A; Target 92877; HLA-C*07:02; TUBA3C; ENSG00000198033; TAA
AVVEPYNSI

SEQ ID NO: 92878 - protein, 9 aa, Homo sapiens
  misc_feature: Table A; Target 92878; HLA-C*07:06; TUBA3C; ENSG00000198033; TAA
AVVEPYNSI

SEQ ID NO: 92879 - protein, 9 aa, Homo sapiens
  misc_feature: Table A; Target 92879; HLA-C*12:03; TUBA3C; ENSG00000198033; TAA
AVVEPYNSI

SEQ ID NO: 92880 - protein, 9 aa, Homo sapiens
  misc_feature: Table A; Target 92880; HLA-C*14:02; TUBA3C; ENSG00000198033; TAA
AVVEPYNSI

SEQ ID NO: 92881 - protein, 9 aa, Homo sapiens
  misc_feature: Table A; Target 92881; HLA-C*16:02; TUBA3C; ENSG00000198033; TAA
AVVEPYNSI

SEQ ID NO: 92882 - protein, 9 aa, Homo sapiens
  misc_feature: Table A; Target 92882; HLA-C*16:04; TUBA3C; ENSG00000198033; TAA
AVVEPYNSI

SEQ ID NO: 92883 - protein, 10 aa, Homo sapiens
  misc_feature: Table A; Target 92883; HLA-A*02:07; TUBA3C; ENSG00000198033; TAA
AVVEPYNSIL

SEQ ID NO: 92884 - protein, 10 aa, Homo sapiens
  misc_feature: Table A; Target 92884; HLA-A*25:01; TUBA3C; ENSG00000198033; TAA
AVVEPYNSIL

SEQ ID NO: 92885 - protein, 10 aa, Homo sapiens
  misc_feature: Table A; Target 92885; HLA-A*26:01; TUBA3C; ENSG00000198033; TAA
AVVEPYNSIL

SEQ ID NO: 92886 - protein, 10 aa, Homo sapiens
  misc_feature: Table A; Target 92886; HLA-A*32:01; TUBA3C; ENSG00000198033; TAA
AVVEPYNSIL

SEQ ID NO: 92887 - protein, 10 aa, Homo sapiens
  misc_feature: Table A; Target 92887; HLA-A*68:02; TUBA3C; ENSG00000198033; TAA
AVVEPYNSIL

SEQ ID NO: 92888 - protein, 10 aa, Homo sapiens
  misc_feature: Table A; Target 92888; HLA-B*07:02; TUBA3C; ENSG00000198033; TAA
AVVEPYNSIL

SEQ ID NO: 92889 - protein, 10 aa, Homo sapiens
  misc_feature: Table A; Target 92889; HLA-B*15:01; TUBA3C; ENSG00000198033; TAA
AVVEPYNSIL

SEQ ID NO: 92890 - protein, 10 aa, Homo sapiens
  misc_feature: Table A; Target 92890; HLA-B*27:05; TUBA3C; ENSG00000198033; TAA
AVVEPYNSIL

SEQ ID NO: 92891 - protein, 10 aa, Homo sapiens
  misc_feature: Table A; Target 92891; HLA-B*35:03; TUBA3C; ENSG00000198033; TAA
AVVEPYNSIL

SEQ ID NO: 92892 - protein, 10 aa, Homo sapiens
  misc_feature: Table A; Target 92892; HLA-B*40:01; TUBA3C; ENSG00000198033; TAA
AVVEPYNSIL

SEQ ID NO: 92893 - protein, 10 aa, Homo sapiens
  misc_feature: Table A; Target 92893; HLA-B*40:02; TUBA3C; ENSG00000198033; TAA
AVVEPYNSIL

SEQ ID NO: 92894 - protein, 10 aa, Homo sapiens
  misc_feature: Table A; Target 92894; HLA-B*58:01; TUBA3C; ENSG00000198033; TAA
AVVEPYNSIL

SEQ ID NO: 92895 - protein, 10 aa, Homo sapiens
  misc_feature: Table A; Target 92895; HLA-C*01:02; TUBA3C; ENSG00000198033; TAA
AVVEPYNSIL

SEQ ID NO: 92896 - protein, 10 aa, Homo sapiens
  misc_feature: Table A; Target 92896; HLA-C*02:02; TUBA3C; ENSG00000198033; TAA
AVVEPYNSIL

SEQ ID NO: 92897 - protein, 10 aa, Homo sapiens
  misc_feature: Table A; Target 92897; HLA-C*03:03; TUBA3C; ENSG00000198033; TAA
AVVEPYNSIL

SEQ ID NO: 92898 - protein, 10 aa, Homo sapiens
  misc_feature: Table A; Target 92898; HLA-C*03:04; TUBA3C; ENSG00000198033; TAA
AVVEPYNSIL

SEQ ID NO: 92899 - protein, 10 aa, Homo sapiens
  misc_feature: Table A; Target 92899; HLA-C*05:01; TUBA3C; ENSG00000198033; TAA
AVVEPYNSIL

SEQ ID NO: 92900 - protein, 10 aa, Homo sapiens
  misc_feature: Table A; Target 92900; HLA-C*07:02; TUBA3C; ENSG00000198033; TAA
AVVEPYNSIL

SEQ ID NO: 92901 - protein, 10 aa, Homo sapiens
  misc_feature: Table A; Target 92901; HLA-C*07:04; TUBA3C; ENSG00000198033; TAA
AVVEPYNSIL

SEQ ID NO: 92902 - protein, 10 aa, Homo sapiens
  misc_feature: Table A; Target 92902; HLA-C*12:03; TUBA3C; ENSG00000198033; TAA
AVVEPYNSIL

SEQ ID NO: 92903 - protein, 10 aa, Homo sapiens
  misc_feature: Table A; Target 92903; HLA-C*14:02; TUBA3C; ENSG00000198033; TAA
AVVEPYNSIL

SEQ ID NO: 92904 - protein, 10 aa, Homo sapiens
  misc_feature: Table A; Target 92904; HLA-C*16:02; TUBA3C; ENSG00000198033; TAA
AVVEPYNSIL

SEQ ID NO: 92905 - protein, 9 aa, Homo sapiens
  misc_feature: Table A; Target 92905; HLA-A*24:02; TUBA3C; ENSG00000198033; TAA
AWARLDHKF

SEQ ID NO: 92906 - protein, 8 aa, Homo sapiens
  misc_feature: Table A; Target 92906; HLA-C*01:02; TUBA3C; ENSG00000198033; TAA
AYHEQLSV

SEQ ID NO: 92907 - protein, 8 aa, Homo sapiens
  misc_feature: Table A; Target 92907; HLA-C*06:02; TUBA3C; ENSG00000198033; TAA
AYHEQLSV

SEQ ID NO: 92908 - protein, 8 aa, Homo sapiens
  misc_feature: Table A; Target 92908; HLA-C*07:01; TUBA3C; ENSG00000198033; TAA
AYHEQLSV

SEQ ID NO: 92909 - protein, 8 aa, Homo sapiens
  misc_feature: Table A; Target 92909; HLA-C*14:02; TUBA3C; ENSG00000198033; TAA
AYHEQLSV

SEQ ID NO: 92910 - protein, 9 aa, Homo sapiens
  misc_feature: Table A; Target 92910; HLA-B*40:02; TUBA3C; ENSG00000198033; TAA
AYHEQLSVA

SEQ ID NO: 92911 - protein, 9 aa, Homo sapiens
  misc_feature: Table A; Target 92911; HLA-B*54:01; TUBA3C; ENSG00000198033; TAA
AYHEQLSVA

SEQ ID NO: 92912 - protein, 9 aa, Homo sapiens
  misc_feature: Table A; Target 92912; HLA-B*55:01; TUBA3C; ENSG00000198033; TAA
AYHEQLSVA

SEQ ID NO: 92913 - protein, 9 aa, Homo sapiens
  misc_feature: Table A; Target 92913; HLA-C*01:02; TUBA3C; ENSG00000198033; TAA
AYHEQLSVA

SEQ ID NO: 92914 - protein, 9 aa, Homo sapiens
  misc_feature: Table A; Target 92914; HLA-C*04:01; TUBA3C; ENSG00000198033; TAA
AYHEQLSVA

SEQ ID NO: 92915 - protein, 9 aa, Homo sapiens
  misc_feature: Table A; Target 92915; HLA-C*06:02; TUBA3C; ENSG00000198033; TAA
AYHEQLSVA

SEQ ID NO: 92916 - protein, 9 aa, Homo sapiens
  misc_feature: Table A; Target 92916; HLA-C*07:01; TUBA3C; ENSG00000198033; TAA
AYHEQLSVA

SEQ ID NO: 92917 - protein, 9 aa, Homo sapiens
  misc_feature: Table A; Target 92917; HLA-C*12:03; TUBA3C; ENSG00000198033; TAA
AYHEQLSVA

SEQ ID NO: 92918 - protein, 9 aa, Homo sapiens
  misc_feature: Table A; Target 92918; HLA-C*14:02; TUBA3C; ENSG00000198033; TAA
AYHEQLSVA

SEQ ID NO: 92919 - protein, 9 aa, Homo sapiens
  misc_feature: Table A; Target 92919; HLA-C*16:02; TUBA3C; ENSG00000198033; TAA
AYHEQLSVA

SEQ ID NO: 92920 - protein, 11 aa, Homo sapiens
  misc_feature: Table A; Target 92920; HLA-A*24:02; TUBA3C; ENSG00000198033; TAA
AYHEQLSVAEI

SEQ ID NO: 92921 - protein, 9 aa, Homo sapiens
  misc_feature: Table A; Target 92921; HLA-B*54:01; TUBA3C; ENSG00000198033; TAA
CAFMVDNEA

SEQ ID NO: 92922 - protein, 9 aa, Homo sapiens
  misc_feature: Table A; Target 92922; HLA-B*56:01; TUBA3C; ENSG00000198033; TAA
CAFMVDNEA

SEQ ID NO: 92923 - protein, 10 aa, Homo sapiens
  misc_feature: Table A; Target 92923; HLA-C*07:01; TUBA3C; ENSG00000198033; TAA
CAFMVDNEAI

SEQ ID NO: 92924 - protein, 8 aa, Homo sapiens
  misc_feature: Table A; Target 92924; HLA-C*07:01; TUBA3C; ENSG00000198033; TAA
CDPRHGKY

SEQ ID NO: 92925 - protein, 8 aa, Homo sapiens
  misc_feature: Table A; Target 92925; HLA-C*01:02; TUBA3C; ENSG00000198033; TAA
CFEPANQM

SEQ ID NO: 92926 - protein, 8 aa, Homo sapiens
  misc_feature: Table A; Target 92926; HLA-C*04:01; TUBA3C; ENSG00000198033; TAA
CFEPANQM

SEQ ID NO: 92927 - protein, 8 aa, Homo sapiens
  misc_feature: Table A; Target 92927; HLA-C*07:01; TUBA3C; ENSG00000198033; TAA
CFEPANQM

SEQ ID NO: 92928 - protein, 8 aa, Homo sapiens
  misc_feature: Table A; Target 92928; HLA-C*14:02; TUBA3C; ENSG00000198033; TAA
CFEPANQM

SEQ ID NO: 92929 - protein, 8 aa, Homo sapiens
  misc_feature: Table A; Target 92929; HLA-C*16:02; TUBA3C; ENSG00000198033; TAA
CFEPANQM

SEQ ID NO: 92930 - protein, 9 aa, Homo sapiens
  misc_feature: Table A; Target 92930; HLA-C*04:01; TUBA3C; ENSG00000198033; TAA
CFEPANQMV

SEQ ID NO: 92931 - protein, 10 aa, Homo sapiens
  misc_feature: Table A; Target 92931; HLA-C*07:01; TUBA3C; ENSG00000198033; TAA
CFEPANQMVK

SEQ ID NO: 92932 - protein, 9 aa, Homo sapiens
  misc_feature: Table A; Target 92932; HLA-A*02:03; TUBA3C; ENSG00000198033; TAA
CISIHVGQA

SEQ ID NO: 92933 - protein, 9 aa, Homo sapiens
  misc_feature: Table A; Target 92933; HLA-A*02:01; TUBA3C; ENSG00000198033; TAA
CMLSNTTAI

SEQ ID NO: 92934 - protein, 9 aa, Homo sapiens
  misc_feature: Table A; Target 92934; HLA-A*02:03; TUBA3C; ENSG00000198033; TAA
CMLSNTTAI

SEQ ID NO: 92935 - protein, 9 aa, Homo sapiens
  misc_feature: Table A; Target 92935; HLA-A*02:04; TUBA3C; ENSG00000198033; TAA
CMLSNTTAI

SEQ ID NO: 92936 - protein, 9 aa, Homo sapiens
  misc_feature: Table A; Target 92936; HLA-A*23:01; TUBA3C; ENSG00000198033; TAA
CMLSNTTAI

SEQ ID NO: 92937 - protein, 9 aa, Homo sapiens
  misc_feature: Table A; Target 92937; HLA-A*24:02; TUBA3C; ENSG00000198033; TAA
CMLSNTTAI

SEQ ID NO: 92938 - protein, 9 aa, Homo sapiens
  misc_feature: Table A; Target 92938; HLA-B*13:02; TUBA3C; ENSG00000198033; TAA
CMLSNTTAI

SEQ ID NO: 92939 - protein, 9 aa, Homo sapiens
  misc_feature: Table A; Target 92939; HLA-B*40:02; TUBA3C; ENSG00000198033; TAA
CMLSNTTAI

SEQ ID NO: 92940 - protein, 9 aa, Homo sapiens
  misc_feature: Table A; Target 92940; HLA-B*46:01; TUBA3C; ENSG00000198033; TAA
CMLSNTTAI

SEQ ID NO: 92941 - protein, 9 aa, Homo sapiens
  misc_feature: Table A; Target 92941; HLA-B*49:01; TUBA3C; ENSG00000198033; TAA
CMLSNTTAI

SEQ ID NO: 92942 - protein, 9 aa, Homo sapiens
  misc_feature: Table A; Target 92942; HLA-B*55:01; TUBA3C; ENSG00000198033; TAA
CMLSNTTAI

SEQ ID NO: 92943 - protein, 9 aa, Homo sapiens
  misc_feature: Table A; Target 92943; HLA-C*01:02; TUBA3C; ENSG00000198033; TAA
CMLSNTTAI

SEQ ID NO: 92944 - protein, 9 aa, Homo sapiens
  misc_feature: Table A; Target 92944; HLA-C*04:01; TUBA3C; ENSG00000198033; TAA
CMLSNTTAI

SEQ ID NO: 92945 - protein, 9 aa, Homo sapiens
  misc_feature: Table A; Target 92945; HLA-C*07:01; TUBA3C; ENSG00000198033; TAA
CMLSNTTAI

SEQ ID NO: 92946 - protein, 9 aa, Homo sapiens
  misc_feature: Table A; Target 92946; HLA-C*14:02; TUBA3C; ENSG00000198033; TAA
CMLSNTTAI

SEQ ID NO: 92947 - protein, 9 aa, Homo sapiens
  misc_feature: Table A; Target 92947; HLA-A*68:02; TUBA3C; ENSG00000198033; TAA
CPTGFKVGI

SEQ ID NO: 92948 - protein, 9 aa, Homo sapiens
  misc_feature: Table A; Target 92948; HLA-B*07:02; TUBA3C; ENSG00000198033; TAA
CPTGFKVGI

SEQ ID NO: 92949 - protein, 9 aa, Homo sapiens
  misc_feature: Table A; Target 92949; HLA-B*08:01; TUBA3C; ENSG00000198033; TAA
CPTGFKVGI

SEQ ID NO: 92950 - protein, 9 aa, Homo sapiens
  misc_feature: Table A; Target 92950; HLA-B*13:02; TUBA3C; ENSG00000198033; TAA
CPTGFKVGI

SEQ ID NO: 92951 - protein, 9 aa, Homo sapiens
  misc_feature: Table A; Target 92951; HLA-B*35:03; TUBA3C; ENSG00000198033; TAA
CPTGFKVGI

SEQ ID NO: 92952 - protein, 9 aa, Homo sapiens
  misc_feature: Table A; Target 92952; HLA-B*51:01; TUBA3C; ENSG00000198033; TAA
CPTGFKVGI

SEQ ID NO: 92953 - protein, 9 aa, Homo sapiens
  misc_feature: Table A; Target 92953; HLA-B*54:01; TUBA3C; ENSG00000198033; TAA
CPTGFKVGI

SEQ ID NO: 92954 - protein, 9 aa, Homo sapiens
  misc_feature: Table A; Target 92954; HLA-B*55:01; TUBA3C; ENSG00000198033; TAA
CPTGFKVGI

SEQ ID NO: 92955 - protein, 9 aa, Homo sapiens
  misc_feature: Table A; Target 92955; HLA-B*56:01; TUBA3C; ENSG00000198033; TAA
CPTGFKVGI

SEQ ID NO: 92956 - protein, 9 aa, Homo sapiens
  misc_feature: Table A; Target 92956; HLA-C*04:01; TUBA3C; ENSG00000198033; TAA
CPTGFKVGI

SEQ ID NO: 92957 - protein, 9 aa, Homo sapiens
  misc_feature: Table A; Target 92957; HLA-C*06:02; TUBA3C; ENSG00000198033; TAA
CPTGFKVGI

SEQ ID NO: 92958 - protein, 9 aa, Homo sapiens
  misc_feature: Table A; Target 92958; HLA-C*07:01; TUBA3C; ENSG00000198033; TAA
CPTGFKVGI

SEQ ID NO: 92959 - protein, 9 aa, Homo sapiens
  misc_feature: Table A; Target 92959; HLA-C*07:02; TUBA3C; ENSG00000198033; TAA
CPTGFKVGI

SEQ ID NO: 92960 - protein, 9 aa, Homo sapiens
  misc_feature: Table A; Target 92960; HLA-C*16:02; TUBA3C; ENSG00000198033; TAA
CPTGFKVGI

SEQ ID NO: 92961 - protein, 8 aa, Homo sapiens
  misc_feature: Table A; Target 92961; HLA-A*33:01; TUBA3C; ENSG00000198033; TAA
DAANNYAR

SEQ ID NO: 92962 - protein, 8 aa, Homo sapiens
  misc_feature: Table A; Target 92962; HLA-A*33:03; TUBA3C; ENSG00000198033; TAA
DAANNYAR

SEQ ID NO: 92963 - protein, 8 aa, Homo sapiens
  misc_feature: Table A; Target 92963; HLA-A*68:01; TUBA3C; ENSG00000198033; TAA
DAANNYAR

SEQ ID NO: 92964 - protein, 8 aa, Homo sapiens
  misc_feature: Table A; Target 92964; HLA-B*27:02; TUBA3C; ENSG00000198033; TAA
DAANNYAR

SEQ ID NO: 92965 - protein, 8 aa, Homo sapiens
  misc_feature: Table A; Target 92965; HLA-B*27:05; TUBA3C; ENSG00000198033; TAA
DAANNYAR

SEQ ID NO: 92966 - protein, 8 aa, Homo sapiens
  misc_feature: Table A; Target 92966; HLA-B*35:01; TUBA3C; ENSG00000198033; TAA
DAANNYAR

SEQ ID NO: 92967 - protein, 8 aa, Homo sapiens
  misc_feature: Table A; Target 92967; HLA-C*07:06; TUBA3C; ENSG00000198033; TAA
DAANNYAR

SEQ ID NO: 92968 - protein, 9 aa, Homo sapiens
  misc_feature: Table A; Target 92968; HLA-A*26:01; TUBA3C; ENSG00000198033; TAA
DAANNYARG

SEQ ID NO: 92969 - protein, 9 aa, Homo sapiens
  misc_feature: Table A; Target 92969; HLA-A*33:01; TUBA3C; ENSG00000198033; TAA
DAANNYARG

SEQ ID NO: 92970 - protein, 11 aa, Homo sapiens
  misc_feature: Table A; Target 92970; HLA-A*01:01; TUBA3C; ENSG00000198033; TAA
DAANNYARGHY

SEQ ID NO: 92971 - protein, 11 aa, Homo sapiens
  misc_feature: Table A; Target 92971; HLA-A*26:01; TUBA3C; ENSG00000198033; TAA
DAANNYARGHY

SEQ ID NO: 92972 - protein, 8 aa, Homo sapiens
  misc_feature: Table A; Target 92972; HLA-B*18:01; TUBA3C; ENSG00000198033; TAA
DDSFNTFF

SEQ ID NO: 92973 - protein, 8 aa, Homo sapiens
  misc_feature: Table A; Target 92973; HLA-B*37:01; TUBA3C; ENSG00000198033; TAA
DDSFNTFF

SEQ ID NO: 92974 - protein, 8 aa, Homo sapiens
  misc_feature: Table A; Target 92974; HLA-C*04:01; TUBA3C; ENSG00000198033; TAA
DDSFNTFF

SEQ ID NO: 92975 - protein, 8 aa, Homo sapiens
  misc_feature: Table A; Target 92975; HLA-C*07:01; TUBA3C; ENSG00000198033; TAA
DDSFNTFF

SEQ ID NO: 92976 - protein, 8 aa, Homo sapiens
  misc_feature: Table A; Target 92976; HLA-A*25:01; TUBA3C; ENSG00000198033; TAA
DEVRTGTY

SEQ ID NO: 92977 - protein, 8 aa, Homo sapiens
  misc_feature: Table A; Target 92977; HLA-A*26:01; TUBA3C; ENSG00000198033; TAA
DEVRTGTY

SEQ ID NO: 92978 - protein, 8 aa, Homo sapiens
  misc_feature: Table A; Target 92978; HLA-B*15:03; TUBA3C; ENSG00000198033; TAA
DEVRTGTY

SEQ ID NO: 92979 - protein, 8 aa, Homo sapiens
  misc_feature: Table A; Target 92979; HLA-B*18:01; TUBA3C; ENSG00000198033; TAA
DEVRTGTY

SEQ ID NO: 92980 - protein, 8 aa, Homo sapiens
  misc_feature: Table A; Target 92980; HLA-B*35:01; TUBA3C; ENSG00000198033; TAA
DEVRTGTY

SEQ ID NO: 92981 - protein, 8 aa, Homo sapiens
  misc_feature: Table A; Target 92981; HLA-B*39:01; TUBA3C; ENSG00000198033; TAA
DEVRTGTY

SEQ ID NO: 92982 - protein, 8 aa, Homo sapiens
  misc_feature: Table A; Target 92982; HLA-B*40:02; TUBA3C; ENSG00000198033; TAA
DEVRTGTY

SEQ ID NO: 92983 - protein, 8 aa, Homo sapiens
  misc_feature: Table A; Target 92983; HLA-B*44:02; TUBA3C; ENSG00000198033; TAA
DEVRTGTY

SEQ ID NO: 92984 - protein, 8 aa, Homo sapiens
  misc_feature: Table A; Target 92984; HLA-B*44:03; TUBA3C; ENSG00000198033; TAA
DEVRTGTY

SEQ ID NO: 92985 - protein, 8 aa, Homo sapiens
  misc_feature: Table A; Target 92985; HLA-B*49:01; TUBA3C; ENSG00000198033; TAA
DEVRTGTY

SEQ ID NO: 92986 - protein, 8 aa, Homo sapiens
  misc_feature: Table A; Target 92986; HLA-B*51:01; TUBA3C; ENSG00000198033; TAA
DEVRTGTY

SEQ ID NO: 92987 - protein, 8 aa, Homo sapiens
  misc_feature: Table A; Target 92987; HLA-C*03:03; TUBA3C; ENSG00000198033; TAA
DEVRTGTY

SEQ ID NO: 92988 - protein, 8 aa, Homo sapiens
  misc_feature: Table A; Target 92988; HLA-C*04:01; TUBA3C; ENSG00000198033; TAA
DEVRTGTY

SEQ ID NO: 92989 - protein, 8 aa, Homo sapiens
  misc_feature: Table A; Target 92989; HLA-C*07:01; TUBA3C; ENSG00000198033; TAA
DEVRTGTY

SEQ ID NO: 92990 - protein, 8 aa, Homo sapiens
  misc_feature: Table A; Target 92990; HLA-C*12:03; TUBA3C; ENSG00000198033; TAA
DEVRTGTY

SEQ ID NO: 92991 - protein, 8 aa, Homo sapiens
  misc_feature: Table A; Target 92991; HLA-C*16:02; TUBA3C; ENSG00000198033; TAA
DEVRTGTY

SEQ ID NO: 92992 - protein, 8 aa, Homo sapiens
  misc_feature: Table A; Target 92992; HLA-C*16:04; TUBA3C; ENSG00000198033; TAA
DEVRTGTY

SEQ ID NO: 92993 - protein, 9 aa, Homo sapiens
  misc_feature: Table A; Target 92993; HLA-A*33:01; TUBA3C; ENSG00000198033; TAA
DEVRTGTYR

SEQ ID NO: 92994 - protein, 9 aa, Homo sapiens
  misc_feature: Table A; Target 92994; HLA-A*33:03; TUBA3C; ENSG00000198033; TAA
DEVRTGTYR

SEQ ID NO: 92995 - protein, 9 aa, Homo sapiens
  misc_feature: Table A; Target 92995; HLA-A*68:01; TUBA3C; ENSG00000198033; TAA
DEVRTGTYR

SEQ ID NO: 92996 - protein, 9 aa, Homo sapiens
  misc_feature: Table A; Target 92996; HLA-B*18:01; TUBA3C; ENSG00000198033; TAA
DEVRTGTYR

SEQ ID NO: 92997 - protein, 8 aa, Homo sapiens
  misc_feature: Table A; Target 92997; HLA-B*35:03; TUBA3C; ENSG00000198033; TAA
DGALNVDL

SEQ ID NO: 92998 - protein, 11 aa, Homo sapiens
  misc_feature: Table A; Target 92998; HLA-B*27:02; TUBA3C; ENSG00000198033; TAA
DGALNVDLTEF

SEQ ID NO: 92999 - protein, 11 aa, Homo sapiens
  misc_feature: Table A; Target 92999; HLA-B*35:01; TUBA3C; ENSG00000198033; TAA
DGALNVDLTEF

SEQ ID NO: 93000 - protein, 11 aa, Homo sapiens
  misc_feature: Table A; Target 93000; HLA-C*07:01; TUBA3C; ENSG00000198033; TAA
DGALNVDLTEF

SEQ ID NO: 93001 - protein, 8 aa, Homo sapiens
  misc_feature: Table A; Target 93001; HLA-C*07:01; TUBA3C; ENSG00000198033; TAA
DHKFDLMY

SEQ ID NO: 93002 - protein, 9 aa, Homo sapiens
  misc_feature: Table A; Target 93002; HLA-A*33:01; TUBA3C; ENSG00000198033; TAA
DIERPTYTN

SEQ ID NO: 93003 - protein, 9 aa, Homo sapiens
  misc_feature: Table A; Target 93003; HLA-C*07:01; TUBA3C; ENSG00000198033; TAA
DIERPTYTN

SEQ ID NO: 93004 - protein, 10 aa, Homo sapiens
  misc_feature: Table A; Target 93004; HLA-A*33:01; TUBA3C; ENSG00000198033; TAA
DIERPTYTNL

SEQ ID NO: 93005 - protein, 10 aa, Homo sapiens
  misc_feature: Table A; Target 93005; HLA-A*68:01; TUBA3C; ENSG00000198033; TAA
DIERPTYTNL

SEQ ID NO: 93006 - protein, 10 aa, Homo sapiens
  misc_feature: Table A; Target 93006; HLA-A*68:02; TUBA3C; ENSG00000198033; TAA
DIERPTYTNL

SEQ ID NO: 93007 - protein, 10 aa, Homo sapiens
  misc_feature: Table A; Target 93007; HLA-B*38:01; TUBA3C; ENSG00000198033; TAA
DIERPTYTNL

SEQ ID NO: 93008 - protein, 10 aa, Homo sapiens
  misc_feature: Table A; Target 93008; HLA-C*01:02; TUBA3C; ENSG00000198033; TAA
DIERPTYTNL

SEQ ID NO: 93009 - protein, 10 aa, Homo sapiens
  misc_feature: Table A; Target 93009; HLA-C*05:01; TUBA3C; ENSG00000198033; TAA
DIERPTYTNL

SEQ ID NO: 93010 - protein, 10 aa, Homo sapiens
  misc_feature: Table A; Target 93010; HLA-C*07:01; TUBA3C; ENSG00000198033; TAA
DIERPTYTNL

SEQ ID NO: 93011 - protein, 10 aa, Homo sapiens
  misc_feature: Table A; Target 93011; HLA-C*07:02; TUBA3C; ENSG00000198033; TAA
DIERPTYTNL

SEQ ID NO: 93012 - protein, 10 aa, Homo sapiens
  misc_feature: Table A; Target 93012; HLA-C*07:06; TUBA3C; ENSG00000198033; TAA
DIERPTYTNL

SEQ ID NO: 93013 - protein, 11 aa, Homo sapiens
  misc_feature: Table A; Target 93013; HLA-A*01:01; TUBA3C; ENSG00000198033; TAA
DIERPTYTNLN

SEQ ID NO: 93014 - protein, 11 aa, Homo sapiens
  misc_feature: Table A; Target 93014; HLA-B*38:01; TUBA3C; ENSG00000198033; TAA
DKTIGGGDDSF

SEQ ID NO: 93015 - protein, 11 aa, Homo sapiens
  misc_feature: Table A; Target 93015; HLA-C*07:01; TUBA3C; ENSG00000198033; TAA
DKTIGGGDDSF

SEQ ID NO: 93016 - protein, 9 aa, Homo sapiens
  misc_feature: Table A; Target 93016; HLA-A*26:01; TUBA3C; ENSG00000198033; TAA
DLAALEKDY

SEQ ID NO: 93017 - protein, 9 aa, Homo sapiens
  misc_feature: Table A; Target 93017; HLA-B*44:03; TUBA3C; ENSG00000198033; TAA
DLAALEKDY

SEQ ID NO: 93018 - protein, 9 aa, Homo sapiens
  misc_feature: Table A; Target 93018; HLA-C*03:03; TUBA3C; ENSG00000198033; TAA
DLAALEKDY

SEQ ID NO: 93019 - protein, 9 aa, Homo sapiens
  misc_feature: Table A; Target 93019; HLA-C*07:01; TUBA3C; ENSG00000198033; TAA
DLAALEKDY

SEQ ID NO: 93020 - protein, 9 aa, Homo sapiens
  misc_feature: Table A; Target 93020; HLA-A*02:03; TUBA3C; ENSG00000198033; TAA
DLAKVQRAV

SEQ ID NO: 93021 - protein, 9 aa, Homo sapiens
  misc_feature: Table A; Target 93021; HLA-A*30:01; TUBA3C; ENSG00000198033; TAA
DLAKVQRAV

SEQ ID NO: 93022 - protein, 9 aa, Homo sapiens
  misc_feature: Table A; Target 93022; HLA-A*68:02; TUBA3C; ENSG00000198033; TAA
DLAKVQRAV

SEQ ID NO: 93023 - protein, 9 aa, Homo sapiens
  misc_feature: Table A; Target 93023; HLA-B*08:01; TUBA3C; ENSG00000198033; TAA
DLAKVQRAV

SEQ ID NO: 93024 - protein, 9 aa, Homo sapiens
  misc_feature: Table A; Target 93024; HLA-B*13:02; TUBA3C; ENSG00000198033; TAA
DLAKVQRAV

SEQ ID NO: 93025 - protein, 9 aa, Homo sapiens
  misc_feature: Table A; Target 93025; HLA-B*51:01; TUBA3C; ENSG00000198033; TAA
DLAKVQRAV

SEQ ID NO: 93026 - protein, 9 aa, Homo sapiens
  misc_feature: Table A; Target 93026; HLA-C*06:02; TUBA3C; ENSG00000198033; TAA
DLAKVQRAV

SEQ ID NO: 93027 - protein, 11 aa, Homo sapiens
  misc_feature: Table A; Target 93027; HLA-B*08:01; TUBA3C; ENSG00000198033; TAA
DLAKVQRAVCM

SEQ ID NO: 93028 - protein, 9 aa, Homo sapiens
  misc_feature: Table A; Target 93028; HLA-A*25:01; TUBA3C; ENSG00000198033; TAA
DLCTGLQGF

SEQ ID NO: 93029 - protein, 9 aa, Homo sapiens
  misc_feature: Table A; Target 93029; HLA-A*26:01; TUBA3C; ENSG00000198033; TAA
DLCTGLQGF

SEQ ID NO: 93030 - protein, 9 aa, Homo sapiens
  misc_feature: Table A; Target 93030; HLA-A*33:01; TUBA3C; ENSG00000198033; TAA
DLCTGLQGF

SEQ ID NO: 93031 - protein, 9 aa, Homo sapiens
  misc_feature: Table A; Target 93031; HLA-B*08:01; TUBA3C; ENSG00000198033; TAA
DLCTGLQGF

SEQ ID NO: 93032 - protein, 9 aa, Homo sapiens
  misc_feature: Table A; Target 93032; HLA-B*18:01; TUBA3C; ENSG00000198033; TAA
DLCTGLQGF

SEQ ID NO: 93033 - protein, 9 aa, Homo sapiens
  misc_feature: Table A; Target 93033; HLA-C*07:01; TUBA3C; ENSG00000198033; TAA
DLCTGLQGF

SEQ ID NO: 93034 - protein, 10 aa, Homo sapiens
  misc_feature: Table A; Target 93034; HLA-C*07:02; TUBA3C; ENSG00000198033; TAA
DLCTGLQGFL

SEQ ID NO: 93035 - protein, 10 aa, Homo sapiens
  misc_feature: Table A; Target 93035; HLA-A*68:02; TUBA3C; ENSG00000198033; TAA
DLEPTVVDEV

SEQ ID NO: 93036 - protein, 11 aa, Homo sapiens
  misc_feature: Table A; Target 93036; HLA-A*33:01; TUBA3C; ENSG00000198033; TAA
DLEPTVVDEVR

SEQ ID NO: 93037 - protein, 11 aa, Homo sapiens
  misc_feature: Table A; Target 93037; HLA-A*68:02; TUBA3C; ENSG00000198033; TAA
DLEPTVVDEVR

SEQ ID NO: 93038 - protein, 8 aa, Homo sapiens
  misc_feature: Table A; Target 93038; HLA-B*08:01; TUBA3C; ENSG00000198033; TAA
DLMYAKRA

SEQ ID NO: 93039 - protein, 9 aa, Homo sapiens
  misc_feature: Table A; Target 93039; HLA-B*08:01; TUBA3C; ENSG00000198033; TAA
DLMYAKRAF

SEQ ID NO: 93040 - protein, 9 aa, Homo sapiens
  misc_feature: Table A; Target 93040; HLA-A*02:01; TUBA3C; ENSG00000198033; TAA
DLTEFQTNL

SEQ ID NO: 93041 - protein, 9 aa, Homo sapiens
  misc_feature: Table A; Target 93041; HLA-A*02:03; TUBA3C; ENSG00000198033; TAA
DLTEFQTNL

SEQ ID NO: 93042 - protein, 9 aa, Homo sapiens
  misc_feature: Table A; Target 93042; HLA-A*02:04; TUBA3C; ENSG00000198033; TAA
DLTEFQTNL

SEQ ID NO: 93043 - protein, 9 aa, Homo sapiens
  misc_feature: Table A; Target 93043; HLA-A*02:07; TUBA3C; ENSG00000198033; TAA
DLTEFQTNL

SEQ ID NO: 93044 - protein, 9 aa, Homo sapiens
  misc_feature: Table A; Target 93044; HLA-A*24:02; TUBA3C; ENSG00000198033; TAA
DLTEFQTNL

SEQ ID NO: 93045 - protein, 9 aa, Homo sapiens
  misc_feature: Table A; Target 93045; HLA-A*25:01; TUBA3C; ENSG00000198033; TAA
DLTEFQTNL

SEQ ID NO: 93046 - protein, 9 aa, Homo sapiens
  misc_feature: Table A; Target 93046; HLA-A*26:01; TUBA3C; ENSG00000198033; TAA
DLTEFQTNL

SEQ ID NO: 93047 - protein, 9 aa, Homo sapiens
  misc_feature: Table A; Target 93047; HLA-A*68:01; TUBA3C; ENSG00000198033; TAA
DLTEFQTNL

SEQ ID NO: 93048 - protein, 9 aa, Homo sapiens
  misc_feature: Table A; Target 93048; HLA-A*68:02; TUBA3C; ENSG00000198033; TAA
DLTEFQTNL

SEQ ID NO: 93049 - protein, 9 aa, Homo sapiens
  misc_feature: Table A; Target 93049; HLA-B*08:01; TUBA3C; ENSG00000198033; TAA
DLTEFQTNL

SEQ ID NO: 93050 - protein, 9 aa, Homo sapiens
  misc_feature: Table A; Target 93050; HLA-B*13:02; TUBA3C; ENSG00000198033; TAA
DLTEFQTNL

SEQ ID NO: 93051 - protein, 9 aa, Homo sapiens
  misc_feature: Table A; Target 93051; HLA-B*18:01; TUBA3C; ENSG00000198033; TAA
DLTEFQTNL

SEQ ID NO: 93052 - protein, 9 aa, Homo sapiens
  misc_feature: Table A; Target 93052; HLA-B*27:05; TUBA3C; ENSG00000198033; TAA
DLTEFQTNL

SEQ ID NO: 93053 - protein, 9 aa, Homo sapiens
  misc_feature: Table A; Target 93053; HLA-B*38:01; TUBA3C; ENSG00000198033; TAA
DLTEFQTNL

SEQ ID NO: 93054 - protein, 9 aa, Homo sapiens
  misc_feature: Table A; Target 93054; HLA-B*39:01; TUBA3C; ENSG00000198033; TAA
DLTEFQTNL

SEQ ID NO: 93055 - protein, 9 aa, Homo sapiens
  misc_feature: Table A; Target 93055; HLA-B*40:01; TUBA3C; ENSG00000198033; TAA
DLTEFQTNL

SEQ ID NO: 93056 - protein, 9 aa, Homo sapiens
  misc_feature: Table A; Target 93056; HLA-B*40:02; TUBA3C; ENSG00000198033; TAA
DLTEFQTNL

SEQ ID NO: 93057 - protein, 9 aa, Homo sapiens
  misc_feature: Table A; Target 93057; HLA-B*51:01; TUBA3C; ENSG00000198033; TAA
DLTEFQTNL

SEQ ID NO: 93058 - protein, 9 aa, Homo sapiens
  misc_feature: Table A; Target 93058; HLA-B*55:01; TUBA3C; ENSG00000198033; TAA
DLTEFQTNL

SEQ ID NO: 93059 - protein, 9 aa, Homo sapiens
  misc_feature: Table A; Target 93059; HLA-C*16:02; TUBA3C; ENSG00000198033; TAA
DLTEFQTNL

SEQ ID NO: 93060 - protein, 10 aa, Homo sapiens
  misc_feature: Table A; Target 93060; HLA-A*68:02; TUBA3C; ENSG00000198033; TAA
DLTEFQTNLV

SEQ ID NO: 93061 - protein, 10 aa, Homo sapiens
  misc_feature: Table A; Target 93061; HLA-A*33:01; TUBA3C; ENSG00000198033; TAA
DNEAIYDICR

SEQ ID NO: 93062 - protein, 8 aa, Homo sapiens
  misc_feature: Table A; Target 93062; HLA-B*08:01; TUBA3C; ENSG00000198033; TAA
DPRHGKYM

SEQ ID NO: 93063 - protein, 9 aa, Homo sapiens
  misc_feature: Table A; Target 93063; HLA-B*54:01; TUBA3C; ENSG00000198033; TAA
DPRHGKYMA

SEQ ID NO: 93064 - protein, 9 aa, Homo sapiens
  misc_feature: Table A; Target 93064; HLA-A*33:01; TUBA3C; ENSG00000198033; TAA
DSFNTFFSE

SEQ ID NO: 93065 - protein, 10 aa, Homo sapiens
  misc_feature: Table A; Target 93065; HLA-A*68:02; TUBA3C; ENSG00000198033; TAA
DSFNTFFSET

SEQ ID NO: 93066 - protein, 9 aa, Homo sapiens
  misc_feature: Table A; Target 93066; HLA-A*02:03; TUBA3C; ENSG00000198033; TAA
DVNAAIATI

SEQ ID NO: 93067 - protein, 9 aa, Homo sapiens
  misc_feature: Table A; Target 93067; HLA-A*23:01; TUBA3C; ENSG00000198033; TAA
DVNAAIATI

SEQ ID NO: 93068 - protein, 9 aa, Homo sapiens
  misc_feature: Table A; Target 93068; HLA-A*24:02; TUBA3C; ENSG00000198033; TAA
DVNAAIATI

SEQ ID NO: 93069 - protein, 9 aa, Homo sapiens
  misc_feature: Table A; Target 93069; HLA-A*25:01; TUBA3C; ENSG00000198033; TAA
DVNAAIATI

SEQ ID NO: 93070 - protein, 9 aa, Homo sapiens
  misc_feature: Table A; Target 93070; HLA-A*26:01; TUBA3C; ENSG00000198033; TAA
DVNAAIATI

SEQ ID NO: 93071 - protein, 9 aa, Homo sapiens
  misc_feature: Table A; Target 93071; HLA-A*32:01; TUBA3C; ENSG00000198033; TAA
DVNAAIATI

SEQ ID NO: 93072 - protein, 9 aa, Homo sapiens
  misc_feature: Table A; Target 93072; HLA-A*33:01; TUBA3C; ENSG00000198033; TAA
DVNAAIATI

SEQ ID NO: 93073 - protein, 9 aa, Homo sapiens
  misc_feature: Table A; Target 93073; HLA-A*33:03; TUBA3C; ENSG00000198033; TAA
DVNAAIATI

SEQ ID NO: 93074 - protein, 9 aa, Homo sapiens
  misc_feature: Table A; Target 93074; HLA-A*68:01; TUBA3C; ENSG00000198033; TAA
DVNAAIATI

SEQ ID NO: 93075 - protein, 9 aa, Homo sapiens
  misc_feature: Table A; Target 93075; HLA-A*68:02; TUBA3C; ENSG00000198033; TAA
DVNAAIATI

SEQ ID NO: 93076 - protein, 9 aa, Homo sapiens
  misc_feature: Table A; Target 93076; HLA-B*07:02; TUBA3C; ENSG00000198033; TAA
DVNAAIATI

SEQ ID NO: 93077 - protein, 9 aa, Homo sapiens
  misc_feature: Table A; Target 93077; HLA-B*08:01; TUBA3C; ENSG00000198033; TAA
DVNAAIATI

SEQ ID NO: 93078 - protein, 9 aa, Homo sapiens
  misc_feature: Table A; Target 93078; HLA-B*13:02; TUBA3C; ENSG00000198033; TAA
DVNAAIATI

SEQ ID NO: 93079 - protein, 9 aa, Homo sapiens
  misc_feature: Table A; Target 93079; HLA-B*18:01; TUBA3C; ENSG00000198033; TAA
DVNAAIATI

SEQ ID NO: 93080 - protein, 9 aa, Homo sapiens
  misc_feature: Table A; Target 93080; HLA-B*35:01; TUBA3C; ENSG00000198033; TAA
DVNAAIATI

SEQ ID NO: 93081 - protein, 9 aa, Homo sapiens
  misc_feature: Table A; Target 93081; HLA-B*35:03; TUBA3C; ENSG00000198033; TAA
DVNAAIATI

SEQ ID NO: 93082 - protein, 9 aa, Homo sapiens
  misc_feature: Table A; Target 93082; HLA-B*38:01; TUBA3C; ENSG00000198033; TAA
DVNAAIATI

SEQ ID NO: 93083 - protein, 9 aa, Homo sapiens
  misc_feature: Table A; Target 93083; HLA-B*39:01; TUBA3C; ENSG00000198033; TAA
DVNAAIATI

SEQ ID NO: 93084 - protein, 9 aa, Homo sapiens
  misc_feature: Table A; Target 93084; HLA-B*40:02; TUBA3C; ENSG00000198033; TAA
DVNAAIATI

SEQ ID NO: 93085 - protein, 9 aa, Homo sapiens
  misc_feature: Table A; Target 93085; HLA-B*44:02; TUBA3C; ENSG00000198033; TAA
DVNAAIATI

SEQ ID NO: 93086 - protein, 9 aa, Homo sapiens
  misc_feature: Table A; Target 93086; HLA-B*51:01; TUBA3C; ENSG00000198033; TAA
DVNAAIATI

SEQ ID NO: 93087 - protein, 9 aa, Homo sapiens
  misc_feature: Table A; Target 93087; HLA-B*54:01; TUBA3C; ENSG00000198033; TAA
DVNAAIATI

SEQ ID NO: 93088 - protein, 9 aa, Homo sapiens
  misc_feature: Table A; Target 93088; HLA-B*58:01; TUBA3C; ENSG00000198033; TAA
DVNAAIATI

SEQ ID NO: 93089 - protein, 9 aa, Homo sapiens
  misc_feature: Table A; Target 93089; HLA-C*01:02; TUBA3C; ENSG00000198033; TAA
DVNAAIATI

SEQ ID NO: 93090 - protein, 9 aa, Homo sapiens
  misc_feature: Table A; Target 93090; HLA-C*06:02; TUBA3C; ENSG00000198033; TAA
DVNAAIATI

SEQ ID NO: 93091 - protein, 9 aa, Homo sapiens
  misc_feature: Table A; Target 93091; HLA-C*07:04; TUBA3C; ENSG00000198033; TAA
DVNAAIATI

SEQ ID NO: 93092 - protein, 9 aa, Homo sapiens
  misc_feature: Table A; Target 93092; HLA-C*07:06; TUBA3C; ENSG00000198033; TAA
DVNAAIATI

SEQ ID NO: 93093 - protein, 9 aa, Homo sapiens
  misc_feature: Table A; Target 93093; HLA-C*12:03; TUBA3C; ENSG00000198033; TAA
DVNAAIATI

SEQ ID NO: 93094 - protein, 10 aa, Homo sapiens
  misc_feature: Table A; Target 93094; HLA-A*03:01; TUBA3C; ENSG00000198033; TAA
DVNAAIATIK

SEQ ID NO: 93095 - protein, 10 aa, Homo sapiens
  misc_feature: Table A; Target 93095; HLA-A*03:02; TUBA3C; ENSG00000198033; TAA
DVNAAIATIK

SEQ ID NO: 93096 - protein, 10 aa, Homo sapiens
  misc_feature: Table A; Target 93096; HLA-A*11:01; TUBA3C; ENSG00000198033; TAA
DVNAAIATIK

SEQ ID NO: 93097 - protein, 10 aa, Homo sapiens
  misc_feature: Table A; Target 93097; HLA-A*33:01; TUBA3C; ENSG00000198033; TAA
DVNAAIATIK

SEQ ID NO: 93098 - protein, 10 aa, Homo sapiens
  misc_feature: Table A; Target 93098; HLA-A*33:03; TUBA3C; ENSG00000198033; TAA
DVNAAIATIK

SEQ ID NO: 93099 - protein, 10 aa, Homo sapiens
  misc_feature: Table A; Target 93099; HLA-A*68:01; TUBA3C; ENSG00000198033; TAA
DVNAAIATIK

SEQ ID NO: 93100 - protein, 10 aa, Homo sapiens
  misc_feature: Table A; Target 93100; HLA-B*27:02; TUBA3C; ENSG00000198033; TAA
DVNAAIATIK

SEQ ID NO: 93101 - protein, 10 aa, Homo sapiens
  misc_feature: Table A; Target 93101; HLA-C*07:06; TUBA3C; ENSG00000198033; TAA
DVNAAIATIK

SEQ ID NO: 93102 - protein, 11 aa, Homo sapiens
  misc_feature: Table A; Target 93102; HLA-A*33:01; TUBA3C; ENSG00000198033; TAA
DVNAAIATIKT

SEQ ID NO: 93103 - protein, 11 aa, Homo sapiens
  misc_feature: Table A; Target 93103; HLA-A*68:01; TUBA3C; ENSG00000198033; TAA
DVNAAIATIKT

SEQ ID NO: 93104 - protein, 11 aa, Homo sapiens
  misc_feature: Table A; Target 93104; HLA-C*06:02; TUBA3C; ENSG00000198033; TAA
DVNAAIATIKT

SEQ ID NO: 93105 - protein, 8 aa, Homo sapiens
  misc_feature: Table A; Target 93105; HLA-C*07:01; TUBA3C; ENSG00000198033; TAA
DVVPKDVN

SEQ ID NO: 93106 - protein, 9 aa, Homo sapiens
  misc_feature: Table A; Target 93106; HLA-A*25:01; TUBA3C; ENSG00000198033; TAA
DVVPKDVNA

SEQ ID NO: 93107 - protein, 9 aa, Homo sapiens
  misc_feature: Table A; Target 93107; HLA-A*26:01; TUBA3C; ENSG00000198033; TAA
DVVPKDVNA

SEQ ID NO: 93108 - protein, 9 aa, Homo sapiens
  misc_feature: Table A; Target 93108; HLA-A*33:01; TUBA3C; ENSG00000198033; TAA
DVVPKDVNA

SEQ ID NO: 93109 - protein, 9 aa, Homo sapiens
  misc_feature: Table A; Target 93109; HLA-A*33:03; TUBA3C; ENSG00000198033; TAA
DVVPKDVNA

SEQ ID NO: 93110 - protein, 9 aa, Homo sapiens
  misc_feature: Table A; Target 93110; HLA-A*68:01; TUBA3C; ENSG00000198033; TAA
DVVPKDVNA

SEQ ID NO: 93111 - protein, 9 aa, Homo sapiens
  misc_feature: Table A; Target 93111; HLA-A*68:02; TUBA3C; ENSG00000198033; TAA
DVVPKDVNA

SEQ ID NO: 93112 - protein, 9 aa, Homo sapiens
  misc_feature: Table A; Target 93112; HLA-B*08:01; TUBA3C; ENSG00000198033; TAA
DVVPKDVNA

SEQ ID NO: 93113 - protein, 9 aa, Homo sapiens
  misc_feature: Table A; Target 93113; HLA-B*35:03; TUBA3C; ENSG00000198033; TAA
DVVPKDVNA

SEQ ID NO: 93114 - protein, 9 aa, Homo sapiens
  misc_feature: Table A; Target 93114; HLA-B*54:01; TUBA3C; ENSG00000198033; TAA
DVVPKDVNA

SEQ ID NO: 93115 - protein, 9 aa, Homo sapiens
  misc_feature: Table A; Target 93115; HLA-C*07:06; TUBA3C; ENSG00000198033; TAA
DVVPKDVNA

SEQ ID NO: 93116 - protein, 10 aa, Homo sapiens
  misc_feature: Table A; Target 93116; HLA-A*25:01; TUBA3C; ENSG00000198033; TAA
DVVPKDVNAA

SEQ ID NO: 93117 - protein, 10 aa, Homo sapiens
  misc_feature: Table A; Target 93117; HLA-A*26:01; TUBA3C; ENSG00000198033; TAA
DVVPKDVNAA

SEQ ID NO: 93118 - protein, 10 aa, Homo sapiens
  misc_feature: Table A; Target 93118; HLA-A*68:01; TUBA3C; ENSG00000198033; TAA
DVVPKDVNAA

SEQ ID NO: 93119 - protein, 10 aa, Homo sapiens
  misc_feature: Table A; Target 93119; HLA-A*68:02; TUBA3C; ENSG00000198033; TAA
DVVPKDVNAA

SEQ ID NO: 93120 - protein, 10 aa, Homo sapiens
  misc_feature: Table A; Target 93120; HLA-C*07:06; TUBA3C; ENSG00000198033; TAA
DVVPKDVNAA

SEQ ID NO: 93121 - protein, 11 aa, Homo sapiens
  misc_feature: Table A; Target 93121; HLA-A*25:01; TUBA3C; ENSG00000198033; TAA
DVVPKDVNAAI

SEQ ID NO: 93122 - protein, 11 aa, Homo sapiens
  misc_feature: Table A; Target 93122; HLA-A*26:01; TUBA3C; ENSG00000198033; TAA
DVVPKDVNAAI

SEQ ID NO: 93123 - protein, 11 aa, Homo sapiens
  misc_feature: Table A; Target 93123; HLA-A*33:01; TUBA3C; ENSG00000198033; TAA
DVVPKDVNAAI

SEQ ID NO: 93124 - protein, 11 aa, Homo sapiens
  misc_feature: Table A; Target 93124; HLA-A*33:03; TUBA3C; ENSG00000198033; TAA
DVVPKDVNAAI

SEQ ID NO: 93125 - protein, 11 aa, Homo sapiens
  misc_feature: Table A; Target 93125; HLA-A*68:01; TUBA3C; ENSG00000198033; TAA
DVVPKDVNAAI

SEQ ID NO: 93126 - protein, 11 aa, Homo sapiens
  misc_feature: Table A; Target 93126; HLA-A*68:02; TUBA3C; ENSG00000198033; TAA
DVVPKDVNAAI

SEQ ID NO: 93127 - protein, 11 aa, Homo sapiens
  misc_feature: Table A; Target 93127; HLA-C*06:02; TUBA3C; ENSG00000198033; TAA
DVVPKDVNAAI

SEQ ID NO: 93128 - protein, 10 aa, Homo sapiens
  misc_feature: Table A; Target 93128; HLA-B*39:01; TUBA3C; ENSG00000198033; TAA
DYEEVGVDSV

SEQ ID NO: 93129 - protein, 10 aa, Homo sapiens
  misc_feature: Table A; Target 93129; HLA-C*07:01; TUBA3C; ENSG00000198033; TAA
DYEEVGVDSV

SEQ ID NO: 93130 - protein, 8 aa, Homo sapiens
  misc_feature: Table A; Target 93130; HLA-B*08:01; TUBA3C; ENSG00000198033; TAA
DYGKKSKL

SEQ ID NO: 93131 - protein, 8 aa, Homo sapiens
  misc_feature: Table A; Target 93131; HLA-C*07:01; TUBA3C; ENSG00000198033; TAA
DYGKKSKL

SEQ ID NO: 93132 - protein, 10 aa, Homo sapiens
  misc_feature: Table A; Target 93132; HLA-A*24:02; TUBA3C; ENSG00000198033; TAA
DYGKKSKLEF

SEQ ID NO: 93133 - protein, 10 aa, Homo sapiens
  misc_feature: Table A; Target 93133; HLA-A*33:01; TUBA3C; ENSG00000198033; TAA
DYGKKSKLEF

SEQ ID NO: 93134 - protein, 10 aa, Homo sapiens
  misc_feature: Table A; Target 93134; HLA-A*01:01; TUBA3C; ENSG00000198033; TAA
EAEAEEGEEY

SEQ ID NO: 93135 - protein, 10 aa, Homo sapiens
  misc_feature: Table A; Target 93135; HLA-A*26:01; TUBA3C; ENSG00000198033; TAA
EAEAEEGEEY

SEQ ID NO: 93136 - protein, 10 aa, Homo sapiens
  misc_feature: Table A; Target 93136; HLA-B*15:01; TUBA3C; ENSG00000198033; TAA
EAEAEEGEEY

SEQ ID NO: 93137 - protein, 10 aa, Homo sapiens
  misc_feature: Table A; Target 93137; HLA-B*27:02; TUBA3C; ENSG00000198033; TAA
EAEAEEGEEY

SEQ ID NO: 93138 - protein, 10 aa, Homo sapiens
  misc_feature: Table A; Target 93138; HLA-B*27:05; TUBA3C; ENSG00000198033; TAA
EAEAEEGEEY

SEQ ID NO: 93139 - protein, 10 aa, Homo sapiens
  misc_feature: Table A; Target 93139; HLA-B*35:01; TUBA3C; ENSG00000198033; TAA
EAEAEEGEEY

SEQ ID NO: 93140 - protein, 10 aa, Homo sapiens
  misc_feature: Table A; Target 93140; HLA-B*39:01; TUBA3C; ENSG00000198033; TAA
EAEAEEGEEY

SEQ ID NO: 93141 - protein, 10 aa, Homo sapiens
  misc_feature: Table A; Target 93141; HLA-B*55:01; TUBA3C; ENSG00000198033; TAA
EAEAEEGEEY

SEQ ID NO: 93142 - protein, 10 aa, Homo sapiens
  misc_feature: Table A; Target 93142; HLA-C*03:03; TUBA3C; ENSG00000198033; TAA
EAEAEEGEEY

SEQ ID NO: 93143 - protein, 10 aa, Homo sapiens
  misc_feature: Table A; Target 93143; HLA-C*04:01; TUBA3C; ENSG00000198033; TAA
EAEAEEGEEY

SEQ ID NO: 93144 - protein, 10 aa, Homo sapiens
  misc_feature: Table A; Target 93144; HLA-C*07:01; TUBA3C; ENSG00000198033; TAA
EAEAEEGEEY

SEQ ID NO: 93145 - protein, 10 aa, Homo sapiens
  misc_feature: Table A; Target 93145; HLA-C*07:04; TUBA3C; ENSG00000198033; TAA
EAEAEEGEEY

SEQ ID NO: 93146 - protein, 10 aa, Homo sapiens
  misc_feature: Table A; Target 93146; HLA-C*07:06; TUBA3C; ENSG00000198033; TAA
EAEAEEGEEY

SEQ ID NO: 93147 - protein, 8 aa, Homo sapiens
  misc_feature: Table A; Target 93147; HLA-A*01:01; TUBA3C; ENSG00000198033; TAA
EAEEGEEY

SEQ ID NO: 93148 - protein, 8 aa, Homo sapiens
  misc_feature: Table A; Target 93148; HLA-B*27:05; TUBA3C; ENSG00000198033; TAA
EAEEGEEY

SEQ ID NO: 93149 - protein, 8 aa, Homo sapiens
  misc_feature: Table A; Target 93149; HLA-B*35:01; TUBA3C; ENSG00000198033; TAA
EAEEGEEY

SEQ ID NO: 93150 - protein, 8 aa, Homo sapiens
  misc_feature: Table A; Target 93150; HLA-B*39:01; TUBA3C; ENSG00000198033; TAA
EAEEGEEY

SEQ ID NO: 93151 - protein, 8 aa, Homo sapiens
  misc_feature: Table A; Target 93151; HLA-B*55:01; TUBA3C; ENSG00000198033; TAA
EAEEGEEY

SEQ ID NO: 93152 - protein, 8 aa, Homo sapiens
  misc_feature: Table A; Target 93152; HLA-C*01:02; TUBA3C; ENSG00000198033; TAA
EAEEGEEY

SEQ ID NO: 93153 - protein, 8 aa, Homo sapiens
  misc_feature: Table A; Target 93153; HLA-C*03:03; TUBA3C; ENSG00000198033; TAA
EAEEGEEY

SEQ ID NO: 93154 - protein, 8 aa, Homo sapiens
  misc_feature: Table A; Target 93154; HLA-C*04:01; TUBA3C; ENSG00000198033; TAA
EAEEGEEY

SEQ ID NO: 93155 - protein, 8 aa, Homo sapiens
  misc_feature: Table A; Target 93155; HLA-C*05:01; TUBA3C; ENSG00000198033; TAA
EAEEGEEY

SEQ ID NO: 93156 - protein, 8 aa, Homo sapiens
  misc_feature: Table A; Target 93156; HLA-C*07:01; TUBA3C; ENSG00000198033; TAA
EAEEGEEY

SEQ ID NO: 93157 - protein, 8 aa, Homo sapiens
  misc_feature: Table A; Target 93157; HLA-C*07:06; TUBA3C; ENSG00000198033; TAA
EAEEGEEY

SEQ ID NO: 93158 - protein, 8 aa, Homo sapiens
  misc_feature: Table A; Target 93158; HLA-C*12:03; TUBA3C; ENSG00000198033; TAA
EAEEGEEY

SEQ ID NO: 93159 - protein, 8 aa, Homo sapiens
  misc_feature: Table A; Target 93159; HLA-C*16:02; TUBA3C; ENSG00000198033; TAA
EAEEGEEY

SEQ ID NO: 93160 - protein, 8 aa, Homo sapiens
  misc_feature: Table A; Target 93160; HLA-A*33:01; TUBA3C; ENSG00000198033; TAA
EAIYDICR

SEQ ID NO: 93161 - protein, 8 aa, Homo sapiens
  misc_feature: Table A; Target 93161; HLA-A*33:03; TUBA3C; ENSG00000198033; TAA
EAIYDICR

SEQ ID NO: 93162 - protein, 8 aa, Homo sapiens
  misc_feature: Table A; Target 93162; HLA-A*68:01; TUBA3C; ENSG00000198033; TAA
EAIYDICR

SEQ ID NO: 93163 - protein, 8 aa, Homo sapiens
  misc_feature: Table A; Target 93163; HLA-B*27:02; TUBA3C; ENSG00000198033; TAA
EAIYDICR

SEQ ID NO: 93164 - protein, 8 aa, Homo sapiens
  misc_feature: Table A; Target 93164; HLA-C*07:06; TUBA3C; ENSG00000198033; TAA
EAIYDICR

SEQ ID NO: 93165 - protein, 9 aa, Homo sapiens
  misc_feature: Table A; Target 93165; HLA-A*26:01; TUBA3C; ENSG00000198033; TAA
EAIYDICRR

SEQ ID NO: 93166 - protein, 9 aa, Homo sapiens
  misc_feature: Table A; Target 93166; HLA-A*33:01; TUBA3C; ENSG00000198033; TAA
EAIYDICRR

SEQ ID NO: 93167 - protein, 9 aa, Homo sapiens
  misc_feature: Table A; Target 93167; HLA-A*33:03; TUBA3C; ENSG00000198033; TAA
EAIYDICRR

SEQ ID NO: 93168 - protein, 9 aa, Homo sapiens
  misc_feature: Table A; Target 93168; HLA-A*68:01; TUBA3C; ENSG00000198033; TAA
EAIYDICRR

SEQ ID NO: 93169 - protein, 9 aa, Homo sapiens
  misc_feature: Table A; Target 93169; HLA-A*68:02; TUBA3C; ENSG00000198033; TAA
EAIYDICRR

SEQ ID NO: 93170 - protein, 9 aa, Homo sapiens
  misc_feature: Table A; Target 93170; HLA-C*07:06; TUBA3C; ENSG00000198033; TAA
EAIYDICRR

SEQ ID NO: 93171 - protein, 9 aa, Homo sapiens
  misc_feature: Table A; Target 93171; HLA-A*25:01; TUBA3C; ENSG00000198033; TAA
EAREDLAAL

SEQ ID NO: 93172 - protein, 9 aa, Homo sapiens
  misc_feature: Table A; Target 93172; HLA-A*26:01; TUBA3C; ENSG00000198033; TAA
EAREDLAAL

SEQ ID NO: 93173 - protein, 9 aa, Homo sapiens
  misc_feature: Table A; Target 93173; HLA-A*33:01; TUBA3C; ENSG00000198033; TAA
EAREDLAAL

SEQ ID NO: 93174 - protein, 9 aa, Homo sapiens
  misc_feature: Table A; Target 93174; HLA-A*33:03; TUBA3C; ENSG00000198033; TAA
EAREDLAAL

SEQ ID NO: 93175 - protein, 9 aa, Homo sapiens
  misc_feature: Table A; Target 93175; HLA-A*68:02; TUBA3C; ENSG00000198033; TAA
EAREDLAAL

SEQ ID NO: 93176 - protein, 9 aa, Homo sapiens
  misc_feature: Table A; Target 93176; HLA-B*07:02; TUBA3C; ENSG00000198033; TAA
EAREDLAAL

SEQ ID NO: 93177 - protein, 9 aa, Homo sapiens
  misc_feature: Table A; Target 93177; HLA-B*08:01; TUBA3C; ENSG00000198033; TAA
EAREDLAAL

SEQ ID NO: 93178 - protein, 9 aa, Homo sapiens
  misc_feature: Table A; Target 93178; HLA-B*35:01; TUBA3C; ENSG00000198033; TAA
EAREDLAAL

SEQ ID NO: 93179 - protein, 9 aa, Homo sapiens
  misc_feature: Table A; Target 93179; HLA-B*35:03; TUBA3C; ENSG00000198033; TAA
EAREDLAAL

SEQ ID NO: 93180 - protein, 9 aa, Homo sapiens
  misc_feature: Table A; Target 93180; HLA-B*40:02; TUBA3C; ENSG00000198033; TAA
EAREDLAAL

SEQ ID NO: 93181 - protein, 9 aa, Homo sapiens
  misc_feature: Table A; Target 93181; HLA-B*46:01; TUBA3C; ENSG00000198033; TAA
EAREDLAAL

SEQ ID NO: 93182 - protein, 9 aa, Homo sapiens
  misc_feature: Table A; Target 93182; HLA-B*51:01; TUBA3C; ENSG00000198033; TAA
EAREDLAAL

SEQ ID NO: 93183 - protein, 9 aa, Homo sapiens
  misc_feature: Table A; Target 93183; HLA-B*54:01; TUBA3C; ENSG00000198033; TAA
EAREDLAAL

SEQ ID NO: 93184 - protein, 9 aa, Homo sapiens
  misc_feature: Table A; Target 93184; HLA-C*01:02; TUBA3C; ENSG00000198033; TAA
EAREDLAAL

SEQ ID NO: 93185 - protein, 9 aa, Homo sapiens
  misc_feature: Table A; Target 93185; HLA-C*03:03; TUBA3C; ENSG00000198033; TAA
EAREDLAAL

SEQ ID NO: 93186 - protein, 9 aa, Homo sapiens
  misc_feature: Table A; Target 93186; HLA-C*07:02; TUBA3C; ENSG00000198033; TAA
EAREDLAAL

SEQ ID NO: 93187 - protein, 9 aa, Homo sapiens
  misc_feature: Table A; Target 93187; HLA-C*07:06; TUBA3C; ENSG00000198033; TAA
EAREDLAAL

SEQ ID NO: 93188 - protein, 11 aa, Homo sapiens
  misc_feature: Table A; Target 93188; HLA-A*33:01; TUBA3C; ENSG00000198033; TAA
EAREDLAALEK

SEQ ID NO: 93189 - protein, 11 aa, Homo sapiens
  misc_feature: Table A; Target 93189; HLA-A*33:03; TUBA3C; ENSG00000198033; TAA
EAREDLAALEK

SEQ ID NO: 93190 - protein, 11 aa, Homo sapiens
  misc_feature: Table A; Target 93190; HLA-A*68:01; TUBA3C; ENSG00000198033; TAA
EAREDLAALEK

SEQ ID NO: 93191 - protein, 11 aa, Homo sapiens
  misc_feature: Table A; Target 93191; HLA-C*07:06; TUBA3C; ENSG00000198033; TAA
EAREDLAALEK

SEQ ID NO: 93192 - protein, 9 aa, Homo sapiens
  misc_feature: Table A; Target 93192; HLA-A*33:01; TUBA3C; ENSG00000198033; TAA
EAWARLDHK

SEQ ID NO: 93193 - protein, 9 aa, Homo sapiens
  misc_feature: Table A; Target 93193; HLA-A*26:01; TUBA3C; ENSG00000198033; TAA
ECISIHVGQ

SEQ ID NO: 93194 - protein, 9 aa, Homo sapiens
  misc_feature: Table A; Target 93194; HLA-C*07:01; TUBA3C; ENSG00000198033; TAA
ECISIHVGQ

SEQ ID NO: 93195 - protein, 10 aa, Homo sapiens
  misc_feature: Table A; Target 93195; HLA-A*26:01; TUBA3C; ENSG00000198033; TAA
ECISIHVGQA

SEQ ID NO: 93196 - protein, 8 aa, Homo sapiens
  misc_feature: Table A; Target 93196; HLA-C*06:02; TUBA3C; ENSG00000198033; TAA
EDAANNYA

SEQ ID NO: 93197 - protein, 8 aa, Homo sapiens
  misc_feature: Table A; Target 93197; HLA-C*07:01; TUBA3C; ENSG00000198033; TAA
EDAANNYA

SEQ ID NO: 93198 - protein, 9 aa, Homo sapiens
  misc_feature: Table A; Target 93198; HLA-A*33:01; TUBA3C; ENSG00000198033; TAA
EDAANNYAR

SEQ ID NO: 93199 - protein, 9 aa, Homo sapiens
  misc_feature: Table A; Target 93199; HLA-A*33:03; TUBA3C; ENSG00000198033; TAA
EDAANNYAR

SEQ ID NO: 93200 - protein, 9 aa, Homo sapiens
  misc_feature: Table A; Target 93200; HLA-A*68:01; TUBA3C; ENSG00000198033; TAA
EDAANNYAR

SEQ ID NO: 93201 - protein, 9 aa, Homo sapiens
  misc_feature: Table A; Target 93201; HLA-A*68:02; TUBA3C; ENSG00000198033; TAA
EDAANNYAR

SEQ ID NO: 93202 - protein, 9 aa, Homo sapiens
  misc_feature: Table A; Target 93202; HLA-B*27:02; TUBA3C; ENSG00000198033; TAA
EDAANNYAR

SEQ ID NO: 93203 - protein, 9 aa, Homo sapiens
  misc_feature: Table A; Target 93203; HLA-B*27:05; TUBA3C; ENSG00000198033; TAA
EDAANNYAR

SEQ ID NO: 93204 - protein, 9 aa, Homo sapiens
  misc_feature: Table A; Target 93204; HLA-B*39:01; TUBA3C; ENSG00000198033; TAA
EDAANNYAR

SEQ ID NO: 93205 - protein, 9 aa, Homo sapiens
  misc_feature: Table A; Target 93205; HLA-C*07:01; TUBA3C; ENSG00000198033; TAA
EDAANNYAR

SEQ ID NO: 93206 - protein, 9 aa, Homo sapiens
  misc_feature: Table A; Target 93206; HLA-C*07:02; TUBA3C; ENSG00000198033; TAA
EDAANNYAR

SEQ ID NO: 93207 - protein, 9 aa, Homo sapiens
  misc_feature: Table A; Target 93207; HLA-C*07:06; TUBA3C; ENSG00000198033; TAA
EDAANNYAR

SEQ ID NO: 93208 - protein, 10 aa, Homo sapiens
  misc_feature: Table A; Target 93208; HLA-C*07:01; TUBA3C; ENSG00000198033; TAA
EDAANNYARG

SEQ ID NO: 93209 - protein, 8 aa, Homo sapiens
  misc_feature: Table A; Target 93209; HLA-A*11:01; TUBA3C; ENSG00000198033; TAA
EDLAALEK

SEQ ID NO: 93210 - protein, 8 aa, Homo sapiens
  misc_feature: Table A; Target 93210; HLA-B*27:02; TUBA3C; ENSG00000198033; TAA
EDLAALEK

SEQ ID NO: 93211 - protein, 8 aa, Homo sapiens
  misc_feature: Table A; Target 93211; HLA-C*07:01; TUBA3C; ENSG00000198033; TAA
EDLAALEK

SEQ ID NO: 93212 - protein, 10 aa, Homo sapiens
  misc_feature: Table A; Target 93212; HLA-B*44:02; TUBA3C; ENSG00000198033; TAA
EDLAALEKDY

SEQ ID NO: 93213 - protein, 10 aa, Homo sapiens
  misc_feature: Table A; Target 93213; HLA-B*44:03; TUBA3C; ENSG00000198033; TAA
EDLAALEKDY

SEQ ID NO: 93214 - protein, 10 aa, Homo sapiens
  misc_feature: Table A; Target 93214; HLA-C*07:01; TUBA3C; ENSG00000198033; TAA
EDLAALEKDY

SEQ ID NO: 93215 - protein, 8 aa, Homo sapiens
  misc_feature: Table A; Target 93215; HLA-B*18:01; TUBA3C; ENSG00000198033; TAA
EEGEFSEA

SEQ ID NO: 93216 - protein, 8 aa, Homo sapiens
  misc_feature: Table A; Target 93216; HLA-B*40:02; TUBA3C; ENSG00000198033; TAA
EEGEFSEA

SEQ ID NO: 93217 - protein, 8 aa, Homo sapiens
  misc_feature: Table A; Target 93217; HLA-B*49:01; TUBA3C; ENSG00000198033; TAA
EEGEFSEA

SEQ ID NO: 93218 - protein, 9 aa, Homo sapiens
  misc_feature: Table A; Target 93218; HLA-A*33:03; TUBA3C; ENSG00000198033; TAA
EEGEFSEAR

SEQ ID NO: 93219 - protein, 9 aa, Homo sapiens
  misc_feature: Table A; Target 93219; HLA-B*27:02; TUBA3C; ENSG00000198033; TAA
EEGEFSEAR

SEQ ID NO: 93220 - protein, 9 aa, Homo sapiens
  misc_feature: Table A; Target 93220; HLA-B*44:02; TUBA3C; ENSG00000198033; TAA
EEGEFSEAR

SEQ ID NO: 93221 - protein, 8 aa, Homo sapiens
  misc_feature: Table A; Target 93221; HLA-A*30:01; TUBA3C; ENSG00000198033; TAA
EEVGVDSV

SEQ ID NO: 93222 - protein, 8 aa, Homo sapiens
  misc_feature: Table A; Target 93222; HLA-B*18:01; TUBA3C; ENSG00000198033; TAA
EEVGVDSV

SEQ ID NO: 93223 - protein, 8 aa, Homo sapiens
  misc_feature: Table A; Target 93223; HLA-B*39:01; TUBA3C; ENSG00000198033; TAA
EEVGVDSV

SEQ ID NO: 93224 - protein, 8 aa, Homo sapiens
  misc_feature: Table A; Target 93224; HLA-B*40:01; TUBA3C; ENSG00000198033; TAA
EEVGVDSV

SEQ ID NO: 93225 - protein, 8 aa, Homo sapiens
  misc_feature: Table A; Target 93225; HLA-B*40:02; TUBA3C; ENSG00000198033; TAA
EEVGVDSV

SEQ ID NO: 93226 - protein, 8 aa, Homo sapiens
  misc_feature: Table A; Target 93226; HLA-B*49:01; TUBA3C; ENSG00000198033; TAA
EEVGVDSV

SEQ ID NO: 93227 - protein, 8 aa, Homo sapiens
  misc_feature: Table A; Target 93227; HLA-C*07:01; TUBA3C; ENSG00000198033; TAA
EEVGVDSV

SEQ ID NO: 93228 - protein, 8 aa, Homo sapiens
  misc_feature: Table A; Target 93228; HLA-C*12:03; TUBA3C; ENSG00000198033; TAA
EEVGVDSV

SEQ ID NO: 93229 - protein, 8 aa, Homo sapiens
  misc_feature: Table A; Target 93229; HLA-C*16:04; TUBA3C; ENSG00000198033; TAA
EEVGVDSV

SEQ ID NO: 93230 - protein, 10 aa, Homo sapiens
  misc_feature: Table A; Target 93230; HLA-A*30:01; TUBA3C; ENSG00000198033; TAA
EEVGVDSVEA

SEQ ID NO: 93231 - protein, 10 aa, Homo sapiens
  misc_feature: Table A; Target 93231; HLA-A*68:02; TUBA3C; ENSG00000198033; TAA
EEVGVDSVEA

SEQ ID NO: 93232 - protein, 10 aa, Homo sapiens
  misc_feature: Table A; Target 93232; HLA-B*39:01; TUBA3C; ENSG00000198033; TAA
EEVGVDSVEA

SEQ ID NO: 93233 - protein, 10 aa, Homo sapiens
  misc_feature: Table A; Target 93233; HLA-B*40:01; TUBA3C; ENSG00000198033; TAA
EEVGVDSVEA

SEQ ID NO: 93234 - protein, 10 aa, Homo sapiens
  misc_feature: Table A; Target 93234; HLA-B*40:02; TUBA3C; ENSG00000198033; TAA
EEVGVDSVEA

SEQ ID NO: 93235 - protein, 10 aa, Homo sapiens
  misc_feature: Table A; Target 93235; HLA-A*33:03; TUBA3C; ENSG00000198033; TAA
EFAIYPAPQV

SEQ ID NO: 93236 - protein, 10 aa, Homo sapiens
  misc_feature: Table A; Target 93236; HLA-A*68:02; TUBA3C; ENSG00000198033; TAA
EFAIYPAPQV

SEQ ID NO: 93237 - protein, 10 aa, Homo sapiens
  misc_feature: Table A; Target 93237; HLA-B*07:02; TUBA3C; ENSG00000198033; TAA
EFAIYPAPQV

SEQ ID NO: 93238 - protein, 10 aa, Homo sapiens
  misc_feature: Table A; Target 93238; HLA-C*04:01; TUBA3C; ENSG00000198033; TAA
EFAIYPAPQV

SEQ ID NO: 93239 - protein, 10 aa, Homo sapiens
  misc_feature: Table A; Target 93239; HLA-C*06:02; TUBA3C; ENSG00000198033; TAA
EFAIYPAPQV

SEQ ID NO: 93240 - protein, 10 aa, Homo sapiens
  misc_feature: Table A; Target 93240; HLA-C*07:01; TUBA3C; ENSG00000198033; TAA
EFAIYPAPQV

SEQ ID NO: 93241 - protein, 10 aa, Homo sapiens
  misc_feature: Table A; Target 93241; HLA-C*07:02; TUBA3C; ENSG00000198033; TAA
EFAIYPAPQV

SEQ ID NO: 93242 - protein, 9 aa, Homo sapiens
  misc_feature: Table A; Target 93242; HLA-A*29:02; TUBA3C; ENSG00000198033; TAA
EFQTNLVPY

SEQ ID NO: 93243 - protein, 9 aa, Homo sapiens
  misc_feature: Table A; Target 93243; HLA-A*33:01; TUBA3C; ENSG00000198033; TAA
EFQTNLVPY

SEQ ID NO: 93244 - protein, 9 aa, Homo sapiens
  misc_feature: Table A; Target 93244; HLA-A*33:03; TUBA3C; ENSG00000198033; TAA
EFQTNLVPY

SEQ ID NO: 93245 - protein, 9 aa, Homo sapiens
  misc_feature: Table A; Target 93245; HLA-C*04:01; TUBA3C; ENSG00000198033; TAA
EFQTNLVPY

SEQ ID NO: 93246 - protein, 9 aa, Homo sapiens
  misc_feature: Table A; Target 93246; HLA-C*07:01; TUBA3C; ENSG00000198033; TAA
EFQTNLVPY

SEQ ID NO: 93247 - protein, 9 aa, Homo sapiens
  misc_feature: Table A; Target 93247; HLA-C*14:02; TUBA3C; ENSG00000198033; TAA
EFQTNLVPY

SEQ ID NO: 93248 - protein, 11 aa, Homo sapiens
  misc_feature: Table A; Target 93248; HLA-A*33:01; TUBA3C; ENSG00000198033; TAA
EFQTNLVPYPR

SEQ ID NO: 93249 - protein, 11 aa, Homo sapiens
  misc_feature: Table A; Target 93249; HLA-A*33:03; TUBA3C; ENSG00000198033; TAA
EFQTNLVPYPR

SEQ ID NO: 93250 - protein, 9 aa, Homo sapiens
  misc_feature: Table A; Target 93250; HLA-C*14:02; TUBA3C; ENSG00000198033; TAA
EFSEAREDL

SEQ ID NO: 93251 - protein, 8 aa, Homo sapiens
  misc_feature: Table A; Target 93251; HLA-C*04:01; TUBA3C; ENSG00000198033; TAA
EGMEEGEF

SEQ ID NO: 93252 - protein, 8 aa, Homo sapiens
  misc_feature: Table A; Target 93252; HLA-C*05:01; TUBA3C; ENSG00000198033; TAA
EGMEEGEF

SEQ ID NO: 93253 - protein, 11 aa, Homo sapiens
  misc_feature: Table A; Target 93253; HLA-B*54:01; TUBA3C; ENSG00000198033; TAA
EGMEEGEFSEA

SEQ ID NO: 93254 - protein, 8 aa, Homo sapiens
  misc_feature: Table A; Target 93254; HLA-B*39:01; TUBA3C; ENSG00000198033; TAA
EHGIQPDG

SEQ ID NO: 93255 - protein, 8 aa, Homo sapiens
  misc_feature: Table A; Target 93255; HLA-C*07:01; TUBA3C; ENSG00000198033; TAA
EHGIQPDG

SEQ ID NO: 93256 - protein, 10 aa, Homo sapiens
  misc_feature: Table A; Target 93256; HLA-B*27:05; TUBA3C; ENSG00000198033; TAA
EHGIQPDGQM

SEQ ID NO: 93257 - protein, 10 aa, Homo sapiens
  misc_feature: Table A; Target 93257; HLA-B*38:01; TUBA3C; ENSG00000198033; TAA
EHGIQPDGQM

SEQ ID NO: 93258 - protein, 10 aa, Homo sapiens
  misc_feature: Table A; Target 93258; HLA-B*39:01; TUBA3C; ENSG00000198033; TAA
EHGIQPDGQM

SEQ ID NO: 93259 - protein, 10 aa, Homo sapiens
  misc_feature: Table A; Target 93259; HLA-C*04:01; TUBA3C; ENSG00000198033; TAA
EHGIQPDGQM

SEQ ID NO: 93260 - protein, 10 aa, Homo sapiens
  misc_feature: Table A; Target 93260; HLA-C*07:01; TUBA3C; ENSG00000198033; TAA
EHGIQPDGQM

SEQ ID NO: 93261 - protein, 9 aa, Homo sapiens
  misc_feature: Table A; Target 93261; HLA-A*68:02; TUBA3C; ENSG00000198033; TAA
EHSDCAFMV

SEQ ID NO: 93262 - protein, 9 aa, Homo sapiens
  misc_feature: Table A; Target 93262; HLA-B*38:01; TUBA3C; ENSG00000198033; TAA
EHSDCAFMV

SEQ ID NO: 93263 - protein, 9 aa, Homo sapiens
  misc_feature: Table A; Target 93263; HLA-B*39:01; TUBA3C; ENSG00000198033; TAA
EHSDCAFMV

SEQ ID NO: 93264 - protein, 9 aa, Homo sapiens
  misc_feature: Table A; Target 93264; HLA-A*11:01; TUBA3C; ENSG00000198033; TAA
EIVDLVLDR

SEQ ID NO: 93265 - protein, 9 aa, Homo sapiens
  misc_feature: Table A; Target 93265; HLA-A*25:01; TUBA3C; ENSG00000198033; TAA
EIVDLVLDR

SEQ ID NO: 93266 - protein, 9 aa, Homo sapiens
  misc_feature: Table A; Target 93266; HLA-A*26:01; TUBA3C; ENSG00000198033; TAA
EIVDLVLDR

SEQ ID NO: 93267 - protein, 9 aa, Homo sapiens
  misc_feature: Table A; Target 93267; HLA-A*29:02; TUBA3C; ENSG00000198033; TAA
EIVDLVLDR

SEQ ID NO: 93268 - protein, 9 aa, Homo sapiens
  misc_feature: Table A; Target 93268; HLA-A*33:01; TUBA3C; ENSG00000198033; TAA
EIVDLVLDR

SEQ ID NO: 93269 - protein, 9 aa, Homo sapiens
  misc_feature: Table A; Target 93269; HLA-A*33:03; TUBA3C; ENSG00000198033; TAA
EIVDLVLDR

SEQ ID NO: 93270 - protein, 9 aa, Homo sapiens
  misc_feature: Table A; Target 93270; HLA-A*68:01; TUBA3C; ENSG00000198033; TAA
EIVDLVLDR

SEQ ID NO: 93271 - protein, 9 aa, Homo sapiens
  misc_feature: Table A; Target 93271; HLA-A*68:02; TUBA3C; ENSG00000198033; TAA
EIVDLVLDR

SEQ ID NO: 93272 - protein, 9 aa, Homo sapiens
  misc_feature: Table A; Target 93272; HLA-B*27:02; TUBA3C; ENSG00000198033; TAA
EIVDLVLDR

SEQ ID NO: 93273 - protein, 9 aa, Homo sapiens
  misc_feature: Table A; Target 93273; HLA-B*35:01; TUBA3C; ENSG00000198033; TAA
EIVDLVLDR

SEQ ID NO: 93274 - protein, 9 aa, Homo sapiens
  misc_feature: Table A; Target 93274; HLA-C*07:06; TUBA3C; ENSG00000198033; TAA
EIVDLVLDR

SEQ ID NO: 93275 - protein, 9 aa, Homo sapiens
  misc_feature: Table A; Target 93275; HLA-C*12:03; TUBA3C; ENSG00000198033; TAA
EIVDLVLDR

SEQ ID NO: 93276 - protein, 10 aa, Homo sapiens
  misc_feature: Table A; Target 93276; HLA-A*02:07; TUBA3C; ENSG00000198033; TAA
EIVDLVLDRI

SEQ ID NO: 93277 - protein, 10 aa, Homo sapiens
  misc_feature: Table A; Target 93277; HLA-A*25:01; TUBA3C; ENSG00000198033; TAA
EIVDLVLDRI

SEQ ID NO: 93278 - protein, 10 aa, Homo sapiens
  misc_feature: Table A; Target 93278; HLA-A*26:01; TUBA3C; ENSG00000198033; TAA
EIVDLVLDRI

SEQ ID NO: 93279 - protein, 10 aa, Homo sapiens
  misc_feature: Table A; Target 93279; HLA-A*68:02; TUBA3C; ENSG00000198033; TAA
EIVDLVLDRI

SEQ ID NO: 93280 - protein, 10 aa, Homo sapiens
  misc_feature: Table A; Target 93280; HLA-B*44:03; TUBA3C; ENSG00000198033; TAA
EIVDLVLDRI

SEQ ID NO: 93281 - protein, 8 aa, Homo sapiens
  misc_feature: Table A; Target 93281; HLA-C*07:01; TUBA3C; ENSG00000198033; TAA
EKAYHEQL

SEQ ID NO: 93282 - protein, 8 aa, Homo sapiens
  misc_feature: Table A; Target 93282; HLA-A*33:03; TUBA3C; ENSG00000198033; TAA
EPANQMVK

SEQ ID NO: 93283 - protein, 8 aa, Homo sapiens
  misc_feature: Table A; Target 93283; HLA-A*68:01; TUBA3C; ENSG00000198033; TAA
EPANQMVK

SEQ ID NO: 93284 - protein, 8 aa, Homo sapiens
  misc_feature: Table A; Target 93284; HLA-B*51:01; TUBA3C; ENSG00000198033; TAA
EPANQMVK

SEQ ID NO: 93285 - protein, 8 aa, Homo sapiens
  misc_feature: Table A; Target 93285; HLA-C*07:01; TUBA3C; ENSG00000198033; TAA
EPANQMVK

SEQ ID NO: 93286 - protein, 9 aa, Homo sapiens
  misc_feature: Table A; Target 93286; HLA-A*68:01; TUBA3C; ENSG00000198033; TAA
EPANQMVKC

SEQ ID NO: 93287 - protein, 9 aa, Homo sapiens
  misc_feature: Table A; Target 93287; HLA-A*68:02; TUBA3C; ENSG00000198033; TAA
EPANQMVKC

SEQ ID NO: 93288 - protein, 9 aa, Homo sapiens
  misc_feature: Table A; Target 93288; HLA-B*35:03; TUBA3C; ENSG00000198033; TAA
EPANQMVKC

SEQ ID NO: 93289 - protein, 9 aa, Homo sapiens
  misc_feature: Table A; Target 93289; HLA-B*51:01; TUBA3C; ENSG00000198033; TAA
EPANQMVKC

SEQ ID NO: 93290 - protein, 9 aa, Homo sapiens
  misc_feature: Table A; Target 93290; HLA-B*54:01; TUBA3C; ENSG00000198033; TAA
EPANQMVKC

SEQ ID NO: 93291 - protein, 9 aa, Homo sapiens
  misc_feature: Table A; Target 93291; HLA-B*55:01; TUBA3C; ENSG00000198033; TAA
EPANQMVKC

SEQ ID NO: 93292 - protein, 9 aa, Homo sapiens
  misc_feature: Table A; Target 93292; HLA-B*56:01; TUBA3C; ENSG00000198033; TAA
EPANQMVKC

SEQ ID NO: 93293 - protein, 8 aa, Homo sapiens
  misc_feature: Table A; Target 93293; HLA-B*35:01; TUBA3C; ENSG00000198033; TAA
EPTVVDEV

SEQ ID NO: 93294 - protein, 8 aa, Homo sapiens
  misc_feature: Table A; Target 93294; HLA-B*35:03; TUBA3C; ENSG00000198033; TAA
EPTVVDEV

SEQ ID NO: 93295 - protein, 8 aa, Homo sapiens
  misc_feature: Table A; Target 93295; HLA-B*51:01; TUBA3C; ENSG00000198033; TAA
EPTVVDEV

SEQ ID NO: 93296 - protein, 8 aa, Homo sapiens
  misc_feature: Table A; Target 93296; HLA-B*54:01; TUBA3C; ENSG00000198033; TAA
EPTVVDEV

SEQ ID NO: 93297 - protein, 8 aa, Homo sapiens
  misc_feature: Table A; Target 93297; HLA-B*55:01; TUBA3C; ENSG00000198033; TAA
EPTVVDEV

SEQ ID NO: 93298 - protein, 8 aa, Homo sapiens
  misc_feature: Table A; Target 93298; HLA-B*56:01; TUBA3C; ENSG00000198033; TAA
EPTVVDEV

SEQ ID NO: 93299 - protein, 8 aa, Homo sapiens
  misc_feature: Table A; Target 93299; HLA-C*04:01; TUBA3C; ENSG00000198033; TAA
EPTVVDEV

SEQ ID NO: 93300 - protein, 8 aa, Homo sapiens
  misc_feature: Table A; Target 93300; HLA-C*07:01; TUBA3C; ENSG00000198033; TAA
EPTVVDEV

SEQ ID NO: 93301 - protein, 9 aa, Homo sapiens
  misc_feature: Table A; Target 93301; HLA-A*33:03; TUBA3C; ENSG00000198033; TAA
EPTVVDEVR

SEQ ID NO: 93302 - protein, 9 aa, Homo sapiens
  misc_feature: Table A; Target 93302; HLA-A*68:01; TUBA3C; ENSG00000198033; TAA
EPTVVDEVR

SEQ ID NO: 93303 - protein, 9 aa, Homo sapiens
  misc_feature: Table A; Target 93303; HLA-A*68:02; TUBA3C; ENSG00000198033; TAA
EPTVVDEVR

SEQ ID NO: 93304 - protein, 9 aa, Homo sapiens
  misc_feature: Table A; Target 93304; HLA-B*27:02; TUBA3C; ENSG00000198033; TAA
EPTVVDEVR

SEQ ID NO: 93305 - protein, 9 aa, Homo sapiens
  misc_feature: Table A; Target 93305; HLA-B*35:01; TUBA3C; ENSG00000198033; TAA
EPTVVDEVR

SEQ ID NO: 93306 - protein, 9 aa, Homo sapiens
  misc_feature: Table A; Target 93306; HLA-B*35:03; TUBA3C; ENSG00000198033; TAA
EPTVVDEVR

SEQ ID NO: 93307 - protein, 9 aa, Homo sapiens
  misc_feature: Table A; Target 93307; HLA-B*55:01; TUBA3C; ENSG00000198033; TAA
EPTVVDEVR

SEQ ID NO: 93308 - protein, 9 aa, Homo sapiens
  misc_feature: Table A; Target 93308; HLA-C*03:03; TUBA3C; ENSG00000198033; TAA
EPTVVDEVR

SEQ ID NO: 93309 - protein, 9 aa, Homo sapiens
  misc_feature: Table A; Target 93309; HLA-C*07:06; TUBA3C; ENSG00000198033; TAA
EPTVVDEVR

SEQ ID NO: 93310 - protein, 8 aa, Homo sapiens
  misc_feature: Table A; Target 93310; HLA-B*51:01; TUBA3C; ENSG00000198033; TAA
EPYNSILT

SEQ ID NO: 93311 - protein, 9 aa, Homo sapiens
  misc_feature: Table A; Target 93311; HLA-A*33:03; TUBA3C; ENSG00000198033; TAA
EPYNSILTT

SEQ ID NO: 93312 - protein, 9 aa, Homo sapiens
  misc_feature: Table A; Target 93312; HLA-B*35:01; TUBA3C; ENSG00000198033; TAA
EPYNSILTT

SEQ ID NO: 93313 - protein, 9 aa, Homo sapiens
  misc_feature: Table A; Target 93313; HLA-B*35:03; TUBA3C; ENSG00000198033; TAA
EPYNSILTT

SEQ ID NO: 93314 - protein, 9 aa, Homo sapiens
  misc_feature: Table A; Target 93314; HLA-B*51:01; TUBA3C; ENSG00000198033; TAA
EPYNSILTT

SEQ ID NO: 93315 - protein, 9 aa, Homo sapiens
  misc_feature: Table A; Target 93315; HLA-B*54:01; TUBA3C; ENSG00000198033; TAA
EPYNSILTT

SEQ ID NO: 93316 - protein, 9 aa, Homo sapiens
  misc_feature: Table A; Target 93316; HLA-B*55:01; TUBA3C; ENSG00000198033; TAA
EPYNSILTT

SEQ ID NO: 93317 - protein, 9 aa, Homo sapiens
  misc_feature: Table A; Target 93317; HLA-B*56:01; TUBA3C; ENSG00000198033; TAA
EPYNSILTT

SEQ ID NO: 93318 - protein, 10 aa, Homo sapiens
  misc_feature: Table A; Target 93318; HLA-A*25:01; TUBA3C; ENSG00000198033; TAA
EPYNSILTTH

SEQ ID NO: 93319 - protein, 10 aa, Homo sapiens
  misc_feature: Table A; Target 93319; HLA-A*26:01; TUBA3C; ENSG00000198033; TAA
EPYNSILTTH

SEQ ID NO: 93320 - protein, 10 aa, Homo sapiens
  misc_feature: Table A; Target 93320; HLA-A*33:01; TUBA3C; ENSG00000198033; TAA
EPYNSILTTH

SEQ ID NO: 93321 - protein, 10 aa, Homo sapiens
  misc_feature: Table A; Target 93321; HLA-A*33:03; TUBA3C; ENSG00000198033; TAA
EPYNSILTTH

SEQ ID NO: 93322 - protein, 10 aa, Homo sapiens
  misc_feature: Table A; Target 93322; HLA-A*68:01; TUBA3C; ENSG00000198033; TAA
EPYNSILTTH

SEQ ID NO: 93323 - protein, 10 aa, Homo sapiens
  misc_feature: Table A; Target 93323; HLA-A*68:02; TUBA3C; ENSG00000198033; TAA
EPYNSILTTH

SEQ ID NO: 93324 - protein, 10 aa, Homo sapiens
  misc_feature: Table A; Target 93324; HLA-B*35:01; TUBA3C; ENSG00000198033; TAA
EPYNSILTTH

SEQ ID NO: 93325 - protein, 10 aa, Homo sapiens
  misc_feature: Table A; Target 93325; HLA-B*51:01; TUBA3C; ENSG00000198033; TAA
EPYNSILTTH

SEQ ID NO: 93326 - protein, 10 aa, Homo sapiens
  misc_feature: Table A; Target 93326; HLA-B*54:01; TUBA3C; ENSG00000198033; TAA
EPYNSILTTH

SEQ ID NO: 93327 - protein, 10 aa, Homo sapiens
  misc_feature: Table A; Target 93327; HLA-B*55:01; TUBA3C; ENSG00000198033; TAA
EPYNSILTTH

SEQ ID NO: 93328 - protein, 10 aa, Homo sapiens
  misc_feature: Table A; Target 93328; HLA-B*56:01; TUBA3C; ENSG00000198033; TAA
EPYNSILTTH

SEQ ID NO: 93329 - protein, 10 aa, Homo sapiens
  misc_feature: Table A; Target 93329; HLA-C*07:06; TUBA3C; ENSG00000198033; TAA
EPYNSILTTH

SEQ ID NO: 93330 - protein, 11 aa, Homo sapiens
  misc_feature: Table A; Target 93330; HLA-A*68:02; TUBA3C; ENSG00000198033; TAA
EPYNSILTTHT

SEQ ID NO: 93331 - protein, 11 aa, Homo sapiens
  misc_feature: Table A; Target 93331; HLA-B*54:01; TUBA3C; ENSG00000198033; TAA
EPYNSILTTHT

SEQ ID NO: 93332 - protein, 8 aa, Homo sapiens
  misc_feature: Table A; Target 93332; HLA-B*13:02; TUBA3C; ENSG00000198033; TAA
EQLSVAEI

SEQ ID NO: 93333 - protein, 8 aa, Homo sapiens
  misc_feature: Table A; Target 93333; HLA-B*38:01; TUBA3C; ENSG00000198033; TAA
EQLSVAEI

SEQ ID NO: 93334 - protein, 8 aa, Homo sapiens
  misc_feature: Table A; Target 93334; HLA-B*39:01; TUBA3C; ENSG00000198033; TAA
EQLSVAEI

SEQ ID NO: 93335 - protein, 8 aa, Homo sapiens
  misc_feature: Table A; Target 93335; HLA-B*51:01; TUBA3C; ENSG00000198033; TAA
EQLSVAEI

SEQ ID NO: 93336 - protein, 8 aa, Homo sapiens
  misc_feature: Table A; Target 93336; HLA-C*04:01; TUBA3C; ENSG00000198033; TAA
EQLSVAEI

SEQ ID NO: 93337 - protein, 8 aa, Homo sapiens
  misc_feature: Table A; Target 93337; HLA-C*07:01; TUBA3C; ENSG00000198033; TAA
EQLSVAEI

SEQ ID NO: 93338 - protein, 8 aa, Homo sapiens
  misc_feature: Table A; Target 93338; HLA-C*07:04; TUBA3C; ENSG00000198033; TAA
EQLSVAEI

SEQ ID NO: 93339 - protein, 10 aa, Homo sapiens
  misc_feature: Table A; Target 93339; HLA-C*04:01; TUBA3C; ENSG00000198033; TAA
EQLSVAEITN

SEQ ID NO: 93340 - protein, 10 aa, Homo sapiens
  misc_feature: Table A; Target 93340; HLA-C*07:01; TUBA3C; ENSG00000198033; TAA
EQLSVAEITN

SEQ ID NO: 93341 - protein, 9 aa, Homo sapiens
  misc_feature: Table A; Target 93341; HLA-B*27:02; TUBA3C; ENSG00000198033; TAA
ERLSVDYGK

SEQ ID NO: 93342 - protein, 9 aa, Homo sapiens
  misc_feature: Table A; Target 93342; HLA-B*27:05; TUBA3C; ENSG00000198033; TAA
ERLSVDYGK

SEQ ID NO: 93343 - protein, 10 aa, Homo sapiens
  misc_feature: Table A; Target 93343; HLA-B*27:02; TUBA3C; ENSG00000198033; TAA
ERLSVDYGKK

SEQ ID NO: 93344 - protein, 8 aa, Homo sapiens
  misc_feature: Table A; Target 93344; HLA-C*07:01; TUBA3C; ENSG00000198033; TAA
ERPTYTNL

SEQ ID NO: 93345 - protein, 8 aa, Homo sapiens
  misc_feature: Table A; Target 93345; HLA-C*07:02; TUBA3C; ENSG00000198033; TAA
ERPTYTNL

SEQ ID NO: 93346 - protein, 10 aa, Homo sapiens
  misc_feature: Table A; Target 93346; HLA-A*31:01; TUBA3C; ENSG00000198033; TAA
ETGAGKHVPR

SEQ ID NO: 93347 - protein, 10 aa, Homo sapiens
  misc_feature: Table A; Target 93347; HLA-A*33:01; TUBA3C; ENSG00000198033; TAA
ETGAGKHVPR

SEQ ID NO: 93348 - protein, 10 aa, Homo sapiens
  misc_feature: Table A; Target 93348; HLA-A*33:03; TUBA3C; ENSG00000198033; TAA
ETGAGKHVPR

SEQ ID NO: 93349 - protein, 10 aa, Homo sapiens
  misc_feature: Table A; Target 93349; HLA-A*68:01; TUBA3C; ENSG00000198033; TAA
ETGAGKHVPR

SEQ ID NO: 93350 - protein, 10 aa, Homo sapiens
  misc_feature: Table A; Target 93350; HLA-A*68:02; TUBA3C; ENSG00000198033; TAA
ETGAGKHVPR

SEQ ID NO: 93351 - protein, 10 aa, Homo sapiens
  misc_feature: Table A; Target 93351; HLA-C*07:06; TUBA3C; ENSG00000198033; TAA
ETGAGKHVPR

SEQ ID NO: 93352 - protein, 8 aa, Homo sapiens
  misc_feature: Table A; Target 93352; HLA-A*31:01; TUBA3C; ENSG00000198033; TAA
EVRTGTYR

SEQ ID NO: 93353 - protein, 8 aa, Homo sapiens
  misc_feature: Table A; Target 93353; HLA-A*33:01; TUBA3C; ENSG00000198033; TAA
EVRTGTYR

SEQ ID NO: 93354 - protein, 8 aa, Homo sapiens
  misc_feature: Table A; Target 93354; HLA-A*33:03; TUBA3C; ENSG00000198033; TAA
EVRTGTYR

SEQ ID NO: 93355 - protein, 8 aa, Homo sapiens
  misc_feature: Table A; Target 93355; HLA-A*68:01; TUBA3C; ENSG00000198033; TAA
EVRTGTYR

SEQ ID NO: 93356 - protein, 8 aa, Homo sapiens
  misc_feature: Table A; Target 93356; HLA-C*07:06; TUBA3C; ENSG00000198033; TAA
EVRTGTYR

SEQ ID NO: 93357 - protein, 10 aa, Homo sapiens
  misc_feature: Table A; Target 93357; HLA-A*25:01; TUBA3C; ENSG00000198033; TAA
EVRTGTYRQL

SEQ ID NO: 93358 - protein, 10 aa, Homo sapiens
  misc_feature: Table A; Target 93358; HLA-A*26:01; TUBA3C; ENSG00000198033; TAA
EVRTGTYRQL

SEQ ID NO: 93359 - protein, 10 aa, Homo sapiens
  misc_feature: Table A; Target 93359; HLA-A*33:01; TUBA3C; ENSG00000198033; TAA
EVRTGTYRQL

SEQ ID NO: 93360 - protein, 10 aa, Homo sapiens
  misc_feature: Table A; Target 93360; HLA-A*33:03; TUBA3C; ENSG00000198033; TAA
EVRTGTYRQL

SEQ ID NO: 93361 - protein, 11 aa, Homo sapiens
  misc_feature: Table A; Target 93361; HLA-B*57:01; TUBA3C; ENSG00000198033; TAA
EVRTGTYRQLF

SEQ ID NO: 93362 - protein, 9 aa, Homo sapiens
  misc_feature: Table A; Target 93362; HLA-A*01:01; TUBA3C; ENSG00000198033; TAA
FAIYPAPQV

SEQ ID NO: 93363 - protein, 9 aa, Homo sapiens
  misc_feature: Table A; Target 93363; HLA-A*02:01; TUBA3C; ENSG00000198033; TAA
FAIYPAPQV

SEQ ID NO: 93364 - protein, 9 aa, Homo sapiens
  misc_feature: Table A; Target 93364; HLA-A*02:03; TUBA3C; ENSG00000198033; TAA
FAIYPAPQV

SEQ ID NO: 93365 - protein, 9 aa, Homo sapiens
  misc_feature: Table A; Target 93365; HLA-A*02:04; TUBA3C; ENSG00000198033; TAA
FAIYPAPQV

SEQ ID NO: 93366 - protein, 9 aa, Homo sapiens
  misc_feature: Table A; Target 93366; HLA-A*02:07; TUBA3C; ENSG00000198033; TAA
FAIYPAPQV

SEQ ID NO: 93367 - protein, 9 aa, Homo sapiens
  misc_feature: Table A; Target 93367; HLA-A*23:01; TUBA3C; ENSG00000198033; TAA
FAIYPAPQV

SEQ ID NO: 93368 - protein, 9 aa, Homo sapiens
  misc_feature: Table A; Target 93368; HLA-A*24:02; TUBA3C; ENSG00000198033; TAA
FAIYPAPQV

SEQ ID NO: 93369 - protein, 9 aa, Homo sapiens
  misc_feature: Table A; Target 93369; HLA-A*25:01; TUBA3C; ENSG00000198033; TAA
FAIYPAPQV

SEQ ID NO: 93370 - protein, 9 aa, Homo sapiens
  misc_feature: Table A; Target 93370; HLA-A*26:01; TUBA3C; ENSG00000198033; TAA
FAIYPAPQV

SEQ ID NO: 93371 - protein, 9 aa, Homo sapiens
  misc_feature: Table A; Target 93371; HLA-A*30:01; TUBA3C; ENSG00000198033; TAA
FAIYPAPQV

SEQ ID NO: 93372 - protein, 9 aa, Homo sapiens
  misc_feature: Table A; Target 93372; HLA-A*32:01; TUBA3C; ENSG00000198033; TAA
FAIYPAPQV

SEQ ID NO: 93373 - protein, 9 aa, Homo sapiens
  misc_feature: Table A; Target 93373; HLA-A*68:01; TUBA3C; ENSG00000198033; TAA
FAIYPAPQV

SEQ ID NO: 93374 - protein, 9 aa, Homo sapiens
  misc_feature: Table A; Target 93374; HLA-A*68:02; TUBA3C; ENSG00000198033; TAA
FAIYPAPQV

SEQ ID NO: 93375 - protein, 9 aa, Homo sapiens
  misc_feature: Table A; Target 93375; HLA-B*07:02; TUBA3C; ENSG00000198033; TAA
FAIYPAPQV

SEQ ID NO: 93376 - protein, 9 aa, Homo sapiens
  misc_feature: Table A; Target 93376; HLA-B*08:01; TUBA3C; ENSG00000198033; TAA
FAIYPAPQV

SEQ ID NO: 93377 - protein, 9 aa, Homo sapiens
  misc_feature: Table A; Target 93377; HLA-B*13:02; TUBA3C; ENSG00000198033; TAA
FAIYPAPQV

SEQ ID NO: 93378 - protein, 9 aa, Homo sapiens
  misc_feature: Table A; Target 93378; HLA-B*15:01; TUBA3C; ENSG00000198033; TAA
FAIYPAPQV

SEQ ID NO: 93379 - protein, 9 aa, Homo sapiens
  misc_feature: Table A; Target 93379; HLA-B*15:03; TUBA3C; ENSG00000198033; TAA
FAIYPAPQV

SEQ ID NO: 93380 - protein, 9 aa, Homo sapiens
  misc_feature: Table A; Target 93380; HLA-B*27:02; TUBA3C; ENSG00000198033; TAA
FAIYPAPQV

SEQ ID NO: 93381 - protein, 9 aa, Homo sapiens
  misc_feature: Table A; Target 93381; HLA-B*27:05; TUBA3C; ENSG00000198033; TAA
FAIYPAPQV

SEQ ID NO: 93382 - protein, 9 aa, Homo sapiens
  misc_feature: Table A; Target 93382; HLA-B*35:01; TUBA3C; ENSG00000198033; TAA
FAIYPAPQV

SEQ ID NO: 93383 - protein, 9 aa, Homo sapiens
  misc_feature: Table A; Target 93383; HLA-B*35:03; TUBA3C; ENSG00000198033; TAA
FAIYPAPQV

SEQ ID NO: 93384 - protein, 9 aa, Homo sapiens
  misc_feature: Table A; Target 93384; HLA-B*38:01; TUBA3C; ENSG00000198033; TAA
FAIYPAPQV

SEQ ID NO: 93385 - protein, 9 aa, Homo sapiens
  misc_feature: Table A; Target 93385; HLA-B*39:01; TUBA3C; ENSG00000198033; TAA
FAIYPAPQV

SEQ ID NO: 93386 - protein, 9 aa, Homo sapiens
  misc_feature: Table A; Target 93386; HLA-B*40:01; TUBA3C; ENSG00000198033; TAA
FAIYPAPQV

SEQ ID NO: 93387 - protein, 9 aa, Homo sapiens
  misc_feature: Table A; Target 93387; HLA-B*40:02; TUBA3C; ENSG00000198033; TAA
FAIYPAPQV

SEQ ID NO: 93388 - protein, 9 aa, Homo sapiens
  misc_feature: Table A; Target 93388; HLA-B*46:01; TUBA3C; ENSG00000198033; TAA
FAIYPAPQV

SEQ ID NO: 93389 - protein, 9 aa, Homo sapiens
  misc_feature: Table A; Target 93389; HLA-B*49:01; TUBA3C; ENSG00000198033; TAA
FAIYPAPQV

SEQ ID NO: 93390 - protein, 9 aa, Homo sapiens
  misc_feature: Table A; Target 93390; HLA-B*51:01; TUBA3C; ENSG00000198033; TAA
FAIYPAPQV

SEQ ID NO: 93391 - protein, 9 aa, Homo sapiens
  misc_feature: Table A; Target 93391; HLA-B*54:01; TUBA3C; ENSG00000198033; TAA
FAIYPAPQV

SEQ ID NO: 93392 - protein, 9 aa, Homo sapiens
  misc_feature: Table A; Target 93392; HLA-B*55:01; TUBA3C; ENSG00000198033; TAA
FAIYPAPQV

SEQ ID NO: 93393 - protein, 9 aa, Homo sapiens
  misc_feature: Table A; Target 93393; HLA-B*56:01; TUBA3C; ENSG00000198033; TAA
FAIYPAPQV

SEQ ID NO: 93394 - protein, 9 aa, Homo sapiens
  misc_feature: Table A; Target 93394; HLA-B*57:01; TUBA3C; ENSG00000198033; TAA
FAIYPAPQV

SEQ ID NO: 93395 - protein, 9 aa, Homo sapiens
  misc_feature: Table A; Target 93395; HLA-B*58:01; TUBA3C; ENSG00000198033; TAA
FAIYPAPQV

SEQ ID NO: 93396 - protein, 9 aa, Homo sapiens
  misc_feature: Table A; Target 93396; HLA-C*01:02; TUBA3C; ENSG00000198033; TAA
FAIYPAPQV

SEQ ID NO: 93397 - protein, 9 aa, Homo sapiens
  misc_feature: Table A; Target 93397; HLA-C*02:02; TUBA3C; ENSG00000198033; TAA
FAIYPAPQV

SEQ ID NO: 93398 - protein, 9 aa, Homo sapiens
  misc_feature: Table A; Target 93398; HLA-C*03:03; TUBA3C; ENSG00000198033; TAA
FAIYPAPQV

SEQ ID NO: 93399 - protein, 9 aa, Homo sapiens
  misc_feature: Table A; Target 93399; HLA-C*03:04; TUBA3C; ENSG00000198033; TAA
FAIYPAPQV

SEQ ID NO: 93400 - protein, 9 aa, Homo sapiens
  misc_feature: Table A; Target 93400; HLA-C*04:01; TUBA3C; ENSG00000198033; TAA
FAIYPAPQV

SEQ ID NO: 93401 - protein, 9 aa, Homo sapiens
  misc_feature: Table A; Target 93401; HLA-C*05:01; TUBA3C; ENSG00000198033; TAA
FAIYPAPQV

SEQ ID NO: 93402 - protein, 9 aa, Homo sapiens
  misc_feature: Table A; Target 93402; HLA-C*06:02; TUBA3C; ENSG00000198033; TAA
FAIYPAPQV

SEQ ID NO: 93403 - protein, 9 aa, Homo sapiens
  misc_feature: Table A; Target 93403; HLA-C*07:01; TUBA3C; ENSG00000198033; TAA
FAIYPAPQV

SEQ ID NO: 93404 - protein, 9 aa, Homo sapiens
  misc_feature: Table A; Target 93404; HLA-C*07:02; TUBA3C; ENSG00000198033; TAA
FAIYPAPQV

SEQ ID NO: 93405 - protein, 9 aa, Homo sapiens
  misc_feature: Table A; Target 93405; HLA-C*07:04; TUBA3C; ENSG00000198033; TAA
FAIYPAPQV

SEQ ID NO: 93406 - protein, 9 aa, Homo sapiens
  misc_feature: Table A; Target 93406; HLA-C*07:06; TUBA3C; ENSG00000198033; TAA
FAIYPAPQV

SEQ ID NO: 93407 - protein, 9 aa, Homo sapiens
  misc_feature: Table A; Target 93407; HLA-C*12:03; TUBA3C; ENSG00000198033; TAA
FAIYPAPQV

SEQ ID NO: 93408 - protein, 9 aa, Homo sapiens
  misc_feature: Table A; Target 93408; HLA-C*14:02; TUBA3C; ENSG00000198033; TAA
FAIYPAPQV

SEQ ID NO: 93409 - protein, 9 aa, Homo sapiens
  misc_feature: Table A; Target 93409; HLA-C*16:01; TUBA3C; ENSG00000198033; TAA
FAIYPAPQV

SEQ ID NO: 93410 - protein, 9 aa, Homo sapiens
  misc_feature: Table A; Target 93410; HLA-C*16:02; TUBA3C; ENSG00000198033; TAA
FAIYPAPQV

SEQ ID NO: 93411 - protein, 9 aa, Homo sapiens
  misc_feature: Table A; Target 93411; HLA-C*16:04; TUBA3C; ENSG00000198033; TAA
FAIYPAPQV

SEQ ID NO: 93412 - protein, 10 aa, Homo sapiens
  misc_feature: Table A; Target 93412; HLA-B*39:01; TUBA3C; ENSG00000198033; TAA
FAIYPAPQVS

SEQ ID NO: 93413 - protein, 10 aa, Homo sapiens
  misc_feature: Table A; Target 93413; HLA-B*54:01; TUBA3C; ENSG00000198033; TAA
FAIYPAPQVS

SEQ ID NO: 93414 - protein, 10 aa, Homo sapiens
  misc_feature: Table A; Target 93414; HLA-C*07:02; TUBA3C; ENSG00000198033; TAA
FAIYPAPQVS

SEQ ID NO: 93415 - protein, 11 aa, Homo sapiens
  misc_feature: Table A; Target 93415; HLA-A*68:02; TUBA3C; ENSG00000198033; TAA
FAIYPAPQVST

SEQ ID NO: 93416 - protein, 11 aa, Homo sapiens
  misc_feature: Table A; Target 93416; HLA-B*54:01; TUBA3C; ENSG00000198033; TAA
FAIYPAPQVST

SEQ ID NO: 93417 - protein, 8 aa, Homo sapiens
  misc_feature: Table A; Target 93417; HLA-A*33:03; TUBA3C; ENSG00000198033; TAA
FASLLMER

SEQ ID NO: 93418 - protein, 8 aa, Homo sapiens
  misc_feature: Table A; Target 93418; HLA-B*54:01; TUBA3C; ENSG00000198033; TAA
FASLLMER

SEQ ID NO: 93419 - protein, 9 aa, Homo sapiens
  misc_feature: Table A; Target 93419; HLA-A*02:01; TUBA3C; ENSG00000198033; TAA
FASLLMERL

SEQ ID NO: 93420 - protein, 9 aa, Homo sapiens
  misc_feature: Table A; Target 93420; HLA-A*02:04; TUBA3C; ENSG00000198033; TAA
FASLLMERL

SEQ ID NO: 93421 - protein, 9 aa, Homo sapiens
  misc_feature: Table A; Target 93421; HLA-A*02:07; TUBA3C; ENSG00000198033; TAA
FASLLMERL

SEQ ID NO: 93422 - protein, 9 aa, Homo sapiens
  misc_feature: Table A; Target 93422; HLA-A*24:02; TUBA3C; ENSG00000198033; TAA
FASLLMERL

SEQ ID NO: 93423 - protein, 9 aa, Homo sapiens
  misc_feature: Table A; Target 93423; HLA-A*68:02; TUBA3C; ENSG00000198033; TAA
FASLLMERL

SEQ ID NO: 93424 - protein, 9 aa, Homo sapiens
  misc_feature: Table A; Target 93424; HLA-B*13:02; TUBA3C; ENSG00000198033; TAA
FASLLMERL

SEQ ID NO: 93425 - protein, 9 aa, Homo sapiens
  misc_feature: Table A; Target 93425; HLA-B*27:05; TUBA3C; ENSG00000198033; TAA
FASLLMERL

SEQ ID NO: 93426 - protein, 9 aa, Homo sapiens
  misc_feature: Table A; Target 93426; HLA-B*35:01; TUBA3C; ENSG00000198033; TAA
FASLLMERL

SEQ ID NO: 93427 - protein, 9 aa, Homo sapiens
  misc_feature: Table A; Target 93427; HLA-B*35:03; TUBA3C; ENSG00000198033; TAA
FASLLMERL

SEQ ID NO: 93428 - protein, 9 aa, Homo sapiens
  misc_feature: Table A; Target 93428; HLA-B*38:01; TUBA3C; ENSG00000198033; TAA
FASLLMERL

SEQ ID NO: 93429 - protein, 9 aa, Homo sapiens
  misc_feature: Table A; Target 93429; HLA-B*54:01; TUBA3C; ENSG00000198033; TAA
FASLLMERL

SEQ ID NO: 93430 - protein, 9 aa, Homo sapiens
  misc_feature: Table A; Target 93430; HLA-C*02:02; TUBA3C; ENSG00000198033; TAA
FASLLMERL

SEQ ID NO: 93431 - protein, 9 aa, Homo sapiens
  misc_feature: Table A; Target 93431; HLA-C*04:01; TUBA3C; ENSG00000198033; TAA
FASLLMERL

SEQ ID NO: 93432 - protein, 9 aa, Homo sapiens
  misc_feature: Table A; Target 93432; HLA-C*06:02; TUBA3C; ENSG00000198033; TAA
FASLLMERL

SEQ ID NO: 93433 - protein, 9 aa, Homo sapiens
  misc_feature: Table A; Target 93433; HLA-C*07:01; TUBA3C; ENSG00000198033; TAA
FASLLMERL

SEQ ID NO: 93434 - protein, 9 aa, Homo sapiens
  misc_feature: Table A; Target 93434; HLA-C*07:02; TUBA3C; ENSG00000198033; TAA
FASLLMERL

SEQ ID NO: 93435 - protein, 9 aa, Homo sapiens
  misc_feature: Table A; Target 93435; HLA-C*12:03; TUBA3C; ENSG00000198033; TAA
FASLLMERL

SEQ ID NO: 93436 - protein, 9 aa, Homo sapiens
  misc_feature: Table A; Target 93436; HLA-C*16:04; TUBA3C; ENSG00000198033; TAA
FASLLMERL

SEQ ID NO: 93437 - protein, 9 aa, Homo sapiens
  misc_feature: Table A; Target 93437; HLA-A*30:01; TUBA3C; ENSG00000198033; TAA
FDGALNVDL

SEQ ID NO: 93438 - protein, 9 aa, Homo sapiens
  misc_feature: Table A; Target 93438; HLA-B*35:03; TUBA3C; ENSG00000198033; TAA
FDGALNVDL

SEQ ID NO: 93439 - protein, 9 aa, Homo sapiens
  misc_feature: Table A; Target 93439; HLA-B*38:01; TUBA3C; ENSG00000198033; TAA
FDGALNVDL

SEQ ID NO: 93440 - protein, 9 aa, Homo sapiens
  misc_feature: Table A; Target 93440; HLA-B*40:01; TUBA3C; ENSG00000198033; TAA
FDGALNVDL

SEQ ID NO: 93441 - protein, 9 aa, Homo sapiens
  misc_feature: Table A; Target 93441; HLA-B*40:02; TUBA3C; ENSG00000198033; TAA
FDGALNVDL

SEQ ID NO: 93442 - protein, 9 aa, Homo sapiens
  misc_feature: Table A; Target 93442; HLA-C*06:02; TUBA3C; ENSG00000198033; TAA
FDGALNVDL

SEQ ID NO: 93443 - protein, 9 aa, Homo sapiens
  misc_feature: Table A; Target 93443; HLA-C*07:01; TUBA3C; ENSG00000198033; TAA
FDGALNVDL

SEQ ID NO: 93444 - protein, 9 aa, Homo sapiens
  misc_feature: Table A; Target 93444; HLA-C*07:02; TUBA3C; ENSG00000198033; TAA
FDGALNVDL

SEQ ID NO: 93445 - protein, 9 aa, Homo sapiens
  misc_feature: Table A; Target 93445; HLA-C*07:04; TUBA3C; ENSG00000198033; TAA
FDGALNVDL

SEQ ID NO: 93446 - protein, 9 aa, Homo sapiens
  misc_feature: Table A; Target 93446; HLA-C*12:03; TUBA3C; ENSG00000198033; TAA
FDGALNVDL

SEQ ID NO: 93447 - protein, 8 aa, Homo sapiens
  misc_feature: Table A; Target 93447; HLA-B*13:02; TUBA3C; ENSG00000198033; TAA
FEPANQMV

SEQ ID NO: 93448 - protein, 8 aa, Homo sapiens
  misc_feature: Table A; Target 93448; HLA-B*39:01; TUBA3C; ENSG00000198033; TAA
FEPANQMV

SEQ ID NO: 93449 - protein, 8 aa, Homo sapiens
  misc_feature: Table A; Target 93449; HLA-B*40:02; TUBA3C; ENSG00000198033; TAA
FEPANQMV

SEQ ID NO: 93450 - protein, 8 aa, Homo sapiens
  misc_feature: Table A; Target 93450; HLA-B*49:01; TUBA3C; ENSG00000198033; TAA
FEPANQMV

SEQ ID NO: 93451 - protein, 8 aa, Homo sapiens
  misc_feature: Table A; Target 93451; HLA-B*51:01; TUBA3C; ENSG00000198033; TAA
FEPANQMV

SEQ ID NO: 93452 - protein, 8 aa, Homo sapiens
  misc_feature: Table A; Target 93452; HLA-C*04:01; TUBA3C; ENSG00000198033; TAA
FEPANQMV

SEQ ID NO: 93453 - protein, 8 aa, Homo sapiens
  misc_feature: Table A; Target 93453; HLA-C*06:02; TUBA3C; ENSG00000198033; TAA
FEPANQMV

SEQ ID NO: 93454 - protein, 8 aa, Homo sapiens
  misc_feature: Table A; Target 93454; HLA-C*07:01; TUBA3C; ENSG00000198033; TAA
FEPANQMV

SEQ ID NO: 93455 - protein, 8 aa, Homo sapiens
  misc_feature: Table A; Target 93455; HLA-C*07:02; TUBA3C; ENSG00000198033; TAA
FEPANQMV

SEQ ID NO: 93456 - protein, 9 aa, Homo sapiens
  misc_feature: Table A; Target 93456; HLA-A*03:01; TUBA3C; ENSG00000198033; TAA
FEPANQMVK

SEQ ID NO: 93457 - protein, 9 aa, Homo sapiens
  misc_feature: Table A; Target 93457; HLA-A*11:01; TUBA3C; ENSG00000198033; TAA
FEPANQMVK

SEQ ID NO: 93458 - protein, 9 aa, Homo sapiens
  misc_feature: Table A; Target 93458; HLA-B*27:02; TUBA3C; ENSG00000198033; TAA
FEPANQMVK

SEQ ID NO: 93459 - protein, 9 aa, Homo sapiens
  misc_feature: Table A; Target 93459; HLA-B*27:05; TUBA3C; ENSG00000198033; TAA
FEPANQMVK

SEQ ID NO: 93460 - protein, 9 aa, Homo sapiens
  misc_feature: Table A; Target 93460; HLA-B*40:01; TUBA3C; ENSG00000198033; TAA
FEPANQMVK

SEQ ID NO: 93461 - protein, 9 aa, Homo sapiens
  misc_feature: Table A; Target 93461; HLA-B*40:02; TUBA3C; ENSG00000198033; TAA
FEPANQMVK

SEQ ID NO: 93462 - protein, 9 aa, Homo sapiens
  misc_feature: Table A; Target 93462; HLA-B*49:01; TUBA3C; ENSG00000198033; TAA
FEPANQMVK

SEQ ID NO: 93463 - protein, 9 aa, Homo sapiens
  misc_feature: Table A; Target 93463; HLA-B*54:01; TUBA3C; ENSG00000198033; TAA
FEPANQMVK

SEQ ID NO: 93464 - protein, 9 aa, Homo sapiens
  misc_feature: Table A; Target 93464; HLA-C*02:02; TUBA3C; ENSG00000198033; TAA
FEPANQMVK

SEQ ID NO: 93465 - protein, 9 aa, Homo sapiens
  misc_feature: Table A; Target 93465; HLA-C*04:01; TUBA3C; ENSG00000198033; TAA
FEPANQMVK

SEQ ID NO: 93466 - protein, 9 aa, Homo sapiens
  misc_feature: Table A; Target 93466; HLA-C*06:02; TUBA3C; ENSG00000198033; TAA
FEPANQMVK

SEQ ID NO: 93467 - protein, 9 aa, Homo sapiens
  misc_feature: Table A; Target 93467; HLA-C*07:01; TUBA3C; ENSG00000198033; TAA
FEPANQMVK

SEQ ID NO: 93468 - protein, 9 aa, Homo sapiens
  misc_feature: Table A; Target 93468; HLA-C*07:02; TUBA3C; ENSG00000198033; TAA
FEPANQMVK

SEQ ID NO: 93469 - protein, 9 aa, Homo sapiens
  misc_feature: Table A; Target 93469; HLA-C*07:04; TUBA3C; ENSG00000198033; TAA
FEPANQMVK

SEQ ID NO: 93470 - protein, 9 aa, Homo sapiens
  misc_feature: Table A; Target 93470; HLA-C*07:06; TUBA3C; ENSG00000198033; TAA
FEPANQMVK

SEQ ID NO: 93471 - protein, 9 aa, Homo sapiens
  misc_feature: Table A; Target 93471; HLA-C*12:03; TUBA3C; ENSG00000198033; TAA
FEPANQMVK

SEQ ID NO: 93472 - protein, 10 aa, Homo sapiens
  misc_feature: Table A; Target 93472; HLA-A*30:01; TUBA3C; ENSG00000198033; TAA
FEPANQMVKC

SEQ ID NO: 93473 - protein, 10 aa, Homo sapiens
  misc_feature: Table A; Target 93473; HLA-B*40:02; TUBA3C; ENSG00000198033; TAA
FEPANQMVKC

SEQ ID NO: 93474 - protein, 10 aa, Homo sapiens
  misc_feature: Table A; Target 93474; HLA-B*49:01; TUBA3C; ENSG00000198033; TAA
FEPANQMVKC

SEQ ID NO: 93475 - protein, 8 aa, Homo sapiens
  misc_feature: Table A; Target 93475; HLA-C*04:01; TUBA3C; ENSG00000198033; TAA
FFSETGAG

SEQ ID NO: 93476 - protein, 9 aa, Homo sapiens
  misc_feature: Table A; Target 93476; HLA-A*29:02; TUBA3C; ENSG00000198033; TAA
FFSETGAGK

SEQ ID NO: 93477 - protein, 9 aa, Homo sapiens
  misc_feature: Table A; Target 93477; HLA-A*33:03; TUBA3C; ENSG00000198033; TAA
FFSETGAGK

SEQ ID NO: 93478 - protein, 9 aa, Homo sapiens
  misc_feature: Table A; Target 93478; HLA-B*27:05; TUBA3C; ENSG00000198033; TAA
FFSETGAGK

SEQ ID NO: 93479 - protein, 9 aa, Homo sapiens
  misc_feature: Table A; Target 93479; HLA-C*04:01; TUBA3C; ENSG00000198033; TAA
FFSETGAGK

SEQ ID NO: 93480 - protein, 9 aa, Homo sapiens
  misc_feature: Table A; Target 93480; HLA-C*14:02; TUBA3C; ENSG00000198033; TAA
FFSETGAGK

SEQ ID NO: 93481 - protein, 11 aa, Homo sapiens
  misc_feature: Table A; Target 93481; HLA-C*04:01; TUBA3C; ENSG00000198033; TAA
FFSETGAGKHV

SEQ ID NO: 93482 - protein, 8 aa, Homo sapiens
  misc_feature: Table A; Target 93482; HLA-C*04:01; TUBA3C; ENSG00000198033; TAA
FGGGTGSG

SEQ ID NO: 93483 - protein, 8 aa, Homo sapiens
  misc_feature: Table A; Target 93483; HLA-C*06:02; TUBA3C; ENSG00000198033; TAA
FGGGTGSG

SEQ ID NO: 93484 - protein, 8 aa, Homo sapiens
  misc_feature: Table A; Target 93484; HLA-C*07:01; TUBA3C; ENSG00000198033; TAA
FGGGTGSG

SEQ ID NO: 93485 - protein, 8 aa, Homo sapiens
  misc_feature: Table A; Target 93485; HLA-C*07:02; TUBA3C; ENSG00000198033; TAA
FGGGTGSG

SEQ ID NO: 93486 - protein, 8 aa, Homo sapiens
  misc_feature: Table A; Target 93486; HLA-C*12:03; TUBA3C; ENSG00000198033; TAA
FGGGTGSG

SEQ ID NO: 93487 - protein, 9 aa, Homo sapiens
  misc_feature: Table A; Target 93487; HLA-A*01:01; TUBA3C; ENSG00000198033; TAA
FGGGTGSGF

SEQ ID NO: 93488 - protein, 9 aa, Homo sapiens
  misc_feature: Table A; Target 93488; HLA-A*23:01; TUBA3C; ENSG00000198033; TAA
FGGGTGSGF

SEQ ID NO: 93489 - protein, 9 aa, Homo sapiens
  misc_feature: Table A; Target 93489; HLA-A*25:01; TUBA3C; ENSG00000198033; TAA
FGGGTGSGF

SEQ ID NO: 93490 - protein, 9 aa, Homo sapiens
  misc_feature: Table A; Target 93490; HLA-A*26:01; TUBA3C; ENSG00000198033; TAA
FGGGTGSGF

SEQ ID NO: 93491 - protein, 9 aa, Homo sapiens
  misc_feature: Table A; Target 93491; HLA-A*29:02; TUBA3C; ENSG00000198033; TAA
FGGGTGSGF

SEQ ID NO: 93492 - protein, 9 aa, Homo sapiens
  misc_feature: Table A; Target 93492; HLA-A*30:02; TUBA3C; ENSG00000198033; TAA
FGGGTGSGF

SEQ ID NO: 93493 - protein, 9 aa, Homo sapiens
  misc_feature: Table A; Target 93493; HLA-A*32:01; TUBA3C; ENSG00000198033; TAA
FGGGTGSGF

SEQ ID NO: 93494 - protein, 9 aa, Homo sapiens
  misc_feature: Table A; Target 93494; HLA-B*07:02; TUBA3C; ENSG00000198033; TAA
FGGGTGSGF

SEQ ID NO: 93495 - protein, 9 aa, Homo sapiens
  misc_feature: Table A; Target 93495; HLA-B*15:01; TUBA3C; ENSG00000198033; TAA
FGGGTGSGF

SEQ ID NO: 93496 - protein, 9 aa, Homo sapiens
  misc_feature: Table A; Target 93496; HLA-B*15:03; TUBA3C; ENSG00000198033; TAA
FGGGTGSGF

SEQ ID NO: 93497 - protein, 9 aa, Homo sapiens
  misc_feature: Table A; Target 93497; HLA-B*27:02; TUBA3C; ENSG00000198033; TAA
FGGGTGSGF

SEQ ID NO: 93498 - protein, 9 aa, Homo sapiens
  misc_feature: Table A; Target 93498; HLA-B*27:05; TUBA3C; ENSG00000198033; TAA
FGGGTGSGF

SEQ ID NO: 93499 - protein, 9 aa, Homo sapiens
  misc_feature: Table A; Target 93499; HLA-B*35:01; TUBA3C; ENSG00000198033; TAA
FGGGTGSGF

SEQ ID NO: 93500 - protein, 9 aa, Homo sapiens
  misc_feature: Table A; Target 93500; HLA-B*35:03; TUBA3C; ENSG00000198033; TAA
FGGGTGSGF

SEQ ID NO: 93501 - protein, 9 aa, Homo sapiens
  misc_feature: Table A; Target 93501; HLA-B*38:01; TUBA3C; ENSG00000198033; TAA
FGGGTGSGF

SEQ ID NO: 93502 - protein, 9 aa, Homo sapiens
  misc_feature: Table A; Target 93502; HLA-B*39:01; TUBA3C; ENSG00000198033; TAA
FGGGTGSGF

SEQ ID NO: 93503 - protein, 9 aa, Homo sapiens
  misc_feature: Table A; Target 93503; HLA-B*40:02; TUBA3C; ENSG00000198033; TAA
FGGGTGSGF

SEQ ID NO: 93504 - protein, 9 aa, Homo sapiens
  misc_feature: Table A; Target 93504; HLA-B*46:01; TUBA3C; ENSG00000198033; TAA
FGGGTGSGF

SEQ ID NO: 93505 - protein, 9 aa, Homo sapiens
  misc_feature: Table A; Target 93505; HLA-B*55:01; TUBA3C; ENSG00000198033; TAA
FGGGTGSGF

SEQ ID NO: 93506 - protein, 9 aa, Homo sapiens
  misc_feature: Table A; Target 93506; HLA-B*58:01; TUBA3C; ENSG00000198033; TAA
FGGGTGSGF

SEQ ID NO: 93507 - protein, 9 aa, Homo sapiens
  misc_feature: Table A; Target 93507; HLA-C*01:02; TUBA3C; ENSG00000198033; TAA
FGGGTGSGF

SEQ ID NO: 93508 - protein, 9 aa, Homo sapiens
  misc_feature: Table A; Target 93508; HLA-C*02:02; TUBA3C; ENSG00000198033; TAA
FGGGTGSGF

SEQ ID NO: 93509 - protein, 9 aa, Homo sapiens
  misc_feature: Table A; Target 93509; HLA-C*03:03; TUBA3C; ENSG00000198033; TAA
FGGGTGSGF

SEQ ID NO: 93510 - protein, 9 aa, Homo sapiens
  misc_feature: Table A; Target 93510; HLA-C*03:04; TUBA3C; ENSG00000198033; TAA
FGGGTGSGF

SEQ ID NO: 93511 - protein, 9 aa, Homo sapiens
  misc_feature: Table A; Target 93511; HLA-C*04:01; TUBA3C; ENSG00000198033; TAA
FGGGTGSGF

SEQ ID NO: 93512 - protein, 9 aa, Homo sapiens
  misc_feature: Table A; Target 93512; HLA-C*05:01; TUBA3C; ENSG00000198033; TAA
FGGGTGSGF

SEQ ID NO: 93513 - protein, 9 aa, Homo sapiens
  misc_feature: Table A; Target 93513; HLA-C*06:02; TUBA3C; ENSG00000198033; TAA
FGGGTGSGF

SEQ ID NO: 93514 - protein, 9 aa, Homo sapiens
  misc_feature: Table A; Target 93514; HLA-C*07:01; TUBA3C; ENSG00000198033; TAA
FGGGTGSGF

SEQ ID NO: 93515 - protein, 9 aa, Homo sapiens
  misc_feature: Table A; Target 93515; HLA-C*07:02; TUBA3C; ENSG00000198033; TAA
FGGGTGSGF

SEQ ID NO: 93516 - protein, 9 aa, Homo sapiens
  misc_feature: Table A; Target 93516; HLA-C*07:04; TUBA3C; ENSG00000198033; TAA
FGGGTGSGF

SEQ ID NO: 93517 - protein, 9 aa, Homo sapiens
  misc_feature: Table A; Target 93517; HLA-C*12:03; TUBA3C; ENSG00000198033; TAA
FGGGTGSGF

SEQ ID NO: 93518 - protein, 9 aa, Homo sapiens
  misc_feature: Table A; Target 93518; HLA-C*14:02; TUBA3C; ENSG00000198033; TAA
FGGGTGSGF

SEQ ID NO: 93519 - protein, 9 aa, Homo sapiens
  misc_feature: Table A; Target 93519; HLA-C*16:01; TUBA3C; ENSG00000198033; TAA
FGGGTGSGF

SEQ ID NO: 93520 - protein, 9 aa, Homo sapiens
  misc_feature: Table A; Target 93520; HLA-C*16:02; TUBA3C; ENSG00000198033; TAA
FGGGTGSGF

SEQ ID NO: 93521 - protein, 9 aa, Homo sapiens
  misc_feature: Table A; Target 93521; HLA-C*16:04; TUBA3C; ENSG00000198033; TAA
FGGGTGSGF

SEQ ID NO: 93522 - protein, 10 aa, Homo sapiens
  misc_feature: Table A; Target 93522; HLA-B*27:05; TUBA3C; ENSG00000198033; TAA
FGGGTGSGFA

SEQ ID NO: 93523 - protein, 10 aa, Homo sapiens
  misc_feature: Table A; Target 93523; HLA-C*04:01; TUBA3C; ENSG00000198033; TAA
FGGGTGSGFA

SEQ ID NO: 93524 - protein, 10 aa, Homo sapiens
  misc_feature: Table A; Target 93524; HLA-C*06:02; TUBA3C; ENSG00000198033; TAA
FGGGTGSGFA

SEQ ID NO: 93525 - protein, 10 aa, Homo sapiens
  misc_feature: Table A; Target 93525; HLA-C*07:01; TUBA3C; ENSG00000198033; TAA
FGGGTGSGFA

SEQ ID NO: 93526 - protein, 10 aa, Homo sapiens
  misc_feature: Table A; Target 93526; HLA-C*07:02; TUBA3C; ENSG00000198033; TAA
FGGGTGSGFA

SEQ ID NO: 93527 - protein, 11 aa, Homo sapiens
  misc_feature: Table A; Target 93527; HLA-B*07:02; TUBA3C; ENSG00000198033; TAA
FGGGTGSGFAS

SEQ ID NO: 93528 - protein, 11 aa, Homo sapiens
  misc_feature: Table A; Target 93528; HLA-B*27:02; TUBA3C; ENSG00000198033; TAA
FGGGTGSGFAS

SEQ ID NO: 93529 - protein, 11 aa, Homo sapiens
  misc_feature: Table A; Target 93529; HLA-B*27:05; TUBA3C; ENSG00000198033; TAA
FGGGTGSGFAS

SEQ ID NO: 93530 - protein, 11 aa, Homo sapiens
  misc_feature: Table A; Target 93530; HLA-C*01:02; TUBA3C; ENSG00000198033; TAA
FGGGTGSGFAS

SEQ ID NO: 93531 - protein, 11 aa, Homo sapiens
  misc_feature: Table A; Target 93531; HLA-C*03:03; TUBA3C; ENSG00000198033; TAA
FGGGTGSGFAS

SEQ ID NO: 93532 - protein, 11 aa, Homo sapiens
  misc_feature: Table A; Target 93532; HLA-C*04:01; TUBA3C; ENSG00000198033; TAA
FGGGTGSGFAS

SEQ ID NO: 93533 - protein, 11 aa, Homo sapiens
  misc_feature: Table A; Target 93533; HLA-C*06:02; TUBA3C; ENSG00000198033; TAA
FGGGTGSGFAS

SEQ ID NO: 93534 - protein, 11 aa, Homo sapiens
  misc_feature: Table A; Target 93534; HLA-C*07:01; TUBA3C; ENSG00000198033; TAA
FGGGTGSGFAS

SEQ ID NO: 93535 - protein, 11 aa, Homo sapiens
  misc_feature: Table A; Target 93535; HLA-C*07:02; TUBA3C; ENSG00000198033; TAA
FGGGTGSGFAS

SEQ ID NO: 93536 - protein, 11 aa, Homo sapiens
  misc_feature: Table A; Target 93536; HLA-C*07:04; TUBA3C; ENSG00000198033; TAA
FGGGTGSGFAS

SEQ ID NO: 93537 - protein, 11 aa, Homo sapiens
  misc_feature: Table A; Target 93537; HLA-C*12:03; TUBA3C; ENSG00000198033; TAA
FGGGTGSGFAS

SEQ ID NO: 93538 - protein, 11 aa, Homo sapiens
  misc_feature: Table A; Target 93538; HLA-C*14:02; TUBA3C; ENSG00000198033; TAA
FGGGTGSGFAS

SEQ ID NO: 93539 - protein, 9 aa, Homo sapiens
  misc_feature: Table A; Target 93539; HLA-C*07:01; TUBA3C; ENSG00000198033; TAA
FHPEQLITG

SEQ ID NO: 93540 - protein, 9 aa, Homo sapiens
  misc_feature: Table A; Target 93540; HLA-C*07:02; TUBA3C; ENSG00000198033; TAA
FHPEQLITG

SEQ ID NO: 93541 - protein, 10 aa, Homo sapiens
  misc_feature: Table A; Target 93541; HLA-A*68:02; TUBA3C; ENSG00000198033; TAA
FHPEQLITGK

SEQ ID NO: 93542 - protein, 10 aa, Homo sapiens
  misc_feature: Table A; Target 93542; HLA-B*07:02; TUBA3C; ENSG00000198033; TAA
FHPEQLITGK

SEQ ID NO: 93543 - protein, 10 aa, Homo sapiens
  misc_feature: Table A; Target 93543; HLA-B*27:02; TUBA3C; ENSG00000198033; TAA
FHPEQLITGK

SEQ ID NO: 93544 - protein, 10 aa, Homo sapiens
  misc_feature: Table A; Target 93544; HLA-B*27:05; TUBA3C; ENSG00000198033; TAA
FHPEQLITGK

SEQ ID NO: 93545 - protein, 10 aa, Homo sapiens
  misc_feature: Table A; Target 93545; HLA-C*06:02; TUBA3C; ENSG00000198033; TAA
FHPEQLITGK

SEQ ID NO: 93546 - protein, 10 aa, Homo sapiens
  misc_feature: Table A; Target 93546; HLA-C*07:01; TUBA3C; ENSG00000198033; TAA
FHPEQLITGK

SEQ ID NO: 93547 - protein, 10 aa, Homo sapiens
  misc_feature: Table A; Target 93547; HLA-C*07:02; TUBA3C; ENSG00000198033; TAA
FHPEQLITGK

SEQ ID NO: 93548 - protein, 9 aa, Homo sapiens
  misc_feature: Table A; Target 93548; HLA-B*38:01; TUBA3C; ENSG00000198033; TAA
FHSFGGGTG

SEQ ID NO: 93549 - protein, 9 aa, Homo sapiens
  misc_feature: Table A; Target 93549; HLA-B*39:01; TUBA3C; ENSG00000198033; TAA
FHSFGGGTG

SEQ ID NO: 93550 - protein, 10 aa, Homo sapiens
  misc_feature: Table A; Target 93550; HLA-B*39:01; TUBA3C; ENSG00000198033; TAA
FHSFGGGTGS

SEQ ID NO: 93551 - protein, 11 aa, Homo sapiens
  misc_feature: Table A; Target 93551; HLA-B*39:01; TUBA3C; ENSG00000198033; TAA
FHSFGGGTGSG

SEQ ID NO: 93552 - protein, 8 aa, Homo sapiens
  misc_feature: Table A; Target 93552; HLA-B*39:01; TUBA3C; ENSG00000198033; TAA
FMVDNEAI

SEQ ID NO: 93553 - protein, 8 aa, Homo sapiens
  misc_feature: Table A; Target 93553; HLA-B*46:01; TUBA3C; ENSG00000198033; TAA
FMVDNEAI

SEQ ID NO: 93554 - protein, 8 aa, Homo sapiens
  misc_feature: Table A; Target 93554; HLA-B*55:01; TUBA3C; ENSG00000198033; TAA
FMVDNEAI

SEQ ID NO: 93555 - protein, 9 aa, Homo sapiens
  misc_feature: Table A; Target 93555; HLA-A*01:01; TUBA3C; ENSG00000198033; TAA
FMVDNEAIY

SEQ ID NO: 93556 - protein, 9 aa, Homo sapiens
  misc_feature: Table A; Target 93556; HLA-A*25:01; TUBA3C; ENSG00000198033; TAA
FMVDNEAIY

SEQ ID NO: 93557 - protein, 9 aa, Homo sapiens
  misc_feature: Table A; Target 93557; HLA-A*26:01; TUBA3C; ENSG00000198033; TAA
FMVDNEAIY

SEQ ID NO: 93558 - protein, 9 aa, Homo sapiens
  misc_feature: Table A; Target 93558; HLA-A*29:02; TUBA3C; ENSG00000198033; TAA
FMVDNEAIY

SEQ ID NO: 93559 - protein, 9 aa, Homo sapiens
  misc_feature: Table A; Target 93559; HLA-A*30:02; TUBA3C; ENSG00000198033; TAA
FMVDNEAIY

SEQ ID NO: 93560 - protein, 9 aa, Homo sapiens
  misc_feature: Table A; Target 93560; HLA-B*15:01; TUBA3C; ENSG00000198033; TAA
FMVDNEAIY

SEQ ID NO: 93561 - protein, 9 aa, Homo sapiens
  misc_feature: Table A; Target 93561; HLA-B*15:03; TUBA3C; ENSG00000198033; TAA
FMVDNEAIY

SEQ ID NO: 93562 - protein, 9 aa, Homo sapiens
  misc_feature: Table A; Target 93562; HLA-B*35:01; TUBA3C; ENSG00000198033; TAA
FMVDNEAIY

SEQ ID NO: 93563 - protein, 9 aa, Homo sapiens
  misc_feature: Table A; Target 93563; HLA-B*39:01; TUBA3C; ENSG00000198033; TAA
FMVDNEAIY

SEQ ID NO: 93564 - protein, 9 aa, Homo sapiens
  misc_feature: Table A; Target 93564; HLA-B*46:01; TUBA3C; ENSG00000198033; TAA
FMVDNEAIY

SEQ ID NO: 93565 - protein, 9 aa, Homo sapiens
  misc_feature: Table A; Target 93565; HLA-B*55:01; TUBA3C; ENSG00000198033; TAA
FMVDNEAIY

SEQ ID NO: 93566 - protein, 9 aa, Homo sapiens
  misc_feature: Table A; Target 93566; HLA-C*02:02; TUBA3C; ENSG00000198033; TAA
FMVDNEAIY

SEQ ID NO: 93567 - protein, 9 aa, Homo sapiens
  misc_feature: Table A; Target 93567; HLA-C*03:03; TUBA3C; ENSG00000198033; TAA
FMVDNEAIY

SEQ ID NO: 93568 - protein, 9 aa, Homo sapiens
  misc_feature: Table A; Target 93568; HLA-C*07:01; TUBA3C; ENSG00000198033; TAA
FMVDNEAIY

SEQ ID NO: 93569 - protein, 9 aa, Homo sapiens
  misc_feature: Table A; Target 93569; HLA-C*07:04; TUBA3C; ENSG00000198033; TAA
FMVDNEAIY

SEQ ID NO: 93570 - protein, 9 aa, Homo sapiens
  misc_feature: Table A; Target 93570; HLA-C*12:03; TUBA3C; ENSG00000198033; TAA
FMVDNEAIY

SEQ ID NO: 93571 - protein, 9 aa, Homo sapiens
  misc_feature: Table A; Target 93571; HLA-C*14:02; TUBA3C; ENSG00000198033; TAA
FMVDNEAIY

SEQ ID NO: 93572 - protein, 9 aa, Homo sapiens
  misc_feature: Table A; Target 93572; HLA-C*16:01; TUBA3C; ENSG00000198033; TAA
FMVDNEAIY

SEQ ID NO: 93573 - protein, 11 aa, Homo sapiens
  misc_feature: Table A; Target 93573; HLA-A*02:01; TUBA3C; ENSG00000198033; TAA
FMVDNEAIYDI

SEQ ID NO: 93574 - protein, 11 aa, Homo sapiens
  misc_feature: Table A; Target 93574; HLA-A*02:04; TUBA3C; ENSG00000198033; TAA
FMVDNEAIYDI

SEQ ID NO: 93575 - protein, 11 aa, Homo sapiens
  misc_feature: Table A; Target 93575; HLA-A*02:07; TUBA3C; ENSG00000198033; TAA
FMVDNEAIYDI

SEQ ID NO: 93576 - protein, 11 aa, Homo sapiens
  misc_feature: Table A; Target 93576; HLA-A*68:02; TUBA3C; ENSG00000198033; TAA
FMVDNEAIYDI

SEQ ID NO: 93577 - protein, 8 aa, Homo sapiens
  misc_feature: Table A; Target 93577; HLA-B*54:01; TUBA3C; ENSG00000198033; TAA
FPLATYAP

SEQ ID NO: 93578 - protein, 8 aa, Homo sapiens
  misc_feature: Table A; Target 93578; HLA-B*56:01; TUBA3C; ENSG00000198033; TAA
FPLATYAP

SEQ ID NO: 93579 - protein, 9 aa, Homo sapiens
  misc_feature: Table A; Target 93579; HLA-B*35:01; TUBA3C; ENSG00000198033; TAA
FPLATYAPV

SEQ ID NO: 93580 - protein, 9 aa, Homo sapiens
  misc_feature: Table A; Target 93580; HLA-B*35:03; TUBA3C; ENSG00000198033; TAA
FPLATYAPV

SEQ ID NO: 93581 - protein, 9 aa, Homo sapiens
  misc_feature: Table A; Target 93581; HLA-B*51:01; TUBA3C; ENSG00000198033; TAA
FPLATYAPV

SEQ ID NO: 93582 - protein, 9 aa, Homo sapiens
  misc_feature: Table A; Target 93582; HLA-B*54:01; TUBA3C; ENSG00000198033; TAA
FPLATYAPV

SEQ ID NO: 93583 - protein, 9 aa, Homo sapiens
  misc_feature: Table A; Target 93583; HLA-B*56:01; TUBA3C; ENSG00000198033; TAA
FPLATYAPV

SEQ ID NO: 93584 - protein, 9 aa, Homo sapiens
  misc_feature: Table A; Target 93584; HLA-C*04:01; TUBA3C; ENSG00000198033; TAA
FPLATYAPV

SEQ ID NO: 93585 - protein, 10 aa, Homo sapiens
  misc_feature: Table A; Target 93585; HLA-A*23:01; TUBA3C; ENSG00000198033; TAA
FPLATYAPVI

SEQ ID NO: 93586 - protein, 10 aa, Homo sapiens
  misc_feature: Table A; Target 93586; HLA-A*68:02; TUBA3C; ENSG00000198033; TAA
FPLATYAPVI

SEQ ID NO: 93587 - protein, 10 aa, Homo sapiens
  misc_feature: Table A; Target 93587; HLA-B*07:02; TUBA3C; ENSG00000198033; TAA
FPLATYAPVI

SEQ ID NO: 93588 - protein, 10 aa, Homo sapiens
  misc_feature: Table A; Target 93588; HLA-B*35:01; TUBA3C; ENSG00000198033; TAA
FPLATYAPVI

SEQ ID NO: 93589 - protein, 10 aa, Homo sapiens
  misc_feature: Table A; Target 93589; HLA-B*35:03; TUBA3C; ENSG00000198033; TAA
FPLATYAPVI

SEQ ID NO: 93590 - protein, 10 aa, Homo sapiens
  misc_feature: Table A; Target 93590; HLA-B*51:01; TUBA3C; ENSG00000198033; TAA
FPLATYAPVI

SEQ ID NO: 93591 - protein, 10 aa, Homo sapiens
  misc_feature: Table A; Target 93591; HLA-B*54:01; TUBA3C; ENSG00000198033; TAA
FPLATYAPVI

SEQ ID NO: 93592 - protein, 10 aa, Homo sapiens
  misc_feature: Table A; Target 93592; HLA-B*55:01; TUBA3C; ENSG00000198033; TAA
FPLATYAPVI

SEQ ID NO: 93593 - protein, 10 aa, Homo sapiens
  misc_feature: Table A; Target 93593; HLA-B*56:01; TUBA3C; ENSG00000198033; TAA
FPLATYAPVI

SEQ ID NO: 93594 - protein, 10 aa, Homo sapiens
  misc_feature: Table A; Target 93594; HLA-C*01:02; TUBA3C; ENSG00000198033; TAA
FPLATYAPVI

SEQ ID NO: 93595 - protein, 10 aa, Homo sapiens
  misc_feature: Table A; Target 93595; HLA-C*03:03; TUBA3C; ENSG00000198033; TAA
FPLATYAPVI

SEQ ID NO: 93596 - protein, 10 aa, Homo sapiens
  misc_feature: Table A; Target 93596; HLA-C*07:01; TUBA3C; ENSG00000198033; TAA
FPLATYAPVI

SEQ ID NO: 93597 - protein, 8 aa, Homo sapiens
  misc_feature: Table A; Target 93597; HLA-B*15:01; TUBA3C; ENSG00000198033; TAA
FQTNLVPY

SEQ ID NO: 93598 - protein, 8 aa, Homo sapiens
  misc_feature: Table A; Target 93598; HLA-B*15:03; TUBA3C; ENSG00000198033; TAA
FQTNLVPY

SEQ ID NO: 93599 - protein, 8 aa, Homo sapiens
  misc_feature: Table A; Target 93599; HLA-B*46:01; TUBA3C; ENSG00000198033; TAA
FQTNLVPY

SEQ ID NO: 93600 - protein, 8 aa, Homo sapiens
  misc_feature: Table A; Target 93600; HLA-C*04:01; TUBA3C; ENSG00000198033; TAA
FQTNLVPY

SEQ ID NO: 93601 - protein, 8 aa, Homo sapiens
  misc_feature: Table A; Target 93601; HLA-C*07:01; TUBA3C; ENSG00000198033; TAA
FQTNLVPY

SEQ ID NO: 93602 - protein, 8 aa, Homo sapiens
  misc_feature: Table A; Target 93602; HLA-C*07:04; TUBA3C; ENSG00000198033; TAA
FQTNLVPY

SEQ ID NO: 93603 - protein, 8 aa, Homo sapiens
  misc_feature: Table A; Target 93603; HLA-C*14:02; TUBA3C; ENSG00000198033; TAA
FQTNLVPY

SEQ ID NO: 93604 - protein, 9 aa, Homo sapiens
  misc_feature: Table A; Target 93604; HLA-B*13:02; TUBA3C; ENSG00000198033; TAA
FQTNLVPYP

SEQ ID NO: 93605 - protein, 9 aa, Homo sapiens
  misc_feature: Table A; Target 93605; HLA-B*27:05; TUBA3C; ENSG00000198033; TAA
FQTNLVPYP

SEQ ID NO: 93606 - protein, 9 aa, Homo sapiens
  misc_feature: Table A; Target 93606; HLA-C*06:02; TUBA3C; ENSG00000198033; TAA
FQTNLVPYP

SEQ ID NO: 93607 - protein, 9 aa, Homo sapiens
  misc_feature: Table A; Target 93607; HLA-C*07:04; TUBA3C; ENSG00000198033; TAA
FQTNLVPYP

SEQ ID NO: 93608 - protein, 10 aa, Homo sapiens
  misc_feature: Table A; Target 93608; HLA-A*31:01; TUBA3C; ENSG00000198033; TAA
FQTNLVPYPR

SEQ ID NO: 93609 - protein, 10 aa, Homo sapiens
  misc_feature: Table A; Target 93609; HLA-B*27:02; TUBA3C; ENSG00000198033; TAA
FQTNLVPYPR

SEQ ID NO: 93610 - protein, 8 aa, Homo sapiens
  misc_feature: Table A; Target 93610; HLA-C*05:01; TUBA3C; ENSG00000198033; TAA
FSEAREDL

SEQ ID NO: 93611 - protein, 8 aa, Homo sapiens
  misc_feature: Table A; Target 93611; HLA-C*16:01; TUBA3C; ENSG00000198033; TAA
FSEAREDL

SEQ ID NO: 93612 - protein, 8 aa, Homo sapiens
  misc_feature: Table A; Target 93612; HLA-C*01:02; TUBA3C; ENSG00000198033; TAA
FSETGAGK

SEQ ID NO: 93613 - protein, 8 aa, Homo sapiens
  misc_feature: Table A; Target 93613; HLA-C*04:01; TUBA3C; ENSG00000198033; TAA
FSETGAGK

SEQ ID NO: 93614 - protein, 8 aa, Homo sapiens
  misc_feature: Table A; Target 93614; HLA-C*05:01; TUBA3C; ENSG00000198033; TAA
FSETGAGK

SEQ ID NO: 93615 - protein, 9 aa, Homo sapiens
  misc_feature: Table A; Target 93615; HLA-A*01:01; TUBA3C; ENSG00000198033; TAA
FSETGAGKH

SEQ ID NO: 93616 - protein, 10 aa, Homo sapiens
  misc_feature: Table A; Target 93616; HLA-A*01:01; TUBA3C; ENSG00000198033; TAA
FSETGAGKHV

SEQ ID NO: 93617 - protein, 10 aa, Homo sapiens
  misc_feature: Table A; Target 93617; HLA-A*68:02; TUBA3C; ENSG00000198033; TAA
FSETGAGKHV

SEQ ID NO: 93618 - protein, 10 aa, Homo sapiens
  misc_feature: Table A; Target 93618; HLA-B*07:02; TUBA3C; ENSG00000198033; TAA
FSETGAGKHV

SEQ ID NO: 93619 - protein, 10 aa, Homo sapiens
  misc_feature: Table A; Target 93619; HLA-B*40:02; TUBA3C; ENSG00000198033; TAA
FSETGAGKHV

SEQ ID NO: 93620 - protein, 10 aa, Homo sapiens
  misc_feature: Table A; Target 93620; HLA-C*01:02; TUBA3C; ENSG00000198033; TAA
FSETGAGKHV

SEQ ID NO: 93621 - protein, 10 aa, Homo sapiens
  misc_feature: Table A; Target 93621; HLA-C*02:02; TUBA3C; ENSG00000198033; TAA
FSETGAGKHV

SEQ ID NO: 93622 - protein, 10 aa, Homo sapiens
  misc_feature: Table A; Target 93622; HLA-C*03:03; TUBA3C; ENSG00000198033; TAA
FSETGAGKHV

SEQ ID NO: 93623 - protein, 10 aa, Homo sapiens
  misc_feature: Table A; Target 93623; HLA-C*03:04; TUBA3C; ENSG00000198033; TAA
FSETGAGKHV

SEQ ID NO: 93624 - protein, 10 aa, Homo sapiens
  misc_feature: Table A; Target 93624; HLA-C*04:01; TUBA3C; ENSG00000198033; TAA
FSETGAGKHV

SEQ ID NO: 93625 - protein, 10 aa, Homo sapiens
  misc_feature: Table A; Target 93625; HLA-C*05:01; TUBA3C; ENSG00000198033; TAA
FSETGAGKHV

SEQ ID NO: 93626 - protein, 10 aa, Homo sapiens
  misc_feature: Table A; Target 93626; HLA-C*06:02; TUBA3C; ENSG00000198033; TAA
FSETGAGKHV

SEQ ID NO: 93627 - protein, 10 aa, Homo sapiens
  misc_feature: Table A; Target 93627; HLA-C*07:01; TUBA3C; ENSG00000198033; TAA
FSETGAGKHV

SEQ ID NO: 93628 - protein, 10 aa, Homo sapiens
  misc_feature: Table A; Target 93628; HLA-C*07:02; TUBA3C; ENSG00000198033; TAA
FSETGAGKHV

SEQ ID NO: 93629 - protein, 10 aa, Homo sapiens
  misc_feature: Table A; Target 93629; HLA-C*12:03; TUBA3C; ENSG00000198033; TAA
FSETGAGKHV

SEQ ID NO: 93630 - protein, 10 aa, Homo sapiens
  misc_feature: Table A; Target 93630; HLA-C*16:02; TUBA3C; ENSG00000198033; TAA
FSETGAGKHV

SEQ ID NO: 93631 - protein, 11 aa, Homo sapiens
  misc_feature: Table A; Target 93631; HLA-A*01:01; TUBA3C; ENSG00000198033; TAA
FSETGAGKHVP

SEQ ID NO: 93632 - protein, 11 aa, Homo sapiens
  misc_feature: Table A; Target 93632; HLA-C*04:01; TUBA3C; ENSG00000198033; TAA
FSETGAGKHVP

SEQ ID NO: 93633 - protein, 11 aa, Homo sapiens
  misc_feature: Table A; Target 93633; HLA-C*06:02; TUBA3C; ENSG00000198033; TAA
FSETGAGKHVP

SEQ ID NO: 93634 - protein, 11 aa, Homo sapiens
  misc_feature: Table A; Target 93634; HLA-C*07:01; TUBA3C; ENSG00000198033; TAA
FSETGAGKHVP

SEQ ID NO: 93635 - protein, 11 aa, Homo sapiens
  misc_feature: Table A; Target 93635; HLA-C*07:04; TUBA3C; ENSG00000198033; TAA
FSETGAGKHVP

SEQ ID NO: 93636 - protein, 11 aa, Homo sapiens
  misc_feature: Table A; Target 93636; HLA-C*16:02; TUBA3C; ENSG00000198033; TAA
FSETGAGKHVP

SEQ ID NO: 93637 - protein, 8 aa, Homo sapiens
  misc_feature: Table A; Target 93637; HLA-A*02:01; TUBA3C; ENSG00000198033; TAA
FVDLEPTV

SEQ ID NO: 93638 - protein, 8 aa, Homo sapiens
  misc_feature: Table A; Target 93638; HLA-A*02:07; TUBA3C; ENSG00000198033; TAA
FVDLEPTV

SEQ ID NO: 93639 - protein, 8 aa, Homo sapiens
  misc_feature: Table A; Target 93639; HLA-B*13:02; TUBA3C; ENSG00000198033; TAA
FVDLEPTV

SEQ ID NO: 93640 - protein, 8 aa, Homo sapiens
  misc_feature: Table A; Target 93640; HLA-B*35:03; TUBA3C; ENSG00000198033; TAA
FVDLEPTV

SEQ ID NO: 93641 - protein, 8 aa, Homo sapiens
  misc_feature: Table A; Target 93641; HLA-B*38:01; TUBA3C; ENSG00000198033; TAA
FVDLEPTV

SEQ ID NO: 93642 - protein, 8 aa, Homo sapiens
  misc_feature: Table A; Target 93642; HLA-B*39:01; TUBA3C; ENSG00000198033; TAA
FVDLEPTV

SEQ ID NO: 93643 - protein, 8 aa, Homo sapiens
  misc_feature: Table A; Target 93643; HLA-B*51:01; TUBA3C; ENSG00000198033; TAA
FVDLEPTV

SEQ ID NO: 93644 - protein, 8 aa, Homo sapiens
  misc_feature: Table A; Target 93644; HLA-B*54:01; TUBA3C; ENSG00000198033; TAA
FVDLEPTV

SEQ ID NO: 93645 - protein, 8 aa, Homo sapiens
  misc_feature: Table A; Target 93645; HLA-B*55:01; TUBA3C; ENSG00000198033; TAA
FVDLEPTV

SEQ ID NO: 93646 - protein, 8 aa, Homo sapiens
  misc_feature: Table A; Target 93646; HLA-B*56:01; TUBA3C; ENSG00000198033; TAA
FVDLEPTV

SEQ ID NO: 93647 - protein, 8 aa, Homo sapiens
  misc_feature: Table A; Target 93647; HLA-C*03:03; TUBA3C; ENSG00000198033; TAA
FVDLEPTV

SEQ ID NO: 93648 - protein, 8 aa, Homo sapiens
  misc_feature: Table A; Target 93648; HLA-C*03:04; TUBA3C; ENSG00000198033; TAA
FVDLEPTV

SEQ ID NO: 93649 - protein, 8 aa, Homo sapiens
  misc_feature: Table A; Target 93649; HLA-C*04:01; TUBA3C; ENSG00000198033; TAA
FVDLEPTV

SEQ ID NO: 93650 - protein, 8 aa, Homo sapiens
  misc_feature: Table A; Target 93650; HLA-C*05:01; TUBA3C; ENSG00000198033; TAA
FVDLEPTV

SEQ ID NO: 93651 - protein, 8 aa, Homo sapiens
  misc_feature: Table A; Target 93651; HLA-C*07:04; TUBA3C; ENSG00000198033; TAA
FVDLEPTV

SEQ ID NO: 93652 - protein, 8 aa, Homo sapiens
  misc_feature: Table A; Target 93652; HLA-C*12:03; TUBA3C; ENSG00000198033; TAA
FVDLEPTV

SEQ ID NO: 93653 - protein, 9 aa, Homo sapiens
  misc_feature: Table A; Target 93653; HLA-A*01:01; TUBA3C; ENSG00000198033; TAA
FVDLEPTVV

SEQ ID NO: 93654 - protein, 9 aa, Homo sapiens
  misc_feature: Table A; Target 93654; HLA-A*02:01; TUBA3C; ENSG00000198033; TAA
FVDLEPTVV

SEQ ID NO: 93655 - protein, 9 aa, Homo sapiens
  misc_feature: Table A; Target 93655; HLA-A*02:03; TUBA3C; ENSG00000198033; TAA
FVDLEPTVV

SEQ ID NO: 93656 - protein, 9 aa, Homo sapiens
  misc_feature: Table A; Target 93656; HLA-A*02:07; TUBA3C; ENSG00000198033; TAA
FVDLEPTVV

SEQ ID NO: 93657 - protein, 9 aa, Homo sapiens
  misc_feature: Table A; Target 93657; HLA-A*68:02; TUBA3C; ENSG00000198033; TAA
FVDLEPTVV

SEQ ID NO: 93658 - protein, 9 aa, Homo sapiens
  misc_feature: Table A; Target 93658; HLA-B*13:02; TUBA3C; ENSG00000198033; TAA
FVDLEPTVV

SEQ ID NO: 93659 - protein, 9 aa, Homo sapiens
  misc_feature: Table A; Target 93659; HLA-B*27:05; TUBA3C; ENSG00000198033; TAA
FVDLEPTVV

SEQ ID NO: 93660 - protein, 9 aa, Homo sapiens
  misc_feature: Table A; Target 93660; HLA-B*35:01; TUBA3C; ENSG00000198033; TAA
FVDLEPTVV

SEQ ID NO: 93661 - protein, 9 aa, Homo sapiens
  misc_feature: Table A; Target 93661; HLA-B*35:03; TUBA3C; ENSG00000198033; TAA
FVDLEPTVV

SEQ ID NO: 93662 - protein, 9 aa, Homo sapiens
  misc_feature: Table A; Target 93662; HLA-B*38:01; TUBA3C; ENSG00000198033; TAA
FVDLEPTVV

SEQ ID NO: 93663 - protein, 9 aa, Homo sapiens
  misc_feature: Table A; Target 93663; HLA-B*39:01; TUBA3C; ENSG00000198033; TAA
FVDLEPTVV

SEQ ID NO: 93664 - protein, 9 aa, Homo sapiens
  misc_feature: Table A; Target 93664; HLA-B*40:01; TUBA3C; ENSG00000198033; TAA
FVDLEPTVV

SEQ ID NO: 93665 - protein, 9 aa, Homo sapiens
  misc_feature: Table A; Target 93665; HLA-B*49:01; TUBA3C; ENSG00000198033; TAA
FVDLEPTVV

SEQ ID NO: 93666 - protein, 9 aa, Homo sapiens
  misc_feature: Table A; Target 93666; HLA-B*51:01; TUBA3C; ENSG00000198033; TAA
FVDLEPTVV

SEQ ID NO: 93667 - protein, 9 aa, Homo sapiens
  misc_feature: Table A; Target 93667; HLA-B*54:01; TUBA3C; ENSG00000198033; TAA
FVDLEPTVV

SEQ ID NO: 93668 - protein, 9 aa, Homo sapiens
  misc_feature: Table A; Target 93668; HLA-B*55:01; TUBA3C; ENSG00000198033; TAA
FVDLEPTVV

SEQ ID NO: 93669 - protein, 9 aa, Homo sapiens
  misc_feature: Table A; Target 93669; HLA-C*02:02; TUBA3C; ENSG00000198033; TAA
FVDLEPTVV

SEQ ID NO: 93670 - protein, 9 aa, Homo sapiens
  misc_feature: Table A; Target 93670; HLA-C*03:03; TUBA3C; ENSG00000198033; TAA
FVDLEPTVV

SEQ ID NO: 93671 - protein, 9 aa, Homo sapiens
  misc_feature: Table A; Target 93671; HLA-C*03:04; TUBA3C; ENSG00000198033; TAA
FVDLEPTVV

SEQ ID NO: 93672 - protein, 9 aa, Homo sapiens
  misc_feature: Table A; Target 93672; HLA-C*04:01; TUBA3C; ENSG00000198033; TAA
FVDLEPTVV

SEQ ID NO: 93673 - protein, 9 aa, Homo sapiens
  misc_feature: Table A; Target 93673; HLA-C*05:01; TUBA3C; ENSG00000198033; TAA
FVDLEPTVV

SEQ ID NO: 93674 - protein, 9 aa, Homo sapiens
  misc_feature: Table A; Target 93674; HLA-C*07:04; TUBA3C; ENSG00000198033; TAA
FVDLEPTVV

SEQ ID NO: 93675 - protein, 9 aa, Homo sapiens
  misc_feature: Table A; Target 93675; HLA-C*12:03; TUBA3C; ENSG00000198033; TAA
FVDLEPTVV

SEQ ID NO: 93676 - protein, 9 aa, Homo sapiens
  misc_feature: Table A; Target 93676; HLA-A*01:01; TUBA3C; ENSG00000198033; TAA
FVDWCPTGF

SEQ ID NO: 93677 - protein, 9 aa, Homo sapiens
  misc_feature: Table A; Target 93677; HLA-A*02:07; TUBA3C; ENSG00000198033; TAA
FVDWCPTGF

SEQ ID NO: 93678 - protein, 9 aa, Homo sapiens
  misc_feature: Table A; Target 93678; HLA-B*55:01; TUBA3C; ENSG00000198033; TAA
FVDWCPTGF

SEQ ID NO: 93679 - protein, 9 aa, Homo sapiens
  misc_feature: Table A; Target 93679; HLA-C*05:01; TUBA3C; ENSG00000198033; TAA
FVDWCPTGF

SEQ ID NO: 93680 - protein, 9 aa, Homo sapiens
  misc_feature: Table A; Target 93680; HLA-C*07:04; TUBA3C; ENSG00000198033; TAA
FVDWCPTGF

SEQ ID NO: 93681 - protein, 10 aa, Homo sapiens
  misc_feature: Table A; Target 93681; HLA-A*68:02; TUBA3C; ENSG00000198033; TAA
FVHWYVGEGM

SEQ ID NO: 93682 - protein, 8 aa, Homo sapiens
  misc_feature: Table A; Target 93682; HLA-A*31:01; TUBA3C; ENSG00000198033; TAA
GAGKHVPR

SEQ ID NO: 93683 - protein, 8 aa, Homo sapiens
  misc_feature: Table A; Target 93683; HLA-A*33:01; TUBA3C; ENSG00000198033; TAA
GAGKHVPR

SEQ ID NO: 93684 - protein, 8 aa, Homo sapiens
  misc_feature: Table A; Target 93684; HLA-A*33:03; TUBA3C; ENSG00000198033; TAA
GAGKHVPR

SEQ ID NO: 93685 - protein, 8 aa, Homo sapiens
  misc_feature: Table A; Target 93685; HLA-C*07:01; TUBA3C; ENSG00000198033; TAA
GAGKHVPR

SEQ ID NO: 93686 - protein, 10 aa, Homo sapiens
  misc_feature: Table A; Target 93686; HLA-A*02:07; TUBA3C; ENSG00000198033; TAA
GALNVDLTEF

SEQ ID NO: 93687 - protein, 10 aa, Homo sapiens
  misc_feature: Table A; Target 93687; HLA-A*23:01; TUBA3C; ENSG00000198033; TAA
GALNVDLTEF

SEQ ID NO: 93688 - protein, 10 aa, Homo sapiens
  misc_feature: Table A; Target 93688; HLA-A*24:02; TUBA3C; ENSG00000198033; TAA
GALNVDLTEF

SEQ ID NO: 93689 - protein, 10 aa, Homo sapiens
  misc_feature: Table A; Target 93689; HLA-A*25:01; TUBA3C; ENSG00000198033; TAA
GALNVDLTEF

SEQ ID NO: 93690 - protein, 10 aa, Homo sapiens
  misc_feature: Table A; Target 93690; HLA-A*26:01; TUBA3C; ENSG00000198033; TAA
GALNVDLTEF

SEQ ID NO: 93691 - protein, 10 aa, Homo sapiens
  misc_feature: Table A; Target 93691; HLA-A*29:02; TUBA3C; ENSG00000198033; TAA
GALNVDLTEF

SEQ ID NO: 93692 - protein, 10 aa, Homo sapiens
  misc_feature: Table A; Target 93692; HLA-A*32:01; TUBA3C; ENSG00000198033; TAA
GALNVDLTEF

SEQ ID NO: 93693 - protein, 10 aa, Homo sapiens
  misc_feature: Table A; Target 93693; HLA-B*15:01; TUBA3C; ENSG00000198033; TAA
GALNVDLTEF

SEQ ID NO: 93694 - protein, 10 aa, Homo sapiens
  misc_feature: Table A; Target 93694; HLA-B*15:03; TUBA3C; ENSG00000198033; TAA
GALNVDLTEF

SEQ ID NO: 93695 - protein, 10 aa, Homo sapiens
  misc_feature: Table A; Target 93695; HLA-B*27:02; TUBA3C; ENSG00000198033; TAA
GALNVDLTEF

SEQ ID NO: 93696 - protein, 10 aa, Homo sapiens
  misc_feature: Table A; Target 93696; HLA-B*27:05; TUBA3C; ENSG00000198033; TAA
GALNVDLTEF

SEQ ID NO: 93697 - protein, 10 aa, Homo sapiens
  misc_feature: Table A; Target 93697; HLA-B*35:01; TUBA3C; ENSG00000198033; TAA
GALNVDLTEF

SEQ ID NO: 93698 - protein, 10 aa, Homo sapiens
  misc_feature: Table A; Target 93698; HLA-B*35:03; TUBA3C; ENSG00000198033; TAA
GALNVDLTEF

SEQ ID NO: 93699 - protein, 10 aa, Homo sapiens
  misc_feature: Table A; Target 93699; HLA-B*38:01; TUBA3C; ENSG00000198033; TAA
GALNVDLTEF

SEQ ID NO: 93700 - protein, 10 aa, Homo sapiens
  misc_feature: Table A; Target 93700; HLA-B*39:01; TUBA3C; ENSG00000198033; TAA
GALNVDLTEF

SEQ ID NO: 93701 - protein, 10 aa, Homo sapiens
  misc_feature: Table A; Target 93701; HLA-B*40:02; TUBA3C; ENSG00000198033; TAA
GALNVDLTEF

SEQ ID NO: 93702 - protein, 10 aa, Homo sapiens
  misc_feature: Table A; Target 93702; HLA-B*46:01; TUBA3C; ENSG00000198033; TAA
GALNVDLTEF

SEQ ID NO: 93703 - protein, 10 aa, Homo sapiens
  misc_feature: Table A; Target 93703; HLA-B*55:01; TUBA3C; ENSG00000198033; TAA
GALNVDLTEF

SEQ ID NO: 93704 - protein, 10 aa, Homo sapiens
  misc_feature: Table A; Target 93704; HLA-B*57:01; TUBA3C; ENSG00000198033; TAA
GALNVDLTEF

SEQ ID NO: 93705 - protein, 10 aa, Homo sapiens
  misc_feature: Table A; Target 93705; HLA-B*58:01; TUBA3C; ENSG00000198033; TAA
GALNVDLTEF

SEQ ID NO: 93706 - protein, 10 aa, Homo sapiens
  misc_feature: Table A; Target 93706; HLA-C*02:02; TUBA3C; ENSG00000198033; TAA
GALNVDLTEF

SEQ ID NO: 93707 - protein, 10 aa, Homo sapiens
  misc_feature: Table A; Target 93707; HLA-C*03:03; TUBA3C; ENSG00000198033; TAA
GALNVDLTEF

SEQ ID NO: 93708 - protein, 10 aa, Homo sapiens
  misc_feature: Table A; Target 93708; HLA-C*04:01; TUBA3C; ENSG00000198033; TAA
GALNVDLTEF

SEQ ID NO: 93709 - protein, 10 aa, Homo sapiens
  misc_feature: Table A; Target 93709; HLA-C*05:01; TUBA3C; ENSG00000198033; TAA
GALNVDLTEF

SEQ ID NO: 93710 - protein, 10 aa, Homo sapiens
  misc_feature: Table A; Target 93710; HLA-C*07:01; TUBA3C; ENSG00000198033; TAA
GALNVDLTEF

SEQ ID NO: 93711 - protein, 10 aa, Homo sapiens
  misc_feature: Table A; Target 93711; HLA-C*07:04; TUBA3C; ENSG00000198033; TAA
GALNVDLTEF

SEQ ID NO: 93712 - protein, 10 aa, Homo sapiens
  misc_feature: Table A; Target 93712; HLA-C*07:06; TUBA3C; ENSG00000198033; TAA
GALNVDLTEF

SEQ ID NO: 93713 - protein, 10 aa, Homo sapiens
  misc_feature: Table A; Target 93713; HLA-C*12:03; TUBA3C; ENSG00000198033; TAA
GALNVDLTEF

SEQ ID NO: 93714 - protein, 10 aa, Homo sapiens
  misc_feature: Table A; Target 93714; HLA-C*16:02; TUBA3C; ENSG00000198033; TAA
GALNVDLTEF

SEQ ID NO: 93715 - protein, 10 aa, Homo sapiens
  misc_feature: Table A; Target 93715; HLA-C*16:04; TUBA3C; ENSG00000198033; TAA
GALNVDLTEF

SEQ ID NO: 93716 - protein, 8 aa, Homo sapiens
  misc_feature: Table A; Target 93716; HLA-B*18:01; TUBA3C; ENSG00000198033; TAA
GDDSFNTF

SEQ ID NO: 93717 - protein, 8 aa, Homo sapiens
  misc_feature: Table A; Target 93717; HLA-B*37:01; TUBA3C; ENSG00000198033; TAA
GDDSFNTF

SEQ ID NO: 93718 - protein, 8 aa, Homo sapiens
  misc_feature: Table A; Target 93718; HLA-B*38:01; TUBA3C; ENSG00000198033; TAA
GDDSFNTF

SEQ ID NO: 93719 - protein, 8 aa, Homo sapiens
  misc_feature: Table A; Target 93719; HLA-B*40:02; TUBA3C; ENSG00000198033; TAA
GDDSFNTF

SEQ ID NO: 93720 - protein, 8 aa, Homo sapiens
  misc_feature: Table A; Target 93720; HLA-C*04:01; TUBA3C; ENSG00000198033; TAA
GDDSFNTF

SEQ ID NO: 93721 - protein, 8 aa, Homo sapiens
  misc_feature: Table A; Target 93721; HLA-C*05:01; TUBA3C; ENSG00000198033; TAA
GDDSFNTF

SEQ ID NO: 93722 - protein, 8 aa, Homo sapiens
  misc_feature: Table A; Target 93722; HLA-C*07:01; TUBA3C; ENSG00000198033; TAA
GDDSFNTF

SEQ ID NO: 93723 - protein, 9 aa, Homo sapiens
  misc_feature: Table A; Target 93723; HLA-A*02:07; TUBA3C; ENSG00000198033; TAA
GDDSFNTFF

SEQ ID NO: 93724 - protein, 9 aa, Homo sapiens
  misc_feature: Table A; Target 93724; HLA-B*37:01; TUBA3C; ENSG00000198033; TAA
GDDSFNTFF

SEQ ID NO: 93725 - protein, 9 aa, Homo sapiens
  misc_feature: Table A; Target 93725; HLA-B*38:01; TUBA3C; ENSG00000198033; TAA
GDDSFNTFF

SEQ ID NO: 93726 - protein, 9 aa, Homo sapiens
  misc_feature: Table A; Target 93726; HLA-B*44:02; TUBA3C; ENSG00000198033; TAA
GDDSFNTFF

SEQ ID NO: 93727 - protein, 9 aa, Homo sapiens
  misc_feature: Table A; Target 93727; HLA-B*49:01; TUBA3C; ENSG00000198033; TAA
GDDSFNTFF

SEQ ID NO: 93728 - protein, 9 aa, Homo sapiens
  misc_feature: Table A; Target 93728; HLA-C*04:01; TUBA3C; ENSG00000198033; TAA
GDDSFNTFF

SEQ ID NO: 93729 - protein, 9 aa, Homo sapiens
  misc_feature: Table A; Target 93729; HLA-C*07:01; TUBA3C; ENSG00000198033; TAA
GDDSFNTFF

SEQ ID NO: 93730 - protein, 9 aa, Homo sapiens
  misc_feature: Table A; Target 93730; HLA-B*37:01; TUBA3C; ENSG00000198033; TAA
GDLAKVQRA

SEQ ID NO: 93731 - protein, 10 aa, Homo sapiens
  misc_feature: Table A; Target 93731; HLA-C*06:02; TUBA3C; ENSG00000198033; TAA
GDLAKVQRAV

SEQ ID NO: 93732 - protein, 8 aa, Homo sapiens
  misc_feature: Table A; Target 93732; HLA-B*37:01; TUBA3C; ENSG00000198033; TAA
GDVVPKDV

SEQ ID NO: 93733 - protein, 8 aa, Homo sapiens
  misc_feature: Table A; Target 93733; HLA-B*40:02; TUBA3C; ENSG00000198033; TAA
GDVVPKDV

SEQ ID NO: 93734 - protein, 8 aa, Homo sapiens
  misc_feature: Table A; Target 93734; HLA-C*04:01; TUBA3C; ENSG00000198033; TAA
GDVVPKDV

SEQ ID NO: 93735 - protein, 8 aa, Homo sapiens
  misc_feature: Table A; Target 93735; HLA-C*06:02; TUBA3C; ENSG00000198033; TAA
GDVVPKDV

SEQ ID NO: 93736 - protein, 8 aa, Homo sapiens
  misc_feature: Table A; Target 93736; HLA-C*07:01; TUBA3C; ENSG00000198033; TAA
GDVVPKDV

SEQ ID NO: 93737 - protein, 8 aa, Homo sapiens
  misc_feature: Table A; Target 93737; HLA-C*12:03; TUBA3C; ENSG00000198033; TAA
GDVVPKDV

SEQ ID NO: 93738 - protein, 8 aa, Homo sapiens
  misc_feature: Table A; Target 93738; HLA-C*16:02; TUBA3C; ENSG00000198033; TAA
GDVVPKDV

SEQ ID NO: 93739 - protein, 8 aa, Homo sapiens
  misc_feature: Table A; Target 93739; HLA-C*16:04; TUBA3C; ENSG00000198033; TAA
GDVVPKDV

SEQ ID NO: 93740 - protein, 9 aa, Homo sapiens
  misc_feature: Table A; Target 93740; HLA-C*07:01; TUBA3C; ENSG00000198033; TAA
GDVVPKDVN

SEQ ID NO: 93741 - protein, 10 aa, Homo sapiens
  misc_feature: Table A; Target 93741; HLA-B*27:02; TUBA3C; ENSG00000198033; TAA
GDVVPKDVNA

SEQ ID NO: 93742 - protein, 10 aa, Homo sapiens
  misc_feature: Table A; Target 93742; HLA-B*27:05; TUBA3C; ENSG00000198033; TAA
GDVVPKDVNA

SEQ ID NO: 93743 - protein, 10 aa, Homo sapiens
  misc_feature: Table A; Target 93743; HLA-B*40:02; TUBA3C; ENSG00000198033; TAA
GDVVPKDVNA

SEQ ID NO: 93744 - protein, 10 aa, Homo sapiens
  misc_feature: Table A; Target 93744; HLA-C*07:01; TUBA3C; ENSG00000198033; TAA
GDVVPKDVNA

SEQ ID NO: 93745 - protein, 10 aa, Homo sapiens
  misc_feature: Table A; Target 93745; HLA-A*30:01; TUBA3C; ENSG00000198033; TAA
GEFSEAREDL

SEQ ID NO: 93746 - protein, 10 aa, Homo sapiens
  misc_feature: Table A; Target 93746; HLA-B*27:02; TUBA3C; ENSG00000198033; TAA
GEFSEAREDL

SEQ ID NO: 93747 - protein, 10 aa, Homo sapiens
  misc_feature: Table A; Target 93747; HLA-B*27:05; TUBA3C; ENSG00000198033; TAA
GEFSEAREDL

SEQ ID NO: 93748 - protein, 10 aa, Homo sapiens
  misc_feature: Table A; Target 93748; HLA-B*40:01; TUBA3C; ENSG00000198033; TAA
GEFSEAREDL

SEQ ID NO: 93749 - protein, 10 aa, Homo sapiens
  misc_feature: Table A; Target 93749; HLA-B*40:02; TUBA3C; ENSG00000198033; TAA
GEFSEAREDL

SEQ ID NO: 93750 - protein, 10 aa, Homo sapiens
  misc_feature: Table A; Target 93750; HLA-B*44:02; TUBA3C; ENSG00000198033; TAA
GEFSEAREDL

SEQ ID NO: 93751 - protein, 10 aa, Homo sapiens
  misc_feature: Table A; Target 93751; HLA-B*44:03; TUBA3C; ENSG00000198033; TAA
GEFSEAREDL

SEQ ID NO: 93752 - protein, 10 aa, Homo sapiens
  misc_feature: Table A; Target 93752; HLA-B*49:01; TUBA3C; ENSG00000198033; TAA
GEFSEAREDL

SEQ ID NO: 93753 - protein, 10 aa, Homo sapiens
  misc_feature: Table A; Target 93753; HLA-C*16:04; TUBA3C; ENSG00000198033; TAA
GEFSEAREDL

SEQ ID NO: 93754 - protein, 11 aa, Homo sapiens
  misc_feature: Table A; Target 93754; HLA-A*30:01; TUBA3C; ENSG00000198033; TAA
GEFSEAREDLA

SEQ ID NO: 93755 - protein, 11 aa, Homo sapiens
  misc_feature: Table A; Target 93755; HLA-B*40:01; TUBA3C; ENSG00000198033; TAA
GEFSEAREDLA

SEQ ID NO: 93756 - protein, 11 aa, Homo sapiens
  misc_feature: Table A; Target 93756; HLA-B*40:02; TUBA3C; ENSG00000198033; TAA
GEFSEAREDLA

SEQ ID NO: 93757 - protein, 11 aa, Homo sapiens
  misc_feature: Table A; Target 93757; HLA-B*49:01; TUBA3C; ENSG00000198033; TAA
GEFSEAREDLA

SEQ ID NO: 93758 - protein, 9 aa, Homo sapiens
  misc_feature: Table A; Target 93758; HLA-B*27:02; TUBA3C; ENSG00000198033; TAA
GEGMEEGEF

SEQ ID NO: 93759 - protein, 9 aa, Homo sapiens
  misc_feature: Table A; Target 93759; HLA-B*39:01; TUBA3C; ENSG00000198033; TAA
GEGMEEGEF

SEQ ID NO: 93760 - protein, 9 aa, Homo sapiens
  misc_feature: Table A; Target 93760; HLA-B*40:01; TUBA3C; ENSG00000198033; TAA
GEGMEEGEF

SEQ ID NO: 93761 - protein, 9 aa, Homo sapiens
  misc_feature: Table A; Target 93761; HLA-B*40:02; TUBA3C; ENSG00000198033; TAA
GEGMEEGEF

SEQ ID NO: 93762 - protein, 9 aa, Homo sapiens
  misc_feature: Table A; Target 93762; HLA-B*44:02; TUBA3C; ENSG00000198033; TAA
GEGMEEGEF

SEQ ID NO: 93763 - protein, 9 aa, Homo sapiens
  misc_feature: Table A; Target 93763; HLA-B*44:03; TUBA3C; ENSG00000198033; TAA
GEGMEEGEF

SEQ ID NO: 93764 - protein, 9 aa, Homo sapiens
  misc_feature: Table A; Target 93764; HLA-A*31:01; TUBA3C; ENSG00000198033; TAA
GFASLLMER

SEQ ID NO: 93765 - protein, 9 aa, Homo sapiens
  misc_feature: Table A; Target 93765; HLA-A*33:03; TUBA3C; ENSG00000198033; TAA
GFASLLMER

SEQ ID NO: 93766 - protein, 8 aa, Homo sapiens
  misc_feature: Table A; Target 93766; HLA-A*30:02; TUBA3C; ENSG00000198033; TAA
GFKVGINY

SEQ ID NO: 93767 - protein, 8 aa, Homo sapiens
  misc_feature: Table A; Target 93767; HLA-B*15:01; TUBA3C; ENSG00000198033; TAA
GFKVGINY

SEQ ID NO: 93768 - protein, 8 aa, Homo sapiens
  misc_feature: Table A; Target 93768; HLA-B*15:03; TUBA3C; ENSG00000198033; TAA
GFKVGINY

SEQ ID NO: 93769 - protein, 8 aa, Homo sapiens
  misc_feature: Table A; Target 93769; HLA-C*14:02; TUBA3C; ENSG00000198033; TAA
GFKVGINY

SEQ ID NO: 93770 - protein, 8 aa, Homo sapiens
  misc_feature: Table A; Target 93770; HLA-A*23:01; TUBA3C; ENSG00000198033; TAA
GFLIFHSF

SEQ ID NO: 93771 - protein, 8 aa, Homo sapiens
  misc_feature: Table A; Target 93771; HLA-A*24:02; TUBA3C; ENSG00000198033; TAA
GFLIFHSF

SEQ ID NO: 93772 - protein, 8 aa, Homo sapiens
  misc_feature: Table A; Target 93772; HLA-B*57:01; TUBA3C; ENSG00000198033; TAA
GFLIFHSF

SEQ ID NO: 93773 - protein, 9 aa, Homo sapiens
  misc_feature: Table A; Target 93773; HLA-A*01:01; TUBA3C; ENSG00000198033; TAA
GGDDSFNTF

SEQ ID NO: 93774 - protein, 9 aa, Homo sapiens
  misc_feature: Table A; Target 93774; HLA-A*02:07; TUBA3C; ENSG00000198033; TAA
GGDDSFNTF

SEQ ID NO: 93775 - protein, 9 aa, Homo sapiens
  misc_feature: Table A; Target 93775; HLA-A*23:01; TUBA3C; ENSG00000198033; TAA
GGDDSFNTF

SEQ ID NO: 93776 - protein, 9 aa, Homo sapiens
  misc_feature: Table A; Target 93776; HLA-A*24:02; TUBA3C; ENSG00000198033; TAA
GGDDSFNTF

SEQ ID NO: 93777 - protein, 9 aa, Homo sapiens
  misc_feature: Table A; Target 93777; HLA-A*25:01; TUBA3C; ENSG00000198033; TAA
GGDDSFNTF

SEQ ID NO: 93778 - protein, 9 aa, Homo sapiens
  misc_feature: Table A; Target 93778; HLA-A*32:01; TUBA3C; ENSG00000198033; TAA
GGDDSFNTF

SEQ ID NO: 93779 - protein, 9 aa, Homo sapiens
  misc_feature: Table A; Target 93779; HLA-B*15:01; TUBA3C; ENSG00000198033; TAA
GGDDSFNTF

SEQ ID NO: 93780 - protein, 9 aa, Homo sapiens
  misc_feature: Table A; Target 93780; HLA-B*15:03; TUBA3C; ENSG00000198033; TAA
GGDDSFNTF

SEQ ID NO: 93781 - protein, 9 aa, Homo sapiens
  misc_feature: Table A; Target 93781; HLA-B*18:01; TUBA3C; ENSG00000198033; TAA
GGDDSFNTF

SEQ ID NO: 93782 - protein, 9 aa, Homo sapiens
  misc_feature: Table A; Target 93782; HLA-B*27:02; TUBA3C; ENSG00000198033; TAA
GGDDSFNTF

SEQ ID NO: 93783 - protein, 9 aa, Homo sapiens
  misc_feature: Table A; Target 93783; HLA-B*27:05; TUBA3C; ENSG00000198033; TAA
GGDDSFNTF

SEQ ID NO: 93784 - protein, 9 aa, Homo sapiens
  misc_feature: Table A; Target 93784; HLA-B*35:01; TUBA3C; ENSG00000198033; TAA
GGDDSFNTF

SEQ ID NO: 93785 - protein, 9 aa, Homo sapiens
  misc_feature: Table A; Target 93785; HLA-B*35:03; TUBA3C; ENSG00000198033; TAA
GGDDSFNTF

SEQ ID NO: 93786 - protein, 9 aa, Homo sapiens
  misc_feature: Table A; Target 93786; HLA-B*38:01; TUBA3C; ENSG00000198033; TAA
GGDDSFNTF

SEQ ID NO: 93787 - protein, 9 aa, Homo sapiens
  misc_feature: Table A; Target 93787; HLA-B*39:01; TUBA3C; ENSG00000198033; TAA
GGDDSFNTF

SEQ ID NO: 93788 - protein, 9 aa, Homo sapiens
  misc_feature: Table A; Target 93788; HLA-B*40:01; TUBA3C; ENSG00000198033; TAA
GGDDSFNTF

SEQ ID NO: 93789 - protein, 9 aa, Homo sapiens
  misc_feature: Table A; Target 93789; HLA-B*46:01; TUBA3C; ENSG00000198033; TAA
GGDDSFNTF

SEQ ID NO: 93790 - protein, 9 aa, Homo sapiens
  misc_feature: Table A; Target 93790; HLA-B*55:01; TUBA3C; ENSG00000198033; TAA
GGDDSFNTF

SEQ ID NO: 93791 - protein, 9 aa, Homo sapiens
  misc_feature: Table A; Target 93791; HLA-B*58:01; TUBA3C; ENSG00000198033; TAA
GGDDSFNTF

SEQ ID NO: 93792 - protein, 9 aa, Homo sapiens
  misc_feature: Table A; Target 93792; HLA-C*01:02; TUBA3C; ENSG00000198033; TAA
GGDDSFNTF

SEQ ID NO: 93793 - protein, 9 aa, Homo sapiens
  misc_feature: Table A; Target 93793; HLA-C*02:02; TUBA3C; ENSG00000198033; TAA
GGDDSFNTF

SEQ ID NO: 93794 - protein, 9 aa, Homo sapiens
  misc_feature: Table A; Target 93794; HLA-C*03:03; TUBA3C; ENSG00000198033; TAA
GGDDSFNTF

SEQ ID NO: 93795 - protein, 9 aa, Homo sapiens
  misc_feature: Table A; Target 93795; HLA-C*03:04; TUBA3C; ENSG00000198033; TAA
GGDDSFNTF

SEQ ID NO: 93796 - protein, 9 aa, Homo sapiens
  misc_feature: Table A; Target 93796; HLA-C*04:01; TUBA3C; ENSG00000198033; TAA
GGDDSFNTF

SEQ ID NO: 93797 - protein, 9 aa, Homo sapiens
  misc_feature: Table A; Target 93797; HLA-C*05:01; TUBA3C; ENSG00000198033; TAA
GGDDSFNTF

SEQ ID NO: 93798 - protein, 9 aa, Homo sapiens
  misc_feature: Table A; Target 93798; HLA-C*07:04; TUBA3C; ENSG00000198033; TAA
GGDDSFNTF

SEQ ID NO: 93799 - protein, 9 aa, Homo sapiens
  misc_feature: Table A; Target 93799; HLA-C*12:03; TUBA3C; ENSG00000198033; TAA
GGDDSFNTF

SEQ ID NO: 93800 - protein, 9 aa, Homo sapiens
  misc_feature: Table A; Target 93800; HLA-C*16:04; TUBA3C; ENSG00000198033; TAA
GGDDSFNTF

SEQ ID NO: 93801 - protein, 10 aa, Homo sapiens
  misc_feature: Table A; Target 93801; HLA-A*02:07; TUBA3C; ENSG00000198033; TAA
GGDDSFNTFF

SEQ ID NO: 93802 - protein, 10 aa, Homo sapiens
  misc_feature: Table A; Target 93802; HLA-B*27:02; TUBA3C; ENSG00000198033; TAA
GGDDSFNTFF

SEQ ID NO: 93803 - protein, 10 aa, Homo sapiens
  misc_feature: Table A; Target 93803; HLA-B*27:05; TUBA3C; ENSG00000198033; TAA
GGDDSFNTFF

SEQ ID NO: 93804 - protein, 10 aa, Homo sapiens
  misc_feature: Table A; Target 93804; HLA-B*38:01; TUBA3C; ENSG00000198033; TAA
GGDDSFNTFF

SEQ ID NO: 93805 - protein, 10 aa, Homo sapiens
  misc_feature: Table A; Target 93805; HLA-C*04:01; TUBA3C; ENSG00000198033; TAA
GGDDSFNTFF

SEQ ID NO: 93806 - protein, 10 aa, Homo sapiens
  misc_feature: Table A; Target 93806; HLA-C*05:01; TUBA3C; ENSG00000198033; TAA
GGDDSFNTFF

SEQ ID NO: 93807 - protein, 9 aa, Homo sapiens
  misc_feature: Table A; Target 93807; HLA-A*31:01; TUBA3C; ENSG00000198033; TAA
GGDLAKVQR

SEQ ID NO: 93808 - protein, 10 aa, Homo sapiens
  misc_feature: Table A; Target 93808; HLA-A*23:01; TUBA3C; ENSG00000198033; TAA
GGGDDSFNTF

SEQ ID NO: 93809 - protein, 10 aa, Homo sapiens
  misc_feature: Table A; Target 93809; HLA-A*25:01; TUBA3C; ENSG00000198033; TAA
GGGDDSFNTF

SEQ ID NO: 93810 - protein, 10 aa, Homo sapiens
  misc_feature: Table A; Target 93810; HLA-B*15:01; TUBA3C; ENSG00000198033; TAA
GGGDDSFNTF

SEQ ID NO: 93811 - protein, 10 aa, Homo sapiens
  misc_feature: Table A; Target 93811; HLA-B*27:05; TUBA3C; ENSG00000198033; TAA
GGGDDSFNTF

SEQ ID NO: 93812 - protein, 10 aa, Homo sapiens
  misc_feature: Table A; Target 93812; HLA-B*38:01; TUBA3C; ENSG00000198033; TAA
GGGDDSFNTF

SEQ ID NO: 93813 - protein, 10 aa, Homo sapiens
  misc_feature: Table A; Target 93813; HLA-B*39:01; TUBA3C; ENSG00000198033; TAA
GGGDDSFNTF

SEQ ID NO: 93814 - protein, 10 aa, Homo sapiens
  misc_feature: Table A; Target 93814; HLA-B*58:01; TUBA3C; ENSG00000198033; TAA
GGGDDSFNTF

SEQ ID NO: 93815 - protein, 10 aa, Homo sapiens
  misc_feature: Table A; Target 93815; HLA-C*02:02; TUBA3C; ENSG00000198033; TAA
GGGDDSFNTF

SEQ ID NO: 93816 - protein, 10 aa, Homo sapiens
  misc_feature: Table A; Target 93816; HLA-C*14:02; TUBA3C; ENSG00000198033; TAA
GGGDDSFNTF

SEQ ID NO: 93817 - protein, 10 aa, Homo sapiens
  misc_feature: Table A; Target 93817; HLA-C*16:04; TUBA3C; ENSG00000198033; TAA
GGGDDSFNTF

SEQ ID NO: 93818 - protein, 11 aa, Homo sapiens
  misc_feature: Table A; Target 93818; HLA-B*27:05; TUBA3C; ENSG00000198033; TAA
GGGDDSFNTFF

SEQ ID NO: 93819 - protein, 11 aa, Homo sapiens
  misc_feature: Table A; Target 93819; HLA-C*04:01; TUBA3C; ENSG00000198033; TAA
GGGDDSFNTFF

SEQ ID NO: 93820 - protein, 11 aa, Homo sapiens
  misc_feature: Table A; Target 93820; HLA-C*07:01; TUBA3C; ENSG00000198033; TAA
GGGDDSFNTFF

SEQ ID NO: 93821 - protein, 8 aa, Homo sapiens
  misc_feature: Table A; Target 93821; HLA-B*15:01; TUBA3C; ENSG00000198033; TAA
GGGTGSGF

SEQ ID NO: 93822 - protein, 8 aa, Homo sapiens
  misc_feature: Table A; Target 93822; HLA-B*15:03; TUBA3C; ENSG00000198033; TAA
GGGTGSGF

SEQ ID NO: 93823 - protein, 8 aa, Homo sapiens
  misc_feature: Table A; Target 93823; HLA-B*39:01; TUBA3C; ENSG00000198033; TAA
GGGTGSGF

SEQ ID NO: 93824 - protein, 8 aa, Homo sapiens
  misc_feature: Table A; Target 93824; HLA-C*01:02; TUBA3C; ENSG00000198033; TAA
GGGTGSGF

SEQ ID NO: 93825 - protein, 8 aa, Homo sapiens
  misc_feature: Table A; Target 93825; HLA-C*04:01; TUBA3C; ENSG00000198033; TAA
GGGTGSGF

SEQ ID NO: 93826 - protein, 8 aa, Homo sapiens
  misc_feature: Table A; Target 93826; HLA-C*05:01; TUBA3C; ENSG00000198033; TAA
GGGTGSGF

SEQ ID NO: 93827 - protein, 8 aa, Homo sapiens
  misc_feature: Table A; Target 93827; HLA-C*14:02; TUBA3C; ENSG00000198033; TAA
GGGTGSGF

SEQ ID NO: 93828 - protein, 10 aa, Homo sapiens
  misc_feature: Table A; Target 93828; HLA-B*27:05; TUBA3C; ENSG00000198033; TAA
GGGTGSGFAS

SEQ ID NO: 93829 - protein, 11 aa, Homo sapiens
  misc_feature: Table A; Target 93829; HLA-A*30:01; TUBA3C; ENSG00000198033; TAA
GGGTGSGFASL

SEQ ID NO: 93830 - protein, 11 aa, Homo sapiens
  misc_feature: Table A; Target 93830; HLA-B*27:05; TUBA3C; ENSG00000198033; TAA
GGGTGSGFASL

SEQ ID NO: 93831 - protein, 11 aa, Homo sapiens
  misc_feature: Table A; Target 93831; HLA-B*39:01; TUBA3C; ENSG00000198033; TAA
GGGTGSGFASL

SEQ ID NO: 93832 - protein, 11 aa, Homo sapiens
  misc_feature: Table A; Target 93832; HLA-B*40:01; TUBA3C; ENSG00000198033; TAA
GGGTGSGFASL

SEQ ID NO: 93833 - protein, 11 aa, Homo sapiens
  misc_feature: Table A; Target 93833; HLA-B*40:02; TUBA3C; ENSG00000198033; TAA
GGGTGSGFASL

SEQ ID NO: 93834 - protein, 11 aa, Homo sapiens
  misc_feature: Table A; Target 93834; HLA-C*01:02; TUBA3C; ENSG00000198033; TAA
GGGTGSGFASL

SEQ ID NO: 93835 - protein, 11 aa, Homo sapiens
  misc_feature: Table A; Target 93835; HLA-C*07:01; TUBA3C; ENSG00000198033; TAA
GGGTGSGFASL

SEQ ID NO: 93836 - protein, 11 aa, Homo sapiens
  misc_feature: Table A; Target 93836; HLA-C*07:02; TUBA3C; ENSG00000198033; TAA
GGGTGSGFASL

SEQ ID NO: 93837 - protein, 8 aa, Homo sapiens
  misc_feature: Table A; Target 93837; HLA-C*06:02; TUBA3C; ENSG00000198033; TAA
GGTGSGFA

SEQ ID NO: 93838 - protein, 10 aa, Homo sapiens
  misc_feature: Table A; Target 93838; HLA-A*30:01; TUBA3C; ENSG00000198033; TAA
GGTGSGFASL

SEQ ID NO: 93839 - protein, 10 aa, Homo sapiens
  misc_feature: Table A; Target 93839; HLA-B*39:01; TUBA3C; ENSG00000198033; TAA
GGTGSGFASL

SEQ ID NO: 93840 - protein, 10 aa, Homo sapiens
  misc_feature: Table A; Target 93840; HLA-B*40:01; TUBA3C; ENSG00000198033; TAA
GGTGSGFASL

SEQ ID NO: 93841 - protein, 10 aa, Homo sapiens
  misc_feature: Table A; Target 93841; HLA-B*40:02; TUBA3C; ENSG00000198033; TAA
GGTGSGFASL

SEQ ID NO: 93842 - protein, 10 aa, Homo sapiens
  misc_feature: Table A; Target 93842; HLA-C*03:03; TUBA3C; ENSG00000198033; TAA
GGTGSGFASL

SEQ ID NO: 93843 - protein, 10 aa, Homo sapiens
  misc_feature: Table A; Target 93843; HLA-C*03:04; TUBA3C; ENSG00000198033; TAA
GGTGSGFASL

SEQ ID NO: 93844 - protein, 10 aa, Homo sapiens
  misc_feature: Table A; Target 93844; HLA-C*07:02; TUBA3C; ENSG00000198033; TAA
GGTGSGFASL

SEQ ID NO: 93845 - protein, 11 aa, Homo sapiens
  misc_feature: Table A; Target 93845; HLA-B*07:02; TUBA3C; ENSG00000198033; TAA
GGTGSGFASLL

SEQ ID NO: 93846 - protein, 11 aa, Homo sapiens
  misc_feature: Table A; Target 93846; HLA-B*40:01; TUBA3C; ENSG00000198033; TAA
GGTGSGFASLL

SEQ ID NO: 93847 - protein, 11 aa, Homo sapiens
  misc_feature: Table A; Target 93847; HLA-C*06:02; TUBA3C; ENSG00000198033; TAA
GGTGSGFASLL

SEQ ID NO: 93848 - protein, 11 aa, Homo sapiens
  misc_feature: Table A; Target 93848; HLA-C*07:01; TUBA3C; ENSG00000198033; TAA
GGTGSGFASLL

SEQ ID NO: 93849 - protein, 11 aa, Homo sapiens
  misc_feature: Table A; Target 93849; HLA-C*07:02; TUBA3C; ENSG00000198033; TAA
GGTGSGFASLL

SEQ ID NO: 93850 - protein, 11 aa, Homo sapiens
  misc_feature: Table A; Target 93850; HLA-C*16:02; TUBA3C; ENSG00000198033; TAA
GGTGSGFASLL

SEQ ID NO: 93851 - protein, 9 aa, Homo sapiens
  misc_feature: Table A; Target 93851; HLA-B*13:02; TUBA3C; ENSG00000198033; TAA
GHYTIGKEI

SEQ ID NO: 93852 - protein, 9 aa, Homo sapiens
  misc_feature: Table A; Target 93852; HLA-B*27:05; TUBA3C; ENSG00000198033; TAA
GHYTIGKEI

SEQ ID NO: 93853 - protein, 9 aa, Homo sapiens
  misc_feature: Table A; Target 93853; HLA-B*38:01; TUBA3C; ENSG00000198033; TAA
GHYTIGKEI

SEQ ID NO: 93854 - protein, 9 aa, Homo sapiens
  misc_feature: Table A; Target 93854; HLA-B*40:02; TUBA3C; ENSG00000198033; TAA
GHYTIGKEI

SEQ ID NO: 93855 - protein, 9 aa, Homo sapiens
  misc_feature: Table A; Target 93855; HLA-C*06:02; TUBA3C; ENSG00000198033; TAA
GHYTIGKEI

SEQ ID NO: 93856 - protein, 9 aa, Homo sapiens
  misc_feature: Table A; Target 93856; HLA-C*16:04; TUBA3C; ENSG00000198033; TAA
GHYTIGKEI

SEQ ID NO: 93857 - protein, 10 aa, Homo sapiens
  misc_feature: Table A; Target 93857; HLA-B*38:01; TUBA3C; ENSG00000198033; TAA
GHYTIGKEIV

SEQ ID NO: 93858 - protein, 9 aa, Homo sapiens
  misc_feature: Table A; Target 93858; HLA-A*02:01; TUBA3C; ENSG00000198033; TAA
GINYQPPTV

SEQ ID NO: 93859 - protein, 9 aa, Homo sapiens
  misc_feature: Table A; Target 93859; HLA-A*02:03; TUBA3C; ENSG00000198033; TAA
GINYQPPTV

SEQ ID NO: 93860 - protein, 9 aa, Homo sapiens
  misc_feature: Table A; Target 93860; HLA-A*02:04; TUBA3C; ENSG00000198033; TAA
GINYQPPTV

SEQ ID NO: 93861 - protein, 9 aa, Homo sapiens
  misc_feature: Table A; Target 93861; HLA-A*02:07; TUBA3C; ENSG00000198033; TAA
GINYQPPTV

SEQ ID NO: 93862 - protein, 9 aa, Homo sapiens
  misc_feature: Table A; Target 93862; HLA-A*30:01; TUBA3C; ENSG00000198033; TAA
GINYQPPTV

SEQ ID NO: 93863 - protein, 9 aa, Homo sapiens
  misc_feature: Table A; Target 93863; HLA-A*32:01; TUBA3C; ENSG00000198033; TAA
GINYQPPTV

SEQ ID NO: 93864 - protein, 9 aa, Homo sapiens
  misc_feature: Table A; Target 93864; HLA-B*13:02; TUBA3C; ENSG00000198033; TAA
GINYQPPTV

SEQ ID NO: 93865 - protein, 9 aa, Homo sapiens
  misc_feature: Table A; Target 93865; HLA-B*40:02; TUBA3C; ENSG00000198033; TAA
GINYQPPTV

SEQ ID NO: 93866 - protein, 9 aa, Homo sapiens
  misc_feature: Table A; Target 93866; HLA-B*46:01; TUBA3C; ENSG00000198033; TAA
GINYQPPTV

SEQ ID NO: 93867 - protein, 9 aa, Homo sapiens
  misc_feature: Table A; Target 93867; HLA-B*51:01; TUBA3C; ENSG00000198033; TAA
GINYQPPTV

SEQ ID NO: 93868 - protein, 9 aa, Homo sapiens
  misc_feature: Table A; Target 93868; HLA-B*55:01; TUBA3C; ENSG00000198033; TAA
GINYQPPTV

SEQ ID NO: 93869 - protein, 9 aa, Homo sapiens
  misc_feature: Table A; Target 93869; HLA-B*56:01; TUBA3C; ENSG00000198033; TAA
GINYQPPTV

SEQ ID NO: 93870 - protein, 9 aa, Homo sapiens
  misc_feature: Table A; Target 93870; HLA-B*58:01; TUBA3C; ENSG00000198033; TAA
GINYQPPTV

SEQ ID NO: 93871 - protein, 9 aa, Homo sapiens
  misc_feature: Table A; Target 93871; HLA-C*06:02; TUBA3C; ENSG00000198033; TAA
GINYQPPTV

SEQ ID NO: 93872 - protein, 9 aa, Homo sapiens
  misc_feature: Table A; Target 93872; HLA-C*07:04; TUBA3C; ENSG00000198033; TAA
GINYQPPTV

SEQ ID NO: 93873 - protein, 10 aa, Homo sapiens
  misc_feature: Table A; Target 93873; HLA-A*02:03; TUBA3C; ENSG00000198033; TAA
GINYQPPTVV

SEQ ID NO: 93874 - protein, 10 aa, Homo sapiens
  misc_feature: Table A; Target 93874; HLA-B*13:02; TUBA3C; ENSG00000198033; TAA
GINYQPPTVV

SEQ ID NO: 93875 - protein, 10 aa, Homo sapiens
  misc_feature: Table A; Target 93875; HLA-B*55:01; TUBA3C; ENSG00000198033; TAA
GINYQPPTVV

SEQ ID NO: 93876 - protein, 9 aa, Homo sapiens
  misc_feature: Table A; Target 93876; HLA-B*15:01; TUBA3C; ENSG00000198033; TAA
GKEDAANNY

SEQ ID NO: 93877 - protein, 9 aa, Homo sapiens
  misc_feature: Table A; Target 93877; HLA-B*15:03; TUBA3C; ENSG00000198033; TAA
GKEDAANNY

SEQ ID NO: 93878 - protein, 9 aa, Homo sapiens
  misc_feature: Table A; Target 93878; HLA-B*27:05; TUBA3C; ENSG00000198033; TAA
GKEDAANNY

SEQ ID NO: 93879 - protein, 9 aa, Homo sapiens
  misc_feature: Table A; Target 93879; HLA-B*39:01; TUBA3C; ENSG00000198033; TAA
GKEDAANNY

SEQ ID NO: 93880 - protein, 9 aa, Homo sapiens
  misc_feature: Table A; Target 93880; HLA-C*07:01; TUBA3C; ENSG00000198033; TAA
GKEDAANNY

SEQ ID NO: 93881 - protein, 9 aa, Homo sapiens
  misc_feature: Table A; Target 93881; HLA-C*07:04; TUBA3C; ENSG00000198033; TAA
GKEDAANNY

SEQ ID NO: 93882 - protein, 11 aa, Homo sapiens
  misc_feature: Table A; Target 93882; HLA-B*27:02; TUBA3C; ENSG00000198033; TAA
GKEDAANNYAR

SEQ ID NO: 93883 - protein, 11 aa, Homo sapiens
  misc_feature: Table A; Target 93883; HLA-B*27:05; TUBA3C; ENSG00000198033; TAA
GKEDAANNYAR

SEQ ID NO: 93884 - protein, 9 aa, Homo sapiens
  misc_feature: Table A; Target 93884; HLA-B*15:03; TUBA3C; ENSG00000198033; TAA
GKHVPRAVF

SEQ ID NO: 93885 - protein, 8 aa, Homo sapiens
  misc_feature: Table A; Target 93885; HLA-C*04:01; TUBA3C; ENSG00000198033; TAA
GKKSKLEF

SEQ ID NO: 93886 - protein, 9 aa, Homo sapiens
  misc_feature: Table A; Target 93886; HLA-A*02:04; TUBA3C; ENSG00000198033; TAA
GLQGFLIFH

SEQ ID NO: 93887 - protein, 9 aa, Homo sapiens
  misc_feature: Table A; Target 93887; HLA-A*03:01; TUBA3C; ENSG00000198033; TAA
GLQGFLIFH

SEQ ID NO: 93888 - protein, 9 aa, Homo sapiens
  misc_feature: Table A; Target 93888; HLA-A*03:02; TUBA3C; ENSG00000198033; TAA
GLQGFLIFH

SEQ ID NO: 93889 - protein, 9 aa, Homo sapiens
  misc_feature: Table A; Target 93889; HLA-A*31:01; TUBA3C; ENSG00000198033; TAA
GLQGFLIFH

SEQ ID NO: 93890 - protein, 11 aa, Homo sapiens
  misc_feature: Table A; Target 93890; HLA-A*02:04; TUBA3C; ENSG00000198033; TAA
GLQGFLIFHSF

SEQ ID NO: 93891 - protein, 10 aa, Homo sapiens
  misc_feature: Table A; Target 93891; HLA-A*02:01; TUBA3C; ENSG00000198033; TAA
GMEEGEFSEA

SEQ ID NO: 93892 - protein, 10 aa, Homo sapiens
  misc_feature: Table A; Target 93892; HLA-B*39:01; TUBA3C; ENSG00000198033; TAA
GMEEGEFSEA

SEQ ID NO: 93893 - protein, 10 aa, Homo sapiens
  misc_feature: Table A; Target 93893; HLA-B*55:01; TUBA3C; ENSG00000198033; TAA
GMEEGEFSEA

SEQ ID NO: 93894 - protein, 10 aa, Homo sapiens
  misc_feature: Table A; Target 93894; HLA-C*05:01; TUBA3C; ENSG00000198033; TAA
GMEEGEFSEA

SEQ ID NO: 93895 - protein, 9 aa, Homo sapiens
  misc_feature: Table A; Target 93895; HLA-B*13:02; TUBA3C; ENSG00000198033; TAA
GQAGVQIGN

SEQ ID NO: 93896 - protein, 9 aa, Homo sapiens
  misc_feature: Table A; Target 93896; HLA-B*27:05; TUBA3C; ENSG00000198033; TAA
GQAGVQIGN

SEQ ID NO: 93897 - protein, 9 aa, Homo sapiens
  misc_feature: Table A; Target 93897; HLA-C*06:02; TUBA3C; ENSG00000198033; TAA
GQAGVQIGN

SEQ ID NO: 93898 - protein, 9 aa, Homo sapiens
  misc_feature: Table A; Target 93898; HLA-C*07:04; TUBA3C; ENSG00000198033; TAA
GQAGVQIGN

SEQ ID NO: 93899 - protein, 10 aa, Homo sapiens
  misc_feature: Table A; Target 93899; HLA-A*02:03; TUBA3C; ENSG00000198033; TAA
GQAGVQIGNA

SEQ ID NO: 93900 - protein, 10 aa, Homo sapiens
  misc_feature: Table A; Target 93900; HLA-B*13:02; TUBA3C; ENSG00000198033; TAA
GQAGVQIGNA

SEQ ID NO: 93901 - protein, 10 aa, Homo sapiens
  misc_feature: Table A; Target 93901; HLA-B*27:05; TUBA3C; ENSG00000198033; TAA
GQAGVQIGNA

SEQ ID NO: 93902 - protein, 10 aa, Homo sapiens
  misc_feature: Table A; Target 93902; HLA-B*39:01; TUBA3C; ENSG00000198033; TAA
GQAGVQIGNA

SEQ ID NO: 93903 - protein, 10 aa, Homo sapiens
  misc_feature: Table A; Target 93903; HLA-C*06:02; TUBA3C; ENSG00000198033; TAA
GQAGVQIGNA

SEQ ID NO: 93904 - protein, 11 aa, Homo sapiens
  misc_feature: Table A; Target 93904; HLA-B*15:01; TUBA3C; ENSG00000198033; TAA
GQAGVQIGNAC

SEQ ID NO: 93905 - protein, 11 aa, Homo sapiens
  misc_feature: Table A; Target 93905; HLA-B*27:05; TUBA3C; ENSG00000198033; TAA
GQAGVQIGNAC

SEQ ID NO: 93906 - protein, 8 aa, Homo sapiens
  misc_feature: Table A; Target 93906; HLA-B*13:02; TUBA3C; ENSG00000198033; TAA
GQIVSSIT

SEQ ID NO: 93907 - protein, 8 aa, Homo sapiens
  misc_feature: Table A; Target 93907; HLA-B*15:01; TUBA3C; ENSG00000198033; TAA
GQIVSSIT

SEQ ID NO: 93908 - protein, 9 aa, Homo sapiens
  misc_feature: Table A; Target 93908; HLA-A*02:01; TUBA3C; ENSG00000198033; TAA
GQIVSSITA

SEQ ID NO: 93909 - protein, 9 aa, Homo sapiens
  misc_feature: Table A; Target 93909; HLA-A*02:03; TUBA3C; ENSG00000198033; TAA
GQIVSSITA

SEQ ID NO: 93910 - protein, 9 aa, Homo sapiens
  misc_feature: Table A; Target 93910; HLA-A*30:01; TUBA3C; ENSG00000198033; TAA
GQIVSSITA

SEQ ID NO: 93911 - protein, 9 aa, Homo sapiens
  misc_feature: Table A; Target 93911; HLA-A*32:01; TUBA3C; ENSG00000198033; TAA
GQIVSSITA

SEQ ID NO: 93912 - protein, 9 aa, Homo sapiens
  misc_feature: Table A; Target 93912; HLA-B*13:02; TUBA3C; ENSG00000198033; TAA
GQIVSSITA

SEQ ID NO: 93913 - protein, 9 aa, Homo sapiens
  misc_feature: Table A; Target 93913; HLA-B*15:01; TUBA3C; ENSG00000198033; TAA
GQIVSSITA

SEQ ID NO: 93914 - protein, 9 aa, Homo sapiens
  misc_feature: Table A; Target 93914; HLA-B*15:03; TUBA3C; ENSG00000198033; TAA
GQIVSSITA

SEQ ID NO: 93915 - protein, 9 aa, Homo sapiens
  misc_feature: Table A; Target 93915; HLA-B*27:05; TUBA3C; ENSG00000198033; TAA
GQIVSSITA

SEQ ID NO: 93916 - protein, 9 aa, Homo sapiens
  misc_feature: Table A; Target 93916; HLA-B*39:01; TUBA3C; ENSG00000198033; TAA
GQIVSSITA

SEQ ID NO: 93917 - protein, 9 aa, Homo sapiens
  misc_feature: Table A; Target 93917; HLA-B*40:01; TUBA3C; ENSG00000198033; TAA
GQIVSSITA

SEQ ID NO: 93918 - protein, 9 aa, Homo sapiens
  misc_feature: Table A; Target 93918; HLA-B*40:02; TUBA3C; ENSG00000198033; TAA
GQIVSSITA

SEQ ID NO: 93919 - protein, 9 aa, Homo sapiens
  misc_feature: Table A; Target 93919; HLA-B*46:01; TUBA3C; ENSG00000198033; TAA
GQIVSSITA

SEQ ID NO: 93920 - protein, 9 aa, Homo sapiens
  misc_feature: Table A; Target 93920; HLA-B*49:01; TUBA3C; ENSG00000198033; TAA
GQIVSSITA

SEQ ID NO: 93921 - protein, 9 aa, Homo sapiens
  misc_feature: Table A; Target 93921; HLA-B*56:01; TUBA3C; ENSG00000198033; TAA
GQIVSSITA

SEQ ID NO: 93922 - protein, 9 aa, Homo sapiens
  misc_feature: Table A; Target 93922; HLA-C*02:02; TUBA3C; ENSG00000198033; TAA
GQIVSSITA

SEQ ID NO: 93923 - protein, 9 aa, Homo sapiens
  misc_feature: Table A; Target 93923; HLA-C*06:02; TUBA3C; ENSG00000198033; TAA
GQIVSSITA

SEQ ID NO: 93924 - protein, 9 aa, Homo sapiens
  misc_feature: Table A; Target 93924; HLA-C*07:04; TUBA3C; ENSG00000198033; TAA
GQIVSSITA

SEQ ID NO: 93925 - protein, 9 aa, Homo sapiens
  misc_feature: Table A; Target 93925; HLA-C*16:04; TUBA3C; ENSG00000198033; TAA
GQIVSSITA

SEQ ID NO: 93926 - protein, 10 aa, Homo sapiens
  misc_feature: Table A; Target 93926; HLA-B*13:02; TUBA3C; ENSG00000198033; TAA
GQIVSSITAS

SEQ ID NO: 93927 - protein, 10 aa, Homo sapiens
  misc_feature: Table A; Target 93927; HLA-B*15:01; TUBA3C; ENSG00000198033; TAA
GQIVSSITAS

SEQ ID NO: 93928 - protein, 11 aa, Homo sapiens
  misc_feature: Table A; Target 93928; HLA-A*23:01; TUBA3C; ENSG00000198033; TAA
GQIVSSITASL

SEQ ID NO: 93929 - protein, 11 aa, Homo sapiens
  misc_feature: Table A; Target 93929; HLA-A*30:01; TUBA3C; ENSG00000198033; TAA
GQIVSSITASL

SEQ ID NO: 93930 - protein, 11 aa, Homo sapiens
  misc_feature: Table A; Target 93930; HLA-B*13:02; TUBA3C; ENSG00000198033; TAA
GQIVSSITASL

SEQ ID NO: 93931 - protein, 11 aa, Homo sapiens
  misc_feature: Table A; Target 93931; HLA-B*15:01; TUBA3C; ENSG00000198033; TAA
GQIVSSITASL

SEQ ID NO: 93932 - protein, 11 aa, Homo sapiens
  misc_feature: Table A; Target 93932; HLA-B*15:03; TUBA3C; ENSG00000198033; TAA
GQIVSSITASL

SEQ ID NO: 93933 - protein, 11 aa, Homo sapiens
  misc_feature: Table A; Target 93933; HLA-B*27:05; TUBA3C; ENSG00000198033; TAA
GQIVSSITASL

SEQ ID NO: 93934 - protein, 11 aa, Homo sapiens
  misc_feature: Table A; Target 93934; HLA-B*38:01; TUBA3C; ENSG00000198033; TAA
GQIVSSITASL

SEQ ID NO: 93935 - protein, 11 aa, Homo sapiens
  misc_feature: Table A; Target 93935; HLA-B*39:01; TUBA3C; ENSG00000198033; TAA
GQIVSSITASL

SEQ ID NO: 93936 - protein, 11 aa, Homo sapiens
  misc_feature: Table A; Target 93936; HLA-B*40:01; TUBA3C; ENSG00000198033; TAA
GQIVSSITASL

SEQ ID NO: 93937 - protein, 11 aa, Homo sapiens
  misc_feature: Table A; Target 93937; HLA-B*40:02; TUBA3C; ENSG00000198033; TAA
GQIVSSITASL

SEQ ID NO: 93938 - protein, 11 aa, Homo sapiens
  misc_feature: Table A; Target 93938; HLA-B*46:01; TUBA3C; ENSG00000198033; TAA
GQIVSSITASL

SEQ ID NO: 93939 - protein, 11 aa, Homo sapiens
  misc_feature: Table A; Target 93939; HLA-C*03:03; TUBA3C; ENSG00000198033; TAA
GQIVSSITASL

SEQ ID NO: 93940 - protein, 11 aa, Homo sapiens
  misc_feature: Table A; Target 93940; HLA-C*06:02; TUBA3C; ENSG00000198033; TAA
GQIVSSITASL

SEQ ID NO: 93941 - protein, 11 aa, Homo sapiens
  misc_feature: Table A; Target 93941; HLA-C*16:04; TUBA3C; ENSG00000198033; TAA
GQIVSSITASL

SEQ ID NO: 93942 - protein, 9 aa, Homo sapiens
  misc_feature: Table A; Target 93942; HLA-A*02:03; TUBA3C; ENSG00000198033; TAA
GQMPSDKTI

SEQ ID NO: 93943 - protein, 9 aa, Homo sapiens
  misc_feature: Table A; Target 93943; HLA-A*30:01; TUBA3C; ENSG00000198033; TAA
GQMPSDKTI

SEQ ID NO: 93944 - protein, 9 aa, Homo sapiens
  misc_feature: Table A; Target 93944; HLA-B*13:02; TUBA3C; ENSG00000198033; TAA
GQMPSDKTI

SEQ ID NO: 93945 - protein, 9 aa, Homo sapiens
  misc_feature: Table A; Target 93945; HLA-B*15:01; TUBA3C; ENSG00000198033; TAA
GQMPSDKTI

SEQ ID NO: 93946 - protein, 9 aa, Homo sapiens
  misc_feature: Table A; Target 93946; HLA-B*15:03; TUBA3C; ENSG00000198033; TAA
GQMPSDKTI

SEQ ID NO: 93947 - protein, 9 aa, Homo sapiens
  misc_feature: Table A; Target 93947; HLA-B*27:02; TUBA3C; ENSG00000198033; TAA
GQMPSDKTI

SEQ ID NO: 93948 - protein, 9 aa, Homo sapiens
  misc_feature: Table A; Target 93948; HLA-B*27:05; TUBA3C; ENSG00000198033; TAA
GQMPSDKTI

SEQ ID NO: 93949 - protein, 9 aa, Homo sapiens
  misc_feature: Table A; Target 93949; HLA-B*38:01; TUBA3C; ENSG00000198033; TAA
GQMPSDKTI

SEQ ID NO: 93950 - protein, 9 aa, Homo sapiens
  misc_feature: Table A; Target 93950; HLA-B*39:01; TUBA3C; ENSG00000198033; TAA
GQMPSDKTI

SEQ ID NO: 93951 - protein, 9 aa, Homo sapiens
  misc_feature: Table A; Target 93951; HLA-B*40:02; TUBA3C; ENSG00000198033; TAA
GQMPSDKTI

SEQ ID NO: 93952 - protein, 9 aa, Homo sapiens
  misc_feature: Table A; Target 93952; HLA-B*44:02; TUBA3C; ENSG00000198033; TAA
GQMPSDKTI

SEQ ID NO: 93953 - protein, 9 aa, Homo sapiens
  misc_feature: Table A; Target 93953; HLA-B*44:03; TUBA3C; ENSG00000198033; TAA
GQMPSDKTI

SEQ ID NO: 93954 - protein, 9 aa, Homo sapiens
  misc_feature: Table A; Target 93954; HLA-B*49:01; TUBA3C; ENSG00000198033; TAA
GQMPSDKTI

SEQ ID NO: 93955 - protein, 9 aa, Homo sapiens
  misc_feature: Table A; Target 93955; HLA-C*03:03; TUBA3C; ENSG00000198033; TAA
GQMPSDKTI

SEQ ID NO: 93956 - protein, 9 aa, Homo sapiens
  misc_feature: Table A; Target 93956; HLA-C*03:04; TUBA3C; ENSG00000198033; TAA
GQMPSDKTI

SEQ ID NO: 93957 - protein, 9 aa, Homo sapiens
  misc_feature: Table A; Target 93957; HLA-C*06:02; TUBA3C; ENSG00000198033; TAA
GQMPSDKTI

SEQ ID NO: 93958 - protein, 9 aa, Homo sapiens
  misc_feature: Table A; Target 93958; HLA-C*07:04; TUBA3C; ENSG00000198033; TAA
GQMPSDKTI

SEQ ID NO: 93959 - protein, 9 aa, Homo sapiens
  misc_feature: Table A; Target 93959; HLA-C*16:02; TUBA3C; ENSG00000198033; TAA
GQMPSDKTI

SEQ ID NO: 93960 - protein, 9 aa, Homo sapiens
  misc_feature: Table A; Target 93960; HLA-C*16:04; TUBA3C; ENSG00000198033; TAA
GQMPSDKTI

SEQ ID NO: 93961 - protein, 11 aa, Homo sapiens
  misc_feature: Table A; Target 93961; HLA-B*13:02; TUBA3C; ENSG00000198033; TAA
GQMPSDKTIGG

SEQ ID NO: 93962 - protein, 11 aa, Homo sapiens
  misc_feature: Table A; Target 93962; HLA-B*15:01; TUBA3C; ENSG00000198033; TAA
GQMPSDKTIGG

SEQ ID NO: 93963 - protein, 8 aa, Homo sapiens
  misc_feature: Table A; Target 93963; HLA-C*07:04; TUBA3C; ENSG00000198033; TAA
GSGFASLL

SEQ ID NO: 93964 - protein, 8 aa, Homo sapiens
  misc_feature: Table A; Target 93964; HLA-C*12:03; TUBA3C; ENSG00000198033; TAA
GSGFASLL

SEQ ID NO: 93965 - protein, 11 aa, Homo sapiens
  misc_feature: Table A; Target 93965; HLA-A*11:01; TUBA3C; ENSG00000198033; TAA
GSGFASLLMER

SEQ ID NO: 93966 - protein, 11 aa, Homo sapiens
  misc_feature: Table A; Target 93966; HLA-A*31:01; TUBA3C; ENSG00000198033; TAA
GSGFASLLMER

SEQ ID NO: 93967 - protein, 9 aa, Homo sapiens
  misc_feature: Table A; Target 93967; HLA-A*02:03; TUBA3C; ENSG00000198033; TAA
GTGSGFASL

SEQ ID NO: 93968 - protein, 9 aa, Homo sapiens
  misc_feature: Table A; Target 93968; HLA-A*03:01; TUBA3C; ENSG00000198033; TAA
GTGSGFASL

SEQ ID NO: 93969 - protein, 9 aa, Homo sapiens
  misc_feature: Table A; Target 93969; HLA-A*03:02; TUBA3C; ENSG00000198033; TAA
GTGSGFASL

SEQ ID NO: 93970 - protein, 9 aa, Homo sapiens
  misc_feature: Table A; Target 93970; HLA-A*11:01; TUBA3C; ENSG00000198033; TAA
GTGSGFASL

SEQ ID NO: 93971 - protein, 9 aa, Homo sapiens
  misc_feature: Table A; Target 93971; HLA-A*24:02; TUBA3C; ENSG00000198033; TAA
GTGSGFASL

SEQ ID NO: 93972 - protein, 9 aa, Homo sapiens
  misc_feature: Table A; Target 93972; HLA-A*25:01; TUBA3C; ENSG00000198033; TAA
GTGSGFASL

SEQ ID NO: 93973 - protein, 9 aa, Homo sapiens
  misc_feature: Table A; Target 93973; HLA-A*26:01; TUBA3C; ENSG00000198033; TAA
GTGSGFASL

SEQ ID NO: 93974 - protein, 9 aa, Homo sapiens
  misc_feature: Table A; Target 93974; HLA-A*30:01; TUBA3C; ENSG00000198033; TAA
GTGSGFASL

SEQ ID NO: 93975 - protein, 9 aa, Homo sapiens
  misc_feature: Table A; Target 93975; HLA-A*31:01; TUBA3C; ENSG00000198033; TAA
GTGSGFASL

SEQ ID NO: 93976 - protein, 9 aa, Homo sapiens
  misc_feature: Table A; Target 93976; HLA-A*32:01; TUBA3C; ENSG00000198033; TAA
GTGSGFASL

SEQ ID NO: 93977 - protein, 9 aa, Homo sapiens
  misc_feature: Table A; Target 93977; HLA-B*07:02; TUBA3C; ENSG00000198033; TAA
GTGSGFASL

SEQ ID NO: 93978 - protein, 9 aa, Homo sapiens
  misc_feature: Table A; Target 93978; HLA-B*15:01; TUBA3C; ENSG00000198033; TAA
GTGSGFASL

SEQ ID NO: 93979 - protein, 9 aa, Homo sapiens
  misc_feature: Table A; Target 93979; HLA-B*15:03; TUBA3C; ENSG00000198033; TAA
GTGSGFASL

SEQ ID NO: 93980 - protein, 9 aa, Homo sapiens
  misc_feature: Table A; Target 93980; HLA-B*27:05; TUBA3C; ENSG00000198033; TAA
GTGSGFASL

SEQ ID NO: 93981 - protein, 9 aa, Homo sapiens
  misc_feature: Table A; Target 93981; HLA-B*39:01; TUBA3C; ENSG00000198033; TAA
GTGSGFASL

SEQ ID NO: 93982 - protein, 9 aa, Homo sapiens
  misc_feature: Table A; Target 93982; HLA-B*40:01; TUBA3C; ENSG00000198033; TAA
GTGSGFASL

SEQ ID NO: 93983 - protein, 9 aa, Homo sapiens
  misc_feature: Table A; Target 93983; HLA-B*40:02; TUBA3C; ENSG00000198033; TAA
GTGSGFASL

SEQ ID NO: 93984 - protein, 9 aa, Homo sapiens
  misc_feature: Table A; Target 93984; HLA-B*46:01; TUBA3C; ENSG00000198033; TAA
GTGSGFASL

SEQ ID NO: 93985 - protein, 9 aa, Homo sapiens
  misc_feature: Table A; Target 93985; HLA-B*58:01; TUBA3C; ENSG00000198033; TAA
GTGSGFASL

SEQ ID NO: 93986 - protein, 9 aa, Homo sapiens
  misc_feature: Table A; Target 93986; HLA-C*01:02; TUBA3C; ENSG00000198033; TAA
GTGSGFASL

SEQ ID NO: 93987 - protein, 9 aa, Homo sapiens
  misc_feature: Table A; Target 93987; HLA-C*02:02; TUBA3C; ENSG00000198033; TAA
GTGSGFASL

SEQ ID NO: 93988 - protein, 9 aa, Homo sapiens
  misc_feature: Table A; Target 93988; HLA-C*03:03; TUBA3C; ENSG00000198033; TAA
GTGSGFASL

SEQ ID NO: 93989 - protein, 9 aa, Homo sapiens
  misc_feature: Table A; Target 93989; HLA-C*03:04; TUBA3C; ENSG00000198033; TAA
GTGSGFASL

SEQ ID NO: 93990 - protein, 9 aa, Homo sapiens
  misc_feature: Table A; Target 93990; HLA-C*06:02; TUBA3C; ENSG00000198033; TAA
GTGSGFASL

SEQ ID NO: 93991 - protein, 9 aa, Homo sapiens
  misc_feature: Table A; Target 93991; HLA-C*07:01; TUBA3C; ENSG00000198033; TAA
GTGSGFASL

SEQ ID NO: 93992 - protein, 9 aa, Homo sapiens
  misc_feature: Table A; Target 93992; HLA-C*07:02; TUBA3C; ENSG00000198033; TAA
GTGSGFASL

SEQ ID NO: 93993 - protein, 9 aa, Homo sapiens
  misc_feature: Table A; Target 93993; HLA-C*07:04; TUBA3C; ENSG00000198033; TAA
GTGSGFASL

SEQ ID NO: 93994 - protein, 9 aa, Homo sapiens
  misc_feature: Table A; Target 93994; HLA-C*12:03; TUBA3C; ENSG00000198033; TAA
GTGSGFASL

SEQ ID NO: 93995 - protein, 9 aa, Homo sapiens
  misc_feature: Table A; Target 93995; HLA-C*14:02; TUBA3C; ENSG00000198033; TAA
GTGSGFASL

SEQ ID NO: 93996 - protein, 9 aa, Homo sapiens
  misc_feature: Table A; Target 93996; HLA-C*16:04; TUBA3C; ENSG00000198033; TAA
GTGSGFASL

SEQ ID NO: 93997 - protein, 10 aa, Homo sapiens
  misc_feature: Table A; Target 93997; HLA-A*03:01; TUBA3C; ENSG00000198033; TAA
GTGSGFASLL

SEQ ID NO: 93998 - protein, 10 aa, Homo sapiens
  misc_feature: Table A; Target 93998; HLA-A*03:02; TUBA3C; ENSG00000198033; TAA
GTGSGFASLL

SEQ ID NO: 93999 - protein, 10 aa, Homo sapiens
  misc_feature: Table A; Target 93999; HLA-A*11:01; TUBA3C; ENSG00000198033; TAA
GTGSGFASLL

SEQ ID NO: 94000 - protein, 10 aa, Homo sapiens
  misc_feature: Table A; Target 94000; HLA-A*68:02; TUBA3C; ENSG00000198033; TAA
GTGSGFASLL

SEQ ID NO: 94001 - protein, 10 aa, Homo sapiens
  misc_feature: Table A; Target 94001; HLA-B*07:02; TUBA3C; ENSG00000198033; TAA
GTGSGFASLL

SEQ ID NO: 94002 - protein, 10 aa, Homo sapiens
  misc_feature: Table A; Target 94002; HLA-B*40:02; TUBA3C; ENSG00000198033; TAA
GTGSGFASLL

SEQ ID NO: 94003 - protein, 10 aa, Homo sapiens
  misc_feature: Table A; Target 94003; HLA-C*06:02; TUBA3C; ENSG00000198033; TAA
GTGSGFASLL

SEQ ID NO: 94004 - protein, 10 aa, Homo sapiens
  misc_feature: Table A; Target 94004; HLA-C*07:01; TUBA3C; ENSG00000198033; TAA
GTGSGFASLL

SEQ ID NO: 94005 - protein, 10 aa, Homo sapiens
  misc_feature: Table A; Target 94005; HLA-C*07:02; TUBA3C; ENSG00000198033; TAA
GTGSGFASLL

SEQ ID NO: 94006 - protein, 10 aa, Homo sapiens
  misc_feature: Table A; Target 94006; HLA-C*07:04; TUBA3C; ENSG00000198033; TAA
GTGSGFASLL

SEQ ID NO: 94007 - protein, 10 aa, Homo sapiens
  misc_feature: Table A; Target 94007; HLA-C*12:03; TUBA3C; ENSG00000198033; TAA
GTGSGFASLL

SEQ ID NO: 94008 - protein, 9 aa, Homo sapiens
  misc_feature: Table A; Target 94008; HLA-A*02:07; TUBA3C; ENSG00000198033; TAA
GVDSVEAEA

SEQ ID NO: 94009 - protein, 9 aa, Homo sapiens
  misc_feature: Table A; Target 94009; HLA-B*39:01; TUBA3C; ENSG00000198033; TAA
GVDSVEAEA

SEQ ID NO: 94010 - protein, 9 aa, Homo sapiens
  misc_feature: Table A; Target 94010; HLA-C*05:01; TUBA3C; ENSG00000198033; TAA
GVDSVEAEA

SEQ ID NO: 94011 - protein, 9 aa, Homo sapiens
  misc_feature: Table A; Target 94011; HLA-A*25:01; TUBA3C; ENSG00000198033; TAA
GVQIGNACW

SEQ ID NO: 94012 - protein, 9 aa, Homo sapiens
  misc_feature: Table A; Target 94012; HLA-A*32:01; TUBA3C; ENSG00000198033; TAA
GVQIGNACW

SEQ ID NO: 94013 - protein, 9 aa, Homo sapiens
  misc_feature: Table A; Target 94013; HLA-B*15:01; TUBA3C; ENSG00000198033; TAA
GVQIGNACW

SEQ ID NO: 94014 - protein, 9 aa, Homo sapiens
  misc_feature: Table A; Target 94014; HLA-B*44:02; TUBA3C; ENSG00000198033; TAA
GVQIGNACW

SEQ ID NO: 94015 - protein, 9 aa, Homo sapiens
  misc_feature: Table A; Target 94015; HLA-B*57:01; TUBA3C; ENSG00000198033; TAA
GVQIGNACW

SEQ ID NO: 94016 - protein, 9 aa, Homo sapiens
  misc_feature: Table A; Target 94016; HLA-B*58:01; TUBA3C; ENSG00000198033; TAA
GVQIGNACW

SEQ ID NO: 94017 - protein, 8 aa, Homo sapiens
  misc_feature: Table A; Target 94017; HLA-B*18:01; TUBA3C; ENSG00000198033; TAA
HEQLSVAE

SEQ ID NO: 94018 - protein, 9 aa, Homo sapiens
  misc_feature: Table A; Target 94018; HLA-A*30:01; TUBA3C; ENSG00000198033; TAA
HEQLSVAEI

SEQ ID NO: 94019 - protein, 9 aa, Homo sapiens
  misc_feature: Table A; Target 94019; HLA-A*68:02; TUBA3C; ENSG00000198033; TAA
HEQLSVAEI

SEQ ID NO: 94020 - protein, 9 aa, Homo sapiens
  misc_feature: Table A; Target 94020; HLA-B*07:02; TUBA3C; ENSG00000198033; TAA
HEQLSVAEI

SEQ ID NO: 94021 - protein, 9 aa, Homo sapiens
  misc_feature: Table A; Target 94021; HLA-B*08:01; TUBA3C; ENSG00000198033; TAA
HEQLSVAEI

SEQ ID NO: 94022 - protein, 9 aa, Homo sapiens
  misc_feature: Table A; Target 94022; HLA-B*13:02; TUBA3C; ENSG00000198033; TAA
HEQLSVAEI

SEQ ID NO: 94023 - protein, 9 aa, Homo sapiens
  misc_feature: Table A; Target 94023; HLA-B*15:03; TUBA3C; ENSG00000198033; TAA
HEQLSVAEI

SEQ ID NO: 94024 - protein, 9 aa, Homo sapiens
  misc_feature: Table A; Target 94024; HLA-B*18:01; TUBA3C; ENSG00000198033; TAA
HEQLSVAEI

SEQ ID NO: 94025 - protein, 9 aa, Homo sapiens
  misc_feature: Table A; Target 94025; HLA-B*27:02; TUBA3C; ENSG00000198033; TAA
HEQLSVAEI

SEQ ID NO: 94026 - protein, 9 aa, Homo sapiens
  misc_feature: Table A; Target 94026; HLA-B*27:05; TUBA3C; ENSG00000198033; TAA
HEQLSVAEI

SEQ ID NO: 94027 - protein, 9 aa, Homo sapiens
  misc_feature: Table A; Target 94027; HLA-B*37:01; TUBA3C; ENSG00000198033; TAA
HEQLSVAEI

SEQ ID NO: 94028 - protein, 9 aa, Homo sapiens
  misc_feature: Table A; Target 94028; HLA-B*38:01; TUBA3C; ENSG00000198033; TAA
HEQLSVAEI

SEQ ID NO: 94029 - protein, 9 aa, Homo sapiens
  misc_feature: Table A; Target 94029; HLA-B*39:01; TUBA3C; ENSG00000198033; TAA
HEQLSVAEI

SEQ ID NO: 94030 - protein, 9 aa, Homo sapiens
  misc_feature: Table A; Target 94030; HLA-B*40:01; TUBA3C; ENSG00000198033; TAA
HEQLSVAEI

SEQ ID NO: 94031 - protein, 9 aa, Homo sapiens
  misc_feature: Table A; Target 94031; HLA-B*40:02; TUBA3C; ENSG00000198033; TAA
HEQLSVAEI

SEQ ID NO: 94032 - protein, 9 aa, Homo sapiens
  misc_feature: Table A; Target 94032; HLA-B*44:02; TUBA3C; ENSG00000198033; TAA
HEQLSVAEI

SEQ ID NO: 94033 - protein, 9 aa, Homo sapiens
  misc_feature: Table A; Target 94033; HLA-B*44:03; TUBA3C; ENSG00000198033; TAA
HEQLSVAEI

SEQ ID NO: 94034 - protein, 9 aa, Homo sapiens
  misc_feature: Table A; Target 94034; HLA-B*49:01; TUBA3C; ENSG00000198033; TAA
HEQLSVAEI

SEQ ID NO: 94035 - protein, 9 aa, Homo sapiens
  misc_feature: Table A; Target 94035; HLA-B*51:01; TUBA3C; ENSG00000198033; TAA
HEQLSVAEI

SEQ ID NO: 94036 - protein, 9 aa, Homo sapiens
  misc_feature: Table A; Target 94036; HLA-C*02:02; TUBA3C; ENSG00000198033; TAA
HEQLSVAEI

SEQ ID NO: 94037 - protein, 9 aa, Homo sapiens
  misc_feature: Table A; Target 94037; HLA-C*04:01; TUBA3C; ENSG00000198033; TAA
HEQLSVAEI

SEQ ID NO: 94038 - protein, 9 aa, Homo sapiens
  misc_feature: Table A; Target 94038; HLA-C*06:02; TUBA3C; ENSG00000198033; TAA
HEQLSVAEI

SEQ ID NO: 94039 - protein, 9 aa, Homo sapiens
  misc_feature: Table A; Target 94039; HLA-C*07:01; TUBA3C; ENSG00000198033; TAA
HEQLSVAEI

SEQ ID NO: 94040 - protein, 9 aa, Homo sapiens
  misc_feature: Table A; Target 94040; HLA-C*07:02; TUBA3C; ENSG00000198033; TAA
HEQLSVAEI

SEQ ID NO: 94041 - protein, 9 aa, Homo sapiens
  misc_feature: Table A; Target 94041; HLA-C*07:04; TUBA3C; ENSG00000198033; TAA
HEQLSVAEI

SEQ ID NO: 94042 - protein, 9 aa, Homo sapiens
  misc_feature: Table A; Target 94042; HLA-C*12:03; TUBA3C; ENSG00000198033; TAA
HEQLSVAEI

SEQ ID NO: 94043 - protein, 9 aa, Homo sapiens
  misc_feature: Table A; Target 94043; HLA-C*16:02; TUBA3C; ENSG00000198033; TAA
HEQLSVAEI

SEQ ID NO: 94044 - protein, 9 aa, Homo sapiens
  misc_feature: Table A; Target 94044; HLA-C*16:04; TUBA3C; ENSG00000198033; TAA
HEQLSVAEI

SEQ ID NO: 94045 - protein, 9 aa, Homo sapiens
  misc_feature: Table A; Target 94045; HLA-B*35:01; TUBA3C; ENSG00000198033; TAA
HGIQPDGQM

SEQ ID NO: 94046 - protein, 9 aa, Homo sapiens
  misc_feature: Table A; Target 94046; HLA-B*35:03; TUBA3C; ENSG00000198033; TAA
HGIQPDGQM

SEQ ID NO: 94047 - protein, 9 aa, Homo sapiens
  misc_feature: Table A; Target 94047; HLA-C*03:03; TUBA3C; ENSG00000198033; TAA
HGIQPDGQM

SEQ ID NO: 94048 - protein, 9 aa, Homo sapiens
  misc_feature: Table A; Target 94048; HLA-C*03:04; TUBA3C; ENSG00000198033; TAA
HGIQPDGQM

SEQ ID NO: 94049 - protein, 10 aa, Homo sapiens
  misc_feature: Table A; Target 94049; HLA-B*27:05; TUBA3C; ENSG00000198033; TAA
HGIQPDGQMP

SEQ ID NO: 94050 - protein, 10 aa, Homo sapiens
  misc_feature: Table A; Target 94050; HLA-C*04:01; TUBA3C; ENSG00000198033; TAA
HGIQPDGQMP

SEQ ID NO: 94051 - protein, 11 aa, Homo sapiens
  misc_feature: Table A; Target 94051; HLA-C*04:01; TUBA3C; ENSG00000198033; TAA
HGIQPDGQMPS

SEQ ID NO: 94052 - protein, 8 aa, Homo sapiens
  misc_feature: Table A; Target 94052; HLA-B*55:01; TUBA3C; ENSG00000198033; TAA
HPEQLITG

SEQ ID NO: 94053 - protein, 8 aa, Homo sapiens
  misc_feature: Table A; Target 94053; HLA-C*04:01; TUBA3C; ENSG00000198033; TAA
HPEQLITG

SEQ ID NO: 94054 - protein, 9 aa, Homo sapiens
  misc_feature: Table A; Target 94054; HLA-A*01:01; TUBA3C; ENSG00000198033; TAA
HPEQLITGK

SEQ ID NO: 94055 - protein, 9 aa, Homo sapiens
  misc_feature: Table A; Target 94055; HLA-A*03:02; TUBA3C; ENSG00000198033; TAA
HPEQLITGK

SEQ ID NO: 94056 - protein, 9 aa, Homo sapiens
  misc_feature: Table A; Target 94056; HLA-A*11:01; TUBA3C; ENSG00000198033; TAA
HPEQLITGK

SEQ ID NO: 94057 - protein, 9 aa, Homo sapiens
  misc_feature: Table A; Target 94057; HLA-A*68:01; TUBA3C; ENSG00000198033; TAA
HPEQLITGK

SEQ ID NO: 94058 - protein, 9 aa, Homo sapiens
  misc_feature: Table A; Target 94058; HLA-B*27:02; TUBA3C; ENSG00000198033; TAA
HPEQLITGK

SEQ ID NO: 94059 - protein, 9 aa, Homo sapiens
  misc_feature: Table A; Target 94059; HLA-B*35:01; TUBA3C; ENSG00000198033; TAA
HPEQLITGK

SEQ ID NO: 94060 - protein, 9 aa, Homo sapiens
  misc_feature: Table A; Target 94060; HLA-B*35:03; TUBA3C; ENSG00000198033; TAA
HPEQLITGK

SEQ ID NO: 94061 - protein, 9 aa, Homo sapiens
  misc_feature: Table A; Target 94061; HLA-B*55:01; TUBA3C; ENSG00000198033; TAA
HPEQLITGK

SEQ ID NO: 94062 - protein, 9 aa, Homo sapiens
  misc_feature: Table A; Target 94062; HLA-B*56:01; TUBA3C; ENSG00000198033; TAA
HPEQLITGK

SEQ ID NO: 94063 - protein, 9 aa, Homo sapiens
  misc_feature: Table A; Target 94063; HLA-C*07:01; TUBA3C; ENSG00000198033; TAA
HPEQLITGK

SEQ ID NO: 94064 - protein, 9 aa, Homo sapiens
  misc_feature: Table A; Target 94064; HLA-C*07:06; TUBA3C; ENSG00000198033; TAA
HPEQLITGK

SEQ ID NO: 94065 - protein, 8 aa, Homo sapiens
  misc_feature: Table A; Target 94065; HLA-B*40:02; TUBA3C; ENSG00000198033; TAA
HSFGGGTG

SEQ ID NO: 94066 - protein, 8 aa, Homo sapiens
  misc_feature: Table A; Target 94066; HLA-C*04:01; TUBA3C; ENSG00000198033; TAA
HSFGGGTG

SEQ ID NO: 94067 - protein, 8 aa, Homo sapiens
  misc_feature: Table A; Target 94067; HLA-C*06:02; TUBA3C; ENSG00000198033; TAA
HSFGGGTG

SEQ ID NO: 94068 - protein, 8 aa, Homo sapiens
  misc_feature: Table A; Target 94068; HLA-C*07:01; TUBA3C; ENSG00000198033; TAA
HSFGGGTG

SEQ ID NO: 94069 - protein, 8 aa, Homo sapiens
  misc_feature: Table A; Target 94069; HLA-C*07:04; TUBA3C; ENSG00000198033; TAA
HSFGGGTG

SEQ ID NO: 94070 - protein, 8 aa, Homo sapiens
  misc_feature: Table A; Target 94070; HLA-C*12:03; TUBA3C; ENSG00000198033; TAA
HSFGGGTG

SEQ ID NO: 94071 - protein, 10 aa, Homo sapiens
  misc_feature: Table A; Target 94071; HLA-A*26:01; TUBA3C; ENSG00000198033; TAA
HSFGGGTGSG

SEQ ID NO: 94072 - protein, 10 aa, Homo sapiens
  misc_feature: Table A; Target 94072; HLA-B*27:05; TUBA3C; ENSG00000198033; TAA
HSFGGGTGSG

SEQ ID NO: 94073 - protein, 10 aa, Homo sapiens
  misc_feature: Table A; Target 94073; HLA-B*39:01; TUBA3C; ENSG00000198033; TAA
HSFGGGTGSG

SEQ ID NO: 94074 - protein, 10 aa, Homo sapiens
  misc_feature: Table A; Target 94074; HLA-B*40:02; TUBA3C; ENSG00000198033; TAA
HSFGGGTGSG

SEQ ID NO: 94075 - protein, 10 aa, Homo sapiens
  misc_feature: Table A; Target 94075; HLA-B*46:01; TUBA3C; ENSG00000198033; TAA
HSFGGGTGSG

SEQ ID NO: 94076 - protein, 10 aa, Homo sapiens
  misc_feature: Table A; Target 94076; HLA-C*01:02; TUBA3C; ENSG00000198033; TAA
HSFGGGTGSG

SEQ ID NO: 94077 - protein, 10 aa, Homo sapiens
  misc_feature: Table A; Target 94077; HLA-C*04:01; TUBA3C; ENSG00000198033; TAA
HSFGGGTGSG

SEQ ID NO: 94078 - protein, 10 aa, Homo sapiens
  misc_feature: Table A; Target 94078; HLA-C*06:02; TUBA3C; ENSG00000198033; TAA
HSFGGGTGSG

SEQ ID NO: 94079 - protein, 10 aa, Homo sapiens
  misc_feature: Table A; Target 94079; HLA-C*07:01; TUBA3C; ENSG00000198033; TAA
HSFGGGTGSG

SEQ ID NO: 94080 - protein, 10 aa, Homo sapiens
  misc_feature: Table A; Target 94080; HLA-C*07:02; TUBA3C; ENSG00000198033; TAA
HSFGGGTGSG

SEQ ID NO: 94081 - protein, 10 aa, Homo sapiens
  misc_feature: Table A; Target 94081; HLA-C*12:03; TUBA3C; ENSG00000198033; TAA
HSFGGGTGSG

SEQ ID NO: 94082 - protein, 10 aa, Homo sapiens
  misc_feature: Table A; Target 94082; HLA-C*16:02; TUBA3C; ENSG00000198033; TAA
HSFGGGTGSG

SEQ ID NO: 94083 - protein, 10 aa, Homo sapiens
  misc_feature: Table A; Target 94083; HLA-C*16:04; TUBA3C; ENSG00000198033; TAA
HSFGGGTGSG

SEQ ID NO: 94084 - protein, 11 aa, Homo sapiens
  misc_feature: Table A; Target 94084; HLA-A*01:01; TUBA3C; ENSG00000198033; TAA
HSFGGGTGSGF

SEQ ID NO: 94085 - protein, 11 aa, Homo sapiens
  misc_feature: Table A; Target 94085; HLA-A*23:01; TUBA3C; ENSG00000198033; TAA
HSFGGGTGSGF

SEQ ID NO: 94086 - protein, 11 aa, Homo sapiens
  misc_feature: Table A; Target 94086; HLA-A*25:01; TUBA3C; ENSG00000198033; TAA
HSFGGGTGSGF

SEQ ID NO: 94087 - protein, 11 aa, Homo sapiens
  misc_feature: Table A; Target 94087; HLA-A*26:01; TUBA3C; ENSG00000198033; TAA
HSFGGGTGSGF

SEQ ID NO: 94088 - protein, 11 aa, Homo sapiens
  misc_feature: Table A; Target 94088; HLA-A*29:02; TUBA3C; ENSG00000198033; TAA
HSFGGGTGSGF

SEQ ID NO: 94089 - protein, 11 aa, Homo sapiens
  misc_feature: Table A; Target 94089; HLA-A*30:02; TUBA3C; ENSG00000198033; TAA
HSFGGGTGSGF

SEQ ID NO: 94090 - protein, 11 aa, Homo sapiens
  misc_feature: Table A; Target 94090; HLA-A*31:01; TUBA3C; ENSG00000198033; TAA
HSFGGGTGSGF

SEQ ID NO: 94091 - protein, 11 aa, Homo sapiens
  misc_feature: Table A; Target 94091; HLA-A*32:01; TUBA3C; ENSG00000198033; TAA
HSFGGGTGSGF

SEQ ID NO: 94092 - protein, 11 aa, Homo sapiens
  misc_feature: Table A; Target 94092; HLA-A*33:01; TUBA3C; ENSG00000198033; TAA
HSFGGGTGSGF

SEQ ID NO: 94093 - protein, 11 aa, Homo sapiens
  misc_feature: Table A; Target 94093; HLA-A*33:03; TUBA3C; ENSG00000198033; TAA
HSFGGGTGSGF

SEQ ID NO: 94094 - protein, 11 aa, Homo sapiens
  misc_feature: Table A; Target 94094; HLA-A*68:01; TUBA3C; ENSG00000198033; TAA
HSFGGGTGSGF

SEQ ID NO: 94095 - protein, 11 aa, Homo sapiens
  misc_feature: Table A; Target 94095; HLA-A*68:02; TUBA3C; ENSG00000198033; TAA
HSFGGGTGSGF

SEQ ID NO: 94096 - protein, 11 aa, Homo sapiens
  misc_feature: Table A; Target 94096; HLA-B*15:01; TUBA3C; ENSG00000198033; TAA
HSFGGGTGSGF

SEQ ID NO: 94097 - protein, 11 aa, Homo sapiens
  misc_feature: Table A; Target 94097; HLA-B*15:03; TUBA3C; ENSG00000198033; TAA
HSFGGGTGSGF

SEQ ID NO: 94098 - protein, 11 aa, Homo sapiens
  misc_feature: Table A; Target 94098; HLA-B*27:02; TUBA3C; ENSG00000198033; TAA
HSFGGGTGSGF

SEQ ID NO: 94099 - protein, 11 aa, Homo sapiens
  misc_feature: Table A; Target 94099; HLA-B*27:05; TUBA3C; ENSG00000198033; TAA
HSFGGGTGSGF

SEQ ID NO: 94100 - protein, 11 aa, Homo sapiens
  misc_feature: Table A; Target 94100; HLA-B*35:01; TUBA3C; ENSG00000198033; TAA
HSFGGGTGSGF

SEQ ID NO: 94101 - protein, 11 aa, Homo sapiens
  misc_feature: Table A; Target 94101; HLA-B*35:03; TUBA3C; ENSG00000198033; TAA
HSFGGGTGSGF

SEQ ID NO: 94102 - protein, 11 aa, Homo sapiens
  misc_feature: Table A; Target 94102; HLA-B*38:01; TUBA3C; ENSG00000198033; TAA
HSFGGGTGSGF

SEQ ID NO: 94103 - protein, 11 aa, Homo sapiens
  misc_feature: Table A; Target 94103; HLA-B*39:01; TUBA3C; ENSG00000198033; TAA
HSFGGGTGSGF

SEQ ID NO: 94104 - protein, 11 aa, Homo sapiens
  misc_feature: Table A; Target 94104; HLA-B*40:02; TUBA3C; ENSG00000198033; TAA
HSFGGGTGSGF

SEQ ID NO: 94105 - protein, 11 aa, Homo sapiens
  misc_feature: Table A; Target 94105; HLA-B*46:01; TUBA3C; ENSG00000198033; TAA
HSFGGGTGSGF

SEQ ID NO: 94106 - protein, 11 aa, Homo sapiens
  misc_feature: Table A; Target 94106; HLA-B*54:01; TUBA3C; ENSG00000198033; TAA
HSFGGGTGSGF

SEQ ID NO: 94107 - protein, 11 aa, Homo sapiens
  misc_feature: Table A; Target 94107; HLA-B*55:01; TUBA3C; ENSG00000198033; TAA
HSFGGGTGSGF

SEQ ID NO: 94108 - protein, 11 aa, Homo sapiens
  misc_feature: Table A; Target 94108; HLA-B*57:01; TUBA3C; ENSG00000198033; TAA
HSFGGGTGSGF

SEQ ID NO: 94109 - protein, 11 aa, Homo sapiens
  misc_feature: Table A; Target 94109; HLA-B*58:01; TUBA3C; ENSG00000198033; TAA
HSFGGGTGSGF

SEQ ID NO: 94110 - protein, 11 aa, Homo sapiens
  misc_feature: Table A; Target 94110; HLA-C*01:02; TUBA3C; ENSG00000198033; TAA
HSFGGGTGSGF

SEQ ID NO: 94111 - protein, 11 aa, Homo sapiens
  misc_feature: Table A; Target 94111; HLA-C*02:02; TUBA3C; ENSG00000198033; TAA
HSFGGGTGSGF

SEQ ID NO: 94112 - protein, 11 aa, Homo sapiens
  misc_feature: Table A; Target 94112; HLA-C*03:03; TUBA3C; ENSG00000198033; TAA
HSFGGGTGSGF

SEQ ID NO: 94113 - protein, 11 aa, Homo sapiens
  misc_feature: Table A; Target 94113; HLA-C*03:04; TUBA3C; ENSG00000198033; TAA
HSFGGGTGSGF

SEQ ID NO: 94114 - protein, 11 aa, Homo sapiens
  misc_feature: Table A; Target 94114; HLA-C*04:01; TUBA3C; ENSG00000198033; TAA
HSFGGGTGSGF

SEQ ID NO: 94115 - protein, 11 aa, Homo sapiens
  misc_feature: Table A; Target 94115; HLA-C*05:01; TUBA3C; ENSG00000198033; TAA
HSFGGGTGSGF

SEQ ID NO: 94116 - protein, 11 aa, Homo sapiens
  misc_feature: Table A; Target 94116; HLA-C*06:02; TUBA3C; ENSG00000198033; TAA
HSFGGGTGSGF

SEQ ID NO: 94117 - protein, 11 aa, Homo sapiens
  misc_feature: Table A; Target 94117; HLA-C*07:01; TUBA3C; ENSG00000198033; TAA
HSFGGGTGSGF

SEQ ID NO: 94118 - protein, 11 aa, Homo sapiens
  misc_feature: Table A; Target 94118; HLA-C*07:02; TUBA3C; ENSG00000198033; TAA
HSFGGGTGSGF

SEQ ID NO: 94119 - protein, 11 aa, Homo sapiens
  misc_feature: Table A; Target 94119; HLA-C*07:04; TUBA3C; ENSG00000198033; TAA
HSFGGGTGSGF

SEQ ID NO: 94120 - protein, 11 aa, Homo sapiens
  misc_feature: Table A; Target 94120; HLA-C*07:06; TUBA3C; ENSG00000198033; TAA
HSFGGGTGSGF

SEQ ID NO: 94121 - protein, 11 aa, Homo sapiens
  misc_feature: Table A; Target 94121; HLA-C*12:03; TUBA3C; ENSG00000198033; TAA
HSFGGGTGSGF

SEQ ID NO: 94122 - protein, 11 aa, Homo sapiens
  misc_feature: Table A; Target 94122; HLA-C*14:02; TUBA3C; ENSG00000198033; TAA
HSFGGGTGSGF

SEQ ID NO: 94123 - protein, 11 aa, Homo sapiens
  misc_feature: Table A; Target 94123; HLA-C*16:01; TUBA3C; ENSG00000198033; TAA
HSFGGGTGSGF

SEQ ID NO: 94124 - protein, 11 aa, Homo sapiens
  misc_feature: Table A; Target 94124; HLA-C*16:02; TUBA3C; ENSG00000198033; TAA
HSFGGGTGSGF

SEQ ID NO: 94125 - protein, 11 aa, Homo sapiens
  misc_feature: Table A; Target 94125; HLA-C*16:04; TUBA3C; ENSG00000198033; TAA
HSFGGGTGSGF

SEQ ID NO: 94126 - protein, 8 aa, Homo sapiens
  misc_feature: Table A; Target 94126; HLA-C*04:01; TUBA3C; ENSG00000198033; TAA
HVGQAGVQ

SEQ ID NO: 94127 - protein, 8 aa, Homo sapiens
  misc_feature: Table A; Target 94127; HLA-C*07:01; TUBA3C; ENSG00000198033; TAA
HVGQAGVQ

SEQ ID NO: 94128 - protein, 8 aa, Homo sapiens
  misc_feature: Table A; Target 94128; HLA-C*12:03; TUBA3C; ENSG00000198033; TAA
HVGQAGVQ

SEQ ID NO: 94129 - protein, 9 aa, Homo sapiens
  misc_feature: Table A; Target 94129; HLA-A*25:01; TUBA3C; ENSG00000198033; TAA
HVGQAGVQI

SEQ ID NO: 94130 - protein, 9 aa, Homo sapiens
  misc_feature: Table A; Target 94130; HLA-A*26:01; TUBA3C; ENSG00000198033; TAA
HVGQAGVQI

SEQ ID NO: 94131 - protein, 9 aa, Homo sapiens
  misc_feature: Table A; Target 94131; HLA-A*33:03; TUBA3C; ENSG00000198033; TAA
HVGQAGVQI

SEQ ID NO: 94132 - protein, 9 aa, Homo sapiens
  misc_feature: Table A; Target 94132; HLA-A*68:01; TUBA3C; ENSG00000198033; TAA
HVGQAGVQI

SEQ ID NO: 94133 - protein, 9 aa, Homo sapiens
  misc_feature: Table A; Target 94133; HLA-A*68:02; TUBA3C; ENSG00000198033; TAA
HVGQAGVQI

SEQ ID NO: 94134 - protein, 9 aa, Homo sapiens
  misc_feature: Table A; Target 94134; HLA-B*13:02; TUBA3C; ENSG00000198033; TAA
HVGQAGVQI

SEQ ID NO: 94135 - protein, 9 aa, Homo sapiens
  misc_feature: Table A; Target 94135; HLA-B*27:05; TUBA3C; ENSG00000198033; TAA
HVGQAGVQI

SEQ ID NO: 94136 - protein, 9 aa, Homo sapiens
  misc_feature: Table A; Target 94136; HLA-B*35:03; TUBA3C; ENSG00000198033; TAA
HVGQAGVQI

SEQ ID NO: 94137 - protein, 9 aa, Homo sapiens
  misc_feature: Table A; Target 94137; HLA-B*38:01; TUBA3C; ENSG00000198033; TAA
HVGQAGVQI

SEQ ID NO: 94138 - protein, 9 aa, Homo sapiens
  misc_feature: Table A; Target 94138; HLA-B*39:01; TUBA3C; ENSG00000198033; TAA
HVGQAGVQI

SEQ ID NO: 94139 - protein, 9 aa, Homo sapiens
  misc_feature: Table A; Target 94139; HLA-B*40:02; TUBA3C; ENSG00000198033; TAA
HVGQAGVQI

SEQ ID NO: 94140 - protein, 9 aa, Homo sapiens
  misc_feature: Table A; Target 94140; HLA-B*51:01; TUBA3C; ENSG00000198033; TAA
HVGQAGVQI

SEQ ID NO: 94141 - protein, 9 aa, Homo sapiens
  misc_feature: Table A; Target 94141; HLA-C*03:03; TUBA3C; ENSG00000198033; TAA
HVGQAGVQI

SEQ ID NO: 94142 - protein, 9 aa, Homo sapiens
  misc_feature: Table A; Target 94142; HLA-C*04:01; TUBA3C; ENSG00000198033; TAA
HVGQAGVQI

SEQ ID NO: 94143 - protein, 9 aa, Homo sapiens
  misc_feature: Table A; Target 94143; HLA-C*05:01; TUBA3C; ENSG00000198033; TAA
HVGQAGVQI

SEQ ID NO: 94144 - protein, 9 aa, Homo sapiens
  misc_feature: Table A; Target 94144; HLA-C*06:02; TUBA3C; ENSG00000198033; TAA
HVGQAGVQI

SEQ ID NO: 94145 - protein, 9 aa, Homo sapiens
  misc_feature: Table A; Target 94145; HLA-C*07:01; TUBA3C; ENSG00000198033; TAA
HVGQAGVQI

SEQ ID NO: 94146 - protein, 9 aa, Homo sapiens
  misc_feature: Table A; Target 94146; HLA-C*07:02; TUBA3C; ENSG00000198033; TAA
HVGQAGVQI

SEQ ID NO: 94147 - protein, 9 aa, Homo sapiens
  misc_feature: Table A; Target 94147; HLA-C*07:04; TUBA3C; ENSG00000198033; TAA
HVGQAGVQI

SEQ ID NO: 94148 - protein, 9 aa, Homo sapiens
  misc_feature: Table A; Target 94148; HLA-C*07:06; TUBA3C; ENSG00000198033; TAA
HVGQAGVQI

SEQ ID NO: 94149 - protein, 10 aa, Homo sapiens
  misc_feature: Table A; Target 94149; HLA-C*07:01; TUBA3C; ENSG00000198033; TAA
HVGQAGVQIG

SEQ ID NO: 94150 - protein, 11 aa, Homo sapiens
  misc_feature: Table A; Target 94150; HLA-C*07:01; TUBA3C; ENSG00000198033; TAA
HVGQAGVQIGN

SEQ ID NO: 94151 - protein, 8 aa, Homo sapiens
  misc_feature: Table A; Target 94151; HLA-A*68:02; TUBA3C; ENSG00000198033; TAA
HVPRAVFV

SEQ ID NO: 94152 - protein, 8 aa, Homo sapiens
  misc_feature: Table A; Target 94152; HLA-B*51:01; TUBA3C; ENSG00000198033; TAA
HVPRAVFV

SEQ ID NO: 94153 - protein, 10 aa, Homo sapiens
  misc_feature: Table A; Target 94153; HLA-A*02:07; TUBA3C; ENSG00000198033; TAA
HVPRAVFVDL

SEQ ID NO: 94154 - protein, 10 aa, Homo sapiens
  misc_feature: Table A; Target 94154; HLA-A*68:02; TUBA3C; ENSG00000198033; TAA
HVPRAVFVDL

SEQ ID NO: 94155 - protein, 8 aa, Homo sapiens
  misc_feature: Table A; Target 94155; HLA-A*23:01; TUBA3C; ENSG00000198033; TAA
HYTIGKEI

SEQ ID NO: 94156 - protein, 8 aa, Homo sapiens
  misc_feature: Table A; Target 94156; HLA-A*24:02; TUBA3C; ENSG00000198033; TAA
HYTIGKEI

SEQ ID NO: 94157 - protein, 8 aa, Homo sapiens
  misc_feature: Table A; Target 94157; HLA-B*51:01; TUBA3C; ENSG00000198033; TAA
HYTIGKEI

SEQ ID NO: 94158 - protein, 8 aa, Homo sapiens
  misc_feature: Table A; Target 94158; HLA-C*04:01; TUBA3C; ENSG00000198033; TAA
HYTIGKEI

SEQ ID NO: 94159 - protein, 8 aa, Homo sapiens
  misc_feature: Table A; Target 94159; HLA-C*07:01; TUBA3C; ENSG00000198033; TAA
HYTIGKEI

SEQ ID NO: 94160 - protein, 8 aa, Homo sapiens
  misc_feature: Table A; Target 94160; HLA-C*14:02; TUBA3C; ENSG00000198033; TAA
HYTIGKEI

SEQ ID NO: 94161 - protein, 8 aa, Homo sapiens
  misc_feature: Table A; Target 94161; HLA-C*16:02; TUBA3C; ENSG00000198033; TAA
HYTIGKEI

SEQ ID NO: 94162 - protein, 8 aa, Homo sapiens
  misc_feature: Table A; Target 94162; HLA-B*08:01; TUBA3C; ENSG00000198033; TAA
IATIKTKR

SEQ ID NO: 94163 - protein, 8 aa, Homo sapiens
  misc_feature: Table A; Target 94163; HLA-C*16:01; TUBA3C; ENSG00000198033; TAA
IATIKTKR

SEQ ID NO: 94164 - protein, 8 aa, Homo sapiens
  misc_feature: Table A; Target 94164; HLA-C*07:01; TUBA3C; ENSG00000198033; TAA
IERPTYTN

SEQ ID NO: 94165 - protein, 9 aa, Homo sapiens
  misc_feature: Table A; Target 94165; HLA-A*02:03; TUBA3C; ENSG00000198033; TAA
IERPTYTNL

SEQ ID NO: 94166 - protein, 9 aa, Homo sapiens
  misc_feature: Table A; Target 94166; HLA-A*02:07; TUBA3C; ENSG00000198033; TAA
IERPTYTNL

SEQ ID NO: 94167 - protein, 9 aa, Homo sapiens
  misc_feature: Table A; Target 94167; HLA-A*03:01; TUBA3C; ENSG00000198033; TAA
IERPTYTNL

SEQ ID NO: 94168 - protein, 9 aa, Homo sapiens
  misc_feature: Table A; Target 94168; HLA-A*23:01; TUBA3C; ENSG00000198033; TAA
IERPTYTNL

SEQ ID NO: 94169 - protein, 9 aa, Homo sapiens
  misc_feature: Table A; Target 94169; HLA-A*24:02; TUBA3C; ENSG00000198033; TAA
IERPTYTNL

SEQ ID NO: 94170 - protein, 9 aa, Homo sapiens
  misc_feature: Table A; Target 94170; HLA-A*30:01; TUBA3C; ENSG00000198033; TAA
IERPTYTNL

SEQ ID NO: 94171 - protein, 9 aa, Homo sapiens
  misc_feature: Table A; Target 94171; HLA-A*31:01; TUBA3C; ENSG00000198033; TAA
IERPTYTNL

SEQ ID NO: 94172 - protein, 9 aa, Homo sapiens
  misc_feature: Table A; Target 94172; HLA-A*32:01; TUBA3C; ENSG00000198033; TAA
IERPTYTNL

SEQ ID NO: 94173 - protein, 9 aa, Homo sapiens
  misc_feature: Table A; Target 94173; HLA-B*07:02; TUBA3C; ENSG00000198033; TAA
IERPTYTNL

SEQ ID NO: 94174 - protein, 9 aa, Homo sapiens
  misc_feature: Table A; Target 94174; HLA-B*13:02; TUBA3C; ENSG00000198033; TAA
IERPTYTNL

SEQ ID NO: 94175 - protein, 9 aa, Homo sapiens
  misc_feature: Table A; Target 94175; HLA-B*15:01; TUBA3C; ENSG00000198033; TAA
IERPTYTNL

SEQ ID NO: 94176 - protein, 9 aa, Homo sapiens
  misc_feature: Table A; Target 94176; HLA-B*15:03; TUBA3C; ENSG00000198033; TAA
IERPTYTNL

SEQ ID NO: 94177 - protein, 9 aa, Homo sapiens
  misc_feature: Table A; Target 94177; HLA-B*18:01; TUBA3C; ENSG00000198033; TAA
IERPTYTNL

SEQ ID NO: 94178 - protein, 9 aa, Homo sapiens
  misc_feature: Table A; Target 94178; HLA-B*27:05; TUBA3C; ENSG00000198033; TAA
IERPTYTNL

SEQ ID NO: 94179 - protein, 9 aa, Homo sapiens
  misc_feature: Table A; Target 94179; HLA-B*37:01; TUBA3C; ENSG00000198033; TAA
IERPTYTNL

SEQ ID NO: 94180 - protein, 9 aa, Homo sapiens
  misc_feature: Table A; Target 94180; HLA-B*40:01; TUBA3C; ENSG00000198033; TAA
IERPTYTNL

SEQ ID NO: 94181 - protein, 9 aa, Homo sapiens
  misc_feature: Table A; Target 94181; HLA-B*40:02; TUBA3C; ENSG00000198033; TAA
IERPTYTNL

SEQ ID NO: 94182 - protein, 9 aa, Homo sapiens
  misc_feature: Table A; Target 94182; HLA-B*44:02; TUBA3C; ENSG00000198033; TAA
IERPTYTNL

SEQ ID NO: 94183 - protein, 9 aa, Homo sapiens
  misc_feature: Table A; Target 94183; HLA-B*44:03; TUBA3C; ENSG00000198033; TAA
IERPTYTNL

SEQ ID NO: 94184 - protein, 9 aa, Homo sapiens
  misc_feature: Table A; Target 94184; HLA-B*46:01; TUBA3C; ENSG00000198033; TAA
IERPTYTNL

SEQ ID NO: 94185 - protein, 9 aa, Homo sapiens
  misc_feature: Table A; Target 94185; HLA-B*49:01; TUBA3C; ENSG00000198033; TAA
IERPTYTNL

SEQ ID NO: 94186 - protein, 9 aa, Homo sapiens
  misc_feature: Table A; Target 94186; HLA-B*51:01; TUBA3C; ENSG00000198033; TAA
IERPTYTNL

SEQ ID NO: 94187 - protein, 9 aa, Homo sapiens
  misc_feature: Table A; Target 94187; HLA-B*57:01; TUBA3C; ENSG00000198033; TAA
IERPTYTNL

SEQ ID NO: 94188 - protein, 9 aa, Homo sapiens
  misc_feature: Table A; Target 94188; HLA-C*01:02; TUBA3C; ENSG00000198033; TAA
IERPTYTNL

SEQ ID NO: 94189 - protein, 9 aa, Homo sapiens
  misc_feature: Table A; Target 94189; HLA-C*02:02; TUBA3C; ENSG00000198033; TAA
IERPTYTNL

SEQ ID NO: 94190 - protein, 9 aa, Homo sapiens
  misc_feature: Table A; Target 94190; HLA-C*03:04; TUBA3C; ENSG00000198033; TAA
IERPTYTNL

SEQ ID NO: 94191 - protein, 9 aa, Homo sapiens
  misc_feature: Table A; Target 94191; HLA-C*04:01; TUBA3C; ENSG00000198033; TAA
IERPTYTNL

SEQ ID NO: 94192 - protein, 9 aa, Homo sapiens
  misc_feature: Table A; Target 94192; HLA-C*06:02; TUBA3C; ENSG00000198033; TAA
IERPTYTNL

SEQ ID NO: 94193 - protein, 9 aa, Homo sapiens
  misc_feature: Table A; Target 94193; HLA-C*07:01; TUBA3C; ENSG00000198033; TAA
IERPTYTNL

SEQ ID NO: 94194 - protein, 9 aa, Homo sapiens
  misc_feature: Table A; Target 94194; HLA-C*07:02; TUBA3C; ENSG00000198033; TAA
IERPTYTNL

SEQ ID NO: 94195 - protein, 9 aa, Homo sapiens
  misc_feature: Table A; Target 94195; HLA-C*07:04; TUBA3C; ENSG00000198033; TAA
IERPTYTNL

SEQ ID NO: 94196 - protein, 9 aa, Homo sapiens
  misc_feature: Table A; Target 94196; HLA-C*12:03; TUBA3C; ENSG00000198033; TAA
IERPTYTNL

SEQ ID NO: 94197 - protein, 9 aa, Homo sapiens
  misc_feature: Table A; Target 94197; HLA-C*14:02; TUBA3C; ENSG00000198033; TAA
IERPTYTNL

SEQ ID NO: 94198 - protein, 9 aa, Homo sapiens
  misc_feature: Table A; Target 94198; HLA-C*16:02; TUBA3C; ENSG00000198033; TAA
IERPTYTNL

SEQ ID NO: 94199 - protein, 9 aa, Homo sapiens
  misc_feature: Table A; Target 94199; HLA-C*16:04; TUBA3C; ENSG00000198033; TAA
IERPTYTNL

SEQ ID NO: 94200 - protein, 10 aa, Homo sapiens
  misc_feature: Table A; Target 94200; HLA-B*40:02; TUBA3C; ENSG00000198033; TAA
IERPTYTNLN

SEQ ID NO: 94201 - protein, 10 aa, Homo sapiens
  misc_feature: Table A; Target 94201; HLA-C*04:01; TUBA3C; ENSG00000198033; TAA
IERPTYTNLN

SEQ ID NO: 94202 - protein, 11 aa, Homo sapiens
  misc_feature: Table A; Target 94202; HLA-A*31:01; TUBA3C; ENSG00000198033; TAA
IERPTYTNLNR

SEQ ID NO: 94203 - protein, 8 aa, Homo sapiens
  misc_feature: Table A; Target 94203; HLA-B*39:01; TUBA3C; ENSG00000198033; TAA
IGGGDDSF

SEQ ID NO: 94204 - protein, 8 aa, Homo sapiens
  misc_feature: Table A; Target 94204; HLA-C*04:01; TUBA3C; ENSG00000198033; TAA
IGGGDDSF

SEQ ID NO: 94205 - protein, 8 aa, Homo sapiens
  misc_feature: Table A; Target 94205; HLA-C*07:01; TUBA3C; ENSG00000198033; TAA
IGGGDDSF

SEQ ID NO: 94206 - protein, 11 aa, Homo sapiens
  misc_feature: Table A; Target 94206; HLA-A*23:01; TUBA3C; ENSG00000198033; TAA
IGGGDDSFNTF

SEQ ID NO: 94207 - protein, 11 aa, Homo sapiens
  misc_feature: Table A; Target 94207; HLA-A*24:02; TUBA3C; ENSG00000198033; TAA
IGGGDDSFNTF

SEQ ID NO: 94208 - protein, 11 aa, Homo sapiens
  misc_feature: Table A; Target 94208; HLA-B*39:01; TUBA3C; ENSG00000198033; TAA
IGGGDDSFNTF

SEQ ID NO: 94209 - protein, 11 aa, Homo sapiens
  misc_feature: Table A; Target 94209; HLA-C*04:01; TUBA3C; ENSG00000198033; TAA
IGGGDDSFNTF

SEQ ID NO: 94210 - protein, 11 aa, Homo sapiens
  misc_feature: Table A; Target 94210; HLA-C*07:02; TUBA3C; ENSG00000198033; TAA
IGGGDDSFNTF

SEQ ID NO: 94211 - protein, 8 aa, Homo sapiens
  misc_feature: Table A; Target 94211; HLA-B*08:01; TUBA3C; ENSG00000198033; TAA
IGKEIVDL

SEQ ID NO: 94212 - protein, 8 aa, Homo sapiens
  misc_feature: Table A; Target 94212; HLA-B*15:01; TUBA3C; ENSG00000198033; TAA
IGKEIVDL

SEQ ID NO: 94213 - protein, 8 aa, Homo sapiens
  misc_feature: Table A; Target 94213; HLA-B*46:01; TUBA3C; ENSG00000198033; TAA
IGKEIVDL

SEQ ID NO: 94214 - protein, 8 aa, Homo sapiens
  misc_feature: Table A; Target 94214; HLA-C*07:04; TUBA3C; ENSG00000198033; TAA
IGKEIVDL

SEQ ID NO: 94215 - protein, 8 aa, Homo sapiens
  misc_feature: Table A; Target 94215; HLA-C*12:03; TUBA3C; ENSG00000198033; TAA
IGKEIVDL

SEQ ID NO: 94216 - protein, 9 aa, Homo sapiens
  misc_feature: Table A; Target 94216; HLA-B*51:01; TUBA3C; ENSG00000198033; TAA
IGKEIVDLV

SEQ ID NO: 94217 - protein, 9 aa, Homo sapiens
  misc_feature: Table A; Target 94217; HLA-C*12:03; TUBA3C; ENSG00000198033; TAA
IGKEIVDLV

SEQ ID NO: 94218 - protein, 9 aa, Homo sapiens
  misc_feature: Table A; Target 94218; HLA-C*07:01; TUBA3C; ENSG00000198033; TAA
IGNACWELY

SEQ ID NO: 94219 - protein, 8 aa, Homo sapiens
  misc_feature: Table A; Target 94219; HLA-B*08:01; TUBA3C; ENSG00000198033; TAA
IGQIVSSI

SEQ ID NO: 94220 - protein, 8 aa, Homo sapiens
  misc_feature: Table A; Target 94220; HLA-B*13:02; TUBA3C; ENSG00000198033; TAA
IGQIVSSI

SEQ ID NO: 94221 - protein, 8 aa, Homo sapiens
  misc_feature: Table A; Target 94221; HLA-B*15:01; TUBA3C; ENSG00000198033; TAA
IGQIVSSI

SEQ ID NO: 94222 - protein, 8 aa, Homo sapiens
  misc_feature: Table A; Target 94222; HLA-B*40:02; TUBA3C; ENSG00000198033; TAA
IGQIVSSI

SEQ ID NO: 94223 - protein, 8 aa, Homo sapiens
  misc_feature: Table A; Target 94223; HLA-B*51:01; TUBA3C; ENSG00000198033; TAA
IGQIVSSI

SEQ ID NO: 94224 - protein, 8 aa, Homo sapiens
  misc_feature: Table A; Target 94224; HLA-C*04:01; TUBA3C; ENSG00000198033; TAA
IGQIVSSI

SEQ ID NO: 94225 - protein, 8 aa, Homo sapiens
  misc_feature: Table A; Target 94225; HLA-C*05:01; TUBA3C; ENSG00000198033; TAA
IGQIVSSI

SEQ ID NO: 94226 - protein, 8 aa, Homo sapiens
  misc_feature: Table A; Target 94226; HLA-C*06:02; TUBA3C; ENSG00000198033; TAA
IGQIVSSI

SEQ ID NO: 94227 - protein, 8 aa, Homo sapiens
  misc_feature: Table A; Target 94227; HLA-C*07:01; TUBA3C; ENSG00000198033; TAA
IGQIVSSI

SEQ ID NO: 94228 - protein, 8 aa, Homo sapiens
  misc_feature: Table A; Target 94228; HLA-C*07:02; TUBA3C; ENSG00000198033; TAA
IGQIVSSI

SEQ ID NO: 94229 - protein, 8 aa, Homo sapiens
  misc_feature: Table A; Target 94229; HLA-C*07:04; TUBA3C; ENSG00000198033; TAA
IGQIVSSI

SEQ ID NO: 94230 - protein, 8 aa, Homo sapiens
  misc_feature: Table A; Target 94230; HLA-C*12:03; TUBA3C; ENSG00000198033; TAA
IGQIVSSI

SEQ ID NO: 94231 - protein, 8 aa, Homo sapiens
  misc_feature: Table A; Target 94231; HLA-C*14:02; TUBA3C; ENSG00000198033; TAA
IGQIVSSI

SEQ ID NO: 94232 - protein, 8 aa, Homo sapiens
  misc_feature: Table A; Target 94232; HLA-C*16:02; TUBA3C; ENSG00000198033; TAA
IGQIVSSI

SEQ ID NO: 94233 - protein, 9 aa, Homo sapiens
  misc_feature: Table A; Target 94233; HLA-C*04:01; TUBA3C; ENSG00000198033; TAA
IGQIVSSIT

SEQ ID NO: 94234 - protein, 9 aa, Homo sapiens
  misc_feature: Table A; Target 94234; HLA-C*06:02; TUBA3C; ENSG00000198033; TAA
IGQIVSSIT

SEQ ID NO: 94235 - protein, 9 aa, Homo sapiens
  misc_feature: Table A; Target 94235; HLA-C*07:01; TUBA3C; ENSG00000198033; TAA
IGQIVSSIT

SEQ ID NO: 94236 - protein, 10 aa, Homo sapiens
  misc_feature: Table A; Target 94236; HLA-C*04:01; TUBA3C; ENSG00000198033; TAA
IGQIVSSITA

SEQ ID NO: 94237 - protein, 10 aa, Homo sapiens
  misc_feature: Table A; Target 94237; HLA-C*06:02; TUBA3C; ENSG00000198033; TAA
IGQIVSSITA

SEQ ID NO: 94238 - protein, 10 aa, Homo sapiens
  misc_feature: Table A; Target 94238; HLA-C*07:01; TUBA3C; ENSG00000198033; TAA
IGQIVSSITA

SEQ ID NO: 94239 - protein, 10 aa, Homo sapiens
  misc_feature: Table A; Target 94239; HLA-C*07:02; TUBA3C; ENSG00000198033; TAA
IGQIVSSITA

SEQ ID NO: 94240 - protein, 8 aa, Homo sapiens
  misc_feature: Table A; Target 94240; HLA-A*32:01; TUBA3C; ENSG00000198033; TAA
IHFPLATY

SEQ ID NO: 94241 - protein, 8 aa, Homo sapiens
  misc_feature: Table A; Target 94241; HLA-B*15:03; TUBA3C; ENSG00000198033; TAA
IHFPLATY

SEQ ID NO: 94242 - protein, 8 aa, Homo sapiens
  misc_feature: Table A; Target 94242; HLA-B*57:01; TUBA3C; ENSG00000198033; TAA
IHFPLATY

SEQ ID NO: 94243 - protein, 8 aa, Homo sapiens
  misc_feature: Table A; Target 94243; HLA-C*07:01; TUBA3C; ENSG00000198033; TAA
IHFPLATY

SEQ ID NO: 94244 - protein, 8 aa, Homo sapiens
  misc_feature: Table A; Target 94244; HLA-B*39:01; TUBA3C; ENSG00000198033; TAA
IHVGQAGV

SEQ ID NO: 94245 - protein, 9 aa, Homo sapiens
  misc_feature: Table A; Target 94245; HLA-B*39:01; TUBA3C; ENSG00000198033; TAA
IHVGQAGVQ

SEQ ID NO: 94246 - protein, 9 aa, Homo sapiens
  misc_feature: Table A; Target 94246; HLA-C*06:02; TUBA3C; ENSG00000198033; TAA
IHVGQAGVQ

SEQ ID NO: 94247 - protein, 9 aa, Homo sapiens
  misc_feature: Table A; Target 94247; HLA-C*07:01; TUBA3C; ENSG00000198033; TAA
IHVGQAGVQ

SEQ ID NO: 94248 - protein, 10 aa, Homo sapiens
  misc_feature: Table A; Target 94248; HLA-B*13:02; TUBA3C; ENSG00000198033; TAA
IHVGQAGVQI

SEQ ID NO: 94249 - protein, 10 aa, Homo sapiens
  misc_feature: Table A; Target 94249; HLA-B*27:05; TUBA3C; ENSG00000198033; TAA
IHVGQAGVQI

SEQ ID NO: 94250 - protein, 10 aa, Homo sapiens
  misc_feature: Table A; Target 94250; HLA-B*38:01; TUBA3C; ENSG00000198033; TAA
IHVGQAGVQI

SEQ ID NO: 94251 - protein, 10 aa, Homo sapiens
  misc_feature: Table A; Target 94251; HLA-B*39:01; TUBA3C; ENSG00000198033; TAA
IHVGQAGVQI

SEQ ID NO: 94252 - protein, 10 aa, Homo sapiens
  misc_feature: Table A; Target 94252; HLA-C*04:01; TUBA3C; ENSG00000198033; TAA
IHVGQAGVQI

SEQ ID NO: 94253 - protein, 10 aa, Homo sapiens
  misc_feature: Table A; Target 94253; HLA-C*06:02; TUBA3C; ENSG00000198033; TAA
IHVGQAGVQI

SEQ ID NO: 94254 - protein, 10 aa, Homo sapiens
  misc_feature: Table A; Target 94254; HLA-C*07:01; TUBA3C; ENSG00000198033; TAA
IHVGQAGVQI

SEQ ID NO: 94255 - protein, 10 aa, Homo sapiens
  misc_feature: Table A; Target 94255; HLA-C*07:04; TUBA3C; ENSG00000198033; TAA
IHVGQAGVQI

SEQ ID NO: 94256 - protein, 11 aa, Homo sapiens
  misc_feature: Table A; Target 94256; HLA-C*07:01; TUBA3C; ENSG00000198033; TAA
IHVGQAGVQIG

SEQ ID NO: 94257 - protein, 9 aa, Homo sapiens
  misc_feature: Table A; Target 94257; HLA-B*15:03; TUBA3C; ENSG00000198033; TAA
IKTKRTIQF

SEQ ID NO: 94258 - protein, 8 aa, Homo sapiens
  misc_feature: Table A; Target 94258; HLA-A*02:01; TUBA3C; ENSG00000198033; TAA
ILTTHTTL

SEQ ID NO: 94259 - protein, 8 aa, Homo sapiens
  misc_feature: Table A; Target 94259; HLA-A*02:03; TUBA3C; ENSG00000198033; TAA
ILTTHTTL

SEQ ID NO: 94260 - protein, 8 aa, Homo sapiens
  misc_feature: Table A; Target 94260; HLA-A*23:01; TUBA3C; ENSG00000198033; TAA
ILTTHTTL

SEQ ID NO: 94261 - protein, 8 aa, Homo sapiens
  misc_feature: Table A; Target 94261; HLA-A*24:02; TUBA3C; ENSG00000198033; TAA
ILTTHTTL

SEQ ID NO: 94262 - protein, 8 aa, Homo sapiens
  misc_feature: Table A; Target 94262; HLA-A*32:01; TUBA3C; ENSG00000198033; TAA
ILTTHTTL

SEQ ID NO: 94263 - protein, 8 aa, Homo sapiens
  misc_feature: Table A; Target 94263; HLA-B*07:02; TUBA3C; ENSG00000198033; TAA
ILTTHTTL

SEQ ID NO: 94264 - protein, 8 aa, Homo sapiens
  misc_feature: Table A; Target 94264; HLA-B*08:01; TUBA3C; ENSG00000198033; TAA
ILTTHTTL

SEQ ID NO: 94265 - protein, 8 aa, Homo sapiens
  misc_feature: Table A; Target 94265; HLA-B*15:01; TUBA3C; ENSG00000198033; TAA
ILTTHTTL

SEQ ID NO: 94266 - protein, 8 aa, Homo sapiens
  misc_feature: Table A; Target 94266; HLA-B*15:03; TUBA3C; ENSG00000198033; TAA
ILTTHTTL

SEQ ID NO: 94267 - protein, 8 aa, Homo sapiens
  misc_feature: Table A; Target 94267; HLA-B*37:01; TUBA3C; ENSG00000198033; TAA
ILTTHTTL

SEQ ID NO: 94268 - protein, 8 aa, Homo sapiens
  misc_feature: Table A; Target 94268; HLA-B*39:01; TUBA3C; ENSG00000198033; TAA
ILTTHTTL

SEQ ID NO: 94269 - protein, 8 aa, Homo sapiens
  misc_feature: Table A; Target 94269; HLA-B*40:02; TUBA3C; ENSG00000198033; TAA
ILTTHTTL

SEQ ID NO: 94270 - protein, 8 aa, Homo sapiens
  misc_feature: Table A; Target 94270; HLA-B*46:01; TUBA3C; ENSG00000198033; TAA
ILTTHTTL

SEQ ID NO: 94271 - protein, 8 aa, Homo sapiens
  misc_feature: Table A; Target 94271; HLA-B*55:01; TUBA3C; ENSG00000198033; TAA
ILTTHTTL

SEQ ID NO: 94272 - protein, 8 aa, Homo sapiens
  misc_feature: Table A; Target 94272; HLA-B*58:01; TUBA3C; ENSG00000198033; TAA
ILTTHTTL

SEQ ID NO: 94273 - protein, 8 aa, Homo sapiens
  misc_feature: Table A; Target 94273; HLA-C*01:02; TUBA3C; ENSG00000198033; TAA
ILTTHTTL

SEQ ID NO: 94274 - protein, 8 aa, Homo sapiens
  misc_feature: Table A; Target 94274; HLA-C*03:03; TUBA3C; ENSG00000198033; TAA
ILTTHTTL

SEQ ID NO: 94275 - protein, 8 aa, Homo sapiens
  misc_feature: Table A; Target 94275; HLA-C*03:04; TUBA3C; ENSG00000198033; TAA
ILTTHTTL

SEQ ID NO: 94276 - protein, 8 aa, Homo sapiens
  misc_feature: Table A; Target 94276; HLA-C*04:01; TUBA3C; ENSG00000198033; TAA
ILTTHTTL

SEQ ID NO: 94277 - protein, 8 aa, Homo sapiens
  misc_feature: Table A; Target 94277; HLA-C*05:01; TUBA3C; ENSG00000198033; TAA
ILTTHTTL

SEQ ID NO: 94278 - protein, 8 aa, Homo sapiens
  misc_feature: Table A; Target 94278; HLA-C*06:02; TUBA3C; ENSG00000198033; TAA
ILTTHTTL

SEQ ID NO: 94279 - protein, 8 aa, Homo sapiens
  misc_feature: Table A; Target 94279; HLA-C*07:01; TUBA3C; ENSG00000198033; TAA
ILTTHTTL

SEQ ID NO: 94280 - protein, 8 aa, Homo sapiens
  misc_feature: Table A; Target 94280; HLA-C*07:02; TUBA3C; ENSG00000198033; TAA
ILTTHTTL

SEQ ID NO: 94281 - protein, 8 aa, Homo sapiens
  misc_feature: Table A; Target 94281; HLA-C*07:04; TUBA3C; ENSG00000198033; TAA
ILTTHTTL

SEQ ID NO: 94282 - protein, 8 aa, Homo sapiens
  misc_feature: Table A; Target 94282; HLA-C*12:03; TUBA3C; ENSG00000198033; TAA
ILTTHTTL

SEQ ID NO: 94283 - protein, 8 aa, Homo sapiens
  misc_feature: Table A; Target 94283; HLA-C*14:02; TUBA3C; ENSG00000198033; TAA
ILTTHTTL

SEQ ID NO: 94284 - protein, 8 aa, Homo sapiens
  misc_feature: Table A; Target 94284; HLA-C*16:01; TUBA3C; ENSG00000198033; TAA
ILTTHTTL

SEQ ID NO: 94285 - protein, 8 aa, Homo sapiens
  misc_feature: Table A; Target 94285; HLA-C*16:02; TUBA3C; ENSG00000198033; TAA
ILTTHTTL

SEQ ID NO: 94286 - protein, 10 aa, Homo sapiens
  misc_feature: Table A; Target 94286; HLA-A*03:01; TUBA3C; ENSG00000198033; TAA
ILTTHTTLEH

SEQ ID NO: 94287 - protein, 10 aa, Homo sapiens
  misc_feature: Table A; Target 94287; HLA-C*07:01; TUBA3C; ENSG00000198033; TAA
ILTTHTTLEH

SEQ ID NO: 94288 - protein, 8 aa, Homo sapiens
  misc_feature: Table A; Target 94288; HLA-B*13:02; TUBA3C; ENSG00000198033; TAA
INYQPPTV

SEQ ID NO: 94289 - protein, 8 aa, Homo sapiens
  misc_feature: Table A; Target 94289; HLA-B*49:01; TUBA3C; ENSG00000198033; TAA
INYQPPTV

SEQ ID NO: 94290 - protein, 8 aa, Homo sapiens
  misc_feature: Table A; Target 94290; HLA-B*51:01; TUBA3C; ENSG00000198033; TAA
INYQPPTV

SEQ ID NO: 94291 - protein, 8 aa, Homo sapiens
  misc_feature: Table A; Target 94291; HLA-B*54:01; TUBA3C; ENSG00000198033; TAA
INYQPPTV

SEQ ID NO: 94292 - protein, 8 aa, Homo sapiens
  misc_feature: Table A; Target 94292; HLA-C*06:02; TUBA3C; ENSG00000198033; TAA
INYQPPTV

SEQ ID NO: 94293 - protein, 8 aa, Homo sapiens
  misc_feature: Table A; Target 94293; HLA-C*12:03; TUBA3C; ENSG00000198033; TAA
INYQPPTV

SEQ ID NO: 94294 - protein, 8 aa, Homo sapiens
  misc_feature: Table A; Target 94294; HLA-C*16:02; TUBA3C; ENSG00000198033; TAA
INYQPPTV

SEQ ID NO: 94295 - protein, 8 aa, Homo sapiens
  misc_feature: Table A; Target 94295; HLA-C*16:04; TUBA3C; ENSG00000198033; TAA
INYQPPTV

SEQ ID NO: 94296 - protein, 9 aa, Homo sapiens
  misc_feature: Table A; Target 94296; HLA-A*02:01; TUBA3C; ENSG00000198033; TAA
INYQPPTVV

SEQ ID NO: 94297 - protein, 9 aa, Homo sapiens
  misc_feature: Table A; Target 94297; HLA-A*02:03; TUBA3C; ENSG00000198033; TAA
INYQPPTVV

SEQ ID NO: 94298 - protein, 9 aa, Homo sapiens
  misc_feature: Table A; Target 94298; HLA-A*23:01; TUBA3C; ENSG00000198033; TAA
INYQPPTVV

SEQ ID NO: 94299 - protein, 9 aa, Homo sapiens
  misc_feature: Table A; Target 94299; HLA-A*30:01; TUBA3C; ENSG00000198033; TAA
INYQPPTVV

SEQ ID NO: 94300 - protein, 9 aa, Homo sapiens
  misc_feature: Table A; Target 94300; HLA-A*68:02; TUBA3C; ENSG00000198033; TAA
INYQPPTVV

SEQ ID NO: 94301 - protein, 9 aa, Homo sapiens
  misc_feature: Table A; Target 94301; HLA-B*13:02; TUBA3C; ENSG00000198033; TAA
INYQPPTVV

SEQ ID NO: 94302 - protein, 9 aa, Homo sapiens
  misc_feature: Table A; Target 94302; HLA-B*46:01; TUBA3C; ENSG00000198033; TAA
INYQPPTVV

SEQ ID NO: 94303 - protein, 9 aa, Homo sapiens
  misc_feature: Table A; Target 94303; HLA-B*49:01; TUBA3C; ENSG00000198033; TAA
INYQPPTVV

SEQ ID NO: 94304 - protein, 9 aa, Homo sapiens
  misc_feature: Table A; Target 94304; HLA-B*51:01; TUBA3C; ENSG00000198033; TAA
INYQPPTVV

SEQ ID NO: 94305 - protein, 9 aa, Homo sapiens
  misc_feature: Table A; Target 94305; HLA-B*54:01; TUBA3C; ENSG00000198033; TAA
INYQPPTVV

SEQ ID NO: 94306 - protein, 9 aa, Homo sapiens
  misc_feature: Table A; Target 94306; HLA-B*55:01; TUBA3C; ENSG00000198033; TAA
INYQPPTVV

SEQ ID NO: 94307 - protein, 9 aa, Homo sapiens
  misc_feature: Table A; Target 94307; HLA-B*56:01; TUBA3C; ENSG00000198033; TAA
INYQPPTVV

SEQ ID NO: 94308 - protein, 9 aa, Homo sapiens
  misc_feature: Table A; Target 94308; HLA-C*02:02; TUBA3C; ENSG00000198033; TAA
INYQPPTVV

SEQ ID NO: 94309 - protein, 9 aa, Homo sapiens
  misc_feature: Table A; Target 94309; HLA-C*05:01; TUBA3C; ENSG00000198033; TAA
INYQPPTVV

SEQ ID NO: 94310 - protein, 9 aa, Homo sapiens
  misc_feature: Table A; Target 94310; HLA-C*06:02; TUBA3C; ENSG00000198033; TAA
INYQPPTVV

SEQ ID NO: 94311 - protein, 9 aa, Homo sapiens
  misc_feature: Table A; Target 94311; HLA-C*12:03; TUBA3C; ENSG00000198033; TAA
INYQPPTVV

SEQ ID NO: 94312 - protein, 9 aa, Homo sapiens
  misc_feature: Table A; Target 94312; HLA-C*16:04; TUBA3C; ENSG00000198033; TAA
INYQPPTVV

SEQ ID NO: 94313 - protein, 11 aa, Homo sapiens
  misc_feature: Table A; Target 94313; HLA-C*04:01; TUBA3C; ENSG00000198033; TAA
INYQPPTVVPG

SEQ ID NO: 94314 - protein, 8 aa, Homo sapiens
  misc_feature: Table A; Target 94314; HLA-C*04:01; TUBA3C; ENSG00000198033; TAA
IQPDGQMP

SEQ ID NO: 94315 - protein, 9 aa, Homo sapiens
  misc_feature: Table A; Target 94315; HLA-C*07:04; TUBA3C; ENSG00000198033; TAA
IQPDGQMPS

SEQ ID NO: 94316 - protein, 11 aa, Homo sapiens
  misc_feature: Table A; Target 94316; HLA-A*11:01; TUBA3C; ENSG00000198033; TAA
IQPDGQMPSDK

SEQ ID NO: 94317 - protein, 11 aa, Homo sapiens
  misc_feature: Table A; Target 94317; HLA-B*27:02; TUBA3C; ENSG00000198033; TAA
IQPDGQMPSDK

SEQ ID NO: 94318 - protein, 11 aa, Homo sapiens
  misc_feature: Table A; Target 94318; HLA-B*39:01; TUBA3C; ENSG00000198033; TAA
IQPDGQMPSDK

SEQ ID NO: 94319 - protein, 11 aa, Homo sapiens
  misc_feature: Table A; Target 94319; HLA-C*04:01; TUBA3C; ENSG00000198033; TAA
IQPDGQMPSDK

SEQ ID NO: 94320 - protein, 11 aa, Homo sapiens
  misc_feature: Table A; Target 94320; HLA-C*06:02; TUBA3C; ENSG00000198033; TAA
IQPDGQMPSDK

SEQ ID NO: 94321 - protein, 11 aa, Homo sapiens
  misc_feature: Table A; Target 94321; HLA-C*07:01; TUBA3C; ENSG00000198033; TAA
IQPDGQMPSDK

SEQ ID NO: 94322 - protein, 11 aa, Homo sapiens
  misc_feature: Table A; Target 94322; HLA-C*07:02; TUBA3C; ENSG00000198033; TAA
IQPDGQMPSDK

SEQ ID NO: 94323 - protein, 8 aa, Homo sapiens
  misc_feature: Table A; Target 94323; HLA-C*06:02; TUBA3C; ENSG00000198033; TAA
ISIHVGQA

SEQ ID NO: 94324 - protein, 8 aa, Homo sapiens
  misc_feature: Table A; Target 94324; HLA-C*12:03; TUBA3C; ENSG00000198033; TAA
ISIHVGQA

SEQ ID NO: 94325 - protein, 9 aa, Homo sapiens
  misc_feature: Table A; Target 94325; HLA-B*46:01; TUBA3C; ENSG00000198033; TAA
ISIHVGQAG

SEQ ID NO: 94326 - protein, 9 aa, Homo sapiens
  misc_feature: Table A; Target 94326; HLA-B*57:01; TUBA3C; ENSG00000198033; TAA
ISIHVGQAG

SEQ ID NO: 94327 - protein, 9 aa, Homo sapiens
  misc_feature: Table A; Target 94327; HLA-B*58:01; TUBA3C; ENSG00000198033; TAA
ISIHVGQAG

SEQ ID NO: 94328 - protein, 9 aa, Homo sapiens
  misc_feature: Table A; Target 94328; HLA-C*03:03; TUBA3C; ENSG00000198033; TAA
ISIHVGQAG

SEQ ID NO: 94329 - protein, 9 aa, Homo sapiens
  misc_feature: Table A; Target 94329; HLA-C*03:04; TUBA3C; ENSG00000198033; TAA
ISIHVGQAG

SEQ ID NO: 94330 - protein, 10 aa, Homo sapiens
  misc_feature: Table A; Target 94330; HLA-A*02:03; TUBA3C; ENSG00000198033; TAA
ISIHVGQAGV

SEQ ID NO: 94331 - protein, 10 aa, Homo sapiens
  misc_feature: Table A; Target 94331; HLA-A*68:02; TUBA3C; ENSG00000198033; TAA
ISIHVGQAGV

SEQ ID NO: 94332 - protein, 10 aa, Homo sapiens
  misc_feature: Table A; Target 94332; HLA-B*58:01; TUBA3C; ENSG00000198033; TAA
ISIHVGQAGV

SEQ ID NO: 94333 - protein, 10 aa, Homo sapiens
  misc_feature: Table A; Target 94333; HLA-C*06:02; TUBA3C; ENSG00000198033; TAA
ISIHVGQAGV

SEQ ID NO: 94334 - protein, 10 aa, Homo sapiens
  misc_feature: Table A; Target 94334; HLA-C*07:02; TUBA3C; ENSG00000198033; TAA
ISIHVGQAGV

SEQ ID NO: 94335 - protein, 10 aa, Homo sapiens
  misc_feature: Table A; Target 94335; HLA-C*16:02; TUBA3C; ENSG00000198033; TAA
ISIHVGQAGV

SEQ ID NO: 94336 - protein, 11 aa, Homo sapiens
  misc_feature: Table A; Target 94336; HLA-C*07:01; TUBA3C; ENSG00000198033; TAA
ISIHVGQAGVQ

SEQ ID NO: 94337 - protein, 10 aa, Homo sapiens
  misc_feature: Table A; Target 94337; HLA-A*68:02; TUBA3C; ENSG00000198033; TAA
ITASLRFDGA

SEQ ID NO: 94338 - protein, 11 aa, Homo sapiens
  misc_feature: Table A; Target 94338; HLA-A*68:02; TUBA3C; ENSG00000198033; TAA
ITASLRFDGAL

SEQ ID NO: 94339 - protein, 11 aa, Homo sapiens
  misc_feature: Table A; Target 94339; HLA-B*07:02; TUBA3C; ENSG00000198033; TAA
ITASLRFDGAL

SEQ ID NO: 94340 - protein, 11 aa, Homo sapiens
  misc_feature: Table A; Target 94340; HLA-C*06:02; TUBA3C; ENSG00000198033; TAA
ITASLRFDGAL

SEQ ID NO: 94341 - protein, 11 aa, Homo sapiens
  misc_feature: Table A; Target 94341; HLA-C*07:01; TUBA3C; ENSG00000198033; TAA
ITASLRFDGAL

SEQ ID NO: 94342 - protein, 11 aa, Homo sapiens
  misc_feature: Table A; Target 94342; HLA-C*07:02; TUBA3C; ENSG00000198033; TAA
ITASLRFDGAL

SEQ ID NO: 94343 - protein, 11 aa, Homo sapiens
  misc_feature: Table A; Target 94343; HLA-A*01:01; TUBA3C; ENSG00000198033; TAA
ITGKEDAANNY

SEQ ID NO: 94344 - protein, 11 aa, Homo sapiens
  misc_feature: Table A; Target 94344; HLA-A*03:02; TUBA3C; ENSG00000198033; TAA
ITGKEDAANNY

SEQ ID NO: 94345 - protein, 11 aa, Homo sapiens
  misc_feature: Table A; Target 94345; HLA-A*26:01; TUBA3C; ENSG00000198033; TAA
ITGKEDAANNY

SEQ ID NO: 94346 - protein, 11 aa, Homo sapiens
  misc_feature: Table A; Target 94346; HLA-A*29:02; TUBA3C; ENSG00000198033; TAA
ITGKEDAANNY

SEQ ID NO: 94347 - protein, 11 aa, Homo sapiens
  misc_feature: Table A; Target 94347; HLA-A*30:02; TUBA3C; ENSG00000198033; TAA
ITGKEDAANNY

SEQ ID NO: 94348 - protein, 11 aa, Homo sapiens
  misc_feature: Table A; Target 94348; HLA-A*32:01; TUBA3C; ENSG00000198033; TAA
ITGKEDAANNY

SEQ ID NO: 94349 - protein, 11 aa, Homo sapiens
  misc_feature: Table A; Target 94349; HLA-A*68:01; TUBA3C; ENSG00000198033; TAA
ITGKEDAANNY

SEQ ID NO: 94350 - protein, 11 aa, Homo sapiens
  misc_feature: Table A; Target 94350; HLA-B*15:01; TUBA3C; ENSG00000198033; TAA
ITGKEDAANNY

SEQ ID NO: 94351 - protein, 11 aa, Homo sapiens
  misc_feature: Table A; Target 94351; HLA-B*57:01; TUBA3C; ENSG00000198033; TAA
ITGKEDAANNY

SEQ ID NO: 94352 - protein, 11 aa, Homo sapiens
  misc_feature: Table A; Target 94352; HLA-B*58:01; TUBA3C; ENSG00000198033; TAA
ITGKEDAANNY

SEQ ID NO: 94353 - protein, 11 aa, Homo sapiens
  misc_feature: Table A; Target 94353; HLA-C*04:01; TUBA3C; ENSG00000198033; TAA
ITGKEDAANNY

SEQ ID NO: 94354 - protein, 11 aa, Homo sapiens
  misc_feature: Table A; Target 94354; HLA-C*07:01; TUBA3C; ENSG00000198033; TAA
ITGKEDAANNY

SEQ ID NO: 94355 - protein, 11 aa, Homo sapiens
  misc_feature: Table A; Target 94355; HLA-C*07:04; TUBA3C; ENSG00000198033; TAA
ITGKEDAANNY

SEQ ID NO: 94356 - protein, 11 aa, Homo sapiens
  misc_feature: Table A; Target 94356; HLA-C*16:02; TUBA3C; ENSG00000198033; TAA
ITGKEDAANNY

SEQ ID NO: 94357 - protein, 9 aa, Homo sapiens
  misc_feature: Table A; Target 94357; HLA-B*54:01; TUBA3C; ENSG00000198033; TAA
ITNACFEPA

SEQ ID NO: 94358 - protein, 9 aa, Homo sapiens
  misc_feature: Table A; Target 94358; HLA-C*06:02; TUBA3C; ENSG00000198033; TAA
ITNACFEPA

SEQ ID NO: 94359 - protein, 8 aa, Homo sapiens
  misc_feature: Table A; Target 94359; HLA-A*01:01; TUBA3C; ENSG00000198033; TAA
IVDLVLDR

SEQ ID NO: 94360 - protein, 8 aa, Homo sapiens
  misc_feature: Table A; Target 94360; HLA-B*27:02; TUBA3C; ENSG00000198033; TAA
IVDLVLDR

SEQ ID NO: 94361 - protein, 9 aa, Homo sapiens
  misc_feature: Table A; Target 94361; HLA-A*01:01; TUBA3C; ENSG00000198033; TAA
IVDLVLDRI

SEQ ID NO: 94362 - protein, 9 aa, Homo sapiens
  misc_feature: Table A; Target 94362; HLA-A*02:01; TUBA3C; ENSG00000198033; TAA
IVDLVLDRI

SEQ ID NO: 94363 - protein, 9 aa, Homo sapiens
  misc_feature: Table A; Target 94363; HLA-A*02:07; TUBA3C; ENSG00000198033; TAA
IVDLVLDRI

SEQ ID NO: 94364 - protein, 9 aa, Homo sapiens
  misc_feature: Table A; Target 94364; HLA-A*68:02; TUBA3C; ENSG00000198033; TAA
IVDLVLDRI

SEQ ID NO: 94365 - protein, 9 aa, Homo sapiens
  misc_feature: Table A; Target 94365; HLA-B*38:01; TUBA3C; ENSG00000198033; TAA
IVDLVLDRI

SEQ ID NO: 94366 - protein, 9 aa, Homo sapiens
  misc_feature: Table A; Target 94366; HLA-B*51:01; TUBA3C; ENSG00000198033; TAA
IVDLVLDRI

SEQ ID NO: 94367 - protein, 9 aa, Homo sapiens
  misc_feature: Table A; Target 94367; HLA-B*55:01; TUBA3C; ENSG00000198033; TAA
IVDLVLDRI

SEQ ID NO: 94368 - protein, 9 aa, Homo sapiens
  misc_feature: Table A; Target 94368; HLA-C*04:01; TUBA3C; ENSG00000198033; TAA
IVDLVLDRI

SEQ ID NO: 94369 - protein, 9 aa, Homo sapiens
  misc_feature: Table A; Target 94369; HLA-C*05:01; TUBA3C; ENSG00000198033; TAA
IVDLVLDRI

SEQ ID NO: 94370 - protein, 9 aa, Homo sapiens
  misc_feature: Table A; Target 94370; HLA-A*02:01; TUBA3C; ENSG00000198033; TAA
IVSSITASL

SEQ ID NO: 94371 - protein, 9 aa, Homo sapiens
  misc_feature: Table A; Target 94371; HLA-A*02:03; TUBA3C; ENSG00000198033; TAA
IVSSITASL

SEQ ID NO: 94372 - protein, 9 aa, Homo sapiens
  misc_feature: Table A; Target 94372; HLA-A*02:04; TUBA3C; ENSG00000198033; TAA
IVSSITASL

SEQ ID NO: 94373 - protein, 9 aa, Homo sapiens
  misc_feature: Table A; Target 94373; HLA-A*02:07; TUBA3C; ENSG00000198033; TAA
IVSSITASL

SEQ ID NO: 94374 - protein, 9 aa, Homo sapiens
  misc_feature: Table A; Target 94374; HLA-A*03:01; TUBA3C; ENSG00000198033; TAA
IVSSITASL

SEQ ID NO: 94375 - protein, 9 aa, Homo sapiens
  misc_feature: Table A; Target 94375; HLA-A*03:02; TUBA3C; ENSG00000198033; TAA
IVSSITASL

SEQ ID NO: 94376 - protein, 9 aa, Homo sapiens
  misc_feature: Table A; Target 94376; HLA-A*11:01; TUBA3C; ENSG00000198033; TAA
IVSSITASL

SEQ ID NO: 94377 - protein, 9 aa, Homo sapiens
  misc_feature: Table A; Target 94377; HLA-A*23:01; TUBA3C; ENSG00000198033; TAA
IVSSITASL

SEQ ID NO: 94378 - protein, 9 aa, Homo sapiens
  misc_feature: Table A; Target 94378; HLA-A*24:02; TUBA3C; ENSG00000198033; TAA
IVSSITASL

SEQ ID NO: 94379 - protein, 9 aa, Homo sapiens
  misc_feature: Table A; Target 94379; HLA-A*25:01; TUBA3C; ENSG00000198033; TAA
IVSSITASL

SEQ ID NO: 94380 - protein, 9 aa, Homo sapiens
  misc_feature: Table A; Target 94380; HLA-A*26:01; TUBA3C; ENSG00000198033; TAA
IVSSITASL

SEQ ID NO: 94381 - protein, 9 aa, Homo sapiens
  misc_feature: Table A; Target 94381; HLA-A*29:02; TUBA3C; ENSG00000198033; TAA
IVSSITASL

SEQ ID NO: 94382 - protein, 9 aa, Homo sapiens
  misc_feature: Table A; Target 94382; HLA-A*30:01; TUBA3C; ENSG00000198033; TAA
IVSSITASL

SEQ ID NO: 94383 - protein, 9 aa, Homo sapiens
  misc_feature: Table A; Target 94383; HLA-A*30:02; TUBA3C; ENSG00000198033; TAA
IVSSITASL

SEQ ID NO: 94384 - protein, 9 aa, Homo sapiens
  misc_feature: Table A; Target 94384; HLA-A*31:01; TUBA3C; ENSG00000198033; TAA
IVSSITASL

SEQ ID NO: 94385 - protein, 9 aa, Homo sapiens
  misc_feature: Table A; Target 94385; HLA-A*32:01; TUBA3C; ENSG00000198033; TAA
IVSSITASL

SEQ ID NO: 94386 - protein, 9 aa, Homo sapiens
  misc_feature: Table A; Target 94386; HLA-A*33:01; TUBA3C; ENSG00000198033; TAA
IVSSITASL

SEQ ID NO: 94387 - protein, 9 aa, Homo sapiens
  misc_feature: Table A; Target 94387; HLA-A*33:03; TUBA3C; ENSG00000198033; TAA
IVSSITASL

SEQ ID NO: 94388 - protein, 9 aa, Homo sapiens
  misc_feature: Table A; Target 94388; HLA-A*68:01; TUBA3C; ENSG00000198033; TAA
IVSSITASL

SEQ ID NO: 94389 - protein, 9 aa, Homo sapiens
  misc_feature: Table A; Target 94389; HLA-A*68:02; TUBA3C; ENSG00000198033; TAA
IVSSITASL

SEQ ID NO: 94390 - protein, 9 aa, Homo sapiens
  misc_feature: Table A; Target 94390; HLA-B*07:02; TUBA3C; ENSG00000198033; TAA
IVSSITASL

SEQ ID NO: 94391 - protein, 9 aa, Homo sapiens
  misc_feature: Table A; Target 94391; HLA-B*08:01; TUBA3C; ENSG00000198033; TAA
IVSSITASL

SEQ ID NO: 94392 - protein, 9 aa, Homo sapiens
  misc_feature: Table A; Target 94392; HLA-B*13:02; TUBA3C; ENSG00000198033; TAA
IVSSITASL

SEQ ID NO: 94393 - protein, 9 aa, Homo sapiens
  misc_feature: Table A; Target 94393; HLA-B*15:01; TUBA3C; ENSG00000198033; TAA
IVSSITASL

SEQ ID NO: 94394 - protein, 9 aa, Homo sapiens
  misc_feature: Table A; Target 94394; HLA-B*15:03; TUBA3C; ENSG00000198033; TAA
IVSSITASL

SEQ ID NO: 94395 - protein, 9 aa, Homo sapiens
  misc_feature: Table A; Target 94395; HLA-B*18:01; TUBA3C; ENSG00000198033; TAA
IVSSITASL

SEQ ID NO: 94396 - protein, 9 aa, Homo sapiens
  misc_feature: Table A; Target 94396; HLA-B*27:05; TUBA3C; ENSG00000198033; TAA
IVSSITASL

SEQ ID NO: 94397 - protein, 9 aa, Homo sapiens
  misc_feature: Table A; Target 94397; HLA-B*35:01; TUBA3C; ENSG00000198033; TAA
IVSSITASL

SEQ ID NO: 94398 - protein, 9 aa, Homo sapiens
  misc_feature: Table A; Target 94398; HLA-B*35:03; TUBA3C; ENSG00000198033; TAA
IVSSITASL

SEQ ID NO: 94399 - protein, 9 aa, Homo sapiens
  misc_feature: Table A; Target 94399; HLA-B*37:01; TUBA3C; ENSG00000198033; TAA
IVSSITASL

SEQ ID NO: 94400 - protein, 9 aa, Homo sapiens
  misc_feature: Table A; Target 94400; HLA-B*38:01; TUBA3C; ENSG00000198033; TAA
IVSSITASL

SEQ ID NO: 94401 - protein, 9 aa, Homo sapiens
  misc_feature: Table A; Target 94401; HLA-B*39:01; TUBA3C; ENSG00000198033; TAA
IVSSITASL

SEQ ID NO: 94402 - protein, 9 aa, Homo sapiens
  misc_feature: Table A; Target 94402; HLA-B*40:01; TUBA3C; ENSG00000198033; TAA
IVSSITASL

SEQ ID NO: 94403 - protein, 9 aa, Homo sapiens
  misc_feature: Table A; Target 94403; HLA-B*40:02; TUBA3C; ENSG00000198033; TAA
IVSSITASL

SEQ ID NO: 94404 - protein, 9 aa, Homo sapiens
  misc_feature: Table A; Target 94404; HLA-B*44:03; TUBA3C; ENSG00000198033; TAA
IVSSITASL

SEQ ID NO: 94405 - protein, 9 aa, Homo sapiens
  misc_feature: Table A; Target 94405; HLA-B*46:01; TUBA3C; ENSG00000198033; TAA
IVSSITASL

SEQ ID NO: 94406 - protein, 9 aa, Homo sapiens
  misc_feature: Table A; Target 94406; HLA-B*51:01; TUBA3C; ENSG00000198033; TAA
IVSSITASL

SEQ ID NO: 94407 - protein, 9 aa, Homo sapiens
  misc_feature: Table A; Target 94407; HLA-B*54:01; TUBA3C; ENSG00000198033; TAA
IVSSITASL

SEQ ID NO: 94408 - protein, 9 aa, Homo sapiens
  misc_feature: Table A; Target 94408; HLA-B*55:01; TUBA3C; ENSG00000198033; TAA
IVSSITASL

SEQ ID NO: 94409 - protein, 9 aa, Homo sapiens
  misc_feature: Table A; Target 94409; HLA-B*56:01; TUBA3C; ENSG00000198033; TAA
IVSSITASL

SEQ ID NO: 94410 - protein, 9 aa, Homo sapiens
  misc_feature: Table A; Target 94410; HLA-B*57:01; TUBA3C; ENSG00000198033; TAA
IVSSITASL

SEQ ID NO: 94411 - protein, 9 aa, Homo sapiens
  misc_feature: Table A; Target 94411; HLA-B*58:01; TUBA3C; ENSG00000198033; TAA
IVSSITASL

SEQ ID NO: 94412 - protein, 9 aa, Homo sapiens
  misc_feature: Table A; Target 94412; HLA-C*01:02; TUBA3C; ENSG00000198033; TAA
IVSSITASL

SEQ ID NO: 94413 - protein, 9 aa, Homo sapiens
  misc_feature: Table A; Target 94413; HLA-C*02:02; TUBA3C; ENSG00000198033; TAA
IVSSITASL

SEQ ID NO: 94414 - protein, 9 aa, Homo sapiens
  misc_feature: Table A; Target 94414; HLA-C*03:03; TUBA3C; ENSG00000198033; TAA
IVSSITASL

SEQ ID NO: 94415 - protein, 9 aa, Homo sapiens
  misc_feature: Table A; Target 94415; HLA-C*03:04; TUBA3C; ENSG00000198033; TAA
IVSSITASL

SEQ ID NO: 94416 - protein, 9 aa, Homo sapiens
  misc_feature: Table A; Target 94416; HLA-C*04:01; TUBA3C; ENSG00000198033; TAA
IVSSITASL

SEQ ID NO: 94417 - protein, 9 aa, Homo sapiens
  misc_feature: Table A; Target 94417; HLA-C*05:01; TUBA3C; ENSG00000198033; TAA
IVSSITASL

SEQ ID NO: 94418 - protein, 9 aa, Homo sapiens
  misc_feature: Table A; Target 94418; HLA-C*06:02; TUBA3C; ENSG00000198033; TAA
IVSSITASL

SEQ ID NO: 94419 - protein, 9 aa, Homo sapiens
  misc_feature: Table A; Target 94419; HLA-C*07:02; TUBA3C; ENSG00000198033; TAA
IVSSITASL

SEQ ID NO: 94420 - protein, 9 aa, Homo sapiens
  misc_feature: Table A; Target 94420; HLA-C*07:04; TUBA3C; ENSG00000198033; TAA
IVSSITASL

SEQ ID NO: 94421 - protein, 9 aa, Homo sapiens
  misc_feature: Table A; Target 94421; HLA-C*07:06; TUBA3C; ENSG00000198033; TAA
IVSSITASL

SEQ ID NO: 94422 - protein, 9 aa, Homo sapiens
  misc_feature: Table A; Target 94422; HLA-C*12:03; TUBA3C; ENSG00000198033; TAA
IVSSITASL

SEQ ID NO: 94423 - protein, 9 aa, Homo sapiens
  misc_feature: Table A; Target 94423; HLA-C*14:02; TUBA3C; ENSG00000198033; TAA
IVSSITASL

SEQ ID NO: 94424 - protein, 9 aa, Homo sapiens
  misc_feature: Table A; Target 94424; HLA-C*16:01; TUBA3C; ENSG00000198033; TAA
IVSSITASL

SEQ ID NO: 94425 - protein, 9 aa, Homo sapiens
  misc_feature: Table A; Target 94425; HLA-C*16:02; TUBA3C; ENSG00000198033; TAA
IVSSITASL

SEQ ID NO: 94426 - protein, 9 aa, Homo sapiens
  misc_feature: Table A; Target 94426; HLA-C*16:04; TUBA3C; ENSG00000198033; TAA
IVSSITASL

SEQ ID NO: 94427 - protein, 10 aa, Homo sapiens
  misc_feature: Table A; Target 94427; HLA-A*03:01; TUBA3C; ENSG00000198033; TAA
IVSSITASLR

SEQ ID NO: 94428 - protein, 10 aa, Homo sapiens
  misc_feature: Table A; Target 94428; HLA-A*03:02; TUBA3C; ENSG00000198033; TAA
IVSSITASLR

SEQ ID NO: 94429 - protein, 10 aa, Homo sapiens
  misc_feature: Table A; Target 94429; HLA-A*11:01; TUBA3C; ENSG00000198033; TAA
IVSSITASLR

SEQ ID NO: 94430 - protein, 10 aa, Homo sapiens
  misc_feature: Table A; Target 94430; HLA-A*29:02; TUBA3C; ENSG00000198033; TAA
IVSSITASLR

SEQ ID NO: 94431 - protein, 10 aa, Homo sapiens
  misc_feature: Table A; Target 94431; HLA-A*31:01; TUBA3C; ENSG00000198033; TAA
IVSSITASLR

SEQ ID NO: 94432 - protein, 10 aa, Homo sapiens
  misc_feature: Table A; Target 94432; HLA-A*33:01; TUBA3C; ENSG00000198033; TAA
IVSSITASLR

SEQ ID NO: 94433 - protein, 10 aa, Homo sapiens
  misc_feature: Table A; Target 94433; HLA-A*33:03; TUBA3C; ENSG00000198033; TAA
IVSSITASLR

SEQ ID NO: 94434 - protein, 10 aa, Homo sapiens
  misc_feature: Table A; Target 94434; HLA-A*68:01; TUBA3C; ENSG00000198033; TAA
IVSSITASLR

SEQ ID NO: 94435 - protein, 10 aa, Homo sapiens
  misc_feature: Table A; Target 94435; HLA-A*68:02; TUBA3C; ENSG00000198033; TAA
IVSSITASLR

SEQ ID NO: 94436 - protein, 10 aa, Homo sapiens
  misc_feature: Table A; Target 94436; HLA-B*27:02; TUBA3C; ENSG00000198033; TAA
IVSSITASLR

SEQ ID NO: 94437 - protein, 10 aa, Homo sapiens
  misc_feature: Table A; Target 94437; HLA-B*57:01; TUBA3C; ENSG00000198033; TAA
IVSSITASLR

SEQ ID NO: 94438 - protein, 10 aa, Homo sapiens
  misc_feature: Table A; Target 94438; HLA-C*07:06; TUBA3C; ENSG00000198033; TAA
IVSSITASLR

SEQ ID NO: 94439 - protein, 11 aa, Homo sapiens
  misc_feature: Table A; Target 94439; HLA-A*02:07; TUBA3C; ENSG00000198033; TAA
IVSSITASLRF

SEQ ID NO: 94440 - protein, 11 aa, Homo sapiens
  misc_feature: Table A; Target 94440; HLA-A*03:01; TUBA3C; ENSG00000198033; TAA
IVSSITASLRF

SEQ ID NO: 94441 - protein, 11 aa, Homo sapiens
  misc_feature: Table A; Target 94441; HLA-A*03:02; TUBA3C; ENSG00000198033; TAA
IVSSITASLRF

SEQ ID NO: 94442 - protein, 11 aa, Homo sapiens
  misc_feature: Table A; Target 94442; HLA-A*23:01; TUBA3C; ENSG00000198033; TAA
IVSSITASLRF

SEQ ID NO: 94443 - protein, 11 aa, Homo sapiens
  misc_feature: Table A; Target 94443; HLA-A*24:02; TUBA3C; ENSG00000198033; TAA
IVSSITASLRF

SEQ ID NO: 94444 - protein, 11 aa, Homo sapiens
  misc_feature: Table A; Target 94444; HLA-A*25:01; TUBA3C; ENSG00000198033; TAA
IVSSITASLRF

SEQ ID NO: 94445 - protein, 11 aa, Homo sapiens
  misc_feature: Table A; Target 94445; HLA-A*26:01; TUBA3C; ENSG00000198033; TAA
IVSSITASLRF

SEQ ID NO: 94446 - protein, 11 aa, Homo sapiens
  misc_feature: Table A; Target 94446; HLA-A*29:02; TUBA3C; ENSG00000198033; TAA
IVSSITASLRF

SEQ ID NO: 94447 - protein, 11 aa, Homo sapiens
  misc_feature: Table A; Target 94447; HLA-A*30:02; TUBA3C; ENSG00000198033; TAA
IVSSITASLRF

SEQ ID NO: 94448 - protein, 11 aa, Homo sapiens
  misc_feature: Table A; Target 94448; HLA-A*32:01; TUBA3C; ENSG00000198033; TAA
IVSSITASLRF

SEQ ID NO: 94449 - protein, 11 aa, Homo sapiens
  misc_feature: Table A; Target 94449; HLA-B*27:05; TUBA3C; ENSG00000198033; TAA
IVSSITASLRF

SEQ ID NO: 94450 - protein, 11 aa, Homo sapiens
  misc_feature: Table A; Target 94450; HLA-B*35:01; TUBA3C; ENSG00000198033; TAA
IVSSITASLRF

SEQ ID NO: 94451 - protein, 11 aa, Homo sapiens
  misc_feature: Table A; Target 94451; HLA-B*38:01; TUBA3C; ENSG00000198033; TAA
IVSSITASLRF

SEQ ID NO: 94452 - protein, 11 aa, Homo sapiens
  misc_feature: Table A; Target 94452; HLA-B*57:01; TUBA3C; ENSG00000198033; TAA
IVSSITASLRF

SEQ ID NO: 94453 - protein, 11 aa, Homo sapiens
  misc_feature: Table A; Target 94453; HLA-B*58:01; TUBA3C; ENSG00000198033; TAA
IVSSITASLRF

SEQ ID NO: 94454 - protein, 11 aa, Homo sapiens
  misc_feature: Table A; Target 94454; HLA-C*02:02; TUBA3C; ENSG00000198033; TAA
IVSSITASLRF

SEQ ID NO: 94455 - protein, 9 aa, Homo sapiens
  misc_feature: Table A; Target 94455; HLA-A*24:02; TUBA3C; ENSG00000198033; TAA
IYDICRRNL

SEQ ID NO: 94456 - protein, 9 aa, Homo sapiens
  misc_feature: Table A; Target 94456; HLA-C*04:01; TUBA3C; ENSG00000198033; TAA
IYDICRRNL

SEQ ID NO: 94457 - protein, 8 aa, Homo sapiens
  misc_feature: Table A; Target 94457; HLA-C*07:01; TUBA3C; ENSG00000198033; TAA
IYPAPQVS

SEQ ID NO: 94458 - protein, 8 aa, Homo sapiens
  misc_feature: Table A; Target 94458; HLA-C*07:02; TUBA3C; ENSG00000198033; TAA
IYPAPQVS

SEQ ID NO: 94459 - protein, 9 aa, Homo sapiens
  misc_feature: Table A; Target 94459; HLA-A*23:01; TUBA3C; ENSG00000198033; TAA
IYPAPQVST

SEQ ID NO: 94460 - protein, 9 aa, Homo sapiens
  misc_feature: Table A; Target 94460; HLA-A*24:02; TUBA3C; ENSG00000198033; TAA
IYPAPQVST

SEQ ID NO: 94461 - protein, 9 aa, Homo sapiens
  misc_feature: Table A; Target 94461; HLA-A*31:01; TUBA3C; ENSG00000198033; TAA
IYPAPQVST

SEQ ID NO: 94462 - protein, 9 aa, Homo sapiens
  misc_feature: Table A; Target 94462; HLA-A*32:01; TUBA3C; ENSG00000198033; TAA
IYPAPQVST

SEQ ID NO: 94463 - protein, 9 aa, Homo sapiens
  misc_feature: Table A; Target 94463; HLA-B*07:02; TUBA3C; ENSG00000198033; TAA
IYPAPQVST

SEQ ID NO: 94464 - protein, 9 aa, Homo sapiens
  misc_feature: Table A; Target 94464; HLA-B*46:01; TUBA3C; ENSG00000198033; TAA
IYPAPQVST

SEQ ID NO: 94465 - protein, 9 aa, Homo sapiens
  misc_feature: Table A; Target 94465; HLA-C*01:02; TUBA3C; ENSG00000198033; TAA
IYPAPQVST

SEQ ID NO: 94466 - protein, 9 aa, Homo sapiens
  misc_feature: Table A; Target 94466; HLA-C*04:01; TUBA3C; ENSG00000198033; TAA
IYPAPQVST

SEQ ID NO: 94467 - protein, 9 aa, Homo sapiens
  misc_feature: Table A; Target 94467; HLA-C*06:02; TUBA3C; ENSG00000198033; TAA
IYPAPQVST

SEQ ID NO: 94468 - protein, 9 aa, Homo sapiens
  misc_feature: Table A; Target 94468; HLA-C*07:01; TUBA3C; ENSG00000198033; TAA
IYPAPQVST

SEQ ID NO: 94469 - protein, 9 aa, Homo sapiens
  misc_feature: Table A; Target 94469; HLA-C*07:02; TUBA3C; ENSG00000198033; TAA
IYPAPQVST

SEQ ID NO: 94470 - protein, 9 aa, Homo sapiens
  misc_feature: Table A; Target 94470; HLA-C*14:02; TUBA3C; ENSG00000198033; TAA
IYPAPQVST

SEQ ID NO: 94471 - protein, 9 aa, Homo sapiens
  misc_feature: Table A; Target 94471; HLA-C*16:01; TUBA3C; ENSG00000198033; TAA
IYPAPQVST

SEQ ID NO: 94472 - protein, 10 aa, Homo sapiens
  misc_feature: Table A; Target 94472; HLA-A*23:01; TUBA3C; ENSG00000198033; TAA
IYPAPQVSTA

SEQ ID NO: 94473 - protein, 10 aa, Homo sapiens
  misc_feature: Table A; Target 94473; HLA-A*24:02; TUBA3C; ENSG00000198033; TAA
IYPAPQVSTA

SEQ ID NO: 94474 - protein, 10 aa, Homo sapiens
  misc_feature: Table A; Target 94474; HLA-B*07:02; TUBA3C; ENSG00000198033; TAA
IYPAPQVSTA

SEQ ID NO: 94475 - protein, 10 aa, Homo sapiens
  misc_feature: Table A; Target 94475; HLA-C*01:02; TUBA3C; ENSG00000198033; TAA
IYPAPQVSTA

SEQ ID NO: 94476 - protein, 10 aa, Homo sapiens
  misc_feature: Table A; Target 94476; HLA-C*04:01; TUBA3C; ENSG00000198033; TAA
IYPAPQVSTA

SEQ ID NO: 94477 - protein, 10 aa, Homo sapiens
  misc_feature: Table A; Target 94477; HLA-C*06:02; TUBA3C; ENSG00000198033; TAA
IYPAPQVSTA

SEQ ID NO: 94478 - protein, 10 aa, Homo sapiens
  misc_feature: Table A; Target 94478; HLA-C*07:02; TUBA3C; ENSG00000198033; TAA
IYPAPQVSTA

SEQ ID NO: 94479 - protein, 10 aa, Homo sapiens
  misc_feature: Table A; Target 94479; HLA-C*14:02; TUBA3C; ENSG00000198033; TAA
IYPAPQVSTA

SEQ ID NO: 94480 - protein, 11 aa, Homo sapiens
  misc_feature: Table A; Target 94480; HLA-A*23:01; TUBA3C; ENSG00000198033; TAA
IYPAPQVSTAV

SEQ ID NO: 94481 - protein, 11 aa, Homo sapiens
  misc_feature: Table A; Target 94481; HLA-A*24:02; TUBA3C; ENSG00000198033; TAA
IYPAPQVSTAV

SEQ ID NO: 94482 - protein, 11 aa, Homo sapiens
  misc_feature: Table A; Target 94482; HLA-C*04:01; TUBA3C; ENSG00000198033; TAA
IYPAPQVSTAV

SEQ ID NO: 94483 - protein, 11 aa, Homo sapiens
  misc_feature: Table A; Target 94483; HLA-C*07:02; TUBA3C; ENSG00000198033; TAA
IYPAPQVSTAV

SEQ ID NO: 94484 - protein, 11 aa, Homo sapiens
  misc_feature: Table A; Target 94484; HLA-C*14:02; TUBA3C; ENSG00000198033; TAA
IYPAPQVSTAV

SEQ ID NO: 94485 - protein, 9 aa, Homo sapiens
  misc_feature: Table A; Target 94485; HLA-A*02:01; TUBA3C; ENSG00000198033; TAA
KAYHEQLSV

SEQ ID NO: 94486 - protein, 9 aa, Homo sapiens
  misc_feature: Table A; Target 94486; HLA-A*02:03; TUBA3C; ENSG00000198033; TAA
KAYHEQLSV

SEQ ID NO: 94487 - protein, 9 aa, Homo sapiens
  misc_feature: Table A; Target 94487; HLA-A*02:04; TUBA3C; ENSG00000198033; TAA
KAYHEQLSV

SEQ ID NO: 94488 - protein, 9 aa, Homo sapiens
  misc_feature: Table A; Target 94488; HLA-A*02:07; TUBA3C; ENSG00000198033; TAA
KAYHEQLSV

SEQ ID NO: 94489 - protein, 9 aa, Homo sapiens
  misc_feature: Table A; Target 94489; HLA-A*03:01; TUBA3C; ENSG00000198033; TAA
KAYHEQLSV

SEQ ID NO: 94490 - protein, 9 aa, Homo sapiens
  misc_feature: Table A; Target 94490; HLA-A*11:01; TUBA3C; ENSG00000198033; TAA
KAYHEQLSV

SEQ ID NO: 94491 - protein, 9 aa, Homo sapiens
  misc_feature: Table A; Target 94491; HLA-A*25:01; TUBA3C; ENSG00000198033; TAA
KAYHEQLSV

SEQ ID NO: 94492 - protein, 9 aa, Homo sapiens
  misc_feature: Table A; Target 94492; HLA-A*30:01; TUBA3C; ENSG00000198033; TAA
KAYHEQLSV

SEQ ID NO: 94493 - protein, 9 aa, Homo sapiens
  misc_feature: Table A; Target 94493; HLA-A*31:01; TUBA3C; ENSG00000198033; TAA
KAYHEQLSV

SEQ ID NO: 94494 - protein, 9 aa, Homo sapiens
  misc_feature: Table A; Target 94494; HLA-A*32:01; TUBA3C; ENSG00000198033; TAA
KAYHEQLSV

SEQ ID NO: 94495 - protein, 9 aa, Homo sapiens
  misc_feature: Table A; Target 94495; HLA-A*68:02; TUBA3C; ENSG00000198033; TAA
KAYHEQLSV

SEQ ID NO: 94496 - protein, 9 aa, Homo sapiens
  misc_feature: Table A; Target 94496; HLA-B*07:02; TUBA3C; ENSG00000198033; TAA
KAYHEQLSV

SEQ ID NO: 94497 - protein, 9 aa, Homo sapiens
  misc_feature: Table A; Target 94497; HLA-B*08:01; TUBA3C; ENSG00000198033; TAA
KAYHEQLSV

SEQ ID NO: 94498 - protein, 9 aa, Homo sapiens
  misc_feature: Table A; Target 94498; HLA-B*13:02; TUBA3C; ENSG00000198033; TAA
KAYHEQLSV

SEQ ID NO: 94499 - protein, 9 aa, Homo sapiens
  misc_feature: Table A; Target 94499; HLA-B*15:01; TUBA3C; ENSG00000198033; TAA
KAYHEQLSV

SEQ ID NO: 94500 - protein, 9 aa, Homo sapiens
  misc_feature: Table A; Target 94500; HLA-B*15:03; TUBA3C; ENSG00000198033; TAA
KAYHEQLSV

SEQ ID NO: 94501 - protein, 9 aa, Homo sapiens
  misc_feature: Table A; Target 94501; HLA-B*27:05; TUBA3C; ENSG00000198033; TAA
KAYHEQLSV

SEQ ID NO: 94502 - protein, 9 aa, Homo sapiens
  misc_feature: Table A; Target 94502; HLA-B*40:02; TUBA3C; ENSG00000198033; TAA
KAYHEQLSV

SEQ ID NO: 94503 - protein, 9 aa, Homo sapiens
  misc_feature: Table A; Target 94503; HLA-B*46:01; TUBA3C; ENSG00000198033; TAA
KAYHEQLSV

SEQ ID NO: 94504 - protein, 9 aa, Homo sapiens
  misc_feature: Table A; Target 94504; HLA-B*49:01; TUBA3C; ENSG00000198033; TAA
KAYHEQLSV

SEQ ID NO: 94505 - protein, 9 aa, Homo sapiens
  misc_feature: Table A; Target 94505; HLA-B*51:01; TUBA3C; ENSG00000198033; TAA
KAYHEQLSV

SEQ ID NO: 94506 - protein, 9 aa, Homo sapiens
  misc_feature: Table A; Target 94506; HLA-B*54:01; TUBA3C; ENSG00000198033; TAA
KAYHEQLSV

SEQ ID NO: 94507 - protein, 9 aa, Homo sapiens
  misc_feature: Table A; Target 94507; HLA-B*55:01; TUBA3C; ENSG00000198033; TAA
KAYHEQLSV

SEQ ID NO: 94508 - protein, 9 aa, Homo sapiens
  misc_feature: Table A; Target 94508; HLA-B*56:01; TUBA3C; ENSG00000198033; TAA
KAYHEQLSV

SEQ ID NO: 94509 - protein, 9 aa, Homo sapiens
  misc_feature: Table A; Target 94509; HLA-B*57:01; TUBA3C; ENSG00000198033; TAA
KAYHEQLSV

SEQ ID NO: 94510 - protein, 9 aa, Homo sapiens
  misc_feature: Table A; Target 94510; HLA-B*58:01; TUBA3C; ENSG00000198033; TAA
KAYHEQLSV

SEQ ID NO: 94511 - protein, 9 aa, Homo sapiens
  misc_feature: Table A; Target 94511; HLA-C*01:02; TUBA3C; ENSG00000198033; TAA
KAYHEQLSV

SEQ ID NO: 94512 - protein, 9 aa, Homo sapiens
  misc_feature: Table A; Target 94512; HLA-C*02:02; TUBA3C; ENSG00000198033; TAA
KAYHEQLSV

SEQ ID NO: 94513 - protein, 9 aa, Homo sapiens
  misc_feature: Table A; Target 94513; HLA-C*03:03; TUBA3C; ENSG00000198033; TAA
KAYHEQLSV

SEQ ID NO: 94514 - protein, 9 aa, Homo sapiens
  misc_feature: Table A; Target 94514; HLA-C*03:04; TUBA3C; ENSG00000198033; TAA
KAYHEQLSV

SEQ ID NO: 94515 - protein, 9 aa, Homo sapiens
  misc_feature: Table A; Target 94515; HLA-C*05:01; TUBA3C; ENSG00000198033; TAA
KAYHEQLSV

SEQ ID NO: 94516 - protein, 9 aa, Homo sapiens
  misc_feature: Table A; Target 94516; HLA-C*06:02; TUBA3C; ENSG00000198033; TAA
KAYHEQLSV

SEQ ID NO: 94517 - protein, 9 aa, Homo sapiens
  misc_feature: Table A; Target 94517; HLA-C*07:01; TUBA3C; ENSG00000198033; TAA
KAYHEQLSV

SEQ ID NO: 94518 - protein, 9 aa, Homo sapiens
  misc_feature: Table A; Target 94518; HLA-C*07:02; TUBA3C; ENSG00000198033; TAA
KAYHEQLSV

SEQ ID NO: 94519 - protein, 9 aa, Homo sapiens
  misc_feature: Table A; Target 94519; HLA-C*12:03; TUBA3C; ENSG00000198033; TAA
KAYHEQLSV

SEQ ID NO: 94520 - protein, 9 aa, Homo sapiens
  misc_feature: Table A; Target 94520; HLA-C*16:01; TUBA3C; ENSG00000198033; TAA
KAYHEQLSV

SEQ ID NO: 94521 - protein, 9 aa, Homo sapiens
  misc_feature: Table A; Target 94521; HLA-C*16:02; TUBA3C; ENSG00000198033; TAA
KAYHEQLSV

SEQ ID NO: 94522 - protein, 9 aa, Homo sapiens
  misc_feature: Table A; Target 94522; HLA-C*16:04; TUBA3C; ENSG00000198033; TAA
KAYHEQLSV

SEQ ID NO: 94523 - protein, 10 aa, Homo sapiens
  misc_feature: Table A; Target 94523; HLA-A*02:03; TUBA3C; ENSG00000198033; TAA
KAYHEQLSVA

SEQ ID NO: 94524 - protein, 10 aa, Homo sapiens
  misc_feature: Table A; Target 94524; HLA-B*40:02; TUBA3C; ENSG00000198033; TAA
KAYHEQLSVA

SEQ ID NO: 94525 - protein, 10 aa, Homo sapiens
  misc_feature: Table A; Target 94525; HLA-B*54:01; TUBA3C; ENSG00000198033; TAA
KAYHEQLSVA

SEQ ID NO: 94526 - protein, 10 aa, Homo sapiens
  misc_feature: Table A; Target 94526; HLA-B*55:01; TUBA3C; ENSG00000198033; TAA
KAYHEQLSVA

SEQ ID NO: 94527 - protein, 10 aa, Homo sapiens
  misc_feature: Table A; Target 94527; HLA-B*56:01; TUBA3C; ENSG00000198033; TAA
KAYHEQLSVA

SEQ ID NO: 94528 - protein, 10 aa, Homo sapiens
  misc_feature: Table A; Target 94528; HLA-C*06:02; TUBA3C; ENSG00000198033; TAA
KAYHEQLSVA

SEQ ID NO: 94529 - protein, 10 aa, Homo sapiens
  misc_feature: Table A; Target 94529; HLA-C*07:01; TUBA3C; ENSG00000198033; TAA
KAYHEQLSVA

SEQ ID NO: 94530 - protein, 10 aa, Homo sapiens
  misc_feature: Table A; Target 94530; HLA-C*12:03; TUBA3C; ENSG00000198033; TAA
KAYHEQLSVA

SEQ ID NO: 94531 - protein, 10 aa, Homo sapiens
  misc_feature: Table A; Target 94531; HLA-A*30:01; TUBA3C; ENSG00000198033; TAA
KDVNAAIATI

SEQ ID NO: 94532 - protein, 10 aa, Homo sapiens
  misc_feature: Table A; Target 94532; HLA-B*07:02; TUBA3C; ENSG00000198033; TAA
KDVNAAIATI

SEQ ID NO: 94533 - protein, 10 aa, Homo sapiens
  misc_feature: Table A; Target 94533; HLA-B*40:01; TUBA3C; ENSG00000198033; TAA
KDVNAAIATI

SEQ ID NO: 94534 - protein, 10 aa, Homo sapiens
  misc_feature: Table A; Target 94534; HLA-B*40:02; TUBA3C; ENSG00000198033; TAA
KDVNAAIATI

SEQ ID NO: 94535 - protein, 10 aa, Homo sapiens
  misc_feature: Table A; Target 94535; HLA-B*49:01; TUBA3C; ENSG00000198033; TAA
KDVNAAIATI

SEQ ID NO: 94536 - protein, 10 aa, Homo sapiens
  misc_feature: Table A; Target 94536; HLA-C*04:01; TUBA3C; ENSG00000198033; TAA
KDVNAAIATI

SEQ ID NO: 94537 - protein, 10 aa, Homo sapiens
  misc_feature: Table A; Target 94537; HLA-C*06:02; TUBA3C; ENSG00000198033; TAA
KDVNAAIATI

SEQ ID NO: 94538 - protein, 11 aa, Homo sapiens
  misc_feature: Table A; Target 94538; HLA-B*27:02; TUBA3C; ENSG00000198033; TAA
KDVNAAIATIK

SEQ ID NO: 94539 - protein, 8 aa, Homo sapiens
  misc_feature: Table A; Target 94539; HLA-A*30:01; TUBA3C; ENSG00000198033; TAA
KDYEEVGV

SEQ ID NO: 94540 - protein, 8 aa, Homo sapiens
  misc_feature: Table A; Target 94540; HLA-B*37:01; TUBA3C; ENSG00000198033; TAA
KDYEEVGV

SEQ ID NO: 94541 - protein, 8 aa, Homo sapiens
  misc_feature: Table A; Target 94541; HLA-B*40:02; TUBA3C; ENSG00000198033; TAA
KDYEEVGV

SEQ ID NO: 94542 - protein, 8 aa, Homo sapiens
  misc_feature: Table A; Target 94542; HLA-C*06:02; TUBA3C; ENSG00000198033; TAA
KDYEEVGV

SEQ ID NO: 94543 - protein, 10 aa, Homo sapiens
  misc_feature: Table A; Target 94543; HLA-C*06:02; TUBA3C; ENSG00000198033; TAA
KDYEEVGVDS

SEQ ID NO: 94544 - protein, 11 aa, Homo sapiens
  misc_feature: Table A; Target 94544; HLA-A*02:01; TUBA3C; ENSG00000198033; TAA
KDYEEVGVDSV

SEQ ID NO: 94545 - protein, 11 aa, Homo sapiens
  misc_feature: Table A; Target 94545; HLA-A*02:03; TUBA3C; ENSG00000198033; TAA
KDYEEVGVDSV

SEQ ID NO: 94546 - protein, 11 aa, Homo sapiens
  misc_feature: Table A; Target 94546; HLA-A*02:07; TUBA3C; ENSG00000198033; TAA
KDYEEVGVDSV

SEQ ID NO: 94547 - protein, 11 aa, Homo sapiens
  misc_feature: Table A; Target 94547; HLA-A*30:01; TUBA3C; ENSG00000198033; TAA
KDYEEVGVDSV

SEQ ID NO: 94548 - protein, 11 aa, Homo sapiens
  misc_feature: Table A; Target 94548; HLA-A*68:02; TUBA3C; ENSG00000198033; TAA
KDYEEVGVDSV

SEQ ID NO: 94549 - protein, 11 aa, Homo sapiens
  misc_feature: Table A; Target 94549; HLA-B*13:02; TUBA3C; ENSG00000198033; TAA
KDYEEVGVDSV

SEQ ID NO: 94550 - protein, 11 aa, Homo sapiens
  misc_feature: Table A; Target 94550; HLA-B*27:05; TUBA3C; ENSG00000198033; TAA
KDYEEVGVDSV

SEQ ID NO: 94551 - protein, 11 aa, Homo sapiens
  misc_feature: Table A; Target 94551; HLA-B*37:01; TUBA3C; ENSG00000198033; TAA
KDYEEVGVDSV

SEQ ID NO: 94552 - protein, 11 aa, Homo sapiens
  misc_feature: Table A; Target 94552; HLA-B*40:01; TUBA3C; ENSG00000198033; TAA
KDYEEVGVDSV

SEQ ID NO: 94553 - protein, 11 aa, Homo sapiens
  misc_feature: Table A; Target 94553; HLA-B*40:02; TUBA3C; ENSG00000198033; TAA
KDYEEVGVDSV

SEQ ID NO: 94554 - protein, 11 aa, Homo sapiens
  misc_feature: Table A; Target 94554; HLA-B*49:01; TUBA3C; ENSG00000198033; TAA
KDYEEVGVDSV

SEQ ID NO: 94555 - protein, 11 aa, Homo sapiens
  misc_feature: Table A; Target 94555; HLA-B*55:01; TUBA3C; ENSG00000198033; TAA
KDYEEVGVDSV

SEQ ID NO: 94556 - protein, 11 aa, Homo sapiens
  misc_feature: Table A; Target 94556; HLA-C*04:01; TUBA3C; ENSG00000198033; TAA
KDYEEVGVDSV

SEQ ID NO: 94557 - protein, 11 aa, Homo sapiens
  misc_feature: Table A; Target 94557; HLA-C*06:02; TUBA3C; ENSG00000198033; TAA
KDYEEVGVDSV

SEQ ID NO: 94558 - protein, 11 aa, Homo sapiens
  misc_feature: Table A; Target 94558; HLA-C*07:01; TUBA3C; ENSG00000198033; TAA
KDYEEVGVDSV

SEQ ID NO: 94559 - protein, 11 aa, Homo sapiens
  misc_feature: Table A; Target 94559; HLA-C*12:03; TUBA3C; ENSG00000198033; TAA
KDYEEVGVDSV

SEQ ID NO: 94560 - protein, 11 aa, Homo sapiens
  misc_feature: Table A; Target 94560; HLA-C*16:04; TUBA3C; ENSG00000198033; TAA
KDYEEVGVDSV

SEQ ID NO: 94561 - protein, 8 aa, Homo sapiens
  misc_feature: Table A; Target 94561; HLA-A*01:01; TUBA3C; ENSG00000198033; TAA
KEDAANNY

SEQ ID NO: 94562 - protein, 8 aa, Homo sapiens
  misc_feature: Table A; Target 94562; HLA-A*30:02; TUBA3C; ENSG00000198033; TAA
KEDAANNY

SEQ ID NO: 94563 - protein, 8 aa, Homo sapiens
  misc_feature: Table A; Target 94563; HLA-B*15:01; TUBA3C; ENSG00000198033; TAA
KEDAANNY

SEQ ID NO: 94564 - protein, 8 aa, Homo sapiens
  misc_feature: Table A; Target 94564; HLA-B*15:03; TUBA3C; ENSG00000198033; TAA
KEDAANNY

SEQ ID NO: 94565 - protein, 8 aa, Homo sapiens
  misc_feature: Table A; Target 94565; HLA-B*18:01; TUBA3C; ENSG00000198033; TAA
KEDAANNY

SEQ ID NO: 94566 - protein, 8 aa, Homo sapiens
  misc_feature: Table A; Target 94566; HLA-B*27:02; TUBA3C; ENSG00000198033; TAA
KEDAANNY

SEQ ID NO: 94567 - protein, 8 aa, Homo sapiens
  misc_feature: Table A; Target 94567; HLA-B*37:01; TUBA3C; ENSG00000198033; TAA
KEDAANNY

SEQ ID NO: 94568 - protein, 8 aa, Homo sapiens
  misc_feature: Table A; Target 94568; HLA-B*39:01; TUBA3C; ENSG00000198033; TAA
KEDAANNY

SEQ ID NO: 94569 - protein, 8 aa, Homo sapiens
  misc_feature: Table A; Target 94569; HLA-B*44:02; TUBA3C; ENSG00000198033; TAA
KEDAANNY

SEQ ID NO: 94570 - protein, 8 aa, Homo sapiens
  misc_feature: Table A; Target 94570; HLA-B*44:03; TUBA3C; ENSG00000198033; TAA
KEDAANNY

SEQ ID NO: 94571 - protein, 8 aa, Homo sapiens
  misc_feature: Table A; Target 94571; HLA-C*04:01; TUBA3C; ENSG00000198033; TAA
KEDAANNY

SEQ ID NO: 94572 - protein, 8 aa, Homo sapiens
  misc_feature: Table A; Target 94572; HLA-C*05:01; TUBA3C; ENSG00000198033; TAA
KEDAANNY

SEQ ID NO: 94573 - protein, 8 aa, Homo sapiens
  misc_feature: Table A; Target 94573; HLA-C*07:01; TUBA3C; ENSG00000198033; TAA
KEDAANNY

SEQ ID NO: 94574 - protein, 8 aa, Homo sapiens
  misc_feature: Table A; Target 94574; HLA-C*07:04; TUBA3C; ENSG00000198033; TAA
KEDAANNY

SEQ ID NO: 94575 - protein, 8 aa, Homo sapiens
  misc_feature: Table A; Target 94575; HLA-C*12:03; TUBA3C; ENSG00000198033; TAA
KEDAANNY

SEQ ID NO: 94576 - protein, 8 aa, Homo sapiens
  misc_feature: Table A; Target 94576; HLA-C*16:02; TUBA3C; ENSG00000198033; TAA
KEDAANNY

SEQ ID NO: 94577 - protein, 8 aa, Homo sapiens
  misc_feature: Table A; Target 94577; HLA-C*16:04; TUBA3C; ENSG00000198033; TAA
KEDAANNY

SEQ ID NO: 94578 - protein, 9 aa, Homo sapiens
  misc_feature: Table A; Target 94578; HLA-B*27:05; TUBA3C; ENSG00000198033; TAA
KEDAANNYA

SEQ ID NO: 94579 - protein, 9 aa, Homo sapiens
  misc_feature: Table A; Target 94579; HLA-B*39:01; TUBA3C; ENSG00000198033; TAA
KEDAANNYA

SEQ ID NO: 94580 - protein, 9 aa, Homo sapiens
  misc_feature: Table A; Target 94580; HLA-B*40:01; TUBA3C; ENSG00000198033; TAA
KEDAANNYA

SEQ ID NO: 94581 - protein, 9 aa, Homo sapiens
  misc_feature: Table A; Target 94581; HLA-B*40:02; TUBA3C; ENSG00000198033; TAA
KEDAANNYA

SEQ ID NO: 94582 - protein, 9 aa, Homo sapiens
  misc_feature: Table A; Target 94582; HLA-B*49:01; TUBA3C; ENSG00000198033; TAA
KEDAANNYA

SEQ ID NO: 94583 - protein, 9 aa, Homo sapiens
  misc_feature: Table A; Target 94583; HLA-C*06:02; TUBA3C; ENSG00000198033; TAA
KEDAANNYA

SEQ ID NO: 94584 - protein, 10 aa, Homo sapiens
  misc_feature: Table A; Target 94584; HLA-B*27:02; TUBA3C; ENSG00000198033; TAA
KEDAANNYAR

SEQ ID NO: 94585 - protein, 10 aa, Homo sapiens
  misc_feature: Table A; Target 94585; HLA-B*27:05; TUBA3C; ENSG00000198033; TAA
KEDAANNYAR

SEQ ID NO: 94586 - protein, 10 aa, Homo sapiens
  misc_feature: Table A; Target 94586; HLA-B*40:01; TUBA3C; ENSG00000198033; TAA
KEDAANNYAR

SEQ ID NO: 94587 - protein, 10 aa, Homo sapiens
  misc_feature: Table A; Target 94587; HLA-B*40:02; TUBA3C; ENSG00000198033; TAA
KEDAANNYAR

SEQ ID NO: 94588 - protein, 10 aa, Homo sapiens
  misc_feature: Table A; Target 94588; HLA-B*44:02; TUBA3C; ENSG00000198033; TAA
KEDAANNYAR

SEQ ID NO: 94589 - protein, 10 aa, Homo sapiens
  misc_feature: Table A; Target 94589; HLA-B*44:03; TUBA3C; ENSG00000198033; TAA
KEDAANNYAR

SEQ ID NO: 94590 - protein, 10 aa, Homo sapiens
  misc_feature: Table A; Target 94590; HLA-B*49:01; TUBA3C; ENSG00000198033; TAA
KEDAANNYAR

SEQ ID NO: 94591 - protein, 10 aa, Homo sapiens
  misc_feature: Table A; Target 94591; HLA-C*06:02; TUBA3C; ENSG00000198033; TAA
KEDAANNYAR

SEQ ID NO: 94592 - protein, 8 aa, Homo sapiens
  misc_feature: Table A; Target 94592; HLA-A*30:01; TUBA3C; ENSG00000198033; TAA
KEIVDLVL

SEQ ID NO: 94593 - protein, 8 aa, Homo sapiens
  misc_feature: Table A; Target 94593; HLA-B*18:01; TUBA3C; ENSG00000198033; TAA
KEIVDLVL

SEQ ID NO: 94594 - protein, 8 aa, Homo sapiens
  misc_feature: Table A; Target 94594; HLA-B*37:01; TUBA3C; ENSG00000198033; TAA
KEIVDLVL

SEQ ID NO: 94595 - protein, 8 aa, Homo sapiens
  misc_feature: Table A; Target 94595; HLA-B*40:01; TUBA3C; ENSG00000198033; TAA
KEIVDLVL

SEQ ID NO: 94596 - protein, 8 aa, Homo sapiens
  misc_feature: Table A; Target 94596; HLA-B*40:02; TUBA3C; ENSG00000198033; TAA
KEIVDLVL

SEQ ID NO: 94597 - protein, 8 aa, Homo sapiens
  misc_feature: Table A; Target 94597; HLA-B*49:01; TUBA3C; ENSG00000198033; TAA
KEIVDLVL

SEQ ID NO: 94598 - protein, 10 aa, Homo sapiens
  misc_feature: Table A; Target 94598; HLA-B*27:02; TUBA3C; ENSG00000198033; TAA
KEIVDLVLDR

SEQ ID NO: 94599 - protein, 11 aa, Homo sapiens
  misc_feature: Table A; Target 94599; HLA-B*44:02; TUBA3C; ENSG00000198033; TAA
KEIVDLVLDRI

SEQ ID NO: 94600 - protein, 11 aa, Homo sapiens
  misc_feature: Table A; Target 94600; HLA-B*44:03; TUBA3C; ENSG00000198033; TAA
KEIVDLVLDRI

SEQ ID NO: 94601 - protein, 11 aa, Homo sapiens
  misc_feature: Table A; Target 94601; HLA-B*49:01; TUBA3C; ENSG00000198033; TAA
KEIVDLVLDRI

SEQ ID NO: 94602 - protein, 8 aa, Homo sapiens
  misc_feature: Table A; Target 94602; HLA-C*04:01; TUBA3C; ENSG00000198033; TAA
KFDLMYAK

SEQ ID NO: 94603 - protein, 8 aa, Homo sapiens
  misc_feature: Table A; Target 94603; HLA-C*07:01; TUBA3C; ENSG00000198033; TAA
KFDLMYAK

SEQ ID NO: 94604 - protein, 9 aa, Homo sapiens
  misc_feature: Table A; Target 94604; HLA-A*31:01; TUBA3C; ENSG00000198033; TAA
KFDLMYAKR

SEQ ID NO: 94605 - protein, 9 aa, Homo sapiens
  misc_feature: Table A; Target 94605; HLA-A*02:01; TUBA3C; ENSG00000198033; TAA
KLADLCTGL

SEQ ID NO: 94606 - protein, 9 aa, Homo sapiens
  misc_feature: Table A; Target 94606; HLA-A*02:03; TUBA3C; ENSG00000198033; TAA
KLADLCTGL

SEQ ID NO: 94607 - protein, 9 aa, Homo sapiens
  misc_feature: Table A; Target 94607; HLA-A*02:04; TUBA3C; ENSG00000198033; TAA
KLADLCTGL

SEQ ID NO: 94608 - protein, 9 aa, Homo sapiens
  misc_feature: Table A; Target 94608; HLA-A*02:07; TUBA3C; ENSG00000198033; TAA
KLADLCTGL

SEQ ID NO: 94609 - protein, 9 aa, Homo sapiens
  misc_feature: Table A; Target 94609; HLA-A*03:01; TUBA3C; ENSG00000198033; TAA
KLADLCTGL

SEQ ID NO: 94610 - protein, 9 aa, Homo sapiens
  misc_feature: Table A; Target 94610; HLA-A*03:02; TUBA3C; ENSG00000198033; TAA
KLADLCTGL

SEQ ID NO: 94611 - protein, 9 aa, Homo sapiens
  misc_feature: Table A; Target 94611; HLA-A*31:01; TUBA3C; ENSG00000198033; TAA
KLADLCTGL

SEQ ID NO: 94612 - protein, 9 aa, Homo sapiens
  misc_feature: Table A; Target 94612; HLA-A*32:01; TUBA3C; ENSG00000198033; TAA
KLADLCTGL

SEQ ID NO: 94613 - protein, 9 aa, Homo sapiens
  misc_feature: Table A; Target 94613; HLA-A*68:02; TUBA3C; ENSG00000198033; TAA
KLADLCTGL

SEQ ID NO: 94614 - protein, 9 aa, Homo sapiens
  misc_feature: Table A; Target 94614; HLA-B*13:02; TUBA3C; ENSG00000198033; TAA
KLADLCTGL

SEQ ID NO: 94615 - protein, 9 aa, Homo sapiens
  misc_feature: Table A; Target 94615; HLA-B*15:01; TUBA3C; ENSG00000198033; TAA
KLADLCTGL

SEQ ID NO: 94616 - protein, 9 aa, Homo sapiens
  misc_feature: Table A; Target 94616; HLA-B*15:03; TUBA3C; ENSG00000198033; TAA
KLADLCTGL

SEQ ID NO: 94617 - protein, 9 aa, Homo sapiens
  misc_feature: Table A; Target 94617; HLA-B*27:05; TUBA3C; ENSG00000198033; TAA
KLADLCTGL

SEQ ID NO: 94618 - protein, 9 aa, Homo sapiens
  misc_feature: Table A; Target 94618; HLA-B*55:01; TUBA3C; ENSG00000198033; TAA
KLADLCTGL

SEQ ID NO: 94619 - protein, 9 aa, Homo sapiens
  misc_feature: Table A; Target 94619; HLA-B*58:01; TUBA3C; ENSG00000198033; TAA
KLADLCTGL

SEQ ID NO: 94620 - protein, 9 aa, Homo sapiens
  misc_feature: Table A; Target 94620; HLA-C*01:02; TUBA3C; ENSG00000198033; TAA
KLADLCTGL

SEQ ID NO: 94621 - protein, 9 aa, Homo sapiens
  misc_feature: Table A; Target 94621; HLA-C*06:02; TUBA3C; ENSG00000198033; TAA
KLADLCTGL

SEQ ID NO: 94622 - protein, 9 aa, Homo sapiens
  misc_feature: Table A; Target 94622; HLA-C*07:02; TUBA3C; ENSG00000198033; TAA
KLADLCTGL

SEQ ID NO: 94623 - protein, 9 aa, Homo sapiens
  misc_feature: Table A; Target 94623; HLA-C*07:04; TUBA3C; ENSG00000198033; TAA
KLADLCTGL

SEQ ID NO: 94624 - protein, 9 aa, Homo sapiens
  misc_feature: Table A; Target 94624; HLA-C*12:03; TUBA3C; ENSG00000198033; TAA
KLADLCTGL

SEQ ID NO: 94625 - protein, 9 aa, Homo sapiens
  misc_feature: Table A; Target 94625; HLA-C*16:02; TUBA3C; ENSG00000198033; TAA
KLADLCTGL

SEQ ID NO: 94626 - protein, 10 aa, Homo sapiens
  misc_feature: Table A; Target 94626; HLA-C*07:01; TUBA3C; ENSG00000198033; TAA
KLADLCTGLQ

SEQ ID NO: 94627 - protein, 8 aa, Homo sapiens
  misc_feature: Table A; Target 94627; HLA-B*57:01; TUBA3C; ENSG00000198033; TAA
KSKLEFAI

SEQ ID NO: 94628 - protein, 9 aa, Homo sapiens
  misc_feature: Table A; Target 94628; HLA-A*01:01; TUBA3C; ENSG00000198033; TAA
KSKLEFAIY

SEQ ID NO: 94629 - protein, 9 aa, Homo sapiens
  misc_feature: Table A; Target 94629; HLA-A*30:02; TUBA3C; ENSG00000198033; TAA
KSKLEFAIY

SEQ ID NO: 94630 - protein, 9 aa, Homo sapiens
  misc_feature: Table A; Target 94630; HLA-A*31:01; TUBA3C; ENSG00000198033; TAA
KSKLEFAIY

SEQ ID NO: 94631 - protein, 9 aa, Homo sapiens
  misc_feature: Table A; Target 94631; HLA-B*57:01; TUBA3C; ENSG00000198033; TAA
KSKLEFAIY

SEQ ID NO: 94632 - protein, 10 aa, Homo sapiens
  misc_feature: Table A; Target 94632; HLA-A*23:01; TUBA3C; ENSG00000198033; TAA
KTIGGGDDSF

SEQ ID NO: 94633 - protein, 10 aa, Homo sapiens
  misc_feature: Table A; Target 94633; HLA-A*25:01; TUBA3C; ENSG00000198033; TAA
KTIGGGDDSF

SEQ ID NO: 94634 - protein, 10 aa, Homo sapiens
  misc_feature: Table A; Target 94634; HLA-A*26:01; TUBA3C; ENSG00000198033; TAA
KTIGGGDDSF

SEQ ID NO: 94635 - protein, 10 aa, Homo sapiens
  misc_feature: Table A; Target 94635; HLA-A*30:02; TUBA3C; ENSG00000198033; TAA
KTIGGGDDSF

SEQ ID NO: 94636 - protein, 10 aa, Homo sapiens
  misc_feature: Table A; Target 94636; HLA-A*32:01; TUBA3C; ENSG00000198033; TAA
KTIGGGDDSF

SEQ ID NO: 94637 - protein, 10 aa, Homo sapiens
  misc_feature: Table A; Target 94637; HLA-B*15:01; TUBA3C; ENSG00000198033; TAA
KTIGGGDDSF

SEQ ID NO: 94638 - protein, 10 aa, Homo sapiens
  misc_feature: Table A; Target 94638; HLA-B*15:03; TUBA3C; ENSG00000198033; TAA
KTIGGGDDSF

SEQ ID NO: 94639 - protein, 10 aa, Homo sapiens
  misc_feature: Table A; Target 94639; HLA-B*27:02; TUBA3C; ENSG00000198033; TAA
KTIGGGDDSF

SEQ ID NO: 94640 - protein, 10 aa, Homo sapiens
  misc_feature: Table A; Target 94640; HLA-B*27:05; TUBA3C; ENSG00000198033; TAA
KTIGGGDDSF

SEQ ID NO: 94641 - protein, 10 aa, Homo sapiens
  misc_feature: Table A; Target 94641; HLA-B*38:01; TUBA3C; ENSG00000198033; TAA
KTIGGGDDSF

SEQ ID NO: 94642 - protein, 10 aa, Homo sapiens
  misc_feature: Table A; Target 94642; HLA-B*39:01; TUBA3C; ENSG00000198033; TAA
KTIGGGDDSF

SEQ ID NO: 94643 - protein, 10 aa, Homo sapiens
  misc_feature: Table A; Target 94643; HLA-B*40:01; TUBA3C; ENSG00000198033; TAA
KTIGGGDDSF

SEQ ID NO: 94644 - protein, 10 aa, Homo sapiens
  misc_feature: Table A; Target 94644; HLA-B*40:02; TUBA3C; ENSG00000198033; TAA
KTIGGGDDSF

SEQ ID NO: 94645 - protein, 10 aa, Homo sapiens
  misc_feature: Table A; Target 94645; HLA-B*44:03; TUBA3C; ENSG00000198033; TAA
KTIGGGDDSF

SEQ ID NO: 94646 - protein, 10 aa, Homo sapiens
  misc_feature: Table A; Target 94646; HLA-B*46:01; TUBA3C; ENSG00000198033; TAA
KTIGGGDDSF

SEQ ID NO: 94647 - protein, 10 aa, Homo sapiens
  misc_feature: Table A; Target 94647; HLA-B*55:01; TUBA3C; ENSG00000198033; TAA
KTIGGGDDSF

SEQ ID NO: 94648 - protein, 10 aa, Homo sapiens
  misc_feature: Table A; Target 94648; HLA-B*57:01; TUBA3C; ENSG00000198033; TAA
KTIGGGDDSF

SEQ ID NO: 94649 - protein, 10 aa, Homo sapiens
  misc_feature: Table A; Target 94649; HLA-B*58:01; TUBA3C; ENSG00000198033; TAA
KTIGGGDDSF

SEQ ID NO: 94650 - protein, 10 aa, Homo sapiens
  misc_feature: Table A; Target 94650; HLA-C*01:02; TUBA3C; ENSG00000198033; TAA
KTIGGGDDSF

SEQ ID NO: 94651 - protein, 10 aa, Homo sapiens
  misc_feature: Table A; Target 94651; HLA-C*03:04; TUBA3C; ENSG00000198033; TAA
KTIGGGDDSF

SEQ ID NO: 94652 - protein, 10 aa, Homo sapiens
  misc_feature: Table A; Target 94652; HLA-C*04:01; TUBA3C; ENSG00000198033; TAA
KTIGGGDDSF

SEQ ID NO: 94653 - protein, 10 aa, Homo sapiens
  misc_feature: Table A; Target 94653; HLA-C*05:01; TUBA3C; ENSG00000198033; TAA
KTIGGGDDSF

SEQ ID NO: 94654 - protein, 10 aa, Homo sapiens
  misc_feature: Table A; Target 94654; HLA-C*06:02; TUBA3C; ENSG00000198033; TAA
KTIGGGDDSF

SEQ ID NO: 94655 - protein, 10 aa, Homo sapiens
  misc_feature: Table A; Target 94655; HLA-C*07:02; TUBA3C; ENSG00000198033; TAA
KTIGGGDDSF

SEQ ID NO: 94656 - protein, 10 aa, Homo sapiens
  misc_feature: Table A; Target 94656; HLA-C*07:04; TUBA3C; ENSG00000198033; TAA
KTIGGGDDSF

SEQ ID NO: 94657 - protein, 10 aa, Homo sapiens
  misc_feature: Table A; Target 94657; HLA-C*12:03; TUBA3C; ENSG00000198033; TAA
KTIGGGDDSF

SEQ ID NO: 94658 - protein, 10 aa, Homo sapiens
  misc_feature: Table A; Target 94658; HLA-C*14:02; TUBA3C; ENSG00000198033; TAA
KTIGGGDDSF

SEQ ID NO: 94659 - protein, 10 aa, Homo sapiens
  misc_feature: Table A; Target 94659; HLA-C*16:02; TUBA3C; ENSG00000198033; TAA
KTIGGGDDSF

SEQ ID NO: 94660 - protein, 10 aa, Homo sapiens
  misc_feature: Table A; Target 94660; HLA-C*16:04; TUBA3C; ENSG00000198033; TAA
KTIGGGDDSF

SEQ ID NO: 94661 - protein, 8 aa, Homo sapiens
  misc_feature: Table A; Target 94661; HLA-B*40:02; TUBA3C; ENSG00000198033; TAA
KTKRTIQF

SEQ ID NO: 94662 - protein, 8 aa, Homo sapiens
  misc_feature: Table A; Target 94662; HLA-B*57:01; TUBA3C; ENSG00000198033; TAA
KTKRTIQF

SEQ ID NO: 94663 - protein, 9 aa, Homo sapiens
  misc_feature: Table A; Target 94663; HLA-B*40:02; TUBA3C; ENSG00000198033; TAA
KTKRTIQFV

SEQ ID NO: 94664 - protein, 11 aa, Homo sapiens
  misc_feature: Table A; Target 94664; HLA-B*57:01; TUBA3C; ENSG00000198033; TAA
KTKRTIQFVDW

SEQ ID NO: 94665 - protein, 8 aa, Homo sapiens
  misc_feature: Table A; Target 94665; HLA-B*40:02; TUBA3C; ENSG00000198033; TAA
KVQRAVCM

SEQ ID NO: 94666 - protein, 9 aa, Homo sapiens
  misc_feature: Table A; Target 94666; HLA-A*31:01; TUBA3C; ENSG00000198033; TAA
KVQRAVCML

SEQ ID NO: 94667 - protein, 9 aa, Homo sapiens
  misc_feature: Table A; Target 94667; HLA-B*07:02; TUBA3C; ENSG00000198033; TAA
KVQRAVCML

SEQ ID NO: 94668 - protein, 9 aa, Homo sapiens
  misc_feature: Table A; Target 94668; HLA-C*04:01; TUBA3C; ENSG00000198033; TAA
KVQRAVCML

SEQ ID NO: 94669 - protein, 9 aa, Homo sapiens
  misc_feature: Table A; Target 94669; HLA-C*06:02; TUBA3C; ENSG00000198033; TAA
KVQRAVCML

SEQ ID NO: 94670 - protein, 9 aa, Homo sapiens
  misc_feature: Table A; Target 94670; HLA-C*07:02; TUBA3C; ENSG00000198033; TAA
KVQRAVCML

SEQ ID NO: 94671 - protein, 9 aa, Homo sapiens
  misc_feature: Table A; Target 94671; HLA-C*07:04; TUBA3C; ENSG00000198033; TAA
KVQRAVCML

SEQ ID NO: 94672 - protein, 9 aa, Homo sapiens
  misc_feature: Table A; Target 94672; HLA-C*07:01; TUBA3C; ENSG00000198033; TAA
KYMACCMLY

SEQ ID NO: 94673 - protein, 8 aa, Homo sapiens
  misc_feature: Table A; Target 94673; HLA-B*39:01; TUBA3C; ENSG00000198033; TAA
LAALEKDY

SEQ ID NO: 94674 - protein, 8 aa, Homo sapiens
  misc_feature: Table A; Target 94674; HLA-C*03:03; TUBA3C; ENSG00000198033; TAA
LAALEKDY

SEQ ID NO: 94675 - protein, 8 aa, Homo sapiens
  misc_feature: Table A; Target 94675; HLA-C*07:01; TUBA3C; ENSG00000198033; TAA
LAALEKDY

SEQ ID NO: 94676 - protein, 8 aa, Homo sapiens
  misc_feature: Table A; Target 94676; HLA-C*12:03; TUBA3C; ENSG00000198033; TAA
LAALEKDY

SEQ ID NO: 94677 - protein, 8 aa, Homo sapiens
  misc_feature: Table A; Target 94677; HLA-C*16:01; TUBA3C; ENSG00000198033; TAA
LAALEKDY

SEQ ID NO: 94678 - protein, 8 aa, Homo sapiens
  misc_feature: Table A; Target 94678; HLA-C*16:02; TUBA3C; ENSG00000198033; TAA
LAALEKDY

SEQ ID NO: 94679 - protein, 8 aa, Homo sapiens
  misc_feature: Table A; Target 94679; HLA-B*27:05; TUBA3C; ENSG00000198033; TAA
LADLCTGL

SEQ ID NO: 94680 - protein, 8 aa, Homo sapiens
  misc_feature: Table A; Target 94680; HLA-C*04:01; TUBA3C; ENSG00000198033; TAA
LADLCTGL

SEQ ID NO: 94681 - protein, 8 aa, Homo sapiens
  misc_feature: Table A; Target 94681; HLA-C*05:01; TUBA3C; ENSG00000198033; TAA
LADLCTGL

SEQ ID NO: 94682 - protein, 8 aa, Homo sapiens
  misc_feature: Table A; Target 94682; HLA-C*07:01; TUBA3C; ENSG00000198033; TAA
LADLCTGL

SEQ ID NO: 94683 - protein, 11 aa, Homo sapiens
  misc_feature: Table A; Target 94683; HLA-A*01:01; TUBA3C; ENSG00000198033; TAA
LADLCTGLQGF

SEQ ID NO: 94684 - protein, 8 aa, Homo sapiens
  misc_feature: Table A; Target 94684; HLA-B*08:01; TUBA3C; ENSG00000198033; TAA
LAKVQRAV

SEQ ID NO: 94685 - protein, 8 aa, Homo sapiens
  misc_feature: Table A; Target 94685; HLA-B*46:01; TUBA3C; ENSG00000198033; TAA
LAKVQRAV

SEQ ID NO: 94686 - protein, 8 aa, Homo sapiens
  misc_feature: Table A; Target 94686; HLA-B*51:01; TUBA3C; ENSG00000198033; TAA
LAKVQRAV

SEQ ID NO: 94687 - protein, 8 aa, Homo sapiens
  misc_feature: Table A; Target 94687; HLA-B*54:01; TUBA3C; ENSG00000198033; TAA
LAKVQRAV

SEQ ID NO: 94688 - protein, 8 aa, Homo sapiens
  misc_feature: Table A; Target 94688; HLA-C*06:02; TUBA3C; ENSG00000198033; TAA
LAKVQRAV

SEQ ID NO: 94689 - protein, 8 aa, Homo sapiens
  misc_feature: Table A; Target 94689; HLA-C*16:01; TUBA3C; ENSG00000198033; TAA
LAKVQRAV

SEQ ID NO: 94690 - protein, 8 aa, Homo sapiens
  misc_feature: Table A; Target 94690; HLA-C*16:02; TUBA3C; ENSG00000198033; TAA
LAKVQRAV

SEQ ID NO: 94691 - protein, 9 aa, Homo sapiens
  misc_feature: Table A; Target 94691; HLA-B*08:01; TUBA3C; ENSG00000198033; TAA
LAKVQRAVC

SEQ ID NO: 94692 - protein, 9 aa, Homo sapiens
  misc_feature: Table A; Target 94692; HLA-B*54:01; TUBA3C; ENSG00000198033; TAA
LAKVQRAVC

SEQ ID NO: 94693 - protein, 8 aa, Homo sapiens
  misc_feature: Table A; Target 94693; HLA-A*23:01; TUBA3C; ENSG00000198033; TAA
LATYAPVI

SEQ ID NO: 94694 - protein, 8 aa, Homo sapiens
  misc_feature: Table A; Target 94694; HLA-B*07:02; TUBA3C; ENSG00000198033; TAA
LATYAPVI

SEQ ID NO: 94695 - protein, 8 aa, Homo sapiens
  misc_feature: Table A; Target 94695; HLA-B*13:02; TUBA3C; ENSG00000198033; TAA
LATYAPVI

SEQ ID NO: 94696 - protein, 8 aa, Homo sapiens
  misc_feature: Table A; Target 94696; HLA-B*35:03; TUBA3C; ENSG00000198033; TAA
LATYAPVI

SEQ ID NO: 94697 - protein, 8 aa, Homo sapiens
  misc_feature: Table A; Target 94697; HLA-B*40:02; TUBA3C; ENSG00000198033; TAA
LATYAPVI

SEQ ID NO: 94698 - protein, 8 aa, Homo sapiens
  misc_feature: Table A; Target 94698; HLA-B*49:01; TUBA3C; ENSG00000198033; TAA
LATYAPVI

SEQ ID NO: 94699 - protein, 8 aa, Homo sapiens
  misc_feature: Table A; Target 94699; HLA-B*51:01; TUBA3C; ENSG00000198033; TAA
LATYAPVI

SEQ ID NO: 94700 - protein, 8 aa, Homo sapiens
  misc_feature: Table A; Target 94700; HLA-B*54:01; TUBA3C; ENSG00000198033; TAA
LATYAPVI

SEQ ID NO: 94701 - protein, 8 aa, Homo sapiens
  misc_feature: Table A; Target 94701; HLA-B*58:01; TUBA3C; ENSG00000198033; TAA
LATYAPVI

SEQ ID NO: 94702 - protein, 8 aa, Homo sapiens
  misc_feature: Table A; Target 94702; HLA-C*02:02; TUBA3C; ENSG00000198033; TAA
LATYAPVI

SEQ ID NO: 94703 - protein, 8 aa, Homo sapiens
  misc_feature: Table A; Target 94703; HLA-C*03:03; TUBA3C; ENSG00000198033; TAA
LATYAPVI

SEQ ID NO: 94704 - protein, 8 aa, Homo sapiens
  misc_feature: Table A; Target 94704; HLA-C*03:04; TUBA3C; ENSG00000198033; TAA
LATYAPVI

SEQ ID NO: 94705 - protein, 8 aa, Homo sapiens
  misc_feature: Table A; Target 94705; HLA-C*04:01; TUBA3C; ENSG00000198033; TAA
LATYAPVI

SEQ ID NO: 94706 - protein, 8 aa, Homo sapiens
  misc_feature: Table A; Target 94706; HLA-C*06:02; TUBA3C; ENSG00000198033; TAA
LATYAPVI

SEQ ID NO: 94707 - protein, 8 aa, Homo sapiens
  misc_feature: Table A; Target 94707; HLA-C*07:01; TUBA3C; ENSG00000198033; TAA
LATYAPVI

SEQ ID NO: 94708 - protein, 8 aa, Homo sapiens
  misc_feature: Table A; Target 94708; HLA-C*07:02; TUBA3C; ENSG00000198033; TAA
LATYAPVI

SEQ ID NO: 94709 - protein, 8 aa, Homo sapiens
  misc_feature: Table A; Target 94709; HLA-C*07:04; TUBA3C; ENSG00000198033; TAA
LATYAPVI

SEQ ID NO: 94710 - protein, 8 aa, Homo sapiens
  misc_feature: Table A; Target 94710; HLA-C*12:03; TUBA3C; ENSG00000198033; TAA
LATYAPVI

SEQ ID NO: 94711 - protein, 8 aa, Homo sapiens
  misc_feature: Table A; Target 94711; HLA-C*16:01; TUBA3C; ENSG00000198033; TAA
LATYAPVI

SEQ ID NO: 94712 - protein, 8 aa, Homo sapiens
  misc_feature: Table A; Target 94712; HLA-C*16:02; TUBA3C; ENSG00000198033; TAA
LATYAPVI

SEQ ID NO: 94713 - protein, 8 aa, Homo sapiens
  misc_feature: Table A; Target 94713; HLA-C*16:04; TUBA3C; ENSG00000198033; TAA
LATYAPVI

SEQ ID NO: 94714 - protein, 10 aa, Homo sapiens
  misc_feature: Table A; Target 94714; HLA-B*07:02; TUBA3C; ENSG00000198033; TAA
LATYAPVISA

SEQ ID NO: 94715 - protein, 10 aa, Homo sapiens
  misc_feature: Table A; Target 94715; HLA-B*54:01; TUBA3C; ENSG00000198033; TAA
LATYAPVISA

SEQ ID NO: 94716 - protein, 10 aa, Homo sapiens
  misc_feature: Table A; Target 94716; HLA-B*56:01; TUBA3C; ENSG00000198033; TAA
LATYAPVISA

SEQ ID NO: 94717 - protein, 9 aa, Homo sapiens
  misc_feature: Table A; Target 94717; HLA-C*06:02; TUBA3C; ENSG00000198033; TAA
LCTGLQGFL

SEQ ID NO: 94718 - protein, 9 aa, Homo sapiens
  misc_feature: Table A; Target 94718; HLA-C*07:01; TUBA3C; ENSG00000198033; TAA
LCTGLQGFL

SEQ ID NO: 94719 - protein, 10 aa, Homo sapiens
  misc_feature: Table A; Target 94719; HLA-C*07:01; TUBA3C; ENSG00000198033; TAA
LCTGLQGFLI

SEQ ID NO: 94720 - protein, 9 aa, Homo sapiens
  misc_feature: Table A; Target 94720; HLA-A*29:02; TUBA3C; ENSG00000198033; TAA
LDHKFDLMY

SEQ ID NO: 94721 - protein, 9 aa, Homo sapiens
  misc_feature: Table A; Target 94721; HLA-C*04:01; TUBA3C; ENSG00000198033; TAA
LDHKFDLMY

SEQ ID NO: 94722 - protein, 9 aa, Homo sapiens
  misc_feature: Table A; Target 94722; HLA-C*06:02; TUBA3C; ENSG00000198033; TAA
LDHKFDLMY

SEQ ID NO: 94723 - protein, 9 aa, Homo sapiens
  misc_feature: Table A; Target 94723; HLA-C*07:01; TUBA3C; ENSG00000198033; TAA
LDHKFDLMY

SEQ ID NO: 94724 - protein, 8 aa, Homo sapiens
  misc_feature: Table A; Target 94724; HLA-A*25:01; TUBA3C; ENSG00000198033; TAA
LDIERPTY

SEQ ID NO: 94725 - protein, 8 aa, Homo sapiens
  misc_feature: Table A; Target 94725; HLA-A*30:01; TUBA3C; ENSG00000198033; TAA
LDIERPTY

SEQ ID NO: 94726 - protein, 8 aa, Homo sapiens
  misc_feature: Table A; Target 94726; HLA-A*32:01; TUBA3C; ENSG00000198033; TAA
LDIERPTY

SEQ ID NO: 94727 - protein, 8 aa, Homo sapiens
  misc_feature: Table A; Target 94727; HLA-B*07:02; TUBA3C; ENSG00000198033; TAA
LDIERPTY

SEQ ID NO: 94728 - protein, 8 aa, Homo sapiens
  misc_feature: Table A; Target 94728; HLA-B*08:01; TUBA3C; ENSG00000198033; TAA
LDIERPTY

SEQ ID NO: 94729 - protein, 8 aa, Homo sapiens
  misc_feature: Table A; Target 94729; HLA-B*15:01; TUBA3C; ENSG00000198033; TAA
LDIERPTY

SEQ ID NO: 94730 - protein, 8 aa, Homo sapiens
  misc_feature: Table A; Target 94730; HLA-B*15:03; TUBA3C; ENSG00000198033; TAA
LDIERPTY

SEQ ID NO: 94731 - protein, 8 aa, Homo sapiens
  misc_feature: Table A; Target 94731; HLA-B*18:01; TUBA3C; ENSG00000198033; TAA
LDIERPTY

SEQ ID NO: 94732 - protein, 8 aa, Homo sapiens
  misc_feature: Table A; Target 94732; HLA-B*27:02; TUBA3C; ENSG00000198033; TAA
LDIERPTY

SEQ ID NO: 94733 - protein, 8 aa, Homo sapiens
  misc_feature: Table A; Target 94733; HLA-B*27:05; TUBA3C; ENSG00000198033; TAA
LDIERPTY

SEQ ID NO: 94734 - protein, 8 aa, Homo sapiens
  misc_feature: Table A; Target 94734; HLA-B*37:01; TUBA3C; ENSG00000198033; TAA
LDIERPTY

SEQ ID NO: 94735 - protein, 8 aa, Homo sapiens
  misc_feature: Table A; Target 94735; HLA-B*39:01; TUBA3C; ENSG00000198033; TAA
LDIERPTY

SEQ ID NO: 94736 - protein, 8 aa, Homo sapiens
  misc_feature: Table A; Target 94736; HLA-B*40:02; TUBA3C; ENSG00000198033; TAA
LDIERPTY

SEQ ID NO: 94737 - protein, 8 aa, Homo sapiens
  misc_feature: Table A; Target 94737; HLA-B*44:02; TUBA3C; ENSG00000198033; TAA
LDIERPTY

SEQ ID NO: 94738 - protein, 8 aa, Homo sapiens
  misc_feature: Table A; Target 94738; HLA-B*44:03; TUBA3C; ENSG00000198033; TAA
LDIERPTY

SEQ ID NO: 94739 - protein, 8 aa, Homo sapiens
  misc_feature: Table A; Target 94739; HLA-B*57:01; TUBA3C; ENSG00000198033; TAA
LDIERPTY

SEQ ID NO: 94740 - protein, 8 aa, Homo sapiens
  misc_feature: Table A; Target 94740; HLA-B*58:01; TUBA3C; ENSG00000198033; TAA
LDIERPTY

SEQ ID NO: 94741 - protein, 8 aa, Homo sapiens
  misc_feature: Table A; Target 94741; HLA-C*04:01; TUBA3C; ENSG00000198033; TAA
LDIERPTY

SEQ ID NO: 94742 - protein, 8 aa, Homo sapiens
  misc_feature: Table A; Target 94742; HLA-C*06:02; TUBA3C; ENSG00000198033; TAA
LDIERPTY

SEQ ID NO: 94743 - protein, 8 aa, Homo sapiens
  misc_feature: Table A; Target 94743; HLA-C*07:01; TUBA3C; ENSG00000198033; TAA
LDIERPTY

SEQ ID NO: 94744 - protein, 8 aa, Homo sapiens
  misc_feature: Table A; Target 94744; HLA-C*07:02; TUBA3C; ENSG00000198033; TAA
LDIERPTY

SEQ ID NO: 94745 - protein, 8 aa, Homo sapiens
  misc_feature: Table A; Target 94745; HLA-C*07:04; TUBA3C; ENSG00000198033; TAA
LDIERPTY

SEQ ID NO: 94746 - protein, 8 aa, Homo sapiens
  misc_feature: Table A; Target 94746; HLA-C*12:03; TUBA3C; ENSG00000198033; TAA
LDIERPTY

SEQ ID NO: 94747 - protein, 8 aa, Homo sapiens
  misc_feature: Table A; Target 94747; HLA-C*14:02; TUBA3C; ENSG00000198033; TAA
LDIERPTY

SEQ ID NO: 94748 - protein, 8 aa, Homo sapiens
  misc_feature: Table A; Target 94748; HLA-C*16:01; TUBA3C; ENSG00000198033; TAA
LDIERPTY

SEQ ID NO: 94749 - protein, 8 aa, Homo sapiens
  misc_feature: Table A; Target 94749; HLA-C*16:02; TUBA3C; ENSG00000198033; TAA
LDIERPTY

SEQ ID NO: 94750 - protein, 8 aa, Homo sapiens
  misc_feature: Table A; Target 94750; HLA-C*16:04; TUBA3C; ENSG00000198033; TAA
LDIERPTY

SEQ ID NO: 94751 - protein, 9 aa, Homo sapiens
  misc_feature: Table A; Target 94751; HLA-A*02:03; TUBA3C; ENSG00000198033; TAA
LDIERPTYT

SEQ ID NO: 94752 - protein, 9 aa, Homo sapiens
  misc_feature: Table A; Target 94752; HLA-B*37:01; TUBA3C; ENSG00000198033; TAA
LDIERPTYT

SEQ ID NO: 94753 - protein, 9 aa, Homo sapiens
  misc_feature: Table A; Target 94753; HLA-B*40:02; TUBA3C; ENSG00000198033; TAA
LDIERPTYT

SEQ ID NO: 94754 - protein, 9 aa, Homo sapiens
  misc_feature: Table A; Target 94754; HLA-B*49:01; TUBA3C; ENSG00000198033; TAA
LDIERPTYT

SEQ ID NO: 94755 - protein, 9 aa, Homo sapiens
  misc_feature: Table A; Target 94755; HLA-C*04:01; TUBA3C; ENSG00000198033; TAA
LDIERPTYT

SEQ ID NO: 94756 - protein, 9 aa, Homo sapiens
  misc_feature: Table A; Target 94756; HLA-C*07:01; TUBA3C; ENSG00000198033; TAA
LDIERPTYT

SEQ ID NO: 94757 - protein, 11 aa, Homo sapiens
  misc_feature: Table A; Target 94757; HLA-B*40:02; TUBA3C; ENSG00000198033; TAA
LDIERPTYTNL

SEQ ID NO: 94758 - protein, 8 aa, Homo sapiens
  misc_feature: Table A; Target 94758; HLA-B*18:01; TUBA3C; ENSG00000198033; TAA
LEFAIYPA

SEQ ID NO: 94759 - protein, 8 aa, Homo sapiens
  misc_feature: Table A; Target 94759; HLA-B*49:01; TUBA3C; ENSG00000198033; TAA
LEFAIYPA

SEQ ID NO: 94760 - protein, 8 aa, Homo sapiens
  misc_feature: Table A; Target 94760; HLA-B*54:01; TUBA3C; ENSG00000198033; TAA
LEFAIYPA

SEQ ID NO: 94761 - protein, 9 aa, Homo sapiens
  misc_feature: Table A; Target 94761; HLA-A*30:01; TUBA3C; ENSG00000198033; TAA
LEFAIYPAP

SEQ ID NO: 94762 - protein, 9 aa, Homo sapiens
  misc_feature: Table A; Target 94762; HLA-B*18:01; TUBA3C; ENSG00000198033; TAA
LEFAIYPAP

SEQ ID NO: 94763 - protein, 9 aa, Homo sapiens
  misc_feature: Table A; Target 94763; HLA-B*27:05; TUBA3C; ENSG00000198033; TAA
LEFAIYPAP

SEQ ID NO: 94764 - protein, 9 aa, Homo sapiens
  misc_feature: Table A; Target 94764; HLA-B*40:02; TUBA3C; ENSG00000198033; TAA
LEFAIYPAP

SEQ ID NO: 94765 - protein, 9 aa, Homo sapiens
  misc_feature: Table A; Target 94765; HLA-B*49:01; TUBA3C; ENSG00000198033; TAA
LEFAIYPAP

SEQ ID NO: 94766 - protein, 9 aa, Homo sapiens
  misc_feature: Table A; Target 94766; HLA-B*54:01; TUBA3C; ENSG00000198033; TAA
LEFAIYPAP

SEQ ID NO: 94767 - protein, 9 aa, Homo sapiens
  misc_feature: Table A; Target 94767; HLA-C*06:02; TUBA3C; ENSG00000198033; TAA
LEFAIYPAP

SEQ ID NO: 94768 - protein, 9 aa, Homo sapiens
  misc_feature: Table A; Target 94768; HLA-C*16:04; TUBA3C; ENSG00000198033; TAA
LEFAIYPAP

SEQ ID NO: 94769 - protein, 10 aa, Homo sapiens
  misc_feature: Table A; Target 94769; HLA-A*68:02; TUBA3C; ENSG00000198033; TAA
LEFAIYPAPQ

SEQ ID NO: 94770 - protein, 10 aa, Homo sapiens
  misc_feature: Table A; Target 94770; HLA-B*40:02; TUBA3C; ENSG00000198033; TAA
LEFAIYPAPQ

SEQ ID NO: 94771 - protein, 10 aa, Homo sapiens
  misc_feature: Table A; Target 94771; HLA-C*04:01; TUBA3C; ENSG00000198033; TAA
LEFAIYPAPQ

SEQ ID NO: 94772 - protein, 10 aa, Homo sapiens
  misc_feature: Table A; Target 94772; HLA-C*06:02; TUBA3C; ENSG00000198033; TAA
LEFAIYPAPQ

SEQ ID NO: 94773 - protein, 10 aa, Homo sapiens
  misc_feature: Table A; Target 94773; HLA-C*07:01; TUBA3C; ENSG00000198033; TAA
LEFAIYPAPQ

SEQ ID NO: 94774 - protein, 11 aa, Homo sapiens
  misc_feature: Table A; Target 94774; HLA-A*68:02; TUBA3C; ENSG00000198033; TAA
LEFAIYPAPQV

SEQ ID NO: 94775 - protein, 11 aa, Homo sapiens
  misc_feature: Table A; Target 94775; HLA-B*49:01; TUBA3C; ENSG00000198033; TAA
LEFAIYPAPQV

SEQ ID NO: 94776 - protein, 9 aa, Homo sapiens
  misc_feature: Table A; Target 94776; HLA-B*40:02; TUBA3C; ENSG00000198033; TAA
LEHGIQPDG

SEQ ID NO: 94777 - protein, 9 aa, Homo sapiens
  misc_feature: Table A; Target 94777; HLA-C*04:01; TUBA3C; ENSG00000198033; TAA
LEHGIQPDG

SEQ ID NO: 94778 - protein, 9 aa, Homo sapiens
  misc_feature: Table A; Target 94778; HLA-C*06:02; TUBA3C; ENSG00000198033; TAA
LEHGIQPDG

SEQ ID NO: 94779 - protein, 9 aa, Homo sapiens
  misc_feature: Table A; Target 94779; HLA-C*07:01; TUBA3C; ENSG00000198033; TAA
LEHGIQPDG

SEQ ID NO: 94780 - protein, 9 aa, Homo sapiens
  misc_feature: Table A; Target 94780; HLA-C*12:03; TUBA3C; ENSG00000198033; TAA
LEHGIQPDG

SEQ ID NO: 94781 - protein, 9 aa, Homo sapiens
  misc_feature: Table A; Target 94781; HLA-C*16:04; TUBA3C; ENSG00000198033; TAA
LEHGIQPDG

SEQ ID NO: 94782 - protein, 10 aa, Homo sapiens
  misc_feature: Table A; Target 94782; HLA-C*07:01; TUBA3C; ENSG00000198033; TAA
LEHGIQPDGQ

SEQ ID NO: 94783 - protein, 11 aa, Homo sapiens
  misc_feature: Table A; Target 94783; HLA-A*30:01; TUBA3C; ENSG00000198033; TAA
LEHGIQPDGQM

SEQ ID NO: 94784 - protein, 11 aa, Homo sapiens
  misc_feature: Table A; Target 94784; HLA-B*40:01; TUBA3C; ENSG00000198033; TAA
LEHGIQPDGQM

SEQ ID NO: 94785 - protein, 11 aa, Homo sapiens
  misc_feature: Table A; Target 94785; HLA-B*40:02; TUBA3C; ENSG00000198033; TAA
LEHGIQPDGQM

SEQ ID NO: 94786 - protein, 8 aa, Homo sapiens
  misc_feature: Table A; Target 94786; HLA-B*18:01; TUBA3C; ENSG00000198033; TAA
LEHSDCAF

SEQ ID NO: 94787 - protein, 8 aa, Homo sapiens
  misc_feature: Table A; Target 94787; HLA-B*37:01; TUBA3C; ENSG00000198033; TAA
LEHSDCAF

SEQ ID NO: 94788 - protein, 8 aa, Homo sapiens
  misc_feature: Table A; Target 94788; HLA-B*40:02; TUBA3C; ENSG00000198033; TAA
LEHSDCAF

SEQ ID NO: 94789 - protein, 9 aa, Homo sapiens
  misc_feature: Table A; Target 94789; HLA-B*40:01; TUBA3C; ENSG00000198033; TAA
LEHSDCAFM

SEQ ID NO: 94790 - protein, 9 aa, Homo sapiens
  misc_feature: Table A; Target 94790; HLA-B*40:02; TUBA3C; ENSG00000198033; TAA
LEHSDCAFM

SEQ ID NO: 94791 - protein, 9 aa, Homo sapiens
  misc_feature: Table A; Target 94791; HLA-B*49:01; TUBA3C; ENSG00000198033; TAA
LEHSDCAFM

SEQ ID NO: 94792 - protein, 9 aa, Homo sapiens
  misc_feature: Table A; Target 94792; HLA-C*07:01; TUBA3C; ENSG00000198033; TAA
LEHSDCAFM

SEQ ID NO: 94793 - protein, 8 aa, Homo sapiens
  misc_feature: Table A; Target 94793; HLA-B*18:01; TUBA3C; ENSG00000198033; TAA
LEKDYEEV

SEQ ID NO: 94794 - protein, 8 aa, Homo sapiens
  misc_feature: Table A; Target 94794; HLA-B*40:02; TUBA3C; ENSG00000198033; TAA
LEKDYEEV

SEQ ID NO: 94795 - protein, 8 aa, Homo sapiens
  misc_feature: Table A; Target 94795; HLA-B*49:01; TUBA3C; ENSG00000198033; TAA
LEKDYEEV

SEQ ID NO: 94796 - protein, 8 aa, Homo sapiens
  misc_feature: Table A; Target 94796; HLA-C*07:01; TUBA3C; ENSG00000198033; TAA
LEKDYEEV

SEQ ID NO: 94797 - protein, 8 aa, Homo sapiens
  misc_feature: Table A; Target 94797; HLA-C*12:03; TUBA3C; ENSG00000198033; TAA
LEKDYEEV

SEQ ID NO: 94798 - protein, 9 aa, Homo sapiens
  misc_feature: Table A; Target 94798; HLA-B*40:02; TUBA3C; ENSG00000198033; TAA
LEKDYEEVG

SEQ ID NO: 94799 - protein, 10 aa, Homo sapiens
  misc_feature: Table A; Target 94799; HLA-A*30:01; TUBA3C; ENSG00000198033; TAA
LEKDYEEVGV

SEQ ID NO: 94800 - protein, 10 aa, Homo sapiens
  misc_feature: Table A; Target 94800; HLA-B*40:01; TUBA3C; ENSG00000198033; TAA
LEKDYEEVGV

SEQ ID NO: 94801 - protein, 10 aa, Homo sapiens
  misc_feature: Table A; Target 94801; HLA-B*40:02; TUBA3C; ENSG00000198033; TAA
LEKDYEEVGV

SEQ ID NO: 94802 - protein, 10 aa, Homo sapiens
  misc_feature: Table A; Target 94802; HLA-B*49:01; TUBA3C; ENSG00000198033; TAA
LEKDYEEVGV

SEQ ID NO: 94803 - protein, 10 aa, Homo sapiens
  misc_feature: Table A; Target 94803; HLA-C*06:02; TUBA3C; ENSG00000198033; TAA
LEKDYEEVGV

SEQ ID NO: 94804 - protein, 9 aa, Homo sapiens
  misc_feature: Table A; Target 94804; HLA-A*02:01; TUBA3C; ENSG00000198033; TAA
LEPTVVDEV

SEQ ID NO: 94805 - protein, 9 aa, Homo sapiens
  misc_feature: Table A; Target 94805; HLA-A*02:07; TUBA3C; ENSG00000198033; TAA
LEPTVVDEV

SEQ ID NO: 94806 - protein, 9 aa, Homo sapiens
  misc_feature: Table A; Target 94806; HLA-A*26:01; TUBA3C; ENSG00000198033; TAA
LEPTVVDEV

SEQ ID NO: 94807 - protein, 9 aa, Homo sapiens
  misc_feature: Table A; Target 94807; HLA-A*30:01; TUBA3C; ENSG00000198033; TAA
LEPTVVDEV

SEQ ID NO: 94808 - protein, 9 aa, Homo sapiens
  misc_feature: Table A; Target 94808; HLA-A*68:02; TUBA3C; ENSG00000198033; TAA
LEPTVVDEV

SEQ ID NO: 94809 - protein, 9 aa, Homo sapiens
  misc_feature: Table A; Target 94809; HLA-B*13:02; TUBA3C; ENSG00000198033; TAA
LEPTVVDEV

SEQ ID NO: 94810 - protein, 9 aa, Homo sapiens
  misc_feature: Table A; Target 94810; HLA-B*27:05; TUBA3C; ENSG00000198033; TAA
LEPTVVDEV

SEQ ID NO: 94811 - protein, 9 aa, Homo sapiens
  misc_feature: Table A; Target 94811; HLA-B*37:01; TUBA3C; ENSG00000198033; TAA
LEPTVVDEV

SEQ ID NO: 94812 - protein, 9 aa, Homo sapiens
  misc_feature: Table A; Target 94812; HLA-B*40:01; TUBA3C; ENSG00000198033; TAA
LEPTVVDEV

SEQ ID NO: 94813 - protein, 9 aa, Homo sapiens
  misc_feature: Table A; Target 94813; HLA-B*40:02; TUBA3C; ENSG00000198033; TAA
LEPTVVDEV

SEQ ID NO: 94814 - protein, 9 aa, Homo sapiens
  misc_feature: Table A; Target 94814; HLA-B*49:01; TUBA3C; ENSG00000198033; TAA
LEPTVVDEV

SEQ ID NO: 94815 - protein, 9 aa, Homo sapiens
  misc_feature: Table A; Target 94815; HLA-B*55:01; TUBA3C; ENSG00000198033; TAA
LEPTVVDEV

SEQ ID NO: 94816 - protein, 9 aa, Homo sapiens
  misc_feature: Table A; Target 94816; HLA-C*04:01; TUBA3C; ENSG00000198033; TAA
LEPTVVDEV

SEQ ID NO: 94817 - protein, 9 aa, Homo sapiens
  misc_feature: Table A; Target 94817; HLA-C*06:02; TUBA3C; ENSG00000198033; TAA
LEPTVVDEV

SEQ ID NO: 94818 - protein, 9 aa, Homo sapiens
  misc_feature: Table A; Target 94818; HLA-C*07:01; TUBA3C; ENSG00000198033; TAA
LEPTVVDEV

SEQ ID NO: 94819 - protein, 9 aa, Homo sapiens
  misc_feature: Table A; Target 94819; HLA-C*07:02; TUBA3C; ENSG00000198033; TAA
LEPTVVDEV

SEQ ID NO: 94820 - protein, 9 aa, Homo sapiens
  misc_feature: Table A; Target 94820; HLA-C*07:04; TUBA3C; ENSG00000198033; TAA
LEPTVVDEV

SEQ ID NO: 94821 - protein, 9 aa, Homo sapiens
  misc_feature: Table A; Target 94821; HLA-C*12:03; TUBA3C; ENSG00000198033; TAA
LEPTVVDEV

SEQ ID NO: 94822 - protein, 10 aa, Homo sapiens
  misc_feature: Table A; Target 94822; HLA-A*68:02; TUBA3C; ENSG00000198033; TAA
LEPTVVDEVR

SEQ ID NO: 94823 - protein, 10 aa, Homo sapiens
  misc_feature: Table A; Target 94823; HLA-B*27:02; TUBA3C; ENSG00000198033; TAA
LEPTVVDEVR

SEQ ID NO: 94824 - protein, 8 aa, Homo sapiens
  misc_feature: Table A; Target 94824; HLA-C*07:01; TUBA3C; ENSG00000198033; TAA
LFHPEQLI

SEQ ID NO: 94825 - protein, 10 aa, Homo sapiens
  misc_feature: Table A; Target 94825; HLA-C*04:01; TUBA3C; ENSG00000198033; TAA
LFHPEQLITG

SEQ ID NO: 94826 - protein, 11 aa, Homo sapiens
  misc_feature: Table A; Target 94826; HLA-A*31:01; TUBA3C; ENSG00000198033; TAA
LFHPEQLITGK

SEQ ID NO: 94827 - protein, 9 aa, Homo sapiens
  misc_feature: Table A; Target 94827; HLA-A*02:01; TUBA3C; ENSG00000198033; TAA
LIGQIVSSI

SEQ ID NO: 94828 - protein, 9 aa, Homo sapiens
  misc_feature: Table A; Target 94828; HLA-A*02:03; TUBA3C; ENSG00000198033; TAA
LIGQIVSSI

SEQ ID NO: 94829 - protein, 9 aa, Homo sapiens
  misc_feature: Table A; Target 94829; HLA-A*02:04; TUBA3C; ENSG00000198033; TAA
LIGQIVSSI

SEQ ID NO: 94830 - protein, 9 aa, Homo sapiens
  misc_feature: Table A; Target 94830; HLA-A*02:07; TUBA3C; ENSG00000198033; TAA
LIGQIVSSI

SEQ ID NO: 94831 - protein, 9 aa, Homo sapiens
  misc_feature: Table A; Target 94831; HLA-A*23:01; TUBA3C; ENSG00000198033; TAA
LIGQIVSSI

SEQ ID NO: 94832 - protein, 9 aa, Homo sapiens
  misc_feature: Table A; Target 94832; HLA-A*24:02; TUBA3C; ENSG00000198033; TAA
LIGQIVSSI

SEQ ID NO: 94833 - protein, 9 aa, Homo sapiens
  misc_feature: Table A; Target 94833; HLA-A*25:01; TUBA3C; ENSG00000198033; TAA
LIGQIVSSI

SEQ ID NO: 94834 - protein, 9 aa, Homo sapiens
  misc_feature: Table A; Target 94834; HLA-A*30:01; TUBA3C; ENSG00000198033; TAA
LIGQIVSSI

SEQ ID NO: 94835 - protein, 9 aa, Homo sapiens
  misc_feature: Table A; Target 94835; HLA-A*32:01; TUBA3C; ENSG00000198033; TAA
LIGQIVSSI

SEQ ID NO: 94836 - protein, 9 aa, Homo sapiens
  misc_feature: Table A; Target 94836; HLA-A*68:02; TUBA3C; ENSG00000198033; TAA
LIGQIVSSI

SEQ ID NO: 94837 - protein, 9 aa, Homo sapiens
  misc_feature: Table A; Target 94837; HLA-B*07:02; TUBA3C; ENSG00000198033; TAA
LIGQIVSSI

SEQ ID NO: 94838 - protein, 9 aa, Homo sapiens
  misc_feature: Table A; Target 94838; HLA-B*13:02; TUBA3C; ENSG00000198033; TAA
LIGQIVSSI

SEQ ID NO: 94839 - protein, 9 aa, Homo sapiens
  misc_feature: Table A; Target 94839; HLA-B*27:05; TUBA3C; ENSG00000198033; TAA
LIGQIVSSI

SEQ ID NO: 94840 - protein, 9 aa, Homo sapiens
  misc_feature: Table A; Target 94840; HLA-B*38:01; TUBA3C; ENSG00000198033; TAA
LIGQIVSSI

SEQ ID NO: 94841 - protein, 9 aa, Homo sapiens
  misc_feature: Table A; Target 94841; HLA-B*39:01; TUBA3C; ENSG00000198033; TAA
LIGQIVSSI

SEQ ID NO: 94842 - protein, 9 aa, Homo sapiens
  misc_feature: Table A; Target 94842; HLA-B*40:02; TUBA3C; ENSG00000198033; TAA
LIGQIVSSI

SEQ ID NO: 94843 - protein, 9 aa, Homo sapiens
  misc_feature: Table A; Target 94843; HLA-B*46:01; TUBA3C; ENSG00000198033; TAA
LIGQIVSSI

SEQ ID NO: 94844 - protein, 9 aa, Homo sapiens
  misc_feature: Table A; Target 94844; HLA-B*49:01; TUBA3C; ENSG00000198033; TAA
LIGQIVSSI

SEQ ID NO: 94845 - protein, 9 aa, Homo sapiens
  misc_feature: Table A; Target 94845; HLA-B*51:01; TUBA3C; ENSG00000198033; TAA
LIGQIVSSI

SEQ ID NO: 94846 - protein, 9 aa, Homo sapiens
  misc_feature: Table A; Target 94846; HLA-B*58:01; TUBA3C; ENSG00000198033; TAA
LIGQIVSSI

SEQ ID NO: 94847 - protein, 9 aa, Homo sapiens
  misc_feature: Table A; Target 94847; HLA-C*01:02; TUBA3C; ENSG00000198033; TAA
LIGQIVSSI

SEQ ID NO: 94848 - protein, 9 aa, Homo sapiens
  misc_feature: Table A; Target 94848; HLA-C*04:01; TUBA3C; ENSG00000198033; TAA
LIGQIVSSI

SEQ ID NO: 94849 - protein, 9 aa, Homo sapiens
  misc_feature: Table A; Target 94849; HLA-C*06:02; TUBA3C; ENSG00000198033; TAA
LIGQIVSSI

SEQ ID NO: 94850 - protein, 9 aa, Homo sapiens
  misc_feature: Table A; Target 94850; HLA-C*07:01; TUBA3C; ENSG00000198033; TAA
LIGQIVSSI

SEQ ID NO: 94851 - protein, 9 aa, Homo sapiens
  misc_feature: Table A; Target 94851; HLA-C*07:02; TUBA3C; ENSG00000198033; TAA
LIGQIVSSI

SEQ ID NO: 94852 - protein, 9 aa, Homo sapiens
  misc_feature: Table A; Target 94852; HLA-C*07:04; TUBA3C; ENSG00000198033; TAA
LIGQIVSSI

SEQ ID NO: 94853 - protein, 9 aa, Homo sapiens
  misc_feature: Table A; Target 94853; HLA-C*12:03; TUBA3C; ENSG00000198033; TAA
LIGQIVSSI

SEQ ID NO: 94854 - protein, 9 aa, Homo sapiens
  misc_feature: Table A; Target 94854; HLA-C*14:02; TUBA3C; ENSG00000198033; TAA
LIGQIVSSI

SEQ ID NO: 94855 - protein, 8 aa, Homo sapiens
  misc_feature: Table A; Target 94855; HLA-B*08:01; TUBA3C; ENSG00000198033; TAA
LLMERLSV

SEQ ID NO: 94856 - protein, 10 aa, Homo sapiens
  misc_feature: Table A; Target 94856; HLA-A*01:01; TUBA3C; ENSG00000198033; TAA
LLMERLSVDY

SEQ ID NO: 94857 - protein, 10 aa, Homo sapiens
  misc_feature: Table A; Target 94857; HLA-A*26:01; TUBA3C; ENSG00000198033; TAA
LLMERLSVDY

SEQ ID NO: 94858 - protein, 10 aa, Homo sapiens
  misc_feature: Table A; Target 94858; HLA-A*29:02; TUBA3C; ENSG00000198033; TAA
LLMERLSVDY

SEQ ID NO: 94859 - protein, 10 aa, Homo sapiens
  misc_feature: Table A; Target 94859; HLA-A*30:02; TUBA3C; ENSG00000198033; TAA
LLMERLSVDY

SEQ ID NO: 94860 - protein, 10 aa, Homo sapiens
  misc_feature: Table A; Target 94860; HLA-B*15:01; TUBA3C; ENSG00000198033; TAA
LLMERLSVDY

SEQ ID NO: 94861 - protein, 10 aa, Homo sapiens
  misc_feature: Table A; Target 94861; HLA-B*15:03; TUBA3C; ENSG00000198033; TAA
LLMERLSVDY

SEQ ID NO: 94862 - protein, 10 aa, Homo sapiens
  misc_feature: Table A; Target 94862; HLA-B*46:01; TUBA3C; ENSG00000198033; TAA
LLMERLSVDY

SEQ ID NO: 94863 - protein, 10 aa, Homo sapiens
  misc_feature: Table A; Target 94863; HLA-C*02:02; TUBA3C; ENSG00000198033; TAA
LLMERLSVDY

SEQ ID NO: 94864 - protein, 10 aa, Homo sapiens
  misc_feature: Table A; Target 94864; HLA-C*04:01; TUBA3C; ENSG00000198033; TAA
LLMERLSVDY

SEQ ID NO: 94865 - protein, 10 aa, Homo sapiens
  misc_feature: Table A; Target 94865; HLA-C*07:01; TUBA3C; ENSG00000198033; TAA
LLMERLSVDY

SEQ ID NO: 94866 - protein, 9 aa, Homo sapiens
  misc_feature: Table A; Target 94866; HLA-A*01:01; TUBA3C; ENSG00000198033; TAA
LMERLSVDY

SEQ ID NO: 94867 - protein, 9 aa, Homo sapiens
  misc_feature: Table A; Target 94867; HLA-A*29:02; TUBA3C; ENSG00000198033; TAA
LMERLSVDY

SEQ ID NO: 94868 - protein, 9 aa, Homo sapiens
  misc_feature: Table A; Target 94868; HLA-A*30:02; TUBA3C; ENSG00000198033; TAA
LMERLSVDY

SEQ ID NO: 94869 - protein, 9 aa, Homo sapiens
  misc_feature: Table A; Target 94869; HLA-B*15:01; TUBA3C; ENSG00000198033; TAA
LMERLSVDY

SEQ ID NO: 94870 - protein, 9 aa, Homo sapiens
  misc_feature: Table A; Target 94870; HLA-B*15:03; TUBA3C; ENSG00000198033; TAA
LMERLSVDY

SEQ ID NO: 94871 - protein, 9 aa, Homo sapiens
  misc_feature: Table A; Target 94871; HLA-B*18:01; TUBA3C; ENSG00000198033; TAA
LMERLSVDY

SEQ ID NO: 94872 - protein, 9 aa, Homo sapiens
  misc_feature: Table A; Target 94872; HLA-B*35:01; TUBA3C; ENSG00000198033; TAA
LMERLSVDY

SEQ ID NO: 94873 - protein, 9 aa, Homo sapiens
  misc_feature: Table A; Target 94873; HLA-B*46:01; TUBA3C; ENSG00000198033; TAA
LMERLSVDY

SEQ ID NO: 94874 - protein, 9 aa, Homo sapiens
  misc_feature: Table A; Target 94874; HLA-B*55:01; TUBA3C; ENSG00000198033; TAA
LMERLSVDY

SEQ ID NO: 94875 - protein, 9 aa, Homo sapiens
  misc_feature: Table A; Target 94875; HLA-C*03:03; TUBA3C; ENSG00000198033; TAA
LMERLSVDY

SEQ ID NO: 94876 - protein, 9 aa, Homo sapiens
  misc_feature: Table A; Target 94876; HLA-C*04:01; TUBA3C; ENSG00000198033; TAA
LMERLSVDY

SEQ ID NO: 94877 - protein, 9 aa, Homo sapiens
  misc_feature: Table A; Target 94877; HLA-C*07:01; TUBA3C; ENSG00000198033; TAA
LMERLSVDY

SEQ ID NO: 94878 - protein, 9 aa, Homo sapiens
  misc_feature: Table A; Target 94878; HLA-C*07:04; TUBA3C; ENSG00000198033; TAA
LMERLSVDY

SEQ ID NO: 94879 - protein, 9 aa, Homo sapiens
  misc_feature: Table A; Target 94879; HLA-C*12:03; TUBA3C; ENSG00000198033; TAA
LMERLSVDY

SEQ ID NO: 94880 - protein, 8 aa, Homo sapiens
  misc_feature: Table A; Target 94880; HLA-B*08:01; TUBA3C; ENSG00000198033; TAA
LMYAKRAF

SEQ ID NO: 94881 - protein, 9 aa, Homo sapiens
  misc_feature: Table A; Target 94881; HLA-A*02:01; TUBA3C; ENSG00000198033; TAA
LMYAKRAFV

SEQ ID NO: 94882 - protein, 9 aa, Homo sapiens
  misc_feature: Table A; Target 94882; HLA-A*02:03; TUBA3C; ENSG00000198033; TAA
LMYAKRAFV

SEQ ID NO: 94883 - protein, 9 aa, Homo sapiens
  misc_feature: Table A; Target 94883; HLA-B*08:01; TUBA3C; ENSG00000198033; TAA
LMYAKRAFV

SEQ ID NO: 94884 - protein, 8 aa, Homo sapiens
  misc_feature: Table A; Target 94884; HLA-B*27:02; TUBA3C; ENSG00000198033; TAA
LNVDLTEF

SEQ ID NO: 94885 - protein, 8 aa, Homo sapiens
  misc_feature: Table A; Target 94885; HLA-B*46:01; TUBA3C; ENSG00000198033; TAA
LNVDLTEF

SEQ ID NO: 94886 - protein, 8 aa, Homo sapiens
  misc_feature: Table A; Target 94886; HLA-C*04:01; TUBA3C; ENSG00000198033; TAA
LNVDLTEF

SEQ ID NO: 94887 - protein, 8 aa, Homo sapiens
  misc_feature: Table A; Target 94887; HLA-C*07:01; TUBA3C; ENSG00000198033; TAA
LNVDLTEF

SEQ ID NO: 94888 - protein, 11 aa, Homo sapiens
  misc_feature: Table A; Target 94888; HLA-C*07:01; TUBA3C; ENSG00000198033; TAA
LNVDLTEFQTN

SEQ ID NO: 94889 - protein, 10 aa, Homo sapiens
  misc_feature: Table A; Target 94889; HLA-A*24:02; TUBA3C; ENSG00000198033; TAA
LQGFLIFHSF

SEQ ID NO: 94890 - protein, 9 aa, Homo sapiens
  misc_feature: Table A; Target 94890; HLA-A*02:01; TUBA3C; ENSG00000198033; TAA
LRFDGALNV

SEQ ID NO: 94891 - protein, 9 aa, Homo sapiens
  misc_feature: Table A; Target 94891; HLA-A*02:03; TUBA3C; ENSG00000198033; TAA
LRFDGALNV

SEQ ID NO: 94892 - protein, 9 aa, Homo sapiens
  misc_feature: Table A; Target 94892; HLA-A*02:04; TUBA3C; ENSG00000198033; TAA
LRFDGALNV

SEQ ID NO: 94893 - protein, 9 aa, Homo sapiens
  misc_feature: Table A; Target 94893; HLA-A*68:02; TUBA3C; ENSG00000198033; TAA
LRFDGALNV

SEQ ID NO: 94894 - protein, 9 aa, Homo sapiens
  misc_feature: Table A; Target 94894; HLA-B*13:02; TUBA3C; ENSG00000198033; TAA
LRFDGALNV

SEQ ID NO: 94895 - protein, 9 aa, Homo sapiens
  misc_feature: Table A; Target 94895; HLA-B*27:05; TUBA3C; ENSG00000198033; TAA
LRFDGALNV

SEQ ID NO: 94896 - protein, 9 aa, Homo sapiens
  misc_feature: Table A; Target 94896; HLA-B*38:01; TUBA3C; ENSG00000198033; TAA
LRFDGALNV

SEQ ID NO: 94897 - protein, 9 aa, Homo sapiens
  misc_feature: Table A; Target 94897; HLA-B*39:01; TUBA3C; ENSG00000198033; TAA
LRFDGALNV

SEQ ID NO: 94898 - protein, 9 aa, Homo sapiens
  misc_feature: Table A; Target 94898; HLA-B*49:01; TUBA3C; ENSG00000198033; TAA
LRFDGALNV

SEQ ID NO: 94899 - protein, 9 aa, Homo sapiens
  misc_feature: Table A; Target 94899; HLA-B*51:01; TUBA3C; ENSG00000198033; TAA
LRFDGALNV

SEQ ID NO: 94900 - protein, 9 aa, Homo sapiens
  misc_feature: Table A; Target 94900; HLA-C*02:02; TUBA3C; ENSG00000198033; TAA
LRFDGALNV

SEQ ID NO: 94901 - protein, 9 aa, Homo sapiens
  misc_feature: Table A; Target 94901; HLA-C*06:02; TUBA3C; ENSG00000198033; TAA
LRFDGALNV

SEQ ID NO: 94902 - protein, 9 aa, Homo sapiens
  misc_feature: Table A; Target 94902; HLA-C*07:01; TUBA3C; ENSG00000198033; TAA
LRFDGALNV

SEQ ID NO: 94903 - protein, 9 aa, Homo sapiens
  misc_feature: Table A; Target 94903; HLA-C*12:03; TUBA3C; ENSG00000198033; TAA
LRFDGALNV

SEQ ID NO: 94904 - protein, 9 aa, Homo sapiens
  misc_feature: Table A; Target 94904; HLA-C*16:04; TUBA3C; ENSG00000198033; TAA
LRFDGALNV

SEQ ID NO: 94905 - protein, 11 aa, Homo sapiens
  misc_feature: Table A; Target 94905; HLA-B*27:05; TUBA3C; ENSG00000198033; TAA
LRFDGALNVDL

SEQ ID NO: 94906 - protein, 11 aa, Homo sapiens
  misc_feature: Table A; Target 94906; HLA-A*32:01; TUBA3C; ENSG00000198033; TAA
LSNTTAIAEAW

SEQ ID NO: 94907 - protein, 11 aa, Homo sapiens
  misc_feature: Table A; Target 94907; HLA-B*07:02; TUBA3C; ENSG00000198033; TAA
LSNTTAIAEAW

SEQ ID NO: 94908 - protein, 11 aa, Homo sapiens
  misc_feature: Table A; Target 94908; HLA-B*27:02; TUBA3C; ENSG00000198033; TAA
LSNTTAIAEAW

SEQ ID NO: 94909 - protein, 11 aa, Homo sapiens
  misc_feature: Table A; Target 94909; HLA-B*57:01; TUBA3C; ENSG00000198033; TAA
LSNTTAIAEAW

SEQ ID NO: 94910 - protein, 11 aa, Homo sapiens
  misc_feature: Table A; Target 94910; HLA-B*58:01; TUBA3C; ENSG00000198033; TAA
LSNTTAIAEAW

SEQ ID NO: 94911 - protein, 11 aa, Homo sapiens
  misc_feature: Table A; Target 94911; HLA-C*04:01; TUBA3C; ENSG00000198033; TAA
LSNTTAIAEAW

SEQ ID NO: 94912 - protein, 11 aa, Homo sapiens
  misc_feature: Table A; Target 94912; HLA-C*07:01; TUBA3C; ENSG00000198033; TAA
LSNTTAIAEAW

SEQ ID NO: 94913 - protein, 11 aa, Homo sapiens
  misc_feature: Table A; Target 94913; HLA-C*16:04; TUBA3C; ENSG00000198033; TAA
LSNTTAIAEAW

SEQ ID NO: 94914 - protein, 9 aa, Homo sapiens
  misc_feature: Table A; Target 94914; HLA-B*54:01; TUBA3C; ENSG00000198033; TAA
LSVAEITNA

SEQ ID NO: 94915 - protein, 11 aa, Homo sapiens
  misc_feature: Table A; Target 94915; HLA-B*57:01; TUBA3C; ENSG00000198033; TAA
LSVAEITNACF

SEQ ID NO: 94916 - protein, 11 aa, Homo sapiens
  misc_feature: Table A; Target 94916; HLA-B*58:01; TUBA3C; ENSG00000198033; TAA
LSVAEITNACF

SEQ ID NO: 94917 - protein, 11 aa, Homo sapiens
  misc_feature: Table A; Target 94917; HLA-C*04:01; TUBA3C; ENSG00000198033; TAA
LSVAEITNACF

SEQ ID NO: 94918 - protein, 8 aa, Homo sapiens
  misc_feature: Table A; Target 94918; HLA-C*06:02; TUBA3C; ENSG00000198033; TAA
LSVDYGKK

SEQ ID NO: 94919 - protein, 9 aa, Homo sapiens
  misc_feature: Table A; Target 94919; HLA-C*06:02; TUBA3C; ENSG00000198033; TAA
LSVDYGKKS

SEQ ID NO: 94920 - protein, 10 aa, Homo sapiens
  misc_feature: Table A; Target 94920; HLA-C*06:02; TUBA3C; ENSG00000198033; TAA
LSVDYGKKSK

SEQ ID NO: 94921 - protein, 8 aa, Homo sapiens
  misc_feature: Table A; Target 94921; HLA-C*05:01; TUBA3C; ENSG00000198033; TAA
LTEFQTNL

SEQ ID NO: 94922 - protein, 9 aa, Homo sapiens
  misc_feature: Table A; Target 94922; HLA-A*01:01; TUBA3C; ENSG00000198033; TAA
LTEFQTNLV

SEQ ID NO: 94923 - protein, 9 aa, Homo sapiens
  misc_feature: Table A; Target 94923; HLA-A*68:02; TUBA3C; ENSG00000198033; TAA
LTEFQTNLV

SEQ ID NO: 94924 - protein, 11 aa, Homo sapiens
  misc_feature: Table A; Target 94924; HLA-A*01:01; TUBA3C; ENSG00000198033; TAA
LTEFQTNLVPY

SEQ ID NO: 94925 - protein, 11 aa, Homo sapiens
  misc_feature: Table A; Target 94925; HLA-C*04:01; TUBA3C; ENSG00000198033; TAA
LTEFQTNLVPY

SEQ ID NO: 94926 - protein, 11 aa, Homo sapiens
  misc_feature: Table A; Target 94926; HLA-C*07:01; TUBA3C; ENSG00000198033; TAA
LTEFQTNLVPY

SEQ ID NO: 94927 - protein, 9 aa, Homo sapiens
  misc_feature: Table A; Target 94927; HLA-A*01:01; TUBA3C; ENSG00000198033; TAA
LTTHTTLEH

SEQ ID NO: 94928 - protein, 9 aa, Homo sapiens
  misc_feature: Table A; Target 94928; HLA-A*03:01; TUBA3C; ENSG00000198033; TAA
LTTHTTLEH

SEQ ID NO: 94929 - protein, 9 aa, Homo sapiens
  misc_feature: Table A; Target 94929; HLA-A*11:01; TUBA3C; ENSG00000198033; TAA
LTTHTTLEH

SEQ ID NO: 94930 - protein, 9 aa, Homo sapiens
  misc_feature: Table A; Target 94930; HLA-A*29:02; TUBA3C; ENSG00000198033; TAA
LTTHTTLEH

SEQ ID NO: 94931 - protein, 9 aa, Homo sapiens
  misc_feature: Table A; Target 94931; HLA-B*27:05; TUBA3C; ENSG00000198033; TAA
LTTHTTLEH

SEQ ID NO: 94932 - protein, 9 aa, Homo sapiens
  misc_feature: Table A; Target 94932; HLA-C*06:02; TUBA3C; ENSG00000198033; TAA
LTTHTTLEH

SEQ ID NO: 94933 - protein, 9 aa, Homo sapiens
  misc_feature: Table A; Target 94933; HLA-C*07:01; TUBA3C; ENSG00000198033; TAA
LTTHTTLEH

SEQ ID NO: 94934 - protein, 9 aa, Homo sapiens
  misc_feature: Table A; Target 94934; HLA-C*16:01; TUBA3C; ENSG00000198033; TAA
LTTHTTLEH

SEQ ID NO: 94935 - protein, 9 aa, Homo sapiens
  misc_feature: Table A; Target 94935; HLA-C*16:02; TUBA3C; ENSG00000198033; TAA
LTTHTTLEH

SEQ ID NO: 94936 - protein, 9 aa, Homo sapiens
  misc_feature: Table A; Target 94936; HLA-A*02:01; TUBA3C; ENSG00000198033; TAA
LVLDRIRKL

SEQ ID NO: 94937 - protein, 9 aa, Homo sapiens
  misc_feature: Table A; Target 94937; HLA-A*02:03; TUBA3C; ENSG00000198033; TAA
LVLDRIRKL

SEQ ID NO: 94938 - protein, 9 aa, Homo sapiens
  misc_feature: Table A; Target 94938; HLA-A*02:04; TUBA3C; ENSG00000198033; TAA
LVLDRIRKL

SEQ ID NO: 94939 - protein, 9 aa, Homo sapiens
  misc_feature: Table A; Target 94939; HLA-A*02:07; TUBA3C; ENSG00000198033; TAA
LVLDRIRKL

SEQ ID NO: 94940 - protein, 9 aa, Homo sapiens
  misc_feature: Table A; Target 94940; HLA-A*03:01; TUBA3C; ENSG00000198033; TAA
LVLDRIRKL

SEQ ID NO: 94941 - protein, 9 aa, Homo sapiens
  misc_feature: Table A; Target 94941; HLA-A*31:01; TUBA3C; ENSG00000198033; TAA
LVLDRIRKL

SEQ ID NO: 94942 - protein, 9 aa, Homo sapiens
  misc_feature: Table A; Target 94942; HLA-B*57:01; TUBA3C; ENSG00000198033; TAA
LVLDRIRKL

SEQ ID NO: 94943 - protein, 9 aa, Homo sapiens
  misc_feature: Table A; Target 94943; HLA-A*02:07; TUBA3C; ENSG00000198033; TAA
LVPYPRIHF

SEQ ID NO: 94944 - protein, 9 aa, Homo sapiens
  misc_feature: Table A; Target 94944; HLA-A*24:02; TUBA3C; ENSG00000198033; TAA
LVPYPRIHF

SEQ ID NO: 94945 - protein, 9 aa, Homo sapiens
  misc_feature: Table A; Target 94945; HLA-A*31:01; TUBA3C; ENSG00000198033; TAA
LVPYPRIHF

SEQ ID NO: 94946 - protein, 9 aa, Homo sapiens
  misc_feature: Table A; Target 94946; HLA-A*03:01; TUBA3C; ENSG00000198033; TAA
LYRGDVVPK

SEQ ID NO: 94947 - protein, 9 aa, Homo sapiens
  misc_feature: Table A; Target 94947; HLA-A*31:01; TUBA3C; ENSG00000198033; TAA
LYRGDVVPK

SEQ ID NO: 94948 - protein, 9 aa, Homo sapiens
  misc_feature: Table A; Target 94948; HLA-A*33:01; TUBA3C; ENSG00000198033; TAA
LYRGDVVPK

SEQ ID NO: 94949 - protein, 9 aa, Homo sapiens
  misc_feature: Table A; Target 94949; HLA-A*33:03; TUBA3C; ENSG00000198033; TAA
LYRGDVVPK

SEQ ID NO: 94950 - protein, 9 aa, Homo sapiens
  misc_feature: Table A; Target 94950; HLA-B*27:02; TUBA3C; ENSG00000198033; TAA
LYRGDVVPK

SEQ ID NO: 94951 - protein, 9 aa, Homo sapiens
  misc_feature: Table A; Target 94951; HLA-B*40:02; TUBA3C; ENSG00000198033; TAA
LYRGDVVPK

SEQ ID NO: 94952 - protein, 9 aa, Homo sapiens
  misc_feature: Table A; Target 94952; HLA-C*04:01; TUBA3C; ENSG00000198033; TAA
LYRGDVVPK

SEQ ID NO: 94953 - protein, 9 aa, Homo sapiens
  misc_feature: Table A; Target 94953; HLA-C*06:02; TUBA3C; ENSG00000198033; TAA
LYRGDVVPK

SEQ ID NO: 94954 - protein, 9 aa, Homo sapiens
  misc_feature: Table A; Target 94954; HLA-C*07:01; TUBA3C; ENSG00000198033; TAA
LYRGDVVPK

SEQ ID NO: 94955 - protein, 9 aa, Homo sapiens
  misc_feature: Table A; Target 94955; HLA-C*07:02; TUBA3C; ENSG00000198033; TAA
LYRGDVVPK

SEQ ID NO: 94956 - protein, 9 aa, Homo sapiens
  misc_feature: Table A; Target 94956; HLA-A*30:01; TUBA3C; ENSG00000198033; TAA
MEEGEFSEA

SEQ ID NO: 94957 - protein, 9 aa, Homo sapiens
  misc_feature: Table A; Target 94957; HLA-B*18:01; TUBA3C; ENSG00000198033; TAA
MEEGEFSEA

SEQ ID NO: 94958 - protein, 9 aa, Homo sapiens
  misc_feature: Table A; Target 94958; HLA-B*27:05; TUBA3C; ENSG00000198033; TAA
MEEGEFSEA

SEQ ID NO: 94959 - protein, 9 aa, Homo sapiens
  misc_feature: Table A; Target 94959; HLA-B*39:01; TUBA3C; ENSG00000198033; TAA
MEEGEFSEA

SEQ ID NO: 94960 - protein, 9 aa, Homo sapiens
  misc_feature: Table A; Target 94960; HLA-B*40:01; TUBA3C; ENSG00000198033; TAA
MEEGEFSEA

SEQ ID NO: 94961 - protein, 9 aa, Homo sapiens
  misc_feature: Table A; Target 94961; HLA-B*40:02; TUBA3C; ENSG00000198033; TAA
MEEGEFSEA

SEQ ID NO: 94962 - protein, 9 aa, Homo sapiens
  misc_feature: Table A; Target 94962; HLA-B*49:01; TUBA3C; ENSG00000198033; TAA
MEEGEFSEA

SEQ ID NO: 94963 - protein, 8 aa, Homo sapiens
  misc_feature: Table A; Target 94963; HLA-B*15:01; TUBA3C; ENSG00000198033; TAA
MERLSVDY

SEQ ID NO: 94964 - protein, 8 aa, Homo sapiens
  misc_feature: Table A; Target 94964; HLA-B*15:03; TUBA3C; ENSG00000198033; TAA
MERLSVDY

SEQ ID NO: 94965 - protein, 8 aa, Homo sapiens
  misc_feature: Table A; Target 94965; HLA-B*18:01; TUBA3C; ENSG00000198033; TAA
MERLSVDY

SEQ ID NO: 94966 - protein, 8 aa, Homo sapiens
  misc_feature: Table A; Target 94966; HLA-B*35:01; TUBA3C; ENSG00000198033; TAA
MERLSVDY

SEQ ID NO: 94967 - protein, 8 aa, Homo sapiens
  misc_feature: Table A; Target 94967; HLA-B*37:01; TUBA3C; ENSG00000198033; TAA
MERLSVDY

SEQ ID NO: 94968 - protein, 8 aa, Homo sapiens
  misc_feature: Table A; Target 94968; HLA-B*40:02; TUBA3C; ENSG00000198033; TAA
MERLSVDY

SEQ ID NO: 94969 - protein, 8 aa, Homo sapiens
  misc_feature: Table A; Target 94969; HLA-B*44:02; TUBA3C; ENSG00000198033; TAA
MERLSVDY

SEQ ID NO: 94970 - protein, 8 aa, Homo sapiens
  misc_feature: Table A; Target 94970; HLA-B*44:03; TUBA3C; ENSG00000198033; TAA
MERLSVDY

SEQ ID NO: 94971 - protein, 8 aa, Homo sapiens
  misc_feature: Table A; Target 94971; HLA-C*01:02; TUBA3C; ENSG00000198033; TAA
MERLSVDY

SEQ ID NO: 94972 - protein, 8 aa, Homo sapiens
  misc_feature: Table A; Target 94972; HLA-C*04:01; TUBA3C; ENSG00000198033; TAA
MERLSVDY

SEQ ID NO: 94973 - protein, 8 aa, Homo sapiens
  misc_feature: Table A; Target 94973; HLA-C*06:02; TUBA3C; ENSG00000198033; TAA
MERLSVDY

SEQ ID NO: 94974 - protein, 8 aa, Homo sapiens
  misc_feature: Table A; Target 94974; HLA-C*07:01; TUBA3C; ENSG00000198033; TAA
MERLSVDY

SEQ ID NO: 94975 - protein, 8 aa, Homo sapiens
  misc_feature: Table A; Target 94975; HLA-C*07:04; TUBA3C; ENSG00000198033; TAA
MERLSVDY

SEQ ID NO: 94976 - protein, 8 aa, Homo sapiens
  misc_feature: Table A; Target 94976; HLA-C*12:03; TUBA3C; ENSG00000198033; TAA
MERLSVDY

SEQ ID NO: 94977 - protein, 8 aa, Homo sapiens
  misc_feature: Table A; Target 94977; HLA-C*16:02; TUBA3C; ENSG00000198033; TAA
MERLSVDY

SEQ ID NO: 94978 - protein, 8 aa, Homo sapiens
  misc_feature: Table A; Target 94978; HLA-C*16:04; TUBA3C; ENSG00000198033; TAA
MERLSVDY

SEQ ID NO: 94979 - protein, 9 aa, Homo sapiens
  misc_feature: Table A; Target 94979; HLA-B*40:02; TUBA3C; ENSG00000198033; TAA
MERLSVDYG

SEQ ID NO: 94980 - protein, 8 aa, Homo sapiens
  misc_feature: Table A; Target 94980; HLA-A*02:03; TUBA3C; ENSG00000198033; TAA
MLSNTTAI

SEQ ID NO: 94981 - protein, 8 aa, Homo sapiens
  misc_feature: Table A; Target 94981; HLA-B*13:02; TUBA3C; ENSG00000198033; TAA
MLSNTTAI

SEQ ID NO: 94982 - protein, 8 aa, Homo sapiens
  misc_feature: Table A; Target 94982; HLA-B*37:01; TUBA3C; ENSG00000198033; TAA
MLSNTTAI

SEQ ID NO: 94983 - protein, 8 aa, Homo sapiens
  misc_feature: Table A; Target 94983; HLA-B*39:01; TUBA3C; ENSG00000198033; TAA
MLSNTTAI

SEQ ID NO: 94984 - protein, 8 aa, Homo sapiens
  misc_feature: Table A; Target 94984; HLA-C*07:04; TUBA3C; ENSG00000198033; TAA
MLSNTTAI

SEQ ID NO: 94985 - protein, 8 aa, Homo sapiens
  misc_feature: Table A; Target 94985; HLA-C*14:02; TUBA3C; ENSG00000198033; TAA
MLSNTTAI

SEQ ID NO: 94986 - protein, 9 aa, Homo sapiens
  misc_feature: Table A; Target 94986; HLA-A*02:01; TUBA3C; ENSG00000198033; TAA
MLSNTTAIA

SEQ ID NO: 94987 - protein, 9 aa, Homo sapiens
  misc_feature: Table A; Target 94987; HLA-A*02:03; TUBA3C; ENSG00000198033; TAA
MLSNTTAIA

SEQ ID NO: 94988 - protein, 9 aa, Homo sapiens
  misc_feature: Table A; Target 94988; HLA-B*54:01; TUBA3C; ENSG00000198033; TAA
MLSNTTAIA

SEQ ID NO: 94989 - protein, 9 aa, Homo sapiens
  misc_feature: Table A; Target 94989; HLA-C*07:04; TUBA3C; ENSG00000198033; TAA
MLSNTTAIA

SEQ ID NO: 94990 - protein, 9 aa, Homo sapiens
  misc_feature: Table A; Target 94990; HLA-C*14:02; TUBA3C; ENSG00000198033; TAA
MLSNTTAIA

SEQ ID NO: 94991 - protein, 10 aa, Homo sapiens
  misc_feature: Table A; Target 94991; HLA-B*07:02; TUBA3C; ENSG00000198033; TAA
MLSNTTAIAE

SEQ ID NO: 94992 - protein, 10 aa, Homo sapiens
  misc_feature: Table A; Target 94992; HLA-C*04:01; TUBA3C; ENSG00000198033; TAA
MLSNTTAIAE

SEQ ID NO: 94993 - protein, 10 aa, Homo sapiens
  misc_feature: Table A; Target 94993; HLA-C*07:01; TUBA3C; ENSG00000198033; TAA
MLSNTTAIAE

SEQ ID NO: 94994 - protein, 10 aa, Homo sapiens
  misc_feature: Table A; Target 94994; HLA-C*07:04; TUBA3C; ENSG00000198033; TAA
MLSNTTAIAE

SEQ ID NO: 94995 - protein, 11 aa, Homo sapiens
  misc_feature: Table A; Target 94995; HLA-A*02:01; TUBA3C; ENSG00000198033; TAA
MLSNTTAIAEA

SEQ ID NO: 94996 - protein, 11 aa, Homo sapiens
  misc_feature: Table A; Target 94996; HLA-A*02:03; TUBA3C; ENSG00000198033; TAA
MLSNTTAIAEA

SEQ ID NO: 94997 - protein, 11 aa, Homo sapiens
  misc_feature: Table A; Target 94997; HLA-B*54:01; TUBA3C; ENSG00000198033; TAA
MLSNTTAIAEA

SEQ ID NO: 94998 - protein, 11 aa, Homo sapiens
  misc_feature: Table A; Target 94998; HLA-C*07:04; TUBA3C; ENSG00000198033; TAA
MLSNTTAIAEA

SEQ ID NO: 94999 - protein, 8 aa, Homo sapiens
  misc_feature: Table A; Target 94999; HLA-B*08:01; TUBA3C; ENSG00000198033; TAA
MLYRGDVV

SEQ ID NO: 95000 - protein, 8 aa, Homo sapiens
  misc_feature: Table A; Target 95000; HLA-B*13:02; TUBA3C; ENSG00000198033; TAA
MLYRGDVV

SEQ ID NO: 95001 - protein, 8 aa, Homo sapiens
  misc_feature: Table A; Target 95001; HLA-B*40:02; TUBA3C; ENSG00000198033; TAA
MLYRGDVV

SEQ ID NO: 95002 - protein, 8 aa, Homo sapiens
  misc_feature: Table A; Target 95002; HLA-B*51:01; TUBA3C; ENSG00000198033; TAA
MLYRGDVV

SEQ ID NO: 95003 - protein, 8 aa, Homo sapiens
  misc_feature: Table A; Target 95003; HLA-B*54:01; TUBA3C; ENSG00000198033; TAA
MLYRGDVV

SEQ ID NO: 95004 - protein, 9 aa, Homo sapiens
  misc_feature: Table A; Target 95004; HLA-A*02:01; TUBA3C; ENSG00000198033; TAA
MLYRGDVVP

SEQ ID NO: 95005 - protein, 10 aa, Homo sapiens
  misc_feature: Table A; Target 95005; HLA-A*01:01; TUBA3C; ENSG00000198033; TAA
MLYRGDVVPK

SEQ ID NO: 95006 - protein, 10 aa, Homo sapiens
  misc_feature: Table A; Target 95006; HLA-A*02:01; TUBA3C; ENSG00000198033; TAA
MLYRGDVVPK

SEQ ID NO: 95007 - protein, 10 aa, Homo sapiens
  misc_feature: Table A; Target 95007; HLA-A*02:03; TUBA3C; ENSG00000198033; TAA
MLYRGDVVPK

SEQ ID NO: 95008 - protein, 10 aa, Homo sapiens
  misc_feature: Table A; Target 95008; HLA-A*03:01; TUBA3C; ENSG00000198033; TAA
MLYRGDVVPK

SEQ ID NO: 95009 - protein, 10 aa, Homo sapiens
  misc_feature: Table A; Target 95009; HLA-A*03:02; TUBA3C; ENSG00000198033; TAA
MLYRGDVVPK

SEQ ID NO: 95010 - protein, 10 aa, Homo sapiens
  misc_feature: Table A; Target 95010; HLA-A*11:01; TUBA3C; ENSG00000198033; TAA
MLYRGDVVPK

SEQ ID NO: 95011 - protein, 10 aa, Homo sapiens
  misc_feature: Table A; Target 95011; HLA-A*31:01; TUBA3C; ENSG00000198033; TAA
MLYRGDVVPK

SEQ ID NO: 95012 - protein, 10 aa, Homo sapiens
  misc_feature: Table A; Target 95012; HLA-A*33:01; TUBA3C; ENSG00000198033; TAA
MLYRGDVVPK

SEQ ID NO: 95013 - protein, 10 aa, Homo sapiens
  misc_feature: Table A; Target 95013; HLA-A*68:01; TUBA3C; ENSG00000198033; TAA
MLYRGDVVPK

SEQ ID NO: 95014 - protein, 10 aa, Homo sapiens
  misc_feature: Table A; Target 95014; HLA-A*68:02; TUBA3C; ENSG00000198033; TAA
MLYRGDVVPK

SEQ ID NO: 95015 - protein, 10 aa, Homo sapiens
  misc_feature: Table A; Target 95015; HLA-B*27:02; TUBA3C; ENSG00000198033; TAA
MLYRGDVVPK

SEQ ID NO: 95016 - protein, 10 aa, Homo sapiens
  misc_feature: Table A; Target 95016; HLA-B*27:05; TUBA3C; ENSG00000198033; TAA
MLYRGDVVPK

SEQ ID NO: 95017 - protein, 10 aa, Homo sapiens
  misc_feature: Table A; Target 95017; HLA-B*40:02; TUBA3C; ENSG00000198033; TAA
MLYRGDVVPK

SEQ ID NO: 95018 - protein, 10 aa, Homo sapiens
  misc_feature: Table A; Target 95018; HLA-B*54:01; TUBA3C; ENSG00000198033; TAA
MLYRGDVVPK

SEQ ID NO: 95019 - protein, 10 aa, Homo sapiens
  misc_feature: Table A; Target 95019; HLA-B*57:01; TUBA3C; ENSG00000198033; TAA
MLYRGDVVPK

SEQ ID NO: 95020 - protein, 10 aa, Homo sapiens
  misc_feature: Table A; Target 95020; HLA-C*04:01; TUBA3C; ENSG00000198033; TAA
MLYRGDVVPK

SEQ ID NO: 95021 - protein, 10 aa, Homo sapiens
  misc_feature: Table A; Target 95021; HLA-C*06:02; TUBA3C; ENSG00000198033; TAA
MLYRGDVVPK

SEQ ID NO: 95022 - protein, 10 aa, Homo sapiens
  misc_feature: Table A; Target 95022; HLA-C*07:01; TUBA3C; ENSG00000198033; TAA
MLYRGDVVPK

SEQ ID NO: 95023 - protein, 10 aa, Homo sapiens
  misc_feature: Table A; Target 95023; HLA-C*07:02; TUBA3C; ENSG00000198033; TAA
MLYRGDVVPK

SEQ ID NO: 95024 - protein, 10 aa, Homo sapiens
  misc_feature: Table A; Target 95024; HLA-C*07:04; TUBA3C; ENSG00000198033; TAA
MLYRGDVVPK

SEQ ID NO: 95025 - protein, 10 aa, Homo sapiens
  misc_feature: Table A; Target 95025; HLA-C*12:03; TUBA3C; ENSG00000198033; TAA
MLYRGDVVPK

SEQ ID NO: 95026 - protein, 9 aa, Homo sapiens
  misc_feature: Table A; Target 95026; HLA-B*07:02; TUBA3C; ENSG00000198033; TAA
MPSDKTIGG

SEQ ID NO: 95027 - protein, 9 aa, Homo sapiens
  misc_feature: Table A; Target 95027; HLA-B*35:01; TUBA3C; ENSG00000198033; TAA
MPSDKTIGG

SEQ ID NO: 95028 - protein, 9 aa, Homo sapiens
  misc_feature: Table A; Target 95028; HLA-B*35:03; TUBA3C; ENSG00000198033; TAA
MPSDKTIGG

SEQ ID NO: 95029 - protein, 9 aa, Homo sapiens
  misc_feature: Table A; Target 95029; HLA-B*54:01; TUBA3C; ENSG00000198033; TAA
MPSDKTIGG

SEQ ID NO: 95030 - protein, 9 aa, Homo sapiens
  misc_feature: Table A; Target 95030; HLA-B*55:01; TUBA3C; ENSG00000198033; TAA
MPSDKTIGG

SEQ ID NO: 95031 - protein, 9 aa, Homo sapiens
  misc_feature: Table A; Target 95031; HLA-B*56:01; TUBA3C; ENSG00000198033; TAA
MPSDKTIGG

SEQ ID NO: 95032 - protein, 9 aa, Homo sapiens
  misc_feature: Table A; Target 95032; HLA-C*04:01; TUBA3C; ENSG00000198033; TAA
MPSDKTIGG

SEQ ID NO: 95033 - protein, 10 aa, Homo sapiens
  misc_feature: Table A; Target 95033; HLA-C*04:01; TUBA3C; ENSG00000198033; TAA
MPSDKTIGGG

SEQ ID NO: 95034 - protein, 8 aa, Homo sapiens
  misc_feature: Table A; Target 95034; HLA-A*01:01; TUBA3C; ENSG00000198033; TAA
MVDNEAIY

SEQ ID NO: 95035 - protein, 8 aa, Homo sapiens
  misc_feature: Table A; Target 95035; HLA-B*35:01; TUBA3C; ENSG00000198033; TAA
MVDNEAIY

SEQ ID NO: 95036 - protein, 8 aa, Homo sapiens
  misc_feature: Table A; Target 95036; HLA-B*55:01; TUBA3C; ENSG00000198033; TAA
MVDNEAIY

SEQ ID NO: 95037 - protein, 8 aa, Homo sapiens
  misc_feature: Table A; Target 95037; HLA-C*03:03; TUBA3C; ENSG00000198033; TAA
MVDNEAIY

SEQ ID NO: 95038 - protein, 8 aa, Homo sapiens
  misc_feature: Table A; Target 95038; HLA-C*04:01; TUBA3C; ENSG00000198033; TAA
MVDNEAIY

SEQ ID NO: 95039 - protein, 8 aa, Homo sapiens
  misc_feature: Table A; Target 95039; HLA-C*05:01; TUBA3C; ENSG00000198033; TAA
MVDNEAIY

SEQ ID NO: 95040 - protein, 8 aa, Homo sapiens
  misc_feature: Table A; Target 95040; HLA-C*07:01; TUBA3C; ENSG00000198033; TAA
MVDNEAIY

SEQ ID NO: 95041 - protein, 10 aa, Homo sapiens
  misc_feature: Table A; Target 95041; HLA-A*01:01; TUBA3C; ENSG00000198033; TAA
MVDNEAIYDI

SEQ ID NO: 95042 - protein, 10 aa, Homo sapiens
  misc_feature: Table A; Target 95042; HLA-A*02:01; TUBA3C; ENSG00000198033; TAA
MVDNEAIYDI

SEQ ID NO: 95043 - protein, 10 aa, Homo sapiens
  misc_feature: Table A; Target 95043; HLA-A*02:07; TUBA3C; ENSG00000198033; TAA
MVDNEAIYDI

SEQ ID NO: 95044 - protein, 10 aa, Homo sapiens
  misc_feature: Table A; Target 95044; HLA-A*68:02; TUBA3C; ENSG00000198033; TAA
MVDNEAIYDI

SEQ ID NO: 95045 - protein, 10 aa, Homo sapiens
  misc_feature: Table A; Target 95045; HLA-B*07:02; TUBA3C; ENSG00000198033; TAA
MVDNEAIYDI

SEQ ID NO: 95046 - protein, 10 aa, Homo sapiens
  misc_feature: Table A; Target 95046; HLA-B*27:02; TUBA3C; ENSG00000198033; TAA
MVDNEAIYDI

SEQ ID NO: 95047 - protein, 10 aa, Homo sapiens
  misc_feature: Table A; Target 95047; HLA-B*27:05; TUBA3C; ENSG00000198033; TAA
MVDNEAIYDI

SEQ ID NO: 95048 - protein, 10 aa, Homo sapiens
  misc_feature: Table A; Target 95048; HLA-B*35:03; TUBA3C; ENSG00000198033; TAA
MVDNEAIYDI

SEQ ID NO: 95049 - protein, 10 aa, Homo sapiens
  misc_feature: Table A; Target 95049; HLA-B*38:01; TUBA3C; ENSG00000198033; TAA
MVDNEAIYDI

SEQ ID NO: 95050 - protein, 10 aa, Homo sapiens
  misc_feature: Table A; Target 95050; HLA-B*55:01; TUBA3C; ENSG00000198033; TAA
MVDNEAIYDI

SEQ ID NO: 95051 - protein, 10 aa, Homo sapiens
  misc_feature: Table A; Target 95051; HLA-C*04:01; TUBA3C; ENSG00000198033; TAA
MVDNEAIYDI

SEQ ID NO: 95052 - protein, 10 aa, Homo sapiens
  misc_feature: Table A; Target 95052; HLA-C*05:01; TUBA3C; ENSG00000198033; TAA
MVDNEAIYDI

SEQ ID NO: 95053 - protein, 10 aa, Homo sapiens
  misc_feature: Table A; Target 95053; HLA-C*07:01; TUBA3C; ENSG00000198033; TAA
MVDNEAIYDI

SEQ ID NO: 95054 - protein, 10 aa, Homo sapiens
  misc_feature: Table A; Target 95054; HLA-C*07:02; TUBA3C; ENSG00000198033; TAA
MVDNEAIYDI

SEQ ID NO: 95055 - protein, 10 aa, Homo sapiens
  misc_feature: Table A; Target 95055; HLA-A*24:02; TUBA3C; ENSG00000198033; TAA
MYAKRAFVHW

SEQ ID NO: 95056 - protein, 8 aa, Homo sapiens
  misc_feature: Table A; Target 95056; HLA-B*27:02; TUBA3C; ENSG00000198033; TAA
NAAIATIK

SEQ ID NO: 95057 - protein, 8 aa, Homo sapiens
  misc_feature: Table A; Target 95057; HLA-B*27:05; TUBA3C; ENSG00000198033; TAA
NAAIATIK

SEQ ID NO: 95058 - protein, 8 aa, Homo sapiens
  misc_feature: Table A; Target 95058; HLA-B*51:01; TUBA3C; ENSG00000198033; TAA
NAAIATIK

SEQ ID NO: 95059 - protein, 8 aa, Homo sapiens
  misc_feature: Table A; Target 95059; HLA-C*07:01; TUBA3C; ENSG00000198033; TAA
NAAIATIK

SEQ ID NO: 95060 - protein, 8 aa, Homo sapiens
  misc_feature: Table A; Target 95060; HLA-C*07:06; TUBA3C; ENSG00000198033; TAA
NAAIATIK

SEQ ID NO: 95061 - protein, 8 aa, Homo sapiens
  misc_feature: Table A; Target 95061; HLA-C*12:03; TUBA3C; ENSG00000198033; TAA
NAAIATIK

SEQ ID NO: 95062 - protein, 9 aa, Homo sapiens
  misc_feature: Table A; Target 95062; HLA-B*51:01; TUBA3C; ENSG00000198033; TAA
NAAIATIKT

SEQ ID NO: 95063 - protein, 9 aa, Homo sapiens
  misc_feature: Table A; Target 95063; HLA-B*54:01; TUBA3C; ENSG00000198033; TAA
NAAIATIKT

SEQ ID NO: 95064 - protein, 9 aa, Homo sapiens
  misc_feature: Table A; Target 95064; HLA-C*06:02; TUBA3C; ENSG00000198033; TAA
NAAIATIKT

SEQ ID NO: 95065 - protein, 9 aa, Homo sapiens
  misc_feature: Table A; Target 95065; HLA-C*07:01; TUBA3C; ENSG00000198033; TAA
NAAIATIKT

SEQ ID NO: 95066 - protein, 9 aa, Homo sapiens
  misc_feature: Table A; Target 95066; HLA-C*07:02; TUBA3C; ENSG00000198033; TAA
NAAIATIKT

SEQ ID NO: 95067 - protein, 9 aa, Homo sapiens
  misc_feature: Table A; Target 95067; HLA-C*07:04; TUBA3C; ENSG00000198033; TAA
NAAIATIKT

SEQ ID NO: 95068 - protein, 9 aa, Homo sapiens
  misc_feature: Table A; Target 95068; HLA-C*12:03; TUBA3C; ENSG00000198033; TAA
NAAIATIKT

SEQ ID NO: 95069 - protein, 9 aa, Homo sapiens
  misc_feature: Table A; Target 95069; HLA-C*16:01; TUBA3C; ENSG00000198033; TAA
NAAIATIKT

SEQ ID NO: 95070 - protein, 9 aa, Homo sapiens
  misc_feature: Table A; Target 95070; HLA-C*16:02; TUBA3C; ENSG00000198033; TAA
NAAIATIKT

SEQ ID NO: 95071 - protein, 10 aa, Homo sapiens
  misc_feature: Table A; Target 95071; HLA-A*11:01; TUBA3C; ENSG00000198033; TAA
NAAIATIKTK

SEQ ID NO: 95072 - protein, 10 aa, Homo sapiens
  misc_feature: Table A; Target 95072; HLA-A*33:01; TUBA3C; ENSG00000198033; TAA
NAAIATIKTK

SEQ ID NO: 95073 - protein, 10 aa, Homo sapiens
  misc_feature: Table A; Target 95073; HLA-A*33:03; TUBA3C; ENSG00000198033; TAA
NAAIATIKTK

SEQ ID NO: 95074 - protein, 10 aa, Homo sapiens
  misc_feature: Table A; Target 95074; HLA-A*68:01; TUBA3C; ENSG00000198033; TAA
NAAIATIKTK

SEQ ID NO: 95075 - protein, 10 aa, Homo sapiens
  misc_feature: Table A; Target 95075; HLA-B*07:02; TUBA3C; ENSG00000198033; TAA
NAAIATIKTK

SEQ ID NO: 95076 - protein, 10 aa, Homo sapiens
  misc_feature: Table A; Target 95076; HLA-B*27:02; TUBA3C; ENSG00000198033; TAA
NAAIATIKTK

SEQ ID NO: 95077 - protein, 10 aa, Homo sapiens
  misc_feature: Table A; Target 95077; HLA-C*04:01; TUBA3C; ENSG00000198033; TAA
NAAIATIKTK

SEQ ID NO: 95078 - protein, 10 aa, Homo sapiens
  misc_feature: Table A; Target 95078; HLA-C*06:02; TUBA3C; ENSG00000198033; TAA
NAAIATIKTK

SEQ ID NO: 95079 - protein, 10 aa, Homo sapiens
  misc_feature: Table A; Target 95079; HLA-C*07:01; TUBA3C; ENSG00000198033; TAA
NAAIATIKTK

SEQ ID NO: 95080 - protein, 10 aa, Homo sapiens
  misc_feature: Table A; Target 95080; HLA-C*07:06; TUBA3C; ENSG00000198033; TAA
NAAIATIKTK

SEQ ID NO: 95081 - protein, 11 aa, Homo sapiens
  misc_feature: Table A; Target 95081; HLA-A*33:01; TUBA3C; ENSG00000198033; TAA
NAAIATIKTKR

SEQ ID NO: 95082 - protein, 11 aa, Homo sapiens
  misc_feature: Table A; Target 95082; HLA-A*33:03; TUBA3C; ENSG00000198033; TAA
NAAIATIKTKR

SEQ ID NO: 95083 - protein, 11 aa, Homo sapiens
  misc_feature: Table A; Target 95083; HLA-A*68:01; TUBA3C; ENSG00000198033; TAA
NAAIATIKTKR

SEQ ID NO: 95084 - protein, 11 aa, Homo sapiens
  misc_feature: Table A; Target 95084; HLA-A*68:02; TUBA3C; ENSG00000198033; TAA
NAAIATIKTKR

SEQ ID NO: 95085 - protein, 11 aa, Homo sapiens
  misc_feature: Table A; Target 95085; HLA-C*07:06; TUBA3C; ENSG00000198033; TAA
NAAIATIKTKR

SEQ ID NO: 95086 - protein, 10 aa, Homo sapiens
  misc_feature: Table A; Target 95086; HLA-B*35:01; TUBA3C; ENSG00000198033; TAA
NACFEPANQM

SEQ ID NO: 95087 - protein, 10 aa, Homo sapiens
  misc_feature: Table A; Target 95087; HLA-B*35:03; TUBA3C; ENSG00000198033; TAA
NACFEPANQM

SEQ ID NO: 95088 - protein, 10 aa, Homo sapiens
  misc_feature: Table A; Target 95088; HLA-C*06:02; TUBA3C; ENSG00000198033; TAA
NACFEPANQM

SEQ ID NO: 95089 - protein, 10 aa, Homo sapiens
  misc_feature: Table A; Target 95089; HLA-C*07:01; TUBA3C; ENSG00000198033; TAA
NACFEPANQM

SEQ ID NO: 95090 - protein, 10 aa, Homo sapiens
  misc_feature: Table A; Target 95090; HLA-C*12:03; TUBA3C; ENSG00000198033; TAA
NACFEPANQM

SEQ ID NO: 95091 - protein, 9 aa, Homo sapiens
  misc_feature: Table A; Target 95091; HLA-A*68:01; TUBA3C; ENSG00000198033; TAA
NEAIYDICR

SEQ ID NO: 95092 - protein, 9 aa, Homo sapiens
  misc_feature: Table A; Target 95092; HLA-A*01:01; TUBA3C; ENSG00000198033; TAA
NLDIERPTY

SEQ ID NO: 95093 - protein, 9 aa, Homo sapiens
  misc_feature: Table A; Target 95093; HLA-A*02:07; TUBA3C; ENSG00000198033; TAA
NLDIERPTY

SEQ ID NO: 95094 - protein, 9 aa, Homo sapiens
  misc_feature: Table A; Target 95094; HLA-A*03:02; TUBA3C; ENSG00000198033; TAA
NLDIERPTY

SEQ ID NO: 95095 - protein, 9 aa, Homo sapiens
  misc_feature: Table A; Target 95095; HLA-A*25:01; TUBA3C; ENSG00000198033; TAA
NLDIERPTY

SEQ ID NO: 95096 - protein, 9 aa, Homo sapiens
  misc_feature: Table A; Target 95096; HLA-A*26:01; TUBA3C; ENSG00000198033; TAA
NLDIERPTY

SEQ ID NO: 95097 - protein, 9 aa, Homo sapiens
  misc_feature: Table A; Target 95097; HLA-A*29:02; TUBA3C; ENSG00000198033; TAA
NLDIERPTY

SEQ ID NO: 95098 - protein, 9 aa, Homo sapiens
  misc_feature: Table A; Target 95098; HLA-A*30:02; TUBA3C; ENSG00000198033; TAA
NLDIERPTY

SEQ ID NO: 95099 - protein, 9 aa, Homo sapiens
  misc_feature: Table A; Target 95099; HLA-A*32:01; TUBA3C; ENSG00000198033; TAA
NLDIERPTY

SEQ ID NO: 95100 - protein, 9 aa, Homo sapiens
  misc_feature: Table A; Target 95100; HLA-B*15:01; TUBA3C; ENSG00000198033; TAA
NLDIERPTY

SEQ ID NO: 95101 - protein, 9 aa, Homo sapiens
  misc_feature: Table A; Target 95101; HLA-B*15:03; TUBA3C; ENSG00000198033; TAA
NLDIERPTY

SEQ ID NO: 95102 - protein, 9 aa, Homo sapiens
  misc_feature: Table A; Target 95102; HLA-B*18:01; TUBA3C; ENSG00000198033; TAA
NLDIERPTY

SEQ ID NO: 95103 - protein, 9 aa, Homo sapiens
  misc_feature: Table A; Target 95103; HLA-B*27:05; TUBA3C; ENSG00000198033; TAA
NLDIERPTY

SEQ ID NO: 95104 - protein, 9 aa, Homo sapiens
  misc_feature: Table A; Target 95104; HLA-B*35:01; TUBA3C; ENSG00000198033; TAA
NLDIERPTY

SEQ ID NO: 95105 - protein, 9 aa, Homo sapiens
  misc_feature: Table A; Target 95105; HLA-B*38:01; TUBA3C; ENSG00000198033; TAA
NLDIERPTY

SEQ ID NO: 95106 - protein, 9 aa, Homo sapiens
  misc_feature: Table A; Target 95106; HLA-B*39:01; TUBA3C; ENSG00000198033; TAA
NLDIERPTY

SEQ ID NO: 95107 - protein, 9 aa, Homo sapiens
  misc_feature: Table A; Target 95107; HLA-B*44:02; TUBA3C; ENSG00000198033; TAA
NLDIERPTY

SEQ ID NO: 95108 - protein, 9 aa, Homo sapiens
  misc_feature: Table A; Target 95108; HLA-B*44:03; TUBA3C; ENSG00000198033; TAA
NLDIERPTY

SEQ ID NO: 95109 - protein, 9 aa, Homo sapiens
  misc_feature: Table A; Target 95109; HLA-B*46:01; TUBA3C; ENSG00000198033; TAA
NLDIERPTY

SEQ ID NO: 95110 - protein, 9 aa, Homo sapiens
  misc_feature: Table A; Target 95110; HLA-B*55:01; TUBA3C; ENSG00000198033; TAA
NLDIERPTY

SEQ ID NO: 95111 - protein, 9 aa, Homo sapiens
  misc_feature: Table A; Target 95111; HLA-B*58:01; TUBA3C; ENSG00000198033; TAA
NLDIERPTY

SEQ ID NO: 95112 - protein, 9 aa, Homo sapiens
  misc_feature: Table A; Target 95112; HLA-C*02:02; TUBA3C; ENSG00000198033; TAA
NLDIERPTY

SEQ ID NO: 95113 - protein, 9 aa, Homo sapiens
  misc_feature: Table A; Target 95113; HLA-C*03:03; TUBA3C; ENSG00000198033; TAA
NLDIERPTY

SEQ ID NO: 95114 - protein, 9 aa, Homo sapiens
  misc_feature: Table A; Target 95114; HLA-C*04:01; TUBA3C; ENSG00000198033; TAA
NLDIERPTY

SEQ ID NO: 95115 - protein, 9 aa, Homo sapiens
  misc_feature: Table A; Target 95115; HLA-C*05:01; TUBA3C; ENSG00000198033; TAA
NLDIERPTY

SEQ ID NO: 95116 - protein, 9 aa, Homo sapiens
  misc_feature: Table A; Target 95116; HLA-C*07:01; TUBA3C; ENSG00000198033; TAA
NLDIERPTY

SEQ ID NO: 95117 - protein, 9 aa, Homo sapiens
  misc_feature: Table A; Target 95117; HLA-C*07:04; TUBA3C; ENSG00000198033; TAA
NLDIERPTY

SEQ ID NO: 95118 - protein, 9 aa, Homo sapiens
  misc_feature: Table A; Target 95118; HLA-C*12:03; TUBA3C; ENSG00000198033; TAA
NLDIERPTY

SEQ ID NO: 95119 - protein, 9 aa, Homo sapiens
  misc_feature: Table A; Target 95119; HLA-C*16:01; TUBA3C; ENSG00000198033; TAA
NLDIERPTY

SEQ ID NO: 95120 - protein, 9 aa, Homo sapiens
  misc_feature: Table A; Target 95120; HLA-C*16:02; TUBA3C; ENSG00000198033; TAA
NLDIERPTY

SEQ ID NO: 95121 - protein, 9 aa, Homo sapiens
  misc_feature: Table A; Target 95121; HLA-C*16:04; TUBA3C; ENSG00000198033; TAA
NLDIERPTY

SEQ ID NO: 95122 - protein, 10 aa, Homo sapiens
  misc_feature: Table A; Target 95122; HLA-A*01:01; TUBA3C; ENSG00000198033; TAA
NLDIERPTYT

SEQ ID NO: 95123 - protein, 9 aa, Homo sapiens
  misc_feature: Table A; Target 95123; HLA-A*02:03; TUBA3C; ENSG00000198033; TAA
NLNRLIGQI

SEQ ID NO: 95124 - protein, 9 aa, Homo sapiens
  misc_feature: Table A; Target 95124; HLA-A*02:04; TUBA3C; ENSG00000198033; TAA
NLNRLIGQI

SEQ ID NO: 95125 - protein, 9 aa, Homo sapiens
  misc_feature: Table A; Target 95125; HLA-A*02:07; TUBA3C; ENSG00000198033; TAA
NLNRLIGQI

SEQ ID NO: 95126 - protein, 8 aa, Homo sapiens
  misc_feature: Table A; Target 95126; HLA-C*06:02; TUBA3C; ENSG00000198033; TAA
NRLIGQIV

SEQ ID NO: 95127 - protein, 8 aa, Homo sapiens
  misc_feature: Table A; Target 95127; HLA-C*07:01; TUBA3C; ENSG00000198033; TAA
NRLIGQIV

SEQ ID NO: 95128 - protein, 9 aa, Homo sapiens
  misc_feature: Table A; Target 95128; HLA-B*27:05; TUBA3C; ENSG00000198033; TAA
NRLIGQIVS

SEQ ID NO: 95129 - protein, 9 aa, Homo sapiens
  misc_feature: Table A; Target 95129; HLA-C*07:01; TUBA3C; ENSG00000198033; TAA
NRLIGQIVS

SEQ ID NO: 95130 - protein, 10 aa, Homo sapiens
  misc_feature: Table A; Target 95130; HLA-B*27:05; TUBA3C; ENSG00000198033; TAA
NRLIGQIVSS

SEQ ID NO: 95131 - protein, 8 aa, Homo sapiens
  misc_feature: Table A; Target 95131; HLA-C*06:02; TUBA3C; ENSG00000198033; TAA
NSILTTHT

SEQ ID NO: 95132 - protein, 8 aa, Homo sapiens
  misc_feature: Table A; Target 95132; HLA-C*07:01; TUBA3C; ENSG00000198033; TAA
NSILTTHT

SEQ ID NO: 95133 - protein, 9 aa, Homo sapiens
  misc_feature: Table A; Target 95133; HLA-B*58:01; TUBA3C; ENSG00000198033; TAA
NSILTTHTT

SEQ ID NO: 95134 - protein, 9 aa, Homo sapiens
  misc_feature: Table A; Target 95134; HLA-C*06:02; TUBA3C; ENSG00000198033; TAA
NSILTTHTT

SEQ ID NO: 95135 - protein, 9 aa, Homo sapiens
  misc_feature: Table A; Target 95135; HLA-C*07:01; TUBA3C; ENSG00000198033; TAA
NSILTTHTT

SEQ ID NO: 95136 - protein, 9 aa, Homo sapiens
  misc_feature: Table A; Target 95136; HLA-C*16:01; TUBA3C; ENSG00000198033; TAA
NSILTTHTT

SEQ ID NO: 95137 - protein, 10 aa, Homo sapiens
  misc_feature: Table A; Target 95137; HLA-A*68:01; TUBA3C; ENSG00000198033; TAA
NSILTTHTTL

SEQ ID NO: 95138 - protein, 10 aa, Homo sapiens
  misc_feature: Table A; Target 95138; HLA-A*68:02; TUBA3C; ENSG00000198033; TAA
NSILTTHTTL

SEQ ID NO: 95139 - protein, 10 aa, Homo sapiens
  misc_feature: Table A; Target 95139; HLA-B*40:02; TUBA3C; ENSG00000198033; TAA
NSILTTHTTL

SEQ ID NO: 95140 - protein, 10 aa, Homo sapiens
  misc_feature: Table A; Target 95140; HLA-B*58:01; TUBA3C; ENSG00000198033; TAA
NSILTTHTTL

SEQ ID NO: 95141 - protein, 10 aa, Homo sapiens
  misc_feature: Table A; Target 95141; HLA-C*01:02; TUBA3C; ENSG00000198033; TAA
NSILTTHTTL

SEQ ID NO: 95142 - protein, 10 aa, Homo sapiens
  misc_feature: Table A; Target 95142; HLA-C*03:03; TUBA3C; ENSG00000198033; TAA
NSILTTHTTL

SEQ ID NO: 95143 - protein, 10 aa, Homo sapiens
  misc_feature: Table A; Target 95143; HLA-C*06:02; TUBA3C; ENSG00000198033; TAA
NSILTTHTTL

SEQ ID NO: 95144 - protein, 10 aa, Homo sapiens
  misc_feature: Table A; Target 95144; HLA-C*07:01; TUBA3C; ENSG00000198033; TAA
NSILTTHTTL

SEQ ID NO: 95145 - protein, 8 aa, Homo sapiens
  misc_feature: Table A; Target 95145; HLA-C*07:01; TUBA3C; ENSG00000198033; TAA
NTFFSETG

SEQ ID NO: 95146 - protein, 9 aa, Homo sapiens
  misc_feature: Table A; Target 95146; HLA-A*68:02; TUBA3C; ENSG00000198033; TAA
NTFFSETGA

SEQ ID NO: 95147 - protein, 9 aa, Homo sapiens
  misc_feature: Table A; Target 95147; HLA-B*27:05; TUBA3C; ENSG00000198033; TAA
NTFFSETGA

SEQ ID NO: 95148 - protein, 9 aa, Homo sapiens
  misc_feature: Table A; Target 95148; HLA-B*54:01; TUBA3C; ENSG00000198033; TAA
NTFFSETGA

SEQ ID NO: 95149 - protein, 9 aa, Homo sapiens
  misc_feature: Table A; Target 95149; HLA-C*06:02; TUBA3C; ENSG00000198033; TAA
NTFFSETGA

SEQ ID NO: 95150 - protein, 10 aa, Homo sapiens
  misc_feature: Table A; Target 95150; HLA-B*27:05; TUBA3C; ENSG00000198033; TAA
NTFFSETGAG

SEQ ID NO: 95151 - protein, 10 aa, Homo sapiens
  misc_feature: Table A; Target 95151; HLA-C*07:01; TUBA3C; ENSG00000198033; TAA
NTFFSETGAG

SEQ ID NO: 95152 - protein, 11 aa, Homo sapiens
  misc_feature: Table A; Target 95152; HLA-A*01:01; TUBA3C; ENSG00000198033; TAA
NTFFSETGAGK

SEQ ID NO: 95153 - protein, 11 aa, Homo sapiens
  misc_feature: Table A; Target 95153; HLA-A*03:01; TUBA3C; ENSG00000198033; TAA
NTFFSETGAGK

SEQ ID NO: 95154 - protein, 11 aa, Homo sapiens
  misc_feature: Table A; Target 95154; HLA-A*03:02; TUBA3C; ENSG00000198033; TAA
NTFFSETGAGK

SEQ ID NO: 95155 - protein, 11 aa, Homo sapiens
  misc_feature: Table A; Target 95155; HLA-A*11:01; TUBA3C; ENSG00000198033; TAA
NTFFSETGAGK

SEQ ID NO: 95156 - protein, 11 aa, Homo sapiens
  misc_feature: Table A; Target 95156; HLA-A*33:01; TUBA3C; ENSG00000198033; TAA
NTFFSETGAGK

SEQ ID NO: 95157 - protein, 11 aa, Homo sapiens
  misc_feature: Table A; Target 95157; HLA-A*33:03; TUBA3C; ENSG00000198033; TAA
NTFFSETGAGK

SEQ ID NO: 95158 - protein, 11 aa, Homo sapiens
  misc_feature: Table A; Target 95158; HLA-A*68:01; TUBA3C; ENSG00000198033; TAA
NTFFSETGAGK

SEQ ID NO: 95159 - protein, 11 aa, Homo sapiens
  misc_feature: Table A; Target 95159; HLA-A*68:02; TUBA3C; ENSG00000198033; TAA
NTFFSETGAGK

SEQ ID NO: 95160 - protein, 11 aa, Homo sapiens
  misc_feature: Table A; Target 95160; HLA-B*27:02; TUBA3C; ENSG00000198033; TAA
NTFFSETGAGK

SEQ ID NO: 95161 - protein, 11 aa, Homo sapiens
  misc_feature: Table A; Target 95161; HLA-B*27:05; TUBA3C; ENSG00000198033; TAA
NTFFSETGAGK

SEQ ID NO: 95162 - protein, 11 aa, Homo sapiens
  misc_feature: Table A; Target 95162; HLA-C*06:02; TUBA3C; ENSG00000198033; TAA
NTFFSETGAGK

SEQ ID NO: 95163 - protein, 11 aa, Homo sapiens
  misc_feature: Table A; Target 95163; HLA-C*07:06; TUBA3C; ENSG00000198033; TAA
NTFFSETGAGK

SEQ ID NO: 95164 - protein, 9 aa, Homo sapiens
  misc_feature: Table A; Target 95164; HLA-A*01:01; TUBA3C; ENSG00000198033; TAA
NTTAIAEAW

SEQ ID NO: 95165 - protein, 9 aa, Homo sapiens
  misc_feature: Table A; Target 95165; HLA-A*03:02; TUBA3C; ENSG00000198033; TAA
NTTAIAEAW

SEQ ID NO: 95166 - protein, 9 aa, Homo sapiens
  misc_feature: Table A; Target 95166; HLA-A*23:01; TUBA3C; ENSG00000198033; TAA
NTTAIAEAW

SEQ ID NO: 95167 - protein, 9 aa, Homo sapiens
  misc_feature: Table A; Target 95167; HLA-A*24:02; TUBA3C; ENSG00000198033; TAA
NTTAIAEAW

SEQ ID NO: 95168 - protein, 9 aa, Homo sapiens
  misc_feature: Table A; Target 95168; HLA-A*25:01; TUBA3C; ENSG00000198033; TAA
NTTAIAEAW

SEQ ID NO: 95169 - protein, 9 aa, Homo sapiens
  misc_feature: Table A; Target 95169; HLA-A*26:01; TUBA3C; ENSG00000198033; TAA
NTTAIAEAW

SEQ ID NO: 95170 - protein, 9 aa, Homo sapiens
  misc_feature: Table A; Target 95170; HLA-A*29:02; TUBA3C; ENSG00000198033; TAA
NTTAIAEAW

SEQ ID NO: 95171 - protein, 9 aa, Homo sapiens
  misc_feature: Table A; Target 95171; HLA-A*30:02; TUBA3C; ENSG00000198033; TAA
NTTAIAEAW

SEQ ID NO: 95172 - protein, 9 aa, Homo sapiens
  misc_feature: Table A; Target 95172; HLA-A*32:01; TUBA3C; ENSG00000198033; TAA
NTTAIAEAW

SEQ ID NO: 95173 - protein, 9 aa, Homo sapiens
  misc_feature: Table A; Target 95173; HLA-A*33:01; TUBA3C; ENSG00000198033; TAA
NTTAIAEAW

SEQ ID NO: 95174 - protein, 9 aa, Homo sapiens
  misc_feature: Table A; Target 95174; HLA-A*33:03; TUBA3C; ENSG00000198033; TAA
NTTAIAEAW

SEQ ID NO: 95175 - protein, 9 aa, Homo sapiens
  misc_feature: Table A; Target 95175; HLA-A*68:01; TUBA3C; ENSG00000198033; TAA
NTTAIAEAW

SEQ ID NO: 95176 - protein, 9 aa, Homo sapiens
  misc_feature: Table A; Target 95176; HLA-A*68:02; TUBA3C; ENSG00000198033; TAA
NTTAIAEAW

SEQ ID NO: 95177 - protein, 9 aa, Homo sapiens
  misc_feature: Table A; Target 95177; HLA-B*07:02; TUBA3C; ENSG00000198033; TAA
NTTAIAEAW

SEQ ID NO: 95178 - protein, 9 aa, Homo sapiens
  misc_feature: Table A; Target 95178; HLA-B*15:01; TUBA3C; ENSG00000198033; TAA
NTTAIAEAW

SEQ ID NO: 95179 - protein, 9 aa, Homo sapiens
  misc_feature: Table A; Target 95179; HLA-B*18:01; TUBA3C; ENSG00000198033; TAA
NTTAIAEAW

SEQ ID NO: 95180 - protein, 9 aa, Homo sapiens
  misc_feature: Table A; Target 95180; HLA-B*27:02; TUBA3C; ENSG00000198033; TAA
NTTAIAEAW

SEQ ID NO: 95181 - protein, 9 aa, Homo sapiens
  misc_feature: Table A; Target 95181; HLA-B*27:05; TUBA3C; ENSG00000198033; TAA
NTTAIAEAW

SEQ ID NO: 95182 - protein, 9 aa, Homo sapiens
  misc_feature: Table A; Target 95182; HLA-B*35:01; TUBA3C; ENSG00000198033; TAA
NTTAIAEAW

SEQ ID NO: 95183 - protein, 9 aa, Homo sapiens
  misc_feature: Table A; Target 95183; HLA-B*35:03; TUBA3C; ENSG00000198033; TAA
NTTAIAEAW

SEQ ID NO: 95184 - protein, 9 aa, Homo sapiens
  misc_feature: Table A; Target 95184; HLA-B*38:01; TUBA3C; ENSG00000198033; TAA
NTTAIAEAW

SEQ ID NO: 95185 - protein, 9 aa, Homo sapiens
  misc_feature: Table A; Target 95185; HLA-B*39:01; TUBA3C; ENSG00000198033; TAA
NTTAIAEAW

SEQ ID NO: 95186 - protein, 9 aa, Homo sapiens
  misc_feature: Table A; Target 95186; HLA-B*44:02; TUBA3C; ENSG00000198033; TAA
NTTAIAEAW

SEQ ID NO: 95187 - protein, 9 aa, Homo sapiens
  misc_feature: Table A; Target 95187; HLA-B*44:03; TUBA3C; ENSG00000198033; TAA
NTTAIAEAW

SEQ ID NO: 95188 - protein, 9 aa, Homo sapiens
  misc_feature: Table A; Target 95188; HLA-B*57:01; TUBA3C; ENSG00000198033; TAA
NTTAIAEAW

SEQ ID NO: 95189 - protein, 9 aa, Homo sapiens
  misc_feature: Table A; Target 95189; HLA-B*58:01; TUBA3C; ENSG00000198033; TAA
NTTAIAEAW

SEQ ID NO: 95190 - protein, 9 aa, Homo sapiens
  misc_feature: Table A; Target 95190; HLA-C*01:02; TUBA3C; ENSG00000198033; TAA
NTTAIAEAW

SEQ ID NO: 95191 - protein, 9 aa, Homo sapiens
  misc_feature: Table A; Target 95191; HLA-C*02:02; TUBA3C; ENSG00000198033; TAA
NTTAIAEAW

SEQ ID NO: 95192 - protein, 9 aa, Homo sapiens
  misc_feature: Table A; Target 95192; HLA-C*04:01; TUBA3C; ENSG00000198033; TAA
NTTAIAEAW

SEQ ID NO: 95193 - protein, 9 aa, Homo sapiens
  misc_feature: Table A; Target 95193; HLA-C*06:02; TUBA3C; ENSG00000198033; TAA
NTTAIAEAW

SEQ ID NO: 95194 - protein, 9 aa, Homo sapiens
  misc_feature: Table A; Target 95194; HLA-C*07:01; TUBA3C; ENSG00000198033; TAA
NTTAIAEAW

SEQ ID NO: 95195 - protein, 9 aa, Homo sapiens
  misc_feature: Table A; Target 95195; HLA-C*07:02; TUBA3C; ENSG00000198033; TAA
NTTAIAEAW

SEQ ID NO: 95196 - protein, 9 aa, Homo sapiens
  misc_feature: Table A; Target 95196; HLA-C*07:04; TUBA3C; ENSG00000198033; TAA
NTTAIAEAW

SEQ ID NO: 95197 - protein, 9 aa, Homo sapiens
  misc_feature: Table A; Target 95197; HLA-C*07:06; TUBA3C; ENSG00000198033; TAA
NTTAIAEAW

SEQ ID NO: 95198 - protein, 9 aa, Homo sapiens
  misc_feature: Table A; Target 95198; HLA-C*12:03; TUBA3C; ENSG00000198033; TAA
NTTAIAEAW

SEQ ID NO: 95199 - protein, 9 aa, Homo sapiens
  misc_feature: Table A; Target 95199; HLA-C*14:02; TUBA3C; ENSG00000198033; TAA
NTTAIAEAW

SEQ ID NO: 95200 - protein, 9 aa, Homo sapiens
  misc_feature: Table A; Target 95200; HLA-C*16:01; TUBA3C; ENSG00000198033; TAA
NTTAIAEAW

SEQ ID NO: 95201 - protein, 9 aa, Homo sapiens
  misc_feature: Table A; Target 95201; HLA-C*16:02; TUBA3C; ENSG00000198033; TAA
NTTAIAEAW

SEQ ID NO: 95202 - protein, 9 aa, Homo sapiens
  misc_feature: Table A; Target 95202; HLA-C*16:04; TUBA3C; ENSG00000198033; TAA
NTTAIAEAW

SEQ ID NO: 95203 - protein, 11 aa, Homo sapiens
  misc_feature: Table A; Target 95203; HLA-A*33:03; TUBA3C; ENSG00000198033; TAA
NTTAIAEAWAR

SEQ ID NO: 95204 - protein, 11 aa, Homo sapiens
  misc_feature: Table A; Target 95204; HLA-A*68:01; TUBA3C; ENSG00000198033; TAA
NTTAIAEAWAR

SEQ ID NO: 95205 - protein, 11 aa, Homo sapiens
  misc_feature: Table A; Target 95205; HLA-A*68:02; TUBA3C; ENSG00000198033; TAA
NTTAIAEAWAR

SEQ ID NO: 95206 - protein, 11 aa, Homo sapiens
  misc_feature: Table A; Target 95206; HLA-A*02:07; TUBA3C; ENSG00000198033; TAA
NVDLTEFQTNL

SEQ ID NO: 95207 - protein, 11 aa, Homo sapiens
  misc_feature: Table A; Target 95207; HLA-C*05:01; TUBA3C; ENSG00000198033; TAA
NVDLTEFQTNL

SEQ ID NO: 95208 - protein, 9 aa, Homo sapiens
  misc_feature: Table A; Target 95208; HLA-A*23:01; TUBA3C; ENSG00000198033; TAA
NYARGHYTI

SEQ ID NO: 95209 - protein, 9 aa, Homo sapiens
  misc_feature: Table A; Target 95209; HLA-A*24:02; TUBA3C; ENSG00000198033; TAA
NYARGHYTI

SEQ ID NO: 95210 - protein, 8 aa, Homo sapiens
  misc_feature: Table A; Target 95210; HLA-C*04:01; TUBA3C; ENSG00000198033; TAA
NYQPPTVV

SEQ ID NO: 95211 - protein, 8 aa, Homo sapiens
  misc_feature: Table A; Target 95211; HLA-C*06:02; TUBA3C; ENSG00000198033; TAA
NYQPPTVV

SEQ ID NO: 95212 - protein, 8 aa, Homo sapiens
  misc_feature: Table A; Target 95212; HLA-C*12:03; TUBA3C; ENSG00000198033; TAA
NYQPPTVV

SEQ ID NO: 95213 - protein, 8 aa, Homo sapiens
  misc_feature: Table A; Target 95213; HLA-C*14:02; TUBA3C; ENSG00000198033; TAA
NYQPPTVV

SEQ ID NO: 95214 - protein, 8 aa, Homo sapiens
  misc_feature: Table A; Target 95214; HLA-C*16:02; TUBA3C; ENSG00000198033; TAA
NYQPPTVV

SEQ ID NO: 95215 - protein, 9 aa, Homo sapiens
  misc_feature: Table A; Target 95215; HLA-C*14:02; TUBA3C; ENSG00000198033; TAA
NYQPPTVVP

SEQ ID NO: 95216 - protein, 10 aa, Homo sapiens
  misc_feature: Table A; Target 95216; HLA-A*24:02; TUBA3C; ENSG00000198033; TAA
NYQPPTVVPG

SEQ ID NO: 95217 - protein, 10 aa, Homo sapiens
  misc_feature: Table A; Target 95217; HLA-A*31:01; TUBA3C; ENSG00000198033; TAA
NYQPPTVVPG

SEQ ID NO: 95218 - protein, 10 aa, Homo sapiens
  misc_feature: Table A; Target 95218; HLA-A*33:01; TUBA3C; ENSG00000198033; TAA
NYQPPTVVPG

SEQ ID NO: 95219 - protein, 10 aa, Homo sapiens
  misc_feature: Table A; Target 95219; HLA-A*33:03; TUBA3C; ENSG00000198033; TAA
NYQPPTVVPG

SEQ ID NO: 95220 - protein, 10 aa, Homo sapiens
  misc_feature: Table A; Target 95220; HLA-C*01:02; TUBA3C; ENSG00000198033; TAA
NYQPPTVVPG

SEQ ID NO: 95221 - protein, 10 aa, Homo sapiens
  misc_feature: Table A; Target 95221; HLA-C*04:01; TUBA3C; ENSG00000198033; TAA
NYQPPTVVPG

SEQ ID NO: 95222 - protein, 10 aa, Homo sapiens
  misc_feature: Table A; Target 95222; HLA-C*06:02; TUBA3C; ENSG00000198033; TAA
NYQPPTVVPG

SEQ ID NO: 95223 - protein, 10 aa, Homo sapiens
  misc_feature: Table A; Target 95223; HLA-C*07:01; TUBA3C; ENSG00000198033; TAA
NYQPPTVVPG

SEQ ID NO: 95224 - protein, 10 aa, Homo sapiens
  misc_feature: Table A; Target 95224; HLA-C*07:02; TUBA3C; ENSG00000198033; TAA
NYQPPTVVPG

SEQ ID NO: 95225 - protein, 10 aa, Homo sapiens
  misc_feature: Table A; Target 95225; HLA-C*12:03; TUBA3C; ENSG00000198033; TAA
NYQPPTVVPG

SEQ ID NO: 95226 - protein, 10 aa, Homo sapiens
  misc_feature: Table A; Target 95226; HLA-C*14:02; TUBA3C; ENSG00000198033; TAA
NYQPPTVVPG

SEQ ID NO: 95227 - protein, 11 aa, Homo sapiens
  misc_feature: Table A; Target 95227; HLA-C*06:02; TUBA3C; ENSG00000198033; TAA
NYQPPTVVPGG

SEQ ID NO: 95228 - protein, 9 aa, Homo sapiens
  misc_feature: Table A; Target 95228; HLA-B*51:01; TUBA3C; ENSG00000198033; TAA
PAPQVSTAV

SEQ ID NO: 95229 - protein, 9 aa, Homo sapiens
  misc_feature: Table A; Target 95229; HLA-C*01:02; TUBA3C; ENSG00000198033; TAA
PAPQVSTAV

SEQ ID NO: 95230 - protein, 10 aa, Homo sapiens
  misc_feature: Table A; Target 95230; HLA-C*07:02; TUBA3C; ENSG00000198033; TAA
PAPQVSTAVV

SEQ ID NO: 95231 - protein, 8 aa, Homo sapiens
  misc_feature: Table A; Target 95231; HLA-B*27:02; TUBA3C; ENSG00000198033; TAA
PEQLITGK

SEQ ID NO: 95232 - protein, 8 aa, Homo sapiens
  misc_feature: Table A; Target 95232; HLA-C*06:02; TUBA3C; ENSG00000198033; TAA
PGGDLAKV

SEQ ID NO: 95233 - protein, 8 aa, Homo sapiens
  misc_feature: Table A; Target 95233; HLA-C*07:02; TUBA3C; ENSG00000198033; TAA
PGGDLAKV

SEQ ID NO: 95234 - protein, 9 aa, Homo sapiens
  misc_feature: Table A; Target 95234; HLA-A*24:02; TUBA3C; ENSG00000198033; TAA
PLATYAPVI

SEQ ID NO: 95235 - protein, 9 aa, Homo sapiens
  misc_feature: Table A; Target 95235; HLA-B*13:02; TUBA3C; ENSG00000198033; TAA
PLATYAPVI

SEQ ID NO: 95236 - protein, 9 aa, Homo sapiens
  misc_feature: Table A; Target 95236; HLA-C*06:02; TUBA3C; ENSG00000198033; TAA
PLATYAPVI

SEQ ID NO: 95237 - protein, 9 aa, Homo sapiens
  misc_feature: Table A; Target 95237; HLA-C*07:01; TUBA3C; ENSG00000198033; TAA
PLATYAPVI

SEQ ID NO: 95238 - protein, 9 aa, Homo sapiens
  misc_feature: Table A; Target 95238; HLA-C*07:02; TUBA3C; ENSG00000198033; TAA
PLATYAPVI

SEQ ID NO: 95239 - protein, 10 aa, Homo sapiens
  misc_feature: Table A; Target 95239; HLA-C*04:01; TUBA3C; ENSG00000198033; TAA
PLATYAPVIS

SEQ ID NO: 95240 - protein, 10 aa, Homo sapiens
  misc_feature: Table A; Target 95240; HLA-C*07:02; TUBA3C; ENSG00000198033; TAA
PLATYAPVIS

SEQ ID NO: 95241 - protein, 10 aa, Homo sapiens
  misc_feature: Table A; Target 95241; HLA-C*04:01; TUBA3C; ENSG00000198033; TAA
PPTVVPGGDL

SEQ ID NO: 95242 - protein, 11 aa, Homo sapiens
  misc_feature: Table A; Target 95242; HLA-B*27:02; TUBA3C; ENSG00000198033; TAA
PQVSTAVVEPY

SEQ ID NO: 95243 - protein, 11 aa, Homo sapiens
  misc_feature: Table A; Target 95243; HLA-C*04:01; TUBA3C; ENSG00000198033; TAA
PQVSTAVVEPY

SEQ ID NO: 95244 - protein, 11 aa, Homo sapiens
  misc_feature: Table A; Target 95244; HLA-C*07:01; TUBA3C; ENSG00000198033; TAA
PQVSTAVVEPY

SEQ ID NO: 95245 - protein, 11 aa, Homo sapiens
  misc_feature: Table A; Target 95245; HLA-C*07:02; TUBA3C; ENSG00000198033; TAA
PQVSTAVVEPY

SEQ ID NO: 95246 - protein, 8 aa, Homo sapiens
  misc_feature: Table A; Target 95246; HLA-B*07:02; TUBA3C; ENSG00000198033; TAA
PTGFKVGI

SEQ ID NO: 95247 - protein, 8 aa, Homo sapiens
  misc_feature: Table A; Target 95247; HLA-C*07:01; TUBA3C; ENSG00000198033; TAA
PTGFKVGI

SEQ ID NO: 95248 - protein, 8 aa, Homo sapiens
  misc_feature: Table A; Target 95248; HLA-C*07:02; TUBA3C; ENSG00000198033; TAA
PTGFKVGI

SEQ ID NO: 95249 - protein, 8 aa, Homo sapiens
  misc_feature: Table A; Target 95249; HLA-C*07:04; TUBA3C; ENSG00000198033; TAA
PTGFKVGI

SEQ ID NO: 95250 - protein, 10 aa, Homo sapiens
  misc_feature: Table A; Target 95250; HLA-A*01:01; TUBA3C; ENSG00000198033; TAA
PTGFKVGINY

SEQ ID NO: 95251 - protein, 10 aa, Homo sapiens
  misc_feature: Table A; Target 95251; HLA-C*07:01; TUBA3C; ENSG00000198033; TAA
PTGFKVGINY

SEQ ID NO: 95252 - protein, 8 aa, Homo sapiens
  misc_feature: Table A; Target 95252; HLA-B*27:02; TUBA3C; ENSG00000198033; TAA
PTVVDEVR

SEQ ID NO: 95253 - protein, 8 aa, Homo sapiens
  misc_feature: Table A; Target 95253; HLA-C*04:01; TUBA3C; ENSG00000198033; TAA
PTVVDEVR

SEQ ID NO: 95254 - protein, 9 aa, Homo sapiens
  misc_feature: Table A; Target 95254; HLA-C*04:01; TUBA3C; ENSG00000198033; TAA
PTVVPGGDL

SEQ ID NO: 95255 - protein, 9 aa, Homo sapiens
  misc_feature: Table A; Target 95255; HLA-C*06:02; TUBA3C; ENSG00000198033; TAA
PTVVPGGDL

SEQ ID NO: 95256 - protein, 9 aa, Homo sapiens
  misc_feature: Table A; Target 95256; HLA-C*07:02; TUBA3C; ENSG00000198033; TAA
PTVVPGGDL

SEQ ID NO: 95257 - protein, 11 aa, Homo sapiens
  misc_feature: Table A; Target 95257; HLA-A*01:01; TUBA3C; ENSG00000198033; TAA
PTVVPGGDLAK

SEQ ID NO: 95258 - protein, 11 aa, Homo sapiens
  misc_feature: Table A; Target 95258; HLA-A*11:01; TUBA3C; ENSG00000198033; TAA
PTVVPGGDLAK

SEQ ID NO: 95259 - protein, 11 aa, Homo sapiens
  misc_feature: Table A; Target 95259; HLA-B*27:02; TUBA3C; ENSG00000198033; TAA
PTVVPGGDLAK

SEQ ID NO: 95260 - protein, 8 aa, Homo sapiens
  misc_feature: Table A; Target 95260; HLA-A*03:01; TUBA3C; ENSG00000198033; TAA
PTYTNLNR

SEQ ID NO: 95261 - protein, 8 aa, Homo sapiens
  misc_feature: Table A; Target 95261; HLA-A*11:01; TUBA3C; ENSG00000198033; TAA
PTYTNLNR

SEQ ID NO: 95262 - protein, 8 aa, Homo sapiens
  misc_feature: Table A; Target 95262; HLA-A*31:01; TUBA3C; ENSG00000198033; TAA
PTYTNLNR

SEQ ID NO: 95263 - protein, 8 aa, Homo sapiens
  misc_feature: Table A; Target 95263; HLA-C*06:02; TUBA3C; ENSG00000198033; TAA
PTYTNLNR

SEQ ID NO: 95264 - protein, 9 aa, Homo sapiens
  misc_feature: Table A; Target 95264; HLA-A*03:01; TUBA3C; ENSG00000198033; TAA
PTYTNLNRL

SEQ ID NO: 95265 - protein, 9 aa, Homo sapiens
  misc_feature: Table A; Target 95265; HLA-A*31:01; TUBA3C; ENSG00000198033; TAA
PTYTNLNRL

SEQ ID NO: 95266 - protein, 9 aa, Homo sapiens
  misc_feature: Table A; Target 95266; HLA-A*68:02; TUBA3C; ENSG00000198033; TAA
PTYTNLNRL

SEQ ID NO: 95267 - protein, 9 aa, Homo sapiens
  misc_feature: Table A; Target 95267; HLA-C*06:02; TUBA3C; ENSG00000198033; TAA
PTYTNLNRL

SEQ ID NO: 95268 - protein, 9 aa, Homo sapiens
  misc_feature: Table A; Target 95268; HLA-C*07:02; TUBA3C; ENSG00000198033; TAA
PTYTNLNRL

SEQ ID NO: 95269 - protein, 9 aa, Homo sapiens
  misc_feature: Table A; Target 95269; HLA-C*16:02; TUBA3C; ENSG00000198033; TAA
PTYTNLNRL

SEQ ID NO: 95270 - protein, 10 aa, Homo sapiens
  misc_feature: Table A; Target 95270; HLA-C*06:02; TUBA3C; ENSG00000198033; TAA
PTYTNLNRLI

SEQ ID NO: 95271 - protein, 8 aa, Homo sapiens
  misc_feature: Table A; Target 95271; HLA-C*04:01; TUBA3C; ENSG00000198033; TAA
PVISAEKA

SEQ ID NO: 95272 - protein, 8 aa, Homo sapiens
  misc_feature: Table A; Target 95272; HLA-C*06:02; TUBA3C; ENSG00000198033; TAA
PVISAEKA

SEQ ID NO: 95273 - protein, 8 aa, Homo sapiens
  misc_feature: Table A; Target 95273; HLA-C*07:02; TUBA3C; ENSG00000198033; TAA
PVISAEKA

SEQ ID NO: 95274 - protein, 9 aa, Homo sapiens
  misc_feature: Table A; Target 95274; HLA-A*25:01; TUBA3C; ENSG00000198033; TAA
PVISAEKAY

SEQ ID NO: 95275 - protein, 9 aa, Homo sapiens
  misc_feature: Table A; Target 95275; HLA-A*26:01; TUBA3C; ENSG00000198033; TAA
PVISAEKAY

SEQ ID NO: 95276 - protein, 9 aa, Homo sapiens
  misc_feature: Table A; Target 95276; HLA-A*29:02; TUBA3C; ENSG00000198033; TAA
PVISAEKAY

SEQ ID NO: 95277 - protein, 9 aa, Homo sapiens
  misc_feature: Table A; Target 95277; HLA-A*30:02; TUBA3C; ENSG00000198033; TAA
PVISAEKAY

SEQ ID NO: 95278 - protein, 9 aa, Homo sapiens
  misc_feature: Table A; Target 95278; HLA-A*32:01; TUBA3C; ENSG00000198033; TAA
PVISAEKAY

SEQ ID NO: 95279 - protein, 9 aa, Homo sapiens
  misc_feature: Table A; Target 95279; HLA-B*07:02; TUBA3C; ENSG00000198033; TAA
PVISAEKAY

SEQ ID NO: 95280 - protein, 9 aa, Homo sapiens
  misc_feature: Table A; Target 95280; HLA-B*15:01; TUBA3C; ENSG00000198033; TAA
PVISAEKAY

SEQ ID NO: 95281 - protein, 9 aa, Homo sapiens
  misc_feature: Table A; Target 95281; HLA-B*15:03; TUBA3C; ENSG00000198033; TAA
PVISAEKAY

SEQ ID NO: 95282 - protein, 9 aa, Homo sapiens
  misc_feature: Table A; Target 95282; HLA-B*46:01; TUBA3C; ENSG00000198033; TAA
PVISAEKAY

SEQ ID NO: 95283 - protein, 9 aa, Homo sapiens
  misc_feature: Table A; Target 95283; HLA-C*03:03; TUBA3C; ENSG00000198033; TAA
PVISAEKAY

SEQ ID NO: 95284 - protein, 9 aa, Homo sapiens
  misc_feature: Table A; Target 95284; HLA-C*04:01; TUBA3C; ENSG00000198033; TAA
PVISAEKAY

SEQ ID NO: 95285 - protein, 9 aa, Homo sapiens
  misc_feature: Table A; Target 95285; HLA-C*06:02; TUBA3C; ENSG00000198033; TAA
PVISAEKAY

SEQ ID NO: 95286 - protein, 9 aa, Homo sapiens
  misc_feature: Table A; Target 95286; HLA-C*07:01; TUBA3C; ENSG00000198033; TAA
PVISAEKAY

SEQ ID NO: 95287 - protein, 9 aa, Homo sapiens
  misc_feature: Table A; Target 95287; HLA-C*07:02; TUBA3C; ENSG00000198033; TAA
PVISAEKAY

SEQ ID NO: 95288 - protein, 9 aa, Homo sapiens
  misc_feature: Table A; Target 95288; HLA-C*07:04; TUBA3C; ENSG00000198033; TAA
PVISAEKAY

SEQ ID NO: 95289 - protein, 9 aa, Homo sapiens
  misc_feature: Table A; Target 95289; HLA-C*12:03; TUBA3C; ENSG00000198033; TAA
PVISAEKAY

SEQ ID NO: 95290 - protein, 8 aa, Homo sapiens
  misc_feature: Table A; Target 95290; HLA-C*07:01; TUBA3C; ENSG00000198033; TAA
PYNSILTT

SEQ ID NO: 95291 - protein, 9 aa, Homo sapiens
  misc_feature: Table A; Target 95291; HLA-A*23:01; TUBA3C; ENSG00000198033; TAA
PYNSILTTH

SEQ ID NO: 95292 - protein, 9 aa, Homo sapiens
  misc_feature: Table A; Target 95292; HLA-A*24:02; TUBA3C; ENSG00000198033; TAA
PYNSILTTH

SEQ ID NO: 95293 - protein, 9 aa, Homo sapiens
  misc_feature: Table A; Target 95293; HLA-A*31:01; TUBA3C; ENSG00000198033; TAA
PYNSILTTH

SEQ ID NO: 95294 - protein, 9 aa, Homo sapiens
  misc_feature: Table A; Target 95294; HLA-C*04:01; TUBA3C; ENSG00000198033; TAA
PYNSILTTH

SEQ ID NO: 95295 - protein, 9 aa, Homo sapiens
  misc_feature: Table A; Target 95295; HLA-A*24:02; TUBA3C; ENSG00000198033; TAA
PYPRIHFPL

SEQ ID NO: 95296 - protein, 10 aa, Homo sapiens
  misc_feature: Table A; Target 95296; HLA-A*24:02; TUBA3C; ENSG00000198033; TAA
PYPRIHFPLA

SEQ ID NO: 95297 - protein, 8 aa, Homo sapiens
  misc_feature: Table A; Target 95297; HLA-C*07:01; TUBA3C; ENSG00000198033; TAA
QAGVQIGN

SEQ ID NO: 95298 - protein, 11 aa, Homo sapiens
  misc_feature: Table A; Target 95298; HLA-B*44:03; TUBA3C; ENSG00000198033; TAA
QAGVQIGNACW

SEQ ID NO: 95299 - protein, 9 aa, Homo sapiens
  misc_feature: Table A; Target 95299; HLA-A*02:04; TUBA3C; ENSG00000198033; TAA
QGFLIFHSF

SEQ ID NO: 95300 - protein, 9 aa, Homo sapiens
  misc_feature: Table A; Target 95300; HLA-A*02:07; TUBA3C; ENSG00000198033; TAA
QGFLIFHSF

SEQ ID NO: 95301 - protein, 9 aa, Homo sapiens
  misc_feature: Table A; Target 95301; HLA-A*23:01; TUBA3C; ENSG00000198033; TAA
QGFLIFHSF

SEQ ID NO: 95302 - protein, 9 aa, Homo sapiens
  misc_feature: Table A; Target 95302; HLA-A*24:02; TUBA3C; ENSG00000198033; TAA
QGFLIFHSF

SEQ ID NO: 95303 - protein, 9 aa, Homo sapiens
  misc_feature: Table A; Target 95303; HLA-A*29:02; TUBA3C; ENSG00000198033; TAA
QGFLIFHSF

SEQ ID NO: 95304 - protein, 9 aa, Homo sapiens
  misc_feature: Table A; Target 95304; HLA-A*30:01; TUBA3C; ENSG00000198033; TAA
QGFLIFHSF

SEQ ID NO: 95305 - protein, 9 aa, Homo sapiens
  misc_feature: Table A; Target 95305; HLA-A*30:02; TUBA3C; ENSG00000198033; TAA
QGFLIFHSF

SEQ ID NO: 95306 - protein, 9 aa, Homo sapiens
  misc_feature: Table A; Target 95306; HLA-A*31:01; TUBA3C; ENSG00000198033; TAA
QGFLIFHSF

SEQ ID NO: 95307 - protein, 9 aa, Homo sapiens
  misc_feature: Table A; Target 95307; HLA-A*33:01; TUBA3C; ENSG00000198033; TAA
QGFLIFHSF

SEQ ID NO: 95308 - protein, 9 aa, Homo sapiens
  misc_feature: Table A; Target 95308; HLA-A*68:02; TUBA3C; ENSG00000198033; TAA
QGFLIFHSF

SEQ ID NO: 95309 - protein, 9 aa, Homo sapiens
  misc_feature: Table A; Target 95309; HLA-B*08:01; TUBA3C; ENSG00000198033; TAA
QGFLIFHSF

SEQ ID NO: 95310 - protein, 9 aa, Homo sapiens
  misc_feature: Table A; Target 95310; HLA-B*15:03; TUBA3C; ENSG00000198033; TAA
QGFLIFHSF

SEQ ID NO: 95311 - protein, 9 aa, Homo sapiens
  misc_feature: Table A; Target 95311; HLA-B*18:01; TUBA3C; ENSG00000198033; TAA
QGFLIFHSF

SEQ ID NO: 95312 - protein, 9 aa, Homo sapiens
  misc_feature: Table A; Target 95312; HLA-B*27:02; TUBA3C; ENSG00000198033; TAA
QGFLIFHSF

SEQ ID NO: 95313 - protein, 9 aa, Homo sapiens
  misc_feature: Table A; Target 95313; HLA-B*35:01; TUBA3C; ENSG00000198033; TAA
QGFLIFHSF

SEQ ID NO: 95314 - protein, 9 aa, Homo sapiens
  misc_feature: Table A; Target 95314; HLA-B*37:01; TUBA3C; ENSG00000198033; TAA
QGFLIFHSF

SEQ ID NO: 95315 - protein, 9 aa, Homo sapiens
  misc_feature: Table A; Target 95315; HLA-B*40:02; TUBA3C; ENSG00000198033; TAA
QGFLIFHSF

SEQ ID NO: 95316 - protein, 9 aa, Homo sapiens
  misc_feature: Table A; Target 95316; HLA-B*44:02; TUBA3C; ENSG00000198033; TAA
QGFLIFHSF

SEQ ID NO: 95317 - protein, 9 aa, Homo sapiens
  misc_feature: Table A; Target 95317; HLA-B*44:03; TUBA3C; ENSG00000198033; TAA
QGFLIFHSF

SEQ ID NO: 95318 - protein, 9 aa, Homo sapiens
  misc_feature: Table A; Target 95318; HLA-B*51:01; TUBA3C; ENSG00000198033; TAA
QGFLIFHSF

SEQ ID NO: 95319 - protein, 9 aa, Homo sapiens
  misc_feature: Table A; Target 95319; HLA-B*54:01; TUBA3C; ENSG00000198033; TAA
QGFLIFHSF

SEQ ID NO: 95320 - protein, 9 aa, Homo sapiens
  misc_feature: Table A; Target 95320; HLA-B*57:01; TUBA3C; ENSG00000198033; TAA
QGFLIFHSF

SEQ ID NO: 95321 - protein, 9 aa, Homo sapiens
  misc_feature: Table A; Target 95321; HLA-C*02:02; TUBA3C; ENSG00000198033; TAA
QGFLIFHSF

SEQ ID NO: 95322 - protein, 9 aa, Homo sapiens
  misc_feature: Table A; Target 95322; HLA-C*07:01; TUBA3C; ENSG00000198033; TAA
QGFLIFHSF

SEQ ID NO: 95323 - protein, 9 aa, Homo sapiens
  misc_feature: Table A; Target 95323; HLA-C*12:03; TUBA3C; ENSG00000198033; TAA
QGFLIFHSF

SEQ ID NO: 95324 - protein, 9 aa, Homo sapiens
  misc_feature: Table A; Target 95324; HLA-C*16:04; TUBA3C; ENSG00000198033; TAA
QGFLIFHSF

SEQ ID NO: 95325 - protein, 10 aa, Homo sapiens
  misc_feature: Table A; Target 95325; HLA-A*01:01; TUBA3C; ENSG00000198033; TAA
QIGNACWELY

SEQ ID NO: 95326 - protein, 10 aa, Homo sapiens
  misc_feature: Table A; Target 95326; HLA-C*07:01; TUBA3C; ENSG00000198033; TAA
QIGNACWELY

SEQ ID NO: 95327 - protein, 8 aa, Homo sapiens
  misc_feature: Table A; Target 95327; HLA-B*54:01; TUBA3C; ENSG00000198033; TAA
QIVSSITA

SEQ ID NO: 95328 - protein, 8 aa, Homo sapiens
  misc_feature: Table A; Target 95328; HLA-B*56:01; TUBA3C; ENSG00000198033; TAA
QIVSSITA

SEQ ID NO: 95329 - protein, 10 aa, Homo sapiens
  misc_feature: Table A; Target 95329; HLA-A*23:01; TUBA3C; ENSG00000198033; TAA
QIVSSITASL

SEQ ID NO: 95330 - protein, 10 aa, Homo sapiens
  misc_feature: Table A; Target 95330; HLA-A*25:01; TUBA3C; ENSG00000198033; TAA
QIVSSITASL

SEQ ID NO: 95331 - protein, 10 aa, Homo sapiens
  misc_feature: Table A; Target 95331; HLA-A*26:01; TUBA3C; ENSG00000198033; TAA
QIVSSITASL

SEQ ID NO: 95332 - protein, 10 aa, Homo sapiens
  misc_feature: Table A; Target 95332; HLA-A*30:01; TUBA3C; ENSG00000198033; TAA
QIVSSITASL

SEQ ID NO: 95333 - protein, 10 aa, Homo sapiens
  misc_feature: Table A; Target 95333; HLA-A*68:02; TUBA3C; ENSG00000198033; TAA
QIVSSITASL

SEQ ID NO: 95334 - protein, 10 aa, Homo sapiens
  misc_feature: Table A; Target 95334; HLA-B*07:02; TUBA3C; ENSG00000198033; TAA
QIVSSITASL

SEQ ID NO: 95335 - protein, 10 aa, Homo sapiens
  misc_feature: Table A; Target 95335; HLA-B*40:01; TUBA3C; ENSG00000198033; TAA
QIVSSITASL

SEQ ID NO: 95336 - protein, 10 aa, Homo sapiens
  misc_feature: Table A; Target 95336; HLA-B*40:02; TUBA3C; ENSG00000198033; TAA
QIVSSITASL

SEQ ID NO: 95337 - protein, 10 aa, Homo sapiens
  misc_feature: Table A; Target 95337; HLA-B*46:01; TUBA3C; ENSG00000198033; TAA
QIVSSITASL

SEQ ID NO: 95338 - protein, 10 aa, Homo sapiens
  misc_feature: Table A; Target 95338; HLA-C*01:02; TUBA3C; ENSG00000198033; TAA
QIVSSITASL

SEQ ID NO: 95339 - protein, 10 aa, Homo sapiens
  misc_feature: Table A; Target 95339; HLA-C*03:03; TUBA3C; ENSG00000198033; TAA
QIVSSITASL

SEQ ID NO: 95340 - protein, 10 aa, Homo sapiens
  misc_feature: Table A; Target 95340; HLA-C*03:04; TUBA3C; ENSG00000198033; TAA
QIVSSITASL

SEQ ID NO: 95341 - protein, 11 aa, Homo sapiens
  misc_feature: Table A; Target 95341; HLA-A*31:01; TUBA3C; ENSG00000198033; TAA
QIVSSITASLR

SEQ ID NO: 95342 - protein, 11 aa, Homo sapiens
  misc_feature: Table A; Target 95342; HLA-A*33:03; TUBA3C; ENSG00000198033; TAA
QIVSSITASLR

SEQ ID NO: 95343 - protein, 11 aa, Homo sapiens
  misc_feature: Table A; Target 95343; HLA-A*68:01; TUBA3C; ENSG00000198033; TAA
QIVSSITASLR

SEQ ID NO: 95344 - protein, 11 aa, Homo sapiens
  misc_feature: Table A; Target 95344; HLA-B*27:02; TUBA3C; ENSG00000198033; TAA
QIVSSITASLR

SEQ ID NO: 95345 - protein, 11 aa, Homo sapiens
  misc_feature: Table A; Target 95345; HLA-C*07:06; TUBA3C; ENSG00000198033; TAA
QIVSSITASLR

SEQ ID NO: 95346 - protein, 8 aa, Homo sapiens
  misc_feature: Table A; Target 95346; HLA-A*02:03; TUBA3C; ENSG00000198033; TAA
QLFHPEQL

SEQ ID NO: 95347 - protein, 8 aa, Homo sapiens
  misc_feature: Table A; Target 95347; HLA-A*02:04; TUBA3C; ENSG00000198033; TAA
QLFHPEQL

SEQ ID NO: 95348 - protein, 9 aa, Homo sapiens
  misc_feature: Table A; Target 95348; HLA-A*02:01; TUBA3C; ENSG00000198033; TAA
QLFHPEQLI

SEQ ID NO: 95349 - protein, 9 aa, Homo sapiens
  misc_feature: Table A; Target 95349; HLA-A*02:03; TUBA3C; ENSG00000198033; TAA
QLFHPEQLI

SEQ ID NO: 95350 - protein, 9 aa, Homo sapiens
  misc_feature: Table A; Target 95350; HLA-A*02:04; TUBA3C; ENSG00000198033; TAA
QLFHPEQLI

SEQ ID NO: 95351 - protein, 9 aa, Homo sapiens
  misc_feature: Table A; Target 95351; HLA-A*02:07; TUBA3C; ENSG00000198033; TAA
QLFHPEQLI

SEQ ID NO: 95352 - protein, 9 aa, Homo sapiens
  misc_feature: Table A; Target 95352; HLA-A*24:02; TUBA3C; ENSG00000198033; TAA
QLFHPEQLI

SEQ ID NO: 95353 - protein, 9 aa, Homo sapiens
  misc_feature: Table A; Target 95353; HLA-A*68:02; TUBA3C; ENSG00000198033; TAA
QLFHPEQLI

SEQ ID NO: 95354 - protein, 9 aa, Homo sapiens
  misc_feature: Table A; Target 95354; HLA-B*13:02; TUBA3C; ENSG00000198033; TAA
QLFHPEQLI

SEQ ID NO: 95355 - protein, 9 aa, Homo sapiens
  misc_feature: Table A; Target 95355; HLA-B*38:01; TUBA3C; ENSG00000198033; TAA
QLFHPEQLI

SEQ ID NO: 95356 - protein, 9 aa, Homo sapiens
  misc_feature: Table A; Target 95356; HLA-B*51:01; TUBA3C; ENSG00000198033; TAA
QLFHPEQLI

SEQ ID NO: 95357 - protein, 9 aa, Homo sapiens
  misc_feature: Table A; Target 95357; HLA-B*57:01; TUBA3C; ENSG00000198033; TAA
QLFHPEQLI

SEQ ID NO: 95358 - protein, 10 aa, Homo sapiens
  misc_feature: Table A; Target 95358; HLA-C*07:01; TUBA3C; ENSG00000198033; TAA
QLFHPEQLIT

SEQ ID NO: 95359 - protein, 11 aa, Homo sapiens
  misc_feature: Table A; Target 95359; HLA-A*02:03; TUBA3C; ENSG00000198033; TAA
QLFHPEQLITG

SEQ ID NO: 95360 - protein, 11 aa, Homo sapiens
  misc_feature: Table A; Target 95360; HLA-A*02:04; TUBA3C; ENSG00000198033; TAA
QLFHPEQLITG

SEQ ID NO: 95361 - protein, 11 aa, Homo sapiens
  misc_feature: Table A; Target 95361; HLA-A*02:07; TUBA3C; ENSG00000198033; TAA
QLFHPEQLITG

SEQ ID NO: 95362 - protein, 11 aa, Homo sapiens
  misc_feature: Table A; Target 95362; HLA-A*68:02; TUBA3C; ENSG00000198033; TAA
QLFHPEQLITG

SEQ ID NO: 95363 - protein, 10 aa, Homo sapiens
  misc_feature: Table A; Target 95363; HLA-A*02:01; TUBA3C; ENSG00000198033; TAA
QLITGKEDAA

SEQ ID NO: 95364 - protein, 10 aa, Homo sapiens
  misc_feature: Table A; Target 95364; HLA-A*02:03; TUBA3C; ENSG00000198033; TAA
QLSVAEITNA

SEQ ID NO: 95365 - protein, 10 aa, Homo sapiens
  misc_feature: Table A; Target 95365; HLA-B*27:02; TUBA3C; ENSG00000198033; TAA
QPDGQMPSDK

SEQ ID NO: 95366 - protein, 8 aa, Homo sapiens
  misc_feature: Table A; Target 95366; HLA-C*07:01; TUBA3C; ENSG00000198033; TAA
QPPTVVPG

SEQ ID NO: 95367 - protein, 9 aa, Homo sapiens
  misc_feature: Table A; Target 95367; HLA-B*51:01; TUBA3C; ENSG00000198033; TAA
QPPTVVPGG

SEQ ID NO: 95368 - protein, 9 aa, Homo sapiens
  misc_feature: Table A; Target 95368; HLA-C*07:01; TUBA3C; ENSG00000198033; TAA
QPPTVVPGG

SEQ ID NO: 95369 - protein, 9 aa, Homo sapiens
  misc_feature: Table A; Target 95369; HLA-C*07:02; TUBA3C; ENSG00000198033; TAA
QPPTVVPGG

SEQ ID NO: 95370 - protein, 11 aa, Homo sapiens
  misc_feature: Table A; Target 95370; HLA-B*07:02; TUBA3C; ENSG00000198033; TAA
QPPTVVPGGDL

SEQ ID NO: 95371 - protein, 11 aa, Homo sapiens
  misc_feature: Table A; Target 95371; HLA-C*04:01; TUBA3C; ENSG00000198033; TAA
QPPTVVPGGDL

SEQ ID NO: 95372 - protein, 11 aa, Homo sapiens
  misc_feature: Table A; Target 95372; HLA-C*07:02; TUBA3C; ENSG00000198033; TAA
QPPTVVPGGDL

SEQ ID NO: 95373 - protein, 8 aa, Homo sapiens
  misc_feature: Table A; Target 95373; HLA-C*04:01; TUBA3C; ENSG00000198033; TAA
QTNLVPYP

SEQ ID NO: 95374 - protein, 9 aa, Homo sapiens
  misc_feature: Table A; Target 95374; HLA-A*03:01; TUBA3C; ENSG00000198033; TAA
QTNLVPYPR

SEQ ID NO: 95375 - protein, 9 aa, Homo sapiens
  misc_feature: Table A; Target 95375; HLA-A*03:02; TUBA3C; ENSG00000198033; TAA
QTNLVPYPR

SEQ ID NO: 95376 - protein, 9 aa, Homo sapiens
  misc_feature: Table A; Target 95376; HLA-A*11:01; TUBA3C; ENSG00000198033; TAA
QTNLVPYPR

SEQ ID NO: 95377 - protein, 9 aa, Homo sapiens
  misc_feature: Table A; Target 95377; HLA-A*31:01; TUBA3C; ENSG00000198033; TAA
QTNLVPYPR

SEQ ID NO: 95378 - protein, 9 aa, Homo sapiens
  misc_feature: Table A; Target 95378; HLA-A*33:01; TUBA3C; ENSG00000198033; TAA
QTNLVPYPR

SEQ ID NO: 95379 - protein, 9 aa, Homo sapiens
  misc_feature: Table A; Target 95379; HLA-A*33:03; TUBA3C; ENSG00000198033; TAA
QTNLVPYPR

SEQ ID NO: 95380 - protein, 9 aa, Homo sapiens
  misc_feature: Table A; Target 95380; HLA-A*68:01; TUBA3C; ENSG00000198033; TAA
QTNLVPYPR

SEQ ID NO: 95381 - protein, 9 aa, Homo sapiens
  misc_feature: Table A; Target 95381; HLA-A*68:02; TUBA3C; ENSG00000198033; TAA
QTNLVPYPR

SEQ ID NO: 95382 - protein, 9 aa, Homo sapiens
  misc_feature: Table A; Target 95382; HLA-B*27:02; TUBA3C; ENSG00000198033; TAA
QTNLVPYPR

SEQ ID NO: 95383 - protein, 9 aa, Homo sapiens
  misc_feature: Table A; Target 95383; HLA-B*57:01; TUBA3C; ENSG00000198033; TAA
QTNLVPYPR

SEQ ID NO: 95384 - protein, 9 aa, Homo sapiens
  misc_feature: Table A; Target 95384; HLA-C*06:02; TUBA3C; ENSG00000198033; TAA
QTNLVPYPR

SEQ ID NO: 95385 - protein, 9 aa, Homo sapiens
  misc_feature: Table A; Target 95385; HLA-C*07:06; TUBA3C; ENSG00000198033; TAA
QTNLVPYPR

SEQ ID NO: 95386 - protein, 9 aa, Homo sapiens
  misc_feature: Table A; Target 95386; HLA-B*27:05; TUBA3C; ENSG00000198033; TAA
QVSTAVVEP

SEQ ID NO: 95387 - protein, 9 aa, Homo sapiens
  misc_feature: Table A; Target 95387; HLA-C*07:04; TUBA3C; ENSG00000198033; TAA
QVSTAVVEP

SEQ ID NO: 95388 - protein, 10 aa, Homo sapiens
  misc_feature: Table A; Target 95388; HLA-A*01:01; TUBA3C; ENSG00000198033; TAA
QVSTAVVEPY

SEQ ID NO: 95389 - protein, 10 aa, Homo sapiens
  misc_feature: Table A; Target 95389; HLA-A*03:01; TUBA3C; ENSG00000198033; TAA
QVSTAVVEPY

SEQ ID NO: 95390 - protein, 10 aa, Homo sapiens
  misc_feature: Table A; Target 95390; HLA-A*03:02; TUBA3C; ENSG00000198033; TAA
QVSTAVVEPY

SEQ ID NO: 95391 - protein, 10 aa, Homo sapiens
  misc_feature: Table A; Target 95391; HLA-A*25:01; TUBA3C; ENSG00000198033; TAA
QVSTAVVEPY

SEQ ID NO: 95392 - protein, 10 aa, Homo sapiens
  misc_feature: Table A; Target 95392; HLA-A*26:01; TUBA3C; ENSG00000198033; TAA
QVSTAVVEPY

SEQ ID NO: 95393 - protein, 10 aa, Homo sapiens
  misc_feature: Table A; Target 95393; HLA-A*29:02; TUBA3C; ENSG00000198033; TAA
QVSTAVVEPY

SEQ ID NO: 95394 - protein, 10 aa, Homo sapiens
  misc_feature: Table A; Target 95394; HLA-A*30:02; TUBA3C; ENSG00000198033; TAA
QVSTAVVEPY

SEQ ID NO: 95395 - protein, 10 aa, Homo sapiens
  misc_feature: Table A; Target 95395; HLA-A*68:01; TUBA3C; ENSG00000198033; TAA
QVSTAVVEPY

SEQ ID NO: 95396 - protein, 10 aa, Homo sapiens
  misc_feature: Table A; Target 95396; HLA-B*07:02; TUBA3C; ENSG00000198033; TAA
QVSTAVVEPY

SEQ ID NO: 95397 - protein, 10 aa, Homo sapiens
  misc_feature: Table A; Target 95397; HLA-B*15:01; TUBA3C; ENSG00000198033; TAA
QVSTAVVEPY

SEQ ID NO: 95398 - protein, 10 aa, Homo sapiens
  misc_feature: Table A; Target 95398; HLA-B*27:02; TUBA3C; ENSG00000198033; TAA
QVSTAVVEPY

SEQ ID NO: 95399 - protein, 10 aa, Homo sapiens
  misc_feature: Table A; Target 95399; HLA-B*35:01; TUBA3C; ENSG00000198033; TAA
QVSTAVVEPY

SEQ ID NO: 95400 - protein, 10 aa, Homo sapiens
  misc_feature: Table A; Target 95400; HLA-B*57:01; TUBA3C; ENSG00000198033; TAA
QVSTAVVEPY

SEQ ID NO: 95401 - protein, 10 aa, Homo sapiens
  misc_feature: Table A; Target 95401; HLA-C*03:03; TUBA3C; ENSG00000198033; TAA
QVSTAVVEPY

SEQ ID NO: 95402 - protein, 10 aa, Homo sapiens
  misc_feature: Table A; Target 95402; HLA-C*04:01; TUBA3C; ENSG00000198033; TAA
QVSTAVVEPY

SEQ ID NO: 95403 - protein, 10 aa, Homo sapiens
  misc_feature: Table A; Target 95403; HLA-C*06:02; TUBA3C; ENSG00000198033; TAA
QVSTAVVEPY

SEQ ID NO: 95404 - protein, 10 aa, Homo sapiens
  misc_feature: Table A; Target 95404; HLA-C*07:01; TUBA3C; ENSG00000198033; TAA
QVSTAVVEPY

SEQ ID NO: 95405 - protein, 10 aa, Homo sapiens
  misc_feature: Table A; Target 95405; HLA-C*07:04; TUBA3C; ENSG00000198033; TAA
QVSTAVVEPY

SEQ ID NO: 95406 - protein, 10 aa, Homo sapiens
  misc_feature: Table A; Target 95406; HLA-C*07:06; TUBA3C; ENSG00000198033; TAA
QVSTAVVEPY

SEQ ID NO: 95407 - protein, 10 aa, Homo sapiens
  misc_feature: Table A; Target 95407; HLA-C*16:04; TUBA3C; ENSG00000198033; TAA
QVSTAVVEPY

SEQ ID NO: 95408 - protein, 8 aa, Homo sapiens
  misc_feature: Table A; Target 95408; HLA-A*02:04; TUBA3C; ENSG00000198033; TAA
RAFVHWYV

SEQ ID NO: 95409 - protein, 8 aa, Homo sapiens
  misc_feature: Table A; Target 95409; HLA-B*57:01; TUBA3C; ENSG00000198033; TAA
RAFVHWYV

SEQ ID NO: 95410 - protein, 8 aa, Homo sapiens
  misc_feature: Table A; Target 95410; HLA-B*37:01; TUBA3C; ENSG00000198033; TAA
RECISIHV

SEQ ID NO: 95411 - protein, 8 aa, Homo sapiens
  misc_feature: Table A; Target 95411; HLA-B*49:01; TUBA3C; ENSG00000198033; TAA
RECISIHV

SEQ ID NO: 95412 - protein, 9 aa, Homo sapiens
  misc_feature: Table A; Target 95412; HLA-A*01:01; TUBA3C; ENSG00000198033; TAA
REDLAALEK

SEQ ID NO: 95413 - protein, 11 aa, Homo sapiens
  misc_feature: Table A; Target 95413; HLA-B*44:02; TUBA3C; ENSG00000198033; TAA
REDLAALEKDY

SEQ ID NO: 95414 - protein, 11 aa, Homo sapiens
  misc_feature: Table A; Target 95414; HLA-B*44:03; TUBA3C; ENSG00000198033; TAA
REDLAALEKDY

SEQ ID NO: 95415 - protein, 11 aa, Homo sapiens
  misc_feature: Table A; Target 95415; HLA-C*16:04; TUBA3C; ENSG00000198033; TAA
REDLAALEKDY

SEQ ID NO: 95416 - protein, 8 aa, Homo sapiens
  misc_feature: Table A; Target 95416; HLA-C*04:01; TUBA3C; ENSG00000198033; TAA
RFDGALNV

SEQ ID NO: 95417 - protein, 10 aa, Homo sapiens
  misc_feature: Table A; Target 95417; HLA-A*23:01; TUBA3C; ENSG00000198033; TAA
RFDGALNVDL

SEQ ID NO: 95418 - protein, 10 aa, Homo sapiens
  misc_feature: Table A; Target 95418; HLA-B*35:01; TUBA3C; ENSG00000198033; TAA
RFDGALNVDL

SEQ ID NO: 95419 - protein, 10 aa, Homo sapiens
  misc_feature: Table A; Target 95419; HLA-B*35:03; TUBA3C; ENSG00000198033; TAA
RFDGALNVDL

SEQ ID NO: 95420 - protein, 10 aa, Homo sapiens
  misc_feature: Table A; Target 95420; HLA-B*55:01; TUBA3C; ENSG00000198033; TAA
RFDGALNVDL

SEQ ID NO: 95421 - protein, 10 aa, Homo sapiens
  misc_feature: Table A; Target 95421; HLA-C*04:01; TUBA3C; ENSG00000198033; TAA
RFDGALNVDL

SEQ ID NO: 95422 - protein, 9 aa, Homo sapiens
  misc_feature: Table A; Target 95422; HLA-C*04:01; TUBA3C; ENSG00000198033; TAA
RGDVVPKDV

SEQ ID NO: 95423 - protein, 8 aa, Homo sapiens
  misc_feature: Table A; Target 95423; HLA-A*03:01; TUBA3C; ENSG00000198033; TAA
RGHYTIGK

SEQ ID NO: 95424 - protein, 8 aa, Homo sapiens
  misc_feature: Table A; Target 95424; HLA-A*03:02; TUBA3C; ENSG00000198033; TAA
RGHYTIGK

SEQ ID NO: 95425 - protein, 8 aa, Homo sapiens
  misc_feature: Table A; Target 95425; HLA-C*06:02; TUBA3C; ENSG00000198033; TAA
RGHYTIGK

SEQ ID NO: 95426 - protein, 9 aa, Homo sapiens
  misc_feature: Table A; Target 95426; HLA-A*03:01; TUBA3C; ENSG00000198033; TAA
RIHFPLATY

SEQ ID NO: 95427 - protein, 9 aa, Homo sapiens
  misc_feature: Table A; Target 95427; HLA-A*29:02; TUBA3C; ENSG00000198033; TAA
RIHFPLATY

SEQ ID NO: 95428 - protein, 9 aa, Homo sapiens
  misc_feature: Table A; Target 95428; HLA-A*30:02; TUBA3C; ENSG00000198033; TAA
RIHFPLATY

SEQ ID NO: 95429 - protein, 9 aa, Homo sapiens
  misc_feature: Table A; Target 95429; HLA-A*31:01; TUBA3C; ENSG00000198033; TAA
RIHFPLATY

SEQ ID NO: 95430 - protein, 9 aa, Homo sapiens
  misc_feature: Table A; Target 95430; HLA-A*32:01; TUBA3C; ENSG00000198033; TAA
RIHFPLATY

SEQ ID NO: 95431 - protein, 9 aa, Homo sapiens
  misc_feature: Table A; Target 95431; HLA-B*15:01; TUBA3C; ENSG00000198033; TAA
RIHFPLATY

SEQ ID NO: 95432 - protein, 9 aa, Homo sapiens
  misc_feature: Table A; Target 95432; HLA-B*46:01; TUBA3C; ENSG00000198033; TAA
RIHFPLATY

SEQ ID NO: 95433 - protein, 9 aa, Homo sapiens
  misc_feature: Table A; Target 95433; HLA-B*57:01; TUBA3C; ENSG00000198033; TAA
RIHFPLATY

SEQ ID NO: 95434 - protein, 9 aa, Homo sapiens
  misc_feature: Table A; Target 95434; HLA-A*01:01; TUBA3C; ENSG00000198033; TAA
RLDHKFDLM

SEQ ID NO: 95435 - protein, 9 aa, Homo sapiens
  misc_feature: Table A; Target 95435; HLA-A*02:07; TUBA3C; ENSG00000198033; TAA
RLDHKFDLM

SEQ ID NO: 95436 - protein, 10 aa, Homo sapiens
  misc_feature: Table A; Target 95436; HLA-A*01:01; TUBA3C; ENSG00000198033; TAA
RLDHKFDLMY

SEQ ID NO: 95437 - protein, 10 aa, Homo sapiens
  misc_feature: Table A; Target 95437; HLA-A*03:01; TUBA3C; ENSG00000198033; TAA
RLDHKFDLMY

SEQ ID NO: 95438 - protein, 10 aa, Homo sapiens
  misc_feature: Table A; Target 95438; HLA-A*29:02; TUBA3C; ENSG00000198033; TAA
RLDHKFDLMY

SEQ ID NO: 95439 - protein, 9 aa, Homo sapiens
  misc_feature: Table A; Target 95439; HLA-A*02:01; TUBA3C; ENSG00000198033; TAA
RLIGQIVSS

SEQ ID NO: 95440 - protein, 9 aa, Homo sapiens
  misc_feature: Table A; Target 95440; HLA-A*02:03; TUBA3C; ENSG00000198033; TAA
RLIGQIVSS

SEQ ID NO: 95441 - protein, 9 aa, Homo sapiens
  misc_feature: Table A; Target 95441; HLA-A*02:04; TUBA3C; ENSG00000198033; TAA
RLIGQIVSS

SEQ ID NO: 95442 - protein, 9 aa, Homo sapiens
  misc_feature: Table A; Target 95442; HLA-B*55:01; TUBA3C; ENSG00000198033; TAA
RLIGQIVSS

SEQ ID NO: 95443 - protein, 10 aa, Homo sapiens
  misc_feature: Table A; Target 95443; HLA-A*02:01; TUBA3C; ENSG00000198033; TAA
RLIGQIVSSI

SEQ ID NO: 95444 - protein, 10 aa, Homo sapiens
  misc_feature: Table A; Target 95444; HLA-A*02:03; TUBA3C; ENSG00000198033; TAA
RLIGQIVSSI

SEQ ID NO: 95445 - protein, 10 aa, Homo sapiens
  misc_feature: Table A; Target 95445; HLA-A*02:04; TUBA3C; ENSG00000198033; TAA
RLIGQIVSSI

SEQ ID NO: 95446 - protein, 10 aa, Homo sapiens
  misc_feature: Table A; Target 95446; HLA-A*02:07; TUBA3C; ENSG00000198033; TAA
RLIGQIVSSI

SEQ ID NO: 95447 - protein, 10 aa, Homo sapiens
  misc_feature: Table A; Target 95447; HLA-A*03:01; TUBA3C; ENSG00000198033; TAA
RLIGQIVSSI

SEQ ID NO: 95448 - protein, 10 aa, Homo sapiens
  misc_feature: Table A; Target 95448; HLA-A*03:02; TUBA3C; ENSG00000198033; TAA
RLIGQIVSSI

SEQ ID NO: 95449 - protein, 10 aa, Homo sapiens
  misc_feature: Table A; Target 95449; HLA-A*23:01; TUBA3C; ENSG00000198033; TAA
RLIGQIVSSI

SEQ ID NO: 95450 - protein, 10 aa, Homo sapiens
  misc_feature: Table A; Target 95450; HLA-A*24:02; TUBA3C; ENSG00000198033; TAA
RLIGQIVSSI

SEQ ID NO: 95451 - protein, 10 aa, Homo sapiens
  misc_feature: Table A; Target 95451; HLA-A*25:01; TUBA3C; ENSG00000198033; TAA
RLIGQIVSSI

SEQ ID NO: 95452 - protein, 10 aa, Homo sapiens
  misc_feature: Table A; Target 95452; HLA-A*30:01; TUBA3C; ENSG00000198033; TAA
RLIGQIVSSI

SEQ ID NO: 95453 - protein, 10 aa, Homo sapiens
  misc_feature: Table A; Target 95453; HLA-A*31:01; TUBA3C; ENSG00000198033; TAA
RLIGQIVSSI

SEQ ID NO: 95454 - protein, 10 aa, Homo sapiens
  misc_feature: Table A; Target 95454; HLA-A*32:01; TUBA3C; ENSG00000198033; TAA
RLIGQIVSSI

SEQ ID NO: 95455 - protein, 10 aa, Homo sapiens
  misc_feature: Table A; Target 95455; HLA-A*68:02; TUBA3C; ENSG00000198033; TAA
RLIGQIVSSI

SEQ ID NO: 95456 - protein, 10 aa, Homo sapiens
  misc_feature: Table A; Target 95456; HLA-B*13:02; TUBA3C; ENSG00000198033; TAA
RLIGQIVSSI

SEQ ID NO: 95457 - protein, 10 aa, Homo sapiens
  misc_feature: Table A; Target 95457; HLA-B*15:01; TUBA3C; ENSG00000198033; TAA
RLIGQIVSSI

SEQ ID NO: 95458 - protein, 10 aa, Homo sapiens
  misc_feature: Table A; Target 95458; HLA-B*15:03; TUBA3C; ENSG00000198033; TAA
RLIGQIVSSI

SEQ ID NO: 95459 - protein, 10 aa, Homo sapiens
  misc_feature: Table A; Target 95459; HLA-B*40:02; TUBA3C; ENSG00000198033; TAA
RLIGQIVSSI

SEQ ID NO: 95460 - protein, 10 aa, Homo sapiens
  misc_feature: Table A; Target 95460; HLA-B*46:01; TUBA3C; ENSG00000198033; TAA
RLIGQIVSSI

SEQ ID NO: 95461 - protein, 10 aa, Homo sapiens
  misc_feature: Table A; Target 95461; HLA-B*55:01; TUBA3C; ENSG00000198033; TAA
RLIGQIVSSI

SEQ ID NO: 95462 - protein, 10 aa, Homo sapiens
  misc_feature: Table A; Target 95462; HLA-B*58:01; TUBA3C; ENSG00000198033; TAA
RLIGQIVSSI

SEQ ID NO: 95463 - protein, 10 aa, Homo sapiens
  misc_feature: Table A; Target 95463; HLA-C*01:02; TUBA3C; ENSG00000198033; TAA
RLIGQIVSSI

SEQ ID NO: 95464 - protein, 10 aa, Homo sapiens
  misc_feature: Table A; Target 95464; HLA-C*02:02; TUBA3C; ENSG00000198033; TAA
RLIGQIVSSI

SEQ ID NO: 95465 - protein, 10 aa, Homo sapiens
  misc_feature: Table A; Target 95465; HLA-C*04:01; TUBA3C; ENSG00000198033; TAA
RLIGQIVSSI

SEQ ID NO: 95466 - protein, 10 aa, Homo sapiens
  misc_feature: Table A; Target 95466; HLA-C*06:02; TUBA3C; ENSG00000198033; TAA
RLIGQIVSSI

SEQ ID NO: 95467 - protein, 10 aa, Homo sapiens
  misc_feature: Table A; Target 95467; HLA-C*07:01; TUBA3C; ENSG00000198033; TAA
RLIGQIVSSI

SEQ ID NO: 95468 - protein, 10 aa, Homo sapiens
  misc_feature: Table A; Target 95468; HLA-C*07:02; TUBA3C; ENSG00000198033; TAA
RLIGQIVSSI

SEQ ID NO: 95469 - protein, 10 aa, Homo sapiens
  misc_feature: Table A; Target 95469; HLA-C*07:04; TUBA3C; ENSG00000198033; TAA
RLIGQIVSSI

SEQ ID NO: 95470 - protein, 11 aa, Homo sapiens
  misc_feature: Table A; Target 95470; HLA-C*04:01; TUBA3C; ENSG00000198033; TAA
RLIGQIVSSIT

SEQ ID NO: 95471 - protein, 11 aa, Homo sapiens
  misc_feature: Table A; Target 95471; HLA-C*06:02; TUBA3C; ENSG00000198033; TAA
RLIGQIVSSIT

SEQ ID NO: 95472 - protein, 8 aa, Homo sapiens
  misc_feature: Table A; Target 95472; HLA-A*03:02; TUBA3C; ENSG00000198033; TAA
RLSVDYGK

SEQ ID NO: 95473 - protein, 9 aa, Homo sapiens
  misc_feature: Table A; Target 95473; HLA-A*03:01; TUBA3C; ENSG00000198033; TAA
RLSVDYGKK

SEQ ID NO: 95474 - protein, 9 aa, Homo sapiens
  misc_feature: Table A; Target 95474; HLA-A*03:02; TUBA3C; ENSG00000198033; TAA
RLSVDYGKK

SEQ ID NO: 95475 - protein, 10 aa, Homo sapiens
  misc_feature: Table A; Target 95475; HLA-A*03:01; TUBA3C; ENSG00000198033; TAA
RNLDIERPTY

SEQ ID NO: 95476 - protein, 10 aa, Homo sapiens
  misc_feature: Table A; Target 95476; HLA-A*23:01; TUBA3C; ENSG00000198033; TAA
RNLDIERPTY

SEQ ID NO: 95477 - protein, 10 aa, Homo sapiens
  misc_feature: Table A; Target 95477; HLA-A*24:02; TUBA3C; ENSG00000198033; TAA
RNLDIERPTY

SEQ ID NO: 95478 - protein, 10 aa, Homo sapiens
  misc_feature: Table A; Target 95478; HLA-A*29:02; TUBA3C; ENSG00000198033; TAA
RNLDIERPTY

SEQ ID NO: 95479 - protein, 10 aa, Homo sapiens
  misc_feature: Table A; Target 95479; HLA-A*30:02; TUBA3C; ENSG00000198033; TAA
RNLDIERPTY

SEQ ID NO: 95480 - protein, 10 aa, Homo sapiens
  misc_feature: Table A; Target 95480; HLA-A*31:01; TUBA3C; ENSG00000198033; TAA
RNLDIERPTY

SEQ ID NO: 95481 - protein, 10 aa, Homo sapiens
  misc_feature: Table A; Target 95481; HLA-A*32:01; TUBA3C; ENSG00000198033; TAA
RNLDIERPTY

SEQ ID NO: 95482 - protein, 10 aa, Homo sapiens
  misc_feature: Table A; Target 95482; HLA-B*07:02; TUBA3C; ENSG00000198033; TAA
RNLDIERPTY

SEQ ID NO: 95483 - protein, 10 aa, Homo sapiens
  misc_feature: Table A; Target 95483; HLA-B*15:01; TUBA3C; ENSG00000198033; TAA
RNLDIERPTY

SEQ ID NO: 95484 - protein, 10 aa, Homo sapiens
  misc_feature: Table A; Target 95484; HLA-B*15:03; TUBA3C; ENSG00000198033; TAA
RNLDIERPTY

SEQ ID NO: 95485 - protein, 10 aa, Homo sapiens
  misc_feature: Table A; Target 95485; HLA-B*27:05; TUBA3C; ENSG00000198033; TAA
RNLDIERPTY

SEQ ID NO: 95486 - protein, 10 aa, Homo sapiens
  misc_feature: Table A; Target 95486; HLA-B*44:02; TUBA3C; ENSG00000198033; TAA
RNLDIERPTY

SEQ ID NO: 95487 - protein, 10 aa, Homo sapiens
  misc_feature: Table A; Target 95487; HLA-B*44:03; TUBA3C; ENSG00000198033; TAA
RNLDIERPTY

SEQ ID NO: 95488 - protein, 10 aa, Homo sapiens
  misc_feature: Table A; Target 95488; HLA-B*57:01; TUBA3C; ENSG00000198033; TAA
RNLDIERPTY

SEQ ID NO: 95489 - protein, 10 aa, Homo sapiens
  misc_feature: Table A; Target 95489; HLA-B*58:01; TUBA3C; ENSG00000198033; TAA
RNLDIERPTY

SEQ ID NO: 95490 - protein, 10 aa, Homo sapiens
  misc_feature: Table A; Target 95490; HLA-C*07:01; TUBA3C; ENSG00000198033; TAA
RNLDIERPTY

SEQ ID NO: 95491 - protein, 10 aa, Homo sapiens
  misc_feature: Table A; Target 95491; HLA-C*12:03; TUBA3C; ENSG00000198033; TAA
RNLDIERPTY

SEQ ID NO: 95492 - protein, 10 aa, Homo sapiens
  misc_feature: Table A; Target 95492; HLA-C*16:01; TUBA3C; ENSG00000198033; TAA
RNLDIERPTY

SEQ ID NO: 95493 - protein, 10 aa, Homo sapiens
  misc_feature: Table A; Target 95493; HLA-C*16:04; TUBA3C; ENSG00000198033; TAA
RNLDIERPTY

SEQ ID NO: 95494 - protein, 9 aa, Homo sapiens
  misc_feature: Table A; Target 95494; HLA-A*31:01; TUBA3C; ENSG00000198033; TAA
RPTYTNLNR

SEQ ID NO: 95495 - protein, 10 aa, Homo sapiens
  misc_feature: Table A; Target 95495; HLA-B*07:02; TUBA3C; ENSG00000198033; TAA
RPTYTNLNRL

SEQ ID NO: 95496 - protein, 10 aa, Homo sapiens
  misc_feature: Table A; Target 95496; HLA-B*56:01; TUBA3C; ENSG00000198033; TAA
RPTYTNLNRL

SEQ ID NO: 95497 - protein, 10 aa, Homo sapiens
  misc_feature: Table A; Target 95497; HLA-C*07:02; TUBA3C; ENSG00000198033; TAA
RPTYTNLNRL

SEQ ID NO: 95498 - protein, 9 aa, Homo sapiens
  misc_feature: Table A; Target 95498; HLA-A*02:01; TUBA3C; ENSG00000198033; TAA
RQLFHPEQL

SEQ ID NO: 95499 - protein, 9 aa, Homo sapiens
  misc_feature: Table A; Target 95499; HLA-A*02:03; TUBA3C; ENSG00000198033; TAA
RQLFHPEQL

SEQ ID NO: 95500 - protein, 9 aa, Homo sapiens
  misc_feature: Table A; Target 95500; HLA-A*02:04; TUBA3C; ENSG00000198033; TAA
RQLFHPEQL

SEQ ID NO: 95501 - protein, 9 aa, Homo sapiens
  misc_feature: Table A; Target 95501; HLA-A*31:01; TUBA3C; ENSG00000198033; TAA
RQLFHPEQL

SEQ ID NO: 95502 - protein, 9 aa, Homo sapiens
  misc_feature: Table A; Target 95502; HLA-B*13:02; TUBA3C; ENSG00000198033; TAA
RQLFHPEQL

SEQ ID NO: 95503 - protein, 9 aa, Homo sapiens
  misc_feature: Table A; Target 95503; HLA-B*37:01; TUBA3C; ENSG00000198033; TAA
RQLFHPEQL

SEQ ID NO: 95504 - protein, 10 aa, Homo sapiens
  misc_feature: Table A; Target 95504; HLA-B*13:02; TUBA3C; ENSG00000198033; TAA
RQLFHPEQLI

SEQ ID NO: 95505 - protein, 11 aa, Homo sapiens
  misc_feature: Table A; Target 95505; HLA-C*16:04; TUBA3C; ENSG00000198033; TAA
RRNLDIERPTY

SEQ ID NO: 95506 - protein, 9 aa, Homo sapiens
  misc_feature: Table A; Target 95506; HLA-A*24:02; TUBA3C; ENSG00000198033; TAA
RTGTYRQLF

SEQ ID NO: 95507 - protein, 9 aa, Homo sapiens
  misc_feature: Table A; Target 95507; HLA-A*31:01; TUBA3C; ENSG00000198033; TAA
RTGTYRQLF

SEQ ID NO: 95508 - protein, 9 aa, Homo sapiens
  misc_feature: Table A; Target 95508; HLA-A*32:01; TUBA3C; ENSG00000198033; TAA
RTGTYRQLF

SEQ ID NO: 95509 - protein, 9 aa, Homo sapiens
  misc_feature: Table A; Target 95509; HLA-B*57:01; TUBA3C; ENSG00000198033; TAA
RTGTYRQLF

SEQ ID NO: 95510 - protein, 9 aa, Homo sapiens
  misc_feature: Table A; Target 95510; HLA-B*58:01; TUBA3C; ENSG00000198033; TAA
RTGTYRQLF

SEQ ID NO: 95511 - protein, 8 aa, Homo sapiens
  misc_feature: Table A; Target 95511; HLA-B*57:01; TUBA3C; ENSG00000198033; TAA
RTIQFVDW

SEQ ID NO: 95512 - protein, 8 aa, Homo sapiens
  misc_feature: Table A; Target 95512; HLA-B*58:01; TUBA3C; ENSG00000198033; TAA
RTIQFVDW

SEQ ID NO: 95513 - protein, 10 aa, Homo sapiens
  misc_feature: Table A; Target 95513; HLA-B*38:01; TUBA3C; ENSG00000198033; TAA
SAEKAYHEQL

SEQ ID NO: 95514 - protein, 10 aa, Homo sapiens
  misc_feature: Table A; Target 95514; HLA-B*40:01; TUBA3C; ENSG00000198033; TAA
SAEKAYHEQL

SEQ ID NO: 95515 - protein, 10 aa, Homo sapiens
  misc_feature: Table A; Target 95515; HLA-A*30:01; TUBA3C; ENSG00000198033; TAA
SEAREDLAAL

SEQ ID NO: 95516 - protein, 10 aa, Homo sapiens
  misc_feature: Table A; Target 95516; HLA-B*27:05; TUBA3C; ENSG00000198033; TAA
SEAREDLAAL

SEQ ID NO: 95517 - protein, 10 aa, Homo sapiens
  misc_feature: Table A; Target 95517; HLA-B*40:01; TUBA3C; ENSG00000198033; TAA
SEAREDLAAL

SEQ ID NO: 95518 - protein, 10 aa, Homo sapiens
  misc_feature: Table A; Target 95518; HLA-B*40:02; TUBA3C; ENSG00000198033; TAA
SEAREDLAAL

SEQ ID NO: 95519 - protein, 10 aa, Homo sapiens
  misc_feature: Table A; Target 95519; HLA-B*44:02; TUBA3C; ENSG00000198033; TAA
SEAREDLAAL

SEQ ID NO: 95520 - protein, 10 aa, Homo sapiens
  misc_feature: Table A; Target 95520; HLA-B*44:03; TUBA3C; ENSG00000198033; TAA
SEAREDLAAL

SEQ ID NO: 95521 - protein, 10 aa, Homo sapiens
  misc_feature: Table A; Target 95521; HLA-B*49:01; TUBA3C; ENSG00000198033; TAA
SEAREDLAAL

SEQ ID NO: 95522 - protein, 9 aa, Homo sapiens
  misc_feature: Table A; Target 95522; HLA-A*30:01; TUBA3C; ENSG00000198033; TAA
SETGAGKHV

SEQ ID NO: 95523 - protein, 9 aa, Homo sapiens
  misc_feature: Table A; Target 95523; HLA-B*13:02; TUBA3C; ENSG00000198033; TAA
SETGAGKHV

SEQ ID NO: 95524 - protein, 9 aa, Homo sapiens
  misc_feature: Table A; Target 95524; HLA-B*37:01; TUBA3C; ENSG00000198033; TAA
SETGAGKHV

SEQ ID NO: 95525 - protein, 9 aa, Homo sapiens
  misc_feature: Table A; Target 95525; HLA-B*40:01; TUBA3C; ENSG00000198033; TAA
SETGAGKHV

SEQ ID NO: 95526 - protein, 9 aa, Homo sapiens
  misc_feature: Table A; Target 95526; HLA-B*40:02; TUBA3C; ENSG00000198033; TAA
SETGAGKHV

SEQ ID NO: 95527 - protein, 9 aa, Homo sapiens
  misc_feature: Table A; Target 95527; HLA-B*44:02; TUBA3C; ENSG00000198033; TAA
SETGAGKHV

SEQ ID NO: 95528 - protein, 9 aa, Homo sapiens
  misc_feature: Table A; Target 95528; HLA-B*44:03; TUBA3C; ENSG00000198033; TAA
SETGAGKHV

SEQ ID NO: 95529 - protein, 9 aa, Homo sapiens
  misc_feature: Table A; Target 95529; HLA-B*49:01; TUBA3C; ENSG00000198033; TAA
SETGAGKHV

SEQ ID NO: 95530 - protein, 9 aa, Homo sapiens
  misc_feature: Table A; Target 95530; HLA-C*02:02; TUBA3C; ENSG00000198033; TAA
SETGAGKHV

SEQ ID NO: 95531 - protein, 9 aa, Homo sapiens
  misc_feature: Table A; Target 95531; HLA-C*04:01; TUBA3C; ENSG00000198033; TAA
SETGAGKHV

SEQ ID NO: 95532 - protein, 9 aa, Homo sapiens
  misc_feature: Table A; Target 95532; HLA-C*06:02; TUBA3C; ENSG00000198033; TAA
SETGAGKHV

SEQ ID NO: 95533 - protein, 9 aa, Homo sapiens
  misc_feature: Table A; Target 95533; HLA-C*16:02; TUBA3C; ENSG00000198033; TAA
SETGAGKHV

SEQ ID NO: 95534 - protein, 9 aa, Homo sapiens
  misc_feature: Table A; Target 95534; HLA-C*16:04; TUBA3C; ENSG00000198033; TAA
SETGAGKHV

SEQ ID NO: 95535 - protein, 10 aa, Homo sapiens
  misc_feature: Table A; Target 95535; HLA-A*30:01; TUBA3C; ENSG00000198033; TAA
SETGAGKHVP

SEQ ID NO: 95536 - protein, 10 aa, Homo sapiens
  misc_feature: Table A; Target 95536; HLA-B*40:01; TUBA3C; ENSG00000198033; TAA
SETGAGKHVP

SEQ ID NO: 95537 - protein, 10 aa, Homo sapiens
  misc_feature: Table A; Target 95537; HLA-B*40:02; TUBA3C; ENSG00000198033; TAA
SETGAGKHVP

SEQ ID NO: 95538 - protein, 10 aa, Homo sapiens
  misc_feature: Table A; Target 95538; HLA-B*44:02; TUBA3C; ENSG00000198033; TAA
SETGAGKHVP

SEQ ID NO: 95539 - protein, 10 aa, Homo sapiens
  misc_feature: Table A; Target 95539; HLA-B*44:03; TUBA3C; ENSG00000198033; TAA
SETGAGKHVP

SEQ ID NO: 95540 - protein, 10 aa, Homo sapiens
  misc_feature: Table A; Target 95540; HLA-B*49:01; TUBA3C; ENSG00000198033; TAA
SETGAGKHVP

SEQ ID NO: 95541 - protein, 10 aa, Homo sapiens
  misc_feature: Table A; Target 95541; HLA-C*06:02; TUBA3C; ENSG00000198033; TAA
SETGAGKHVP

SEQ ID NO: 95542 - protein, 10 aa, Homo sapiens
  misc_feature: Table A; Target 95542; HLA-C*07:01; TUBA3C; ENSG00000198033; TAA
SETGAGKHVP

SEQ ID NO: 95543 - protein, 10 aa, Homo sapiens
  misc_feature: Table A; Target 95543; HLA-C*07:04; TUBA3C; ENSG00000198033; TAA
SETGAGKHVP

SEQ ID NO: 95544 - protein, 10 aa, Homo sapiens
  misc_feature: Table A; Target 95544; HLA-C*16:02; TUBA3C; ENSG00000198033; TAA
SETGAGKHVP

SEQ ID NO: 95545 - protein, 10 aa, Homo sapiens
  misc_feature: Table A; Target 95545; HLA-C*16:04; TUBA3C; ENSG00000198033; TAA
SETGAGKHVP

SEQ ID NO: 95546 - protein, 11 aa, Homo sapiens
  misc_feature: Table A; Target 95546; HLA-A*31:01; TUBA3C; ENSG00000198033; TAA
SETGAGKHVPR

SEQ ID NO: 95547 - protein, 11 aa, Homo sapiens
  misc_feature: Table A; Target 95547; HLA-A*33:01; TUBA3C; ENSG00000198033; TAA
SETGAGKHVPR

SEQ ID NO: 95548 - protein, 11 aa, Homo sapiens
  misc_feature: Table A; Target 95548; HLA-A*33:03; TUBA3C; ENSG00000198033; TAA
SETGAGKHVPR

SEQ ID NO: 95549 - protein, 11 aa, Homo sapiens
  misc_feature: Table A; Target 95549; HLA-A*68:01; TUBA3C; ENSG00000198033; TAA
SETGAGKHVPR

SEQ ID NO: 95550 - protein, 11 aa, Homo sapiens
  misc_feature: Table A; Target 95550; HLA-A*68:02; TUBA3C; ENSG00000198033; TAA
SETGAGKHVPR

SEQ ID NO: 95551 - protein, 11 aa, Homo sapiens
  misc_feature: Table A; Target 95551; HLA-B*40:02; TUBA3C; ENSG00000198033; TAA
SETGAGKHVPR

SEQ ID NO: 95552 - protein, 11 aa, Homo sapiens
  misc_feature: Table A; Target 95552; HLA-C*04:01; TUBA3C; ENSG00000198033; TAA
SETGAGKHVPR

SEQ ID NO: 95553 - protein, 11 aa, Homo sapiens
  misc_feature: Table A; Target 95553; HLA-C*06:02; TUBA3C; ENSG00000198033; TAA
SETGAGKHVPR

SEQ ID NO: 95554 - protein, 11 aa, Homo sapiens
  misc_feature: Table A; Target 95554; HLA-C*07:01; TUBA3C; ENSG00000198033; TAA
SETGAGKHVPR

SEQ ID NO: 95555 - protein, 10 aa, Homo sapiens
  misc_feature: Table A; Target 95555; HLA-A*23:01; TUBA3C; ENSG00000198033; TAA
SFGGGTGSGF

SEQ ID NO: 95556 - protein, 10 aa, Homo sapiens
  misc_feature: Table A; Target 95556; HLA-A*24:02; TUBA3C; ENSG00000198033; TAA
SFGGGTGSGF

SEQ ID NO: 95557 - protein, 10 aa, Homo sapiens
  misc_feature: Table A; Target 95557; HLA-A*29:02; TUBA3C; ENSG00000198033; TAA
SFGGGTGSGF

SEQ ID NO: 95558 - protein, 10 aa, Homo sapiens
  misc_feature: Table A; Target 95558; HLA-A*30:02; TUBA3C; ENSG00000198033; TAA
SFGGGTGSGF

SEQ ID NO: 95559 - protein, 10 aa, Homo sapiens
  misc_feature: Table A; Target 95559; HLA-A*32:01; TUBA3C; ENSG00000198033; TAA
SFGGGTGSGF

SEQ ID NO: 95560 - protein, 10 aa, Homo sapiens
  misc_feature: Table A; Target 95560; HLA-B*15:01; TUBA3C; ENSG00000198033; TAA
SFGGGTGSGF

SEQ ID NO: 95561 - protein, 10 aa, Homo sapiens
  misc_feature: Table A; Target 95561; HLA-B*15:03; TUBA3C; ENSG00000198033; TAA
SFGGGTGSGF

SEQ ID NO: 95562 - protein, 10 aa, Homo sapiens
  misc_feature: Table A; Target 95562; HLA-C*01:02; TUBA3C; ENSG00000198033; TAA
SFGGGTGSGF

SEQ ID NO: 95563 - protein, 10 aa, Homo sapiens
  misc_feature: Table A; Target 95563; HLA-C*04:01; TUBA3C; ENSG00000198033; TAA
SFGGGTGSGF

SEQ ID NO: 95564 - protein, 10 aa, Homo sapiens
  misc_feature: Table A; Target 95564; HLA-C*07:01; TUBA3C; ENSG00000198033; TAA
SFGGGTGSGF

SEQ ID NO: 95565 - protein, 10 aa, Homo sapiens
  misc_feature: Table A; Target 95565; HLA-C*07:04; TUBA3C; ENSG00000198033; TAA
SFGGGTGSGF

SEQ ID NO: 95566 - protein, 10 aa, Homo sapiens
  misc_feature: Table A; Target 95566; HLA-C*14:02; TUBA3C; ENSG00000198033; TAA
SFGGGTGSGF

SEQ ID NO: 95567 - protein, 9 aa, Homo sapiens
  misc_feature: Table A; Target 95567; HLA-A*31:01; TUBA3C; ENSG00000198033; TAA
SFNTFFSET

SEQ ID NO: 95568 - protein, 8 aa, Homo sapiens
  misc_feature: Table A; Target 95568; HLA-B*51:01; TUBA3C; ENSG00000198033; TAA
SGFASLLM

SEQ ID NO: 95569 - protein, 8 aa, Homo sapiens
  misc_feature: Table A; Target 95569; HLA-C*06:02; TUBA3C; ENSG00000198033; TAA
SGFASLLM

SEQ ID NO: 95570 - protein, 8 aa, Homo sapiens
  misc_feature: Table A; Target 95570; HLA-C*07:01; TUBA3C; ENSG00000198033; TAA
SGFASLLM

SEQ ID NO: 95571 - protein, 10 aa, Homo sapiens
  misc_feature: Table A; Target 95571; HLA-A*31:01; TUBA3C; ENSG00000198033; TAA
SGFASLLMER

SEQ ID NO: 95572 - protein, 10 aa, Homo sapiens
  misc_feature: Table A; Target 95572; HLA-C*07:06; TUBA3C; ENSG00000198033; TAA
SGFASLLMER

SEQ ID NO: 95573 - protein, 8 aa, Homo sapiens
  misc_feature: Table A; Target 95573; HLA-C*01:02; TUBA3C; ENSG00000198033; TAA
SIHVGQAG

SEQ ID NO: 95574 - protein, 9 aa, Homo sapiens
  misc_feature: Table A; Target 95574; HLA-A*02:01; TUBA3C; ENSG00000198033; TAA
SIHVGQAGV

SEQ ID NO: 95575 - protein, 9 aa, Homo sapiens
  misc_feature: Table A; Target 95575; HLA-A*02:03; TUBA3C; ENSG00000198033; TAA
SIHVGQAGV

SEQ ID NO: 95576 - protein, 9 aa, Homo sapiens
  misc_feature: Table A; Target 95576; HLA-A*02:07; TUBA3C; ENSG00000198033; TAA
SIHVGQAGV

SEQ ID NO: 95577 - protein, 9 aa, Homo sapiens
  misc_feature: Table A; Target 95577; HLA-A*32:01; TUBA3C; ENSG00000198033; TAA
SIHVGQAGV

SEQ ID NO: 95578 - protein, 9 aa, Homo sapiens
  misc_feature: Table A; Target 95578; HLA-B*13:02; TUBA3C; ENSG00000198033; TAA
SIHVGQAGV

SEQ ID NO: 95579 - protein, 9 aa, Homo sapiens
  misc_feature: Table A; Target 95579; HLA-B*37:01; TUBA3C; ENSG00000198033; TAA
SIHVGQAGV

SEQ ID NO: 95580 - protein, 9 aa, Homo sapiens
  misc_feature: Table A; Target 95580; HLA-B*46:01; TUBA3C; ENSG00000198033; TAA
SIHVGQAGV

SEQ ID NO: 95581 - protein, 9 aa, Homo sapiens
  misc_feature: Table A; Target 95581; HLA-B*55:01; TUBA3C; ENSG00000198033; TAA
SIHVGQAGV

SEQ ID NO: 95582 - protein, 9 aa, Homo sapiens
  misc_feature: Table A; Target 95582; HLA-C*01:02; TUBA3C; ENSG00000198033; TAA
SIHVGQAGV

SEQ ID NO: 95583 - protein, 10 aa, Homo sapiens
  misc_feature: Table A; Target 95583; HLA-C*07:01; TUBA3C; ENSG00000198033; TAA
SIHVGQAGVQ

SEQ ID NO: 95584 - protein, 11 aa, Homo sapiens
  misc_feature: Table A; Target 95584; HLA-C*04:01; TUBA3C; ENSG00000198033; TAA
SIHVGQAGVQI

SEQ ID NO: 95585 - protein, 9 aa, Homo sapiens
  misc_feature: Table A; Target 95585; HLA-A*02:01; TUBA3C; ENSG00000198033; TAA
SILTTHTTL

SEQ ID NO: 95586 - protein, 9 aa, Homo sapiens
  misc_feature: Table A; Target 95586; HLA-A*02:03; TUBA3C; ENSG00000198033; TAA
SILTTHTTL

SEQ ID NO: 95587 - protein, 9 aa, Homo sapiens
  misc_feature: Table A; Target 95587; HLA-A*02:04; TUBA3C; ENSG00000198033; TAA
SILTTHTTL

SEQ ID NO: 95588 - protein, 9 aa, Homo sapiens
  misc_feature: Table A; Target 95588; HLA-A*02:07; TUBA3C; ENSG00000198033; TAA
SILTTHTTL

SEQ ID NO: 95589 - protein, 9 aa, Homo sapiens
  misc_feature: Table A; Target 95589; HLA-A*03:01; TUBA3C; ENSG00000198033; TAA
SILTTHTTL

SEQ ID NO: 95590 - protein, 9 aa, Homo sapiens
  misc_feature: Table A; Target 95590; HLA-A*23:01; TUBA3C; ENSG00000198033; TAA
SILTTHTTL

SEQ ID NO: 95591 - protein, 9 aa, Homo sapiens
  misc_feature: Table A; Target 95591; HLA-A*24:02; TUBA3C; ENSG00000198033; TAA
SILTTHTTL

SEQ ID NO: 95592 - protein, 9 aa, Homo sapiens
  misc_feature: Table A; Target 95592; HLA-A*30:01; TUBA3C; ENSG00000198033; TAA
SILTTHTTL

SEQ ID NO: 95593 - protein, 9 aa, Homo sapiens
  misc_feature: Table A; Target 95593; HLA-A*31:01; TUBA3C; ENSG00000198033; TAA
SILTTHTTL

SEQ ID NO: 95594 - protein, 9 aa, Homo sapiens
  misc_feature: Table A; Target 95594; HLA-A*32:01; TUBA3C; ENSG00000198033; TAA
SILTTHTTL

SEQ ID NO: 95595 - protein, 9 aa, Homo sapiens
  misc_feature: Table A; Target 95595; HLA-A*68:02; TUBA3C; ENSG00000198033; TAA
SILTTHTTL

SEQ ID NO: 95596 - protein, 9 aa, Homo sapiens
  misc_feature: Table A; Target 95596; HLA-B*07:02; TUBA3C; ENSG00000198033; TAA
SILTTHTTL

SEQ ID NO: 95597 - protein, 9 aa, Homo sapiens
  misc_feature: Table A; Target 95597; HLA-B*08:01; TUBA3C; ENSG00000198033; TAA
SILTTHTTL

SEQ ID NO: 95598 - protein, 9 aa, Homo sapiens
  misc_feature: Table A; Target 95598; HLA-B*13:02; TUBA3C; ENSG00000198033; TAA
SILTTHTTL

SEQ ID NO: 95599 - protein, 9 aa, Homo sapiens
  misc_feature: Table A; Target 95599; HLA-B*15:01; TUBA3C; ENSG00000198033; TAA
SILTTHTTL

SEQ ID NO: 95600 - protein, 9 aa, Homo sapiens
  misc_feature: Table A; Target 95600; HLA-B*15:03; TUBA3C; ENSG00000198033; TAA
SILTTHTTL

SEQ ID NO: 95601 - protein, 9 aa, Homo sapiens
  misc_feature: Table A; Target 95601; HLA-B*27:05; TUBA3C; ENSG00000198033; TAA
SILTTHTTL

SEQ ID NO: 95602 - protein, 9 aa, Homo sapiens
  misc_feature: Table A; Target 95602; HLA-B*35:03; TUBA3C; ENSG00000198033; TAA
SILTTHTTL

SEQ ID NO: 95603 - protein, 9 aa, Homo sapiens
  misc_feature: Table A; Target 95603; HLA-B*37:01; TUBA3C; ENSG00000198033; TAA
SILTTHTTL

SEQ ID NO: 95604 - protein, 9 aa, Homo sapiens
  misc_feature: Table A; Target 95604; HLA-B*38:01; TUBA3C; ENSG00000198033; TAA
SILTTHTTL

SEQ ID NO: 95605 - protein, 9 aa, Homo sapiens
  misc_feature: Table A; Target 95605; HLA-B*39:01; TUBA3C; ENSG00000198033; TAA
SILTTHTTL

SEQ ID NO: 95606 - protein, 9 aa, Homo sapiens
  misc_feature: Table A; Target 95606; HLA-B*40:01; TUBA3C; ENSG00000198033; TAA
SILTTHTTL

SEQ ID NO: 95607 - protein, 9 aa, Homo sapiens
  misc_feature: Table A; Target 95607; HLA-B*40:02; TUBA3C; ENSG00000198033; TAA
SILTTHTTL

SEQ ID NO: 95608 - protein, 9 aa, Homo sapiens
  misc_feature: Table A; Target 95608; HLA-B*46:01; TUBA3C; ENSG00000198033; TAA
SILTTHTTL

SEQ ID NO: 95609 - protein, 9 aa, Homo sapiens
  misc_feature: Table A; Target 95609; HLA-B*55:01; TUBA3C; ENSG00000198033; TAA
SILTTHTTL

SEQ ID NO: 95610 - protein, 9 aa, Homo sapiens
  misc_feature: Table A; Target 95610; HLA-B*57:01; TUBA3C; ENSG00000198033; TAA
SILTTHTTL

SEQ ID NO: 95611 - protein, 9 aa, Homo sapiens
  misc_feature: Table A; Target 95611; HLA-B*58:01; TUBA3C; ENSG00000198033; TAA
SILTTHTTL

SEQ ID NO: 95612 - protein, 9 aa, Homo sapiens
  misc_feature: Table A; Target 95612; HLA-C*01:02; TUBA3C; ENSG00000198033; TAA
SILTTHTTL

SEQ ID NO: 95613 - protein, 9 aa, Homo sapiens
  misc_feature: Table A; Target 95613; HLA-C*02:02; TUBA3C; ENSG00000198033; TAA
SILTTHTTL

SEQ ID NO: 95614 - protein, 9 aa, Homo sapiens
  misc_feature: Table A; Target 95614; HLA-C*03:03; TUBA3C; ENSG00000198033; TAA
SILTTHTTL

SEQ ID NO: 95615 - protein, 9 aa, Homo sapiens
  misc_feature: Table A; Target 95615; HLA-C*03:04; TUBA3C; ENSG00000198033; TAA
SILTTHTTL

SEQ ID NO: 95616 - protein, 9 aa, Homo sapiens
  misc_feature: Table A; Target 95616; HLA-C*04:01; TUBA3C; ENSG00000198033; TAA
SILTTHTTL

SEQ ID NO: 95617 - protein, 9 aa, Homo sapiens
  misc_feature: Table A; Target 95617; HLA-C*05:01; TUBA3C; ENSG00000198033; TAA
SILTTHTTL

SEQ ID NO: 95618 - protein, 9 aa, Homo sapiens
  misc_feature: Table A; Target 95618; HLA-C*07:02; TUBA3C; ENSG00000198033; TAA
SILTTHTTL

SEQ ID NO: 95619 - protein, 9 aa, Homo sapiens
  misc_feature: Table A; Target 95619; HLA-C*07:04; TUBA3C; ENSG00000198033; TAA
SILTTHTTL

SEQ ID NO: 95620 - protein, 9 aa, Homo sapiens
  misc_feature: Table A; Target 95620; HLA-C*07:06; TUBA3C; ENSG00000198033; TAA
SILTTHTTL

SEQ ID NO: 95621 - protein, 9 aa, Homo sapiens
  misc_feature: Table A; Target 95621; HLA-C*12:03; TUBA3C; ENSG00000198033; TAA
SILTTHTTL

SEQ ID NO: 95622 - protein, 9 aa, Homo sapiens
  misc_feature: Table A; Target 95622; HLA-C*14:02; TUBA3C; ENSG00000198033; TAA
SILTTHTTL

SEQ ID NO: 95623 - protein, 9 aa, Homo sapiens
  misc_feature: Table A; Target 95623; HLA-C*16:01; TUBA3C; ENSG00000198033; TAA
SILTTHTTL

SEQ ID NO: 95624 - protein, 9 aa, Homo sapiens
  misc_feature: Table A; Target 95624; HLA-C*16:02; TUBA3C; ENSG00000198033; TAA
SILTTHTTL

SEQ ID NO: 95625 - protein, 9 aa, Homo sapiens
  misc_feature: Table A; Target 95625; HLA-C*16:04; TUBA3C; ENSG00000198033; TAA
SILTTHTTL

SEQ ID NO: 95626 - protein, 8 aa, Homo sapiens
  misc_feature: Table A; Target 95626; HLA-B*37:01; TUBA3C; ENSG00000198033; TAA
SITASLRF

SEQ ID NO: 95627 - protein, 8 aa, Homo sapiens
  misc_feature: Table A; Target 95627; HLA-C*04:01; TUBA3C; ENSG00000198033; TAA
SITASLRF

SEQ ID NO: 95628 - protein, 8 aa, Homo sapiens
  misc_feature: Table A; Target 95628; HLA-C*07:01; TUBA3C; ENSG00000198033; TAA
SITASLRF

SEQ ID NO: 95629 - protein, 8 aa, Homo sapiens
  misc_feature: Table A; Target 95629; HLA-C*16:01; TUBA3C; ENSG00000198033; TAA
SITASLRF

SEQ ID NO: 95630 - protein, 8 aa, Homo sapiens
  misc_feature: Table A; Target 95630; HLA-B*15:03; TUBA3C; ENSG00000198033; TAA
SKLEFAIY

SEQ ID NO: 95631 - protein, 9 aa, Homo sapiens
  misc_feature: Table A; Target 95631; HLA-A*02:01; TUBA3C; ENSG00000198033; TAA
SLLMERLSV

SEQ ID NO: 95632 - protein, 9 aa, Homo sapiens
  misc_feature: Table A; Target 95632; HLA-A*02:03; TUBA3C; ENSG00000198033; TAA
SLLMERLSV

SEQ ID NO: 95633 - protein, 9 aa, Homo sapiens
  misc_feature: Table A; Target 95633; HLA-A*02:04; TUBA3C; ENSG00000198033; TAA
SLLMERLSV

SEQ ID NO: 95634 - protein, 9 aa, Homo sapiens
  misc_feature: Table A; Target 95634; HLA-A*02:07; TUBA3C; ENSG00000198033; TAA
SLLMERLSV

SEQ ID NO: 95635 - protein, 9 aa, Homo sapiens
  misc_feature: Table A; Target 95635; HLA-B*08:01; TUBA3C; ENSG00000198033; TAA
SLLMERLSV

SEQ ID NO: 95636 - protein, 9 aa, Homo sapiens
  misc_feature: Table A; Target 95636; HLA-B*13:02; TUBA3C; ENSG00000198033; TAA
SLLMERLSV

SEQ ID NO: 95637 - protein, 9 aa, Homo sapiens
  misc_feature: Table A; Target 95637; HLA-B*55:01; TUBA3C; ENSG00000198033; TAA
SLLMERLSV

SEQ ID NO: 95638 - protein, 11 aa, Homo sapiens
  misc_feature: Table A; Target 95638; HLA-A*29:02; TUBA3C; ENSG00000198033; TAA
SLLMERLSVDY

SEQ ID NO: 95639 - protein, 11 aa, Homo sapiens
  misc_feature: Table A; Target 95639; HLA-A*30:02; TUBA3C; ENSG00000198033; TAA
SLLMERLSVDY

SEQ ID NO: 95640 - protein, 11 aa, Homo sapiens
  misc_feature: Table A; Target 95640; HLA-C*04:01; TUBA3C; ENSG00000198033; TAA
SLLMERLSVDY

SEQ ID NO: 95641 - protein, 11 aa, Homo sapiens
  misc_feature: Table A; Target 95641; HLA-C*07:01; TUBA3C; ENSG00000198033; TAA
SLLMERLSVDY

SEQ ID NO: 95642 - protein, 10 aa, Homo sapiens
  misc_feature: Table A; Target 95642; HLA-A*02:03; TUBA3C; ENSG00000198033; TAA
SLRFDGALNV

SEQ ID NO: 95643 - protein, 10 aa, Homo sapiens
  misc_feature: Table A; Target 95643; HLA-A*02:04; TUBA3C; ENSG00000198033; TAA
SLRFDGALNV

SEQ ID NO: 95644 - protein, 10 aa, Homo sapiens
  misc_feature: Table A; Target 95644; HLA-C*06:02; TUBA3C; ENSG00000198033; TAA
SLRFDGALNV

SEQ ID NO: 95645 - protein, 9 aa, Homo sapiens
  misc_feature: Table A; Target 95645; HLA-B*54:01; TUBA3C; ENSG00000198033; TAA
SNTTAIAEA

SEQ ID NO: 95646 - protein, 10 aa, Homo sapiens
  misc_feature: Table A; Target 95646; HLA-A*25:01; TUBA3C; ENSG00000198033; TAA
SNTTAIAEAW

SEQ ID NO: 95647 - protein, 10 aa, Homo sapiens
  misc_feature: Table A; Target 95647; HLA-B*07:02; TUBA3C; ENSG00000198033; TAA
SNTTAIAEAW

SEQ ID NO: 95648 - protein, 10 aa, Homo sapiens
  misc_feature: Table A; Target 95648; HLA-B*27:02; TUBA3C; ENSG00000198033; TAA
SNTTAIAEAW

SEQ ID NO: 95649 - protein, 10 aa, Homo sapiens
  misc_feature: Table A; Target 95649; HLA-B*44:02; TUBA3C; ENSG00000198033; TAA
SNTTAIAEAW

SEQ ID NO: 95650 - protein, 10 aa, Homo sapiens
  misc_feature: Table A; Target 95650; HLA-B*44:03; TUBA3C; ENSG00000198033; TAA
SNTTAIAEAW

SEQ ID NO: 95651 - protein, 10 aa, Homo sapiens
  misc_feature: Table A; Target 95651; HLA-B*57:01; TUBA3C; ENSG00000198033; TAA
SNTTAIAEAW

SEQ ID NO: 95652 - protein, 10 aa, Homo sapiens
  misc_feature: Table A; Target 95652; HLA-B*58:01; TUBA3C; ENSG00000198033; TAA
SNTTAIAEAW

SEQ ID NO: 95653 - protein, 10 aa, Homo sapiens
  misc_feature: Table A; Target 95653; HLA-C*16:04; TUBA3C; ENSG00000198033; TAA
SNTTAIAEAW

SEQ ID NO: 95654 - protein, 8 aa, Homo sapiens
  misc_feature: Table A; Target 95654; HLA-A*11:01; TUBA3C; ENSG00000198033; TAA
SSITASLR

SEQ ID NO: 95655 - protein, 8 aa, Homo sapiens
  misc_feature: Table A; Target 95655; HLA-A*31:01; TUBA3C; ENSG00000198033; TAA
SSITASLR

SEQ ID NO: 95656 - protein, 8 aa, Homo sapiens
  misc_feature: Table A; Target 95656; HLA-A*33:01; TUBA3C; ENSG00000198033; TAA
SSITASLR

SEQ ID NO: 95657 - protein, 8 aa, Homo sapiens
  misc_feature: Table A; Target 95657; HLA-A*33:03; TUBA3C; ENSG00000198033; TAA
SSITASLR

SEQ ID NO: 95658 - protein, 8 aa, Homo sapiens
  misc_feature: Table A; Target 95658; HLA-A*68:01; TUBA3C; ENSG00000198033; TAA
SSITASLR

SEQ ID NO: 95659 - protein, 8 aa, Homo sapiens
  misc_feature: Table A; Target 95659; HLA-B*57:01; TUBA3C; ENSG00000198033; TAA
SSITASLR

SEQ ID NO: 95660 - protein, 8 aa, Homo sapiens
  misc_feature: Table A; Target 95660; HLA-C*06:02; TUBA3C; ENSG00000198033; TAA
SSITASLR

SEQ ID NO: 95661 - protein, 8 aa, Homo sapiens
  misc_feature: Table A; Target 95661; HLA-C*07:06; TUBA3C; ENSG00000198033; TAA
SSITASLR

SEQ ID NO: 95662 - protein, 9 aa, Homo sapiens
  misc_feature: Table A; Target 95662; HLA-A*01:01; TUBA3C; ENSG00000198033; TAA
SSITASLRF

SEQ ID NO: 95663 - protein, 9 aa, Homo sapiens
  misc_feature: Table A; Target 95663; HLA-A*11:01; TUBA3C; ENSG00000198033; TAA
SSITASLRF

SEQ ID NO: 95664 - protein, 9 aa, Homo sapiens
  misc_feature: Table A; Target 95664; HLA-A*23:01; TUBA3C; ENSG00000198033; TAA
SSITASLRF

SEQ ID NO: 95665 - protein, 9 aa, Homo sapiens
  misc_feature: Table A; Target 95665; HLA-A*24:02; TUBA3C; ENSG00000198033; TAA
SSITASLRF

SEQ ID NO: 95666 - protein, 9 aa, Homo sapiens
  misc_feature: Table A; Target 95666; HLA-A*25:01; TUBA3C; ENSG00000198033; TAA
SSITASLRF

SEQ ID NO: 95667 - protein, 9 aa, Homo sapiens
  misc_feature: Table A; Target 95667; HLA-A*26:01; TUBA3C; ENSG00000198033; TAA
SSITASLRF

SEQ ID NO: 95668 - protein, 9 aa, Homo sapiens
  misc_feature: Table A; Target 95668; HLA-A*29:02; TUBA3C; ENSG00000198033; TAA
SSITASLRF

SEQ ID NO: 95669 - protein, 9 aa, Homo sapiens
  misc_feature: Table A; Target 95669; HLA-A*30:02; TUBA3C; ENSG00000198033; TAA
SSITASLRF

SEQ ID NO: 95670 - protein, 9 aa, Homo sapiens
  misc_feature: Table A; Target 95670; HLA-A*32:01; TUBA3C; ENSG00000198033; TAA
SSITASLRF

SEQ ID NO: 95671 - protein, 9 aa, Homo sapiens
  misc_feature: Table A; Target 95671; HLA-B*15:01; TUBA3C; ENSG00000198033; TAA
SSITASLRF

SEQ ID NO: 95672 - protein, 9 aa, Homo sapiens
  misc_feature: Table A; Target 95672; HLA-B*44:02; TUBA3C; ENSG00000198033; TAA
SSITASLRF

SEQ ID NO: 95673 - protein, 9 aa, Homo sapiens
  misc_feature: Table A; Target 95673; HLA-B*44:03; TUBA3C; ENSG00000198033; TAA
SSITASLRF

SEQ ID NO: 95674 - protein, 9 aa, Homo sapiens
  misc_feature: Table A; Target 95674; HLA-B*46:01; TUBA3C; ENSG00000198033; TAA
SSITASLRF

SEQ ID NO: 95675 - protein, 9 aa, Homo sapiens
  misc_feature: Table A; Target 95675; HLA-B*57:01; TUBA3C; ENSG00000198033; TAA
SSITASLRF

SEQ ID NO: 95676 - protein, 9 aa, Homo sapiens
  misc_feature: Table A; Target 95676; HLA-B*58:01; TUBA3C; ENSG00000198033; TAA
SSITASLRF

SEQ ID NO: 95677 - protein, 9 aa, Homo sapiens
  misc_feature: Table A; Target 95677; HLA-C*02:02; TUBA3C; ENSG00000198033; TAA
SSITASLRF

SEQ ID NO: 95678 - protein, 9 aa, Homo sapiens
  misc_feature: Table A; Target 95678; HLA-C*04:01; TUBA3C; ENSG00000198033; TAA
SSITASLRF

SEQ ID NO: 95679 - protein, 9 aa, Homo sapiens
  misc_feature: Table A; Target 95679; HLA-C*07:06; TUBA3C; ENSG00000198033; TAA
SSITASLRF

SEQ ID NO: 95680 - protein, 9 aa, Homo sapiens
  misc_feature: Table A; Target 95680; HLA-C*16:01; TUBA3C; ENSG00000198033; TAA
SSITASLRF

SEQ ID NO: 95681 - protein, 9 aa, Homo sapiens
  misc_feature: Table A; Target 95681; HLA-C*16:04; TUBA3C; ENSG00000198033; TAA
SSITASLRF

SEQ ID NO: 95682 - protein, 8 aa, Homo sapiens
  misc_feature: Table A; Target 95682; HLA-A*01:01; TUBA3C; ENSG00000198033; TAA
STAVVEPY

SEQ ID NO: 95683 - protein, 8 aa, Homo sapiens
  misc_feature: Table A; Target 95683; HLA-A*30:02; TUBA3C; ENSG00000198033; TAA
STAVVEPY

SEQ ID NO: 95684 - protein, 8 aa, Homo sapiens
  misc_feature: Table A; Target 95684; HLA-B*15:01; TUBA3C; ENSG00000198033; TAA
STAVVEPY

SEQ ID NO: 95685 - protein, 8 aa, Homo sapiens
  misc_feature: Table A; Target 95685; HLA-B*18:01; TUBA3C; ENSG00000198033; TAA
STAVVEPY

SEQ ID NO: 95686 - protein, 8 aa, Homo sapiens
  misc_feature: Table A; Target 95686; HLA-B*46:01; TUBA3C; ENSG00000198033; TAA
STAVVEPY

SEQ ID NO: 95687 - protein, 8 aa, Homo sapiens
  misc_feature: Table A; Target 95687; HLA-C*01:02; TUBA3C; ENSG00000198033; TAA
STAVVEPY

SEQ ID NO: 95688 - protein, 8 aa, Homo sapiens
  misc_feature: Table A; Target 95688; HLA-C*03:03; TUBA3C; ENSG00000198033; TAA
STAVVEPY

SEQ ID NO: 95689 - protein, 8 aa, Homo sapiens
  misc_feature: Table A; Target 95689; HLA-C*07:01; TUBA3C; ENSG00000198033; TAA
STAVVEPY

SEQ ID NO: 95690 - protein, 8 aa, Homo sapiens
  misc_feature: Table A; Target 95690; HLA-C*07:04; TUBA3C; ENSG00000198033; TAA
STAVVEPY

SEQ ID NO: 95691 - protein, 9 aa, Homo sapiens
  misc_feature: Table A; Target 95691; HLA-C*06:02; TUBA3C; ENSG00000198033; TAA
STAVVEPYN

SEQ ID NO: 95692 - protein, 11 aa, Homo sapiens
  misc_feature: Table A; Target 95692; HLA-A*25:01; TUBA3C; ENSG00000198033; TAA
STAVVEPYNSI

SEQ ID NO: 95693 - protein, 11 aa, Homo sapiens
  misc_feature: Table A; Target 95693; HLA-A*68:02; TUBA3C; ENSG00000198033; TAA
STAVVEPYNSI

SEQ ID NO: 95694 - protein, 8 aa, Homo sapiens
  misc_feature: Table A; Target 95694; HLA-A*02:01; TUBA3C; ENSG00000198033; TAA
SVAEITNA

SEQ ID NO: 95695 - protein, 8 aa, Homo sapiens
  misc_feature: Table A; Target 95695; HLA-A*02:03; TUBA3C; ENSG00000198033; TAA
SVAEITNA

SEQ ID NO: 95696 - protein, 8 aa, Homo sapiens
  misc_feature: Table A; Target 95696; HLA-B*55:01; TUBA3C; ENSG00000198033; TAA
SVAEITNA

SEQ ID NO: 95697 - protein, 8 aa, Homo sapiens
  misc_feature: Table A; Target 95697; HLA-B*56:01; TUBA3C; ENSG00000198033; TAA
SVAEITNA

SEQ ID NO: 95698 - protein, 9 aa, Homo sapiens
  misc_feature: Table A; Target 95698; HLA-A*02:01; TUBA3C; ENSG00000198033; TAA
SVAEITNAC

SEQ ID NO: 95699 - protein, 9 aa, Homo sapiens
  misc_feature: Table A; Target 95699; HLA-A*02:03; TUBA3C; ENSG00000198033; TAA
SVAEITNAC

SEQ ID NO: 95700 - protein, 9 aa, Homo sapiens
  misc_feature: Table A; Target 95700; HLA-A*25:01; TUBA3C; ENSG00000198033; TAA
SVAEITNAC

SEQ ID NO: 95701 - protein, 9 aa, Homo sapiens
  misc_feature: Table A; Target 95701; HLA-A*26:01; TUBA3C; ENSG00000198033; TAA
SVAEITNAC

SEQ ID NO: 95702 - protein, 9 aa, Homo sapiens
  misc_feature: Table A; Target 95702; HLA-A*30:01; TUBA3C; ENSG00000198033; TAA
SVAEITNAC

SEQ ID NO: 95703 - protein, 9 aa, Homo sapiens
  misc_feature: Table A; Target 95703; HLA-A*32:01; TUBA3C; ENSG00000198033; TAA
SVAEITNAC

SEQ ID NO: 95704 - protein, 9 aa, Homo sapiens
  misc_feature: Table A; Target 95704; HLA-A*68:02; TUBA3C; ENSG00000198033; TAA
SVAEITNAC

SEQ ID NO: 95705 - protein, 9 aa, Homo sapiens
  misc_feature: Table A; Target 95705; HLA-B*13:02; TUBA3C; ENSG00000198033; TAA
SVAEITNAC

SEQ ID NO: 95706 - protein, 9 aa, Homo sapiens
  misc_feature: Table A; Target 95706; HLA-B*15:01; TUBA3C; ENSG00000198033; TAA
SVAEITNAC

SEQ ID NO: 95707 - protein, 9 aa, Homo sapiens
  misc_feature: Table A; Target 95707; HLA-B*27:05; TUBA3C; ENSG00000198033; TAA
SVAEITNAC

SEQ ID NO: 95708 - protein, 9 aa, Homo sapiens
  misc_feature: Table A; Target 95708; HLA-B*35:01; TUBA3C; ENSG00000198033; TAA
SVAEITNAC

SEQ ID NO: 95709 - protein, 9 aa, Homo sapiens
  misc_feature: Table A; Target 95709; HLA-B*35:03; TUBA3C; ENSG00000198033; TAA
SVAEITNAC

SEQ ID NO: 95710 - protein, 9 aa, Homo sapiens
  misc_feature: Table A; Target 95710; HLA-B*39:01; TUBA3C; ENSG00000198033; TAA
SVAEITNAC

SEQ ID NO: 95711 - protein, 9 aa, Homo sapiens
  misc_feature: Table A; Target 95711; HLA-B*46:01; TUBA3C; ENSG00000198033; TAA
SVAEITNAC

SEQ ID NO: 95712 - protein, 9 aa, Homo sapiens
  misc_feature: Table A; Target 95712; HLA-B*55:01; TUBA3C; ENSG00000198033; TAA
SVAEITNAC

SEQ ID NO: 95713 - protein, 9 aa, Homo sapiens
  misc_feature: Table A; Target 95713; HLA-B*56:01; TUBA3C; ENSG00000198033; TAA
SVAEITNAC

SEQ ID NO: 95714 - protein, 9 aa, Homo sapiens
  misc_feature: Table A; Target 95714; HLA-B*58:01; TUBA3C; ENSG00000198033; TAA
SVAEITNAC

SEQ ID NO: 95715 - protein, 9 aa, Homo sapiens
  misc_feature: Table A; Target 95715; HLA-C*01:02; TUBA3C; ENSG00000198033; TAA
SVAEITNAC

SEQ ID NO: 95716 - protein, 9 aa, Homo sapiens
  misc_feature: Table A; Target 95716; HLA-C*02:02; TUBA3C; ENSG00000198033; TAA
SVAEITNAC

SEQ ID NO: 95717 - protein, 9 aa, Homo sapiens
  misc_feature: Table A; Target 95717; HLA-C*03:03; TUBA3C; ENSG00000198033; TAA
SVAEITNAC

SEQ ID NO: 95718 - protein, 9 aa, Homo sapiens
  misc_feature: Table A; Target 95718; HLA-C*03:04; TUBA3C; ENSG00000198033; TAA
SVAEITNAC

SEQ ID NO: 95719 - protein, 9 aa, Homo sapiens
  misc_feature: Table A; Target 95719; HLA-C*06:02; TUBA3C; ENSG00000198033; TAA
SVAEITNAC

SEQ ID NO: 95720 - protein, 9 aa, Homo sapiens
  misc_feature: Table A; Target 95720; HLA-C*07:04; TUBA3C; ENSG00000198033; TAA
SVAEITNAC

SEQ ID NO: 95721 - protein, 9 aa, Homo sapiens
  misc_feature: Table A; Target 95721; HLA-C*07:06; TUBA3C; ENSG00000198033; TAA
SVAEITNAC

SEQ ID NO: 95722 - protein, 9 aa, Homo sapiens
  misc_feature: Table A; Target 95722; HLA-C*12:03; TUBA3C; ENSG00000198033; TAA
SVAEITNAC

SEQ ID NO: 95723 - protein, 9 aa, Homo sapiens
  misc_feature: Table A; Target 95723; HLA-C*16:02; TUBA3C; ENSG00000198033; TAA
SVAEITNAC

SEQ ID NO: 95724 - protein, 9 aa, Homo sapiens
  misc_feature: Table A; Target 95724; HLA-C*16:04; TUBA3C; ENSG00000198033; TAA
SVAEITNAC

SEQ ID NO: 95725 - protein, 10 aa, Homo sapiens
  misc_feature: Table A; Target 95725; HLA-A*02:01; TUBA3C; ENSG00000198033; TAA
SVAEITNACF

SEQ ID NO: 95726 - protein, 10 aa, Homo sapiens
  misc_feature: Table A; Target 95726; HLA-A*03:02; TUBA3C; ENSG00000198033; TAA
SVAEITNACF

SEQ ID NO: 95727 - protein, 10 aa, Homo sapiens
  misc_feature: Table A; Target 95727; HLA-A*11:01; TUBA3C; ENSG00000198033; TAA
SVAEITNACF

SEQ ID NO: 95728 - protein, 10 aa, Homo sapiens
  misc_feature: Table A; Target 95728; HLA-A*23:01; TUBA3C; ENSG00000198033; TAA
SVAEITNACF

SEQ ID NO: 95729 - protein, 10 aa, Homo sapiens
  misc_feature: Table A; Target 95729; HLA-A*25:01; TUBA3C; ENSG00000198033; TAA
SVAEITNACF

SEQ ID NO: 95730 - protein, 10 aa, Homo sapiens
  misc_feature: Table A; Target 95730; HLA-A*26:01; TUBA3C; ENSG00000198033; TAA
SVAEITNACF

SEQ ID NO: 95731 - protein, 10 aa, Homo sapiens
  misc_feature: Table A; Target 95731; HLA-A*29:02; TUBA3C; ENSG00000198033; TAA
SVAEITNACF

SEQ ID NO: 95732 - protein, 10 aa, Homo sapiens
  misc_feature: Table A; Target 95732; HLA-A*30:02; TUBA3C; ENSG00000198033; TAA
SVAEITNACF

SEQ ID NO: 95733 - protein, 10 aa, Homo sapiens
  misc_feature: Table A; Target 95733; HLA-A*32:01; TUBA3C; ENSG00000198033; TAA
SVAEITNACF

SEQ ID NO: 95734 - protein, 10 aa, Homo sapiens
  misc_feature: Table A; Target 95734; HLA-A*33:03; TUBA3C; ENSG00000198033; TAA
SVAEITNACF

SEQ ID NO: 95735 - protein, 10 aa, Homo sapiens
  misc_feature: Table A; Target 95735; HLA-A*68:01; TUBA3C; ENSG00000198033; TAA
SVAEITNACF

SEQ ID NO: 95736 - protein, 10 aa, Homo sapiens
  misc_feature: Table A; Target 95736; HLA-A*68:02; TUBA3C; ENSG00000198033; TAA
SVAEITNACF

SEQ ID NO: 95737 - protein, 10 aa, Homo sapiens
  misc_feature: Table A; Target 95737; HLA-B*07:02; TUBA3C; ENSG00000198033; TAA
SVAEITNACF

SEQ ID NO: 95738 - protein, 10 aa, Homo sapiens
  misc_feature: Table A; Target 95738; HLA-B*13:02; TUBA3C; ENSG00000198033; TAA
SVAEITNACF

SEQ ID NO: 95739 - protein, 10 aa, Homo sapiens
  misc_feature: Table A; Target 95739; HLA-B*15:01; TUBA3C; ENSG00000198033; TAA
SVAEITNACF

SEQ ID NO: 95740 - protein, 10 aa, Homo sapiens
  misc_feature: Table A; Target 95740; HLA-B*15:03; TUBA3C; ENSG00000198033; TAA
SVAEITNACF

SEQ ID NO: 95741 - protein, 10 aa, Homo sapiens
  misc_feature: Table A; Target 95741; HLA-B*18:01; TUBA3C; ENSG00000198033; TAA
SVAEITNACF

SEQ ID NO: 95742 - protein, 10 aa, Homo sapiens
  misc_feature: Table A; Target 95742; HLA-B*27:02; TUBA3C; ENSG00000198033; TAA
SVAEITNACF

SEQ ID NO: 95743 - protein, 10 aa, Homo sapiens
  misc_feature: Table A; Target 95743; HLA-B*27:05; TUBA3C; ENSG00000198033; TAA
SVAEITNACF

SEQ ID NO: 95744 - protein, 10 aa, Homo sapiens
  misc_feature: Table A; Target 95744; HLA-B*35:01; TUBA3C; ENSG00000198033; TAA
SVAEITNACF

SEQ ID NO: 95745 - protein, 10 aa, Homo sapiens
  misc_feature: Table A; Target 95745; HLA-B*35:03; TUBA3C; ENSG00000198033; TAA
SVAEITNACF

SEQ ID NO: 95746 - protein, 10 aa, Homo sapiens
  misc_feature: Table A; Target 95746; HLA-B*38:01; TUBA3C; ENSG00000198033; TAA
SVAEITNACF

SEQ ID NO: 95747 - protein, 10 aa, Homo sapiens
  misc_feature: Table A; Target 95747; HLA-B*39:01; TUBA3C; ENSG00000198033; TAA
SVAEITNACF

SEQ ID NO: 95748 - protein, 10 aa, Homo sapiens
  misc_feature: Table A; Target 95748; HLA-B*44:02; TUBA3C; ENSG00000198033; TAA
SVAEITNACF

SEQ ID NO: 95749 - protein, 10 aa, Homo sapiens
  misc_feature: Table A; Target 95749; HLA-B*44:03; TUBA3C; ENSG00000198033; TAA
SVAEITNACF

SEQ ID NO: 95750 - protein, 10 aa, Homo sapiens
  misc_feature: Table A; Target 95750; HLA-B*46:01; TUBA3C; ENSG00000198033; TAA
SVAEITNACF

SEQ ID NO: 95751 - protein, 10 aa, Homo sapiens
  misc_feature: Table A; Target 95751; HLA-B*55:01; TUBA3C; ENSG00000198033; TAA
SVAEITNACF

SEQ ID NO: 95752 - protein, 10 aa, Homo sapiens
  misc_feature: Table A; Target 95752; HLA-B*57:01; TUBA3C; ENSG00000198033; TAA
SVAEITNACF

SEQ ID NO: 95753 - protein, 10 aa, Homo sapiens
  misc_feature: Table A; Target 95753; HLA-B*58:01; TUBA3C; ENSG00000198033; TAA
SVAEITNACF

SEQ ID NO: 95754 - protein, 10 aa, Homo sapiens
  misc_feature: Table A; Target 95754; HLA-C*01:02; TUBA3C; ENSG00000198033; TAA
SVAEITNACF

SEQ ID NO: 95755 - protein, 10 aa, Homo sapiens
  misc_feature: Table A; Target 95755; HLA-C*02:02; TUBA3C; ENSG00000198033; TAA
SVAEITNACF

SEQ ID NO: 95756 - protein, 10 aa, Homo sapiens
  misc_feature: Table A; Target 95756; HLA-C*03:03; TUBA3C; ENSG00000198033; TAA
SVAEITNACF

SEQ ID NO: 95757 - protein, 10 aa, Homo sapiens
  misc_feature: Table A; Target 95757; HLA-C*04:01; TUBA3C; ENSG00000198033; TAA
SVAEITNACF

SEQ ID NO: 95758 - protein, 10 aa, Homo sapiens
  misc_feature: Table A; Target 95758; HLA-C*05:01; TUBA3C; ENSG00000198033; TAA
SVAEITNACF

SEQ ID NO: 95759 - protein, 10 aa, Homo sapiens
  misc_feature: Table A; Target 95759; HLA-C*07:04; TUBA3C; ENSG00000198033; TAA
SVAEITNACF

SEQ ID NO: 95760 - protein, 10 aa, Homo sapiens
  misc_feature: Table A; Target 95760; HLA-C*07:06; TUBA3C; ENSG00000198033; TAA
SVAEITNACF

SEQ ID NO: 95761 - protein, 10 aa, Homo sapiens
  misc_feature: Table A; Target 95761; HLA-C*14:02; TUBA3C; ENSG00000198033; TAA
SVAEITNACF

SEQ ID NO: 95762 - protein, 10 aa, Homo sapiens
  misc_feature: Table A; Target 95762; HLA-C*16:01; TUBA3C; ENSG00000198033; TAA
SVAEITNACF

SEQ ID NO: 95763 - protein, 10 aa, Homo sapiens
  misc_feature: Table A; Target 95763; HLA-C*16:04; TUBA3C; ENSG00000198033; TAA
SVAEITNACF

SEQ ID NO: 95764 - protein, 9 aa, Homo sapiens
  misc_feature: Table A; Target 95764; HLA-A*03:01; TUBA3C; ENSG00000198033; TAA
SVDYGKKSK

SEQ ID NO: 95765 - protein, 9 aa, Homo sapiens
  misc_feature: Table A; Target 95765; HLA-A*03:02; TUBA3C; ENSG00000198033; TAA
SVDYGKKSK

SEQ ID NO: 95766 - protein, 9 aa, Homo sapiens
  misc_feature: Table A; Target 95766; HLA-A*11:01; TUBA3C; ENSG00000198033; TAA
SVDYGKKSK

SEQ ID NO: 95767 - protein, 9 aa, Homo sapiens
  misc_feature: Table A; Target 95767; HLA-A*31:01; TUBA3C; ENSG00000198033; TAA
SVDYGKKSK

SEQ ID NO: 95768 - protein, 9 aa, Homo sapiens
  misc_feature: Table A; Target 95768; HLA-B*07:02; TUBA3C; ENSG00000198033; TAA
SVDYGKKSK

SEQ ID NO: 95769 - protein, 9 aa, Homo sapiens
  misc_feature: Table A; Target 95769; HLA-C*01:02; TUBA3C; ENSG00000198033; TAA
SVDYGKKSK

SEQ ID NO: 95770 - protein, 9 aa, Homo sapiens
  misc_feature: Table A; Target 95770; HLA-C*04:01; TUBA3C; ENSG00000198033; TAA
SVDYGKKSK

SEQ ID NO: 95771 - protein, 9 aa, Homo sapiens
  misc_feature: Table A; Target 95771; HLA-C*06:02; TUBA3C; ENSG00000198033; TAA
SVDYGKKSK

SEQ ID NO: 95772 - protein, 10 aa, Homo sapiens
  misc_feature: Table A; Target 95772; HLA-A*02:07; TUBA3C; ENSG00000198033; TAA
SVDYGKKSKL

SEQ ID NO: 95773 - protein, 10 aa, Homo sapiens
  misc_feature: Table A; Target 95773; HLA-A*03:01; TUBA3C; ENSG00000198033; TAA
SVDYGKKSKL

SEQ ID NO: 95774 - protein, 9 aa, Homo sapiens
  misc_feature: Table A; Target 95774; HLA-A*11:01; TUBA3C; ENSG00000198033; TAA
TAIAEAWAR

SEQ ID NO: 95775 - protein, 9 aa, Homo sapiens
  misc_feature: Table A; Target 95775; HLA-A*31:01; TUBA3C; ENSG00000198033; TAA
TAIAEAWAR

SEQ ID NO: 95776 - protein, 9 aa, Homo sapiens
  misc_feature: Table A; Target 95776; HLA-A*33:01; TUBA3C; ENSG00000198033; TAA
TAIAEAWAR

SEQ ID NO: 95777 - protein, 9 aa, Homo sapiens
  misc_feature: Table A; Target 95777; HLA-A*33:03; TUBA3C; ENSG00000198033; TAA
TAIAEAWAR

SEQ ID NO: 95778 - protein, 9 aa, Homo sapiens
  misc_feature: Table A; Target 95778; HLA-A*68:01; TUBA3C; ENSG00000198033; TAA
TAIAEAWAR

SEQ ID NO: 95779 - protein, 9 aa, Homo sapiens
  misc_feature: Table A; Target 95779; HLA-A*68:02; TUBA3C; ENSG00000198033; TAA
TAIAEAWAR

SEQ ID NO: 95780 - protein, 9 aa, Homo sapiens
  misc_feature: Table A; Target 95780; HLA-B*27:02; TUBA3C; ENSG00000198033; TAA
TAIAEAWAR

SEQ ID NO: 95781 - protein, 9 aa, Homo sapiens
  misc_feature: Table A; Target 95781; HLA-B*27:05; TUBA3C; ENSG00000198033; TAA
TAIAEAWAR

SEQ ID NO: 95782 - protein, 9 aa, Homo sapiens
  misc_feature: Table A; Target 95782; HLA-B*35:01; TUBA3C; ENSG00000198033; TAA
TAIAEAWAR

SEQ ID NO: 95783 - protein, 9 aa, Homo sapiens
  misc_feature: Table A; Target 95783; HLA-B*35:03; TUBA3C; ENSG00000198033; TAA
TAIAEAWAR

SEQ ID NO: 95784 - protein, 9 aa, Homo sapiens
  misc_feature: Table A; Target 95784; HLA-B*54:01; TUBA3C; ENSG00000198033; TAA
TAIAEAWAR

SEQ ID NO: 95785 - protein, 9 aa, Homo sapiens
  misc_feature: Table A; Target 95785; HLA-B*57:01; TUBA3C; ENSG00000198033; TAA
TAIAEAWAR

SEQ ID NO: 95786 - protein, 9 aa, Homo sapiens
  misc_feature: Table A; Target 95786; HLA-C*07:06; TUBA3C; ENSG00000198033; TAA
TAIAEAWAR

SEQ ID NO: 95787 - protein, 10 aa, Homo sapiens
  misc_feature: Table A; Target 95787; HLA-A*68:02; TUBA3C; ENSG00000198033; TAA
TAIAEAWARL

SEQ ID NO: 95788 - protein, 10 aa, Homo sapiens
  misc_feature: Table A; Target 95788; HLA-B*35:03; TUBA3C; ENSG00000198033; TAA
TAIAEAWARL

SEQ ID NO: 95789 - protein, 8 aa, Homo sapiens
  misc_feature: Table A; Target 95789; HLA-C*16:01; TUBA3C; ENSG00000198033; TAA
TASLRFDG

SEQ ID NO: 95790 - protein, 9 aa, Homo sapiens
  misc_feature: Table A; Target 95790; HLA-B*54:01; TUBA3C; ENSG00000198033; TAA
TASLRFDGA

SEQ ID NO: 95791 - protein, 9 aa, Homo sapiens
  misc_feature: Table A; Target 95791; HLA-C*16:01; TUBA3C; ENSG00000198033; TAA
TASLRFDGA

SEQ ID NO: 95792 - protein, 10 aa, Homo sapiens
  misc_feature: Table A; Target 95792; HLA-B*40:02; TUBA3C; ENSG00000198033; TAA
TASLRFDGAL

SEQ ID NO: 95793 - protein, 8 aa, Homo sapiens
  misc_feature: Table A; Target 95793; HLA-C*06:02; TUBA3C; ENSG00000198033; TAA
TAVVEPYN

SEQ ID NO: 95794 - protein, 8 aa, Homo sapiens
  misc_feature: Table A; Target 95794; HLA-C*07:01; TUBA3C; ENSG00000198033; TAA
TAVVEPYN

SEQ ID NO: 95795 - protein, 8 aa, Homo sapiens
  misc_feature: Table A; Target 95795; HLA-C*12:03; TUBA3C; ENSG00000198033; TAA
TAVVEPYN

SEQ ID NO: 95796 - protein, 9 aa, Homo sapiens
  misc_feature: Table A; Target 95796; HLA-B*39:01; TUBA3C; ENSG00000198033; TAA
TAVVEPYNS

SEQ ID NO: 95797 - protein, 10 aa, Homo sapiens
  misc_feature: Table A; Target 95797; HLA-A*25:01; TUBA3C; ENSG00000198033; TAA
TAVVEPYNSI

SEQ ID NO: 95798 - protein, 10 aa, Homo sapiens
  misc_feature: Table A; Target 95798; HLA-B*35:01; TUBA3C; ENSG00000198033; TAA
TAVVEPYNSI

SEQ ID NO: 95799 - protein, 10 aa, Homo sapiens
  misc_feature: Table A; Target 95799; HLA-B*35:03; TUBA3C; ENSG00000198033; TAA
TAVVEPYNSI

SEQ ID NO: 95800 - protein, 10 aa, Homo sapiens
  misc_feature: Table A; Target 95800; HLA-B*38:01; TUBA3C; ENSG00000198033; TAA
TAVVEPYNSI

SEQ ID NO: 95801 - protein, 10 aa, Homo sapiens
  misc_feature: Table A; Target 95801; HLA-B*39:01; TUBA3C; ENSG00000198033; TAA
TAVVEPYNSI

SEQ ID NO: 95802 - protein, 10 aa, Homo sapiens
  misc_feature: Table A; Target 95802; HLA-B*51:01; TUBA3C; ENSG00000198033; TAA
TAVVEPYNSI

SEQ ID NO: 95803 - protein, 10 aa, Homo sapiens
  misc_feature: Table A; Target 95803; HLA-B*54:01; TUBA3C; ENSG00000198033; TAA
TAVVEPYNSI

SEQ ID NO: 95804 - protein, 10 aa, Homo sapiens
  misc_feature: Table A; Target 95804; HLA-B*58:01; TUBA3C; ENSG00000198033; TAA
TAVVEPYNSI

SEQ ID NO: 95805 - protein, 10 aa, Homo sapiens
  misc_feature: Table A; Target 95805; HLA-C*03:03; TUBA3C; ENSG00000198033; TAA
TAVVEPYNSI

SEQ ID NO: 95806 - protein, 10 aa, Homo sapiens
  misc_feature: Table A; Target 95806; HLA-C*03:04; TUBA3C; ENSG00000198033; TAA
TAVVEPYNSI

SEQ ID NO: 95807 - protein, 10 aa, Homo sapiens
  misc_feature: Table A; Target 95807; HLA-C*05:01; TUBA3C; ENSG00000198033; TAA
TAVVEPYNSI

SEQ ID NO: 95808 - protein, 10 aa, Homo sapiens
  misc_feature: Table A; Target 95808; HLA-C*07:06; TUBA3C; ENSG00000198033; TAA
TAVVEPYNSI

SEQ ID NO: 95809 - protein, 10 aa, Homo sapiens
  misc_feature: Table A; Target 95809; HLA-C*16:04; TUBA3C; ENSG00000198033; TAA
TAVVEPYNSI

SEQ ID NO: 95810 - protein, 11 aa, Homo sapiens
  misc_feature: Table A; Target 95810; HLA-B*35:03; TUBA3C; ENSG00000198033; TAA
TAVVEPYNSIL

SEQ ID NO: 95811 - protein, 11 aa, Homo sapiens
  misc_feature: Table A; Target 95811; HLA-C*03:03; TUBA3C; ENSG00000198033; TAA
TAVVEPYNSIL

SEQ ID NO: 95812 - protein, 11 aa, Homo sapiens
  misc_feature: Table A; Target 95812; HLA-C*04:01; TUBA3C; ENSG00000198033; TAA
TAVVEPYNSIL

SEQ ID NO: 95813 - protein, 11 aa, Homo sapiens
  misc_feature: Table A; Target 95813; HLA-C*06:02; TUBA3C; ENSG00000198033; TAA
TAVVEPYNSIL

SEQ ID NO: 95814 - protein, 11 aa, Homo sapiens
  misc_feature: Table A; Target 95814; HLA-C*07:01; TUBA3C; ENSG00000198033; TAA
TAVVEPYNSIL

SEQ ID NO: 95815 - protein, 8 aa, Homo sapiens
  misc_feature: Table A; Target 95815; HLA-A*30:01; TUBA3C; ENSG00000198033; TAA
TEFQTNLV

SEQ ID NO: 95816 - protein, 8 aa, Homo sapiens
  misc_feature: Table A; Target 95816; HLA-B*13:02; TUBA3C; ENSG00000198033; TAA
TEFQTNLV

SEQ ID NO: 95817 - protein, 8 aa, Homo sapiens
  misc_feature: Table A; Target 95817; HLA-B*18:01; TUBA3C; ENSG00000198033; TAA
TEFQTNLV

SEQ ID NO: 95818 - protein, 8 aa, Homo sapiens
  misc_feature: Table A; Target 95818; HLA-B*37:01; TUBA3C; ENSG00000198033; TAA
TEFQTNLV

SEQ ID NO: 95819 - protein, 8 aa, Homo sapiens
  misc_feature: Table A; Target 95819; HLA-B*40:01; TUBA3C; ENSG00000198033; TAA
TEFQTNLV

SEQ ID NO: 95820 - protein, 8 aa, Homo sapiens
  misc_feature: Table A; Target 95820; HLA-B*40:02; TUBA3C; ENSG00000198033; TAA
TEFQTNLV

SEQ ID NO: 95821 - protein, 8 aa, Homo sapiens
  misc_feature: Table A; Target 95821; HLA-B*49:01; TUBA3C; ENSG00000198033; TAA
TEFQTNLV

SEQ ID NO: 95822 - protein, 8 aa, Homo sapiens
  misc_feature: Table A; Target 95822; HLA-B*51:01; TUBA3C; ENSG00000198033; TAA
TEFQTNLV

SEQ ID NO: 95823 - protein, 9 aa, Homo sapiens
  misc_feature: Table A; Target 95823; HLA-A*30:01; TUBA3C; ENSG00000198033; TAA
TEFQTNLVP

SEQ ID NO: 95824 - protein, 9 aa, Homo sapiens
  misc_feature: Table A; Target 95824; HLA-B*18:01; TUBA3C; ENSG00000198033; TAA
TEFQTNLVP

SEQ ID NO: 95825 - protein, 9 aa, Homo sapiens
  misc_feature: Table A; Target 95825; HLA-B*27:05; TUBA3C; ENSG00000198033; TAA
TEFQTNLVP

SEQ ID NO: 95826 - protein, 9 aa, Homo sapiens
  misc_feature: Table A; Target 95826; HLA-B*40:02; TUBA3C; ENSG00000198033; TAA
TEFQTNLVP

SEQ ID NO: 95827 - protein, 9 aa, Homo sapiens
  misc_feature: Table A; Target 95827; HLA-B*44:03; TUBA3C; ENSG00000198033; TAA
TEFQTNLVP

SEQ ID NO: 95828 - protein, 9 aa, Homo sapiens
  misc_feature: Table A; Target 95828; HLA-B*49:01; TUBA3C; ENSG00000198033; TAA
TEFQTNLVP

SEQ ID NO: 95829 - protein, 10 aa, Homo sapiens
  misc_feature: Table A; Target 95829; HLA-A*26:01; TUBA3C; ENSG00000198033; TAA
TEFQTNLVPY

SEQ ID NO: 95830 - protein, 10 aa, Homo sapiens
  misc_feature: Table A; Target 95830; HLA-A*30:01; TUBA3C; ENSG00000198033; TAA
TEFQTNLVPY

SEQ ID NO: 95831 - protein, 10 aa, Homo sapiens
  misc_feature: Table A; Target 95831; HLA-B*15:03; TUBA3C; ENSG00000198033; TAA
TEFQTNLVPY

SEQ ID NO: 95832 - protein, 10 aa, Homo sapiens
  misc_feature: Table A; Target 95832; HLA-B*18:01; TUBA3C; ENSG00000198033; TAA
TEFQTNLVPY

SEQ ID NO: 95833 - protein, 10 aa, Homo sapiens
  misc_feature: Table A; Target 95833; HLA-B*27:02; TUBA3C; ENSG00000198033; TAA
TEFQTNLVPY

SEQ ID NO: 95834 - protein, 10 aa, Homo sapiens
  misc_feature: Table A; Target 95834; HLA-B*35:01; TUBA3C; ENSG00000198033; TAA
TEFQTNLVPY

SEQ ID NO: 95835 - protein, 10 aa, Homo sapiens
  misc_feature: Table A; Target 95835; HLA-B*40:02; TUBA3C; ENSG00000198033; TAA
TEFQTNLVPY

SEQ ID NO: 95836 - protein, 10 aa, Homo sapiens
  misc_feature: Table A; Target 95836; HLA-B*44:02; TUBA3C; ENSG00000198033; TAA
TEFQTNLVPY

SEQ ID NO: 95837 - protein, 10 aa, Homo sapiens
  misc_feature: Table A; Target 95837; HLA-B*44:03; TUBA3C; ENSG00000198033; TAA
TEFQTNLVPY

SEQ ID NO: 95838 - protein, 10 aa, Homo sapiens
  misc_feature: Table A; Target 95838; HLA-B*49:01; TUBA3C; ENSG00000198033; TAA
TEFQTNLVPY

SEQ ID NO: 95839 - protein, 10 aa, Homo sapiens
  misc_feature: Table A; Target 95839; HLA-C*02:02; TUBA3C; ENSG00000198033; TAA
TEFQTNLVPY

SEQ ID NO: 95840 - protein, 10 aa, Homo sapiens
  misc_feature: Table A; Target 95840; HLA-C*04:01; TUBA3C; ENSG00000198033; TAA
TEFQTNLVPY

SEQ ID NO: 95841 - protein, 10 aa, Homo sapiens
  misc_feature: Table A; Target 95841; HLA-C*06:02; TUBA3C; ENSG00000198033; TAA
TEFQTNLVPY

SEQ ID NO: 95842 - protein, 10 aa, Homo sapiens
  misc_feature: Table A; Target 95842; HLA-C*07:01; TUBA3C; ENSG00000198033; TAA
TEFQTNLVPY

SEQ ID NO: 95843 - protein, 10 aa, Homo sapiens
  misc_feature: Table A; Target 95843; HLA-C*07:04; TUBA3C; ENSG00000198033; TAA
TEFQTNLVPY

SEQ ID NO: 95844 - protein, 10 aa, Homo sapiens
  misc_feature: Table A; Target 95844; HLA-C*12:03; TUBA3C; ENSG00000198033; TAA
TEFQTNLVPY

SEQ ID NO: 95845 - protein, 10 aa, Homo sapiens
  misc_feature: Table A; Target 95845; HLA-C*14:02; TUBA3C; ENSG00000198033; TAA
TEFQTNLVPY

SEQ ID NO: 95846 - protein, 10 aa, Homo sapiens
  misc_feature: Table A; Target 95846; HLA-C*16:04; TUBA3C; ENSG00000198033; TAA
TEFQTNLVPY

SEQ ID NO: 95847 - protein, 8 aa, Homo sapiens
  misc_feature: Table A; Target 95847; HLA-C*14:02; TUBA3C; ENSG00000198033; TAA
TFFSETGA

SEQ ID NO: 95848 - protein, 9 aa, Homo sapiens
  misc_feature: Table A; Target 95848; HLA-C*04:01; TUBA3C; ENSG00000198033; TAA
TFFSETGAG

SEQ ID NO: 95849 - protein, 9 aa, Homo sapiens
  misc_feature: Table A; Target 95849; HLA-C*06:02; TUBA3C; ENSG00000198033; TAA
TFFSETGAG

SEQ ID NO: 95850 - protein, 9 aa, Homo sapiens
  misc_feature: Table A; Target 95850; HLA-C*07:01; TUBA3C; ENSG00000198033; TAA
TFFSETGAG

SEQ ID NO: 95851 - protein, 9 aa, Homo sapiens
  misc_feature: Table A; Target 95851; HLA-C*14:02; TUBA3C; ENSG00000198033; TAA
TFFSETGAG

SEQ ID NO: 95852 - protein, 10 aa, Homo sapiens
  misc_feature: Table A; Target 95852; HLA-A*03:02; TUBA3C; ENSG00000198033; TAA
TFFSETGAGK

SEQ ID NO: 95853 - protein, 10 aa, Homo sapiens
  misc_feature: Table A; Target 95853; HLA-A*31:01; TUBA3C; ENSG00000198033; TAA
TFFSETGAGK

SEQ ID NO: 95854 - protein, 10 aa, Homo sapiens
  misc_feature: Table A; Target 95854; HLA-A*33:03; TUBA3C; ENSG00000198033; TAA
TFFSETGAGK

SEQ ID NO: 95855 - protein, 10 aa, Homo sapiens
  misc_feature: Table A; Target 95855; HLA-A*68:01; TUBA3C; ENSG00000198033; TAA
TFFSETGAGK

SEQ ID NO: 95856 - protein, 10 aa, Homo sapiens
  misc_feature: Table A; Target 95856; HLA-B*27:02; TUBA3C; ENSG00000198033; TAA
TFFSETGAGK

SEQ ID NO: 95857 - protein, 10 aa, Homo sapiens
  misc_feature: Table A; Target 95857; HLA-B*27:05; TUBA3C; ENSG00000198033; TAA
TFFSETGAGK

SEQ ID NO: 95858 - protein, 10 aa, Homo sapiens
  misc_feature: Table A; Target 95858; HLA-C*04:01; TUBA3C; ENSG00000198033; TAA
TFFSETGAGK

SEQ ID NO: 95859 - protein, 11 aa, Homo sapiens
  misc_feature: Table A; Target 95859; HLA-A*29:02; TUBA3C; ENSG00000198033; TAA
TFFSETGAGKH

SEQ ID NO: 95860 - protein, 11 aa, Homo sapiens
  misc_feature: Table A; Target 95860; HLA-C*06:02; TUBA3C; ENSG00000198033; TAA
TFFSETGAGKH

SEQ ID NO: 95861 - protein, 11 aa, Homo sapiens
  misc_feature: Table A; Target 95861; HLA-C*07:01; TUBA3C; ENSG00000198033; TAA
TFFSETGAGKH

SEQ ID NO: 95862 - protein, 8 aa, Homo sapiens
  misc_feature: Table A; Target 95862; HLA-C*06:02; TUBA3C; ENSG00000198033; TAA
TGAGKHVP

SEQ ID NO: 95863 - protein, 8 aa, Homo sapiens
  misc_feature: Table A; Target 95863; HLA-C*07:04; TUBA3C; ENSG00000198033; TAA
TGAGKHVP

SEQ ID NO: 95864 - protein, 8 aa, Homo sapiens
  misc_feature: Table A; Target 95864; HLA-C*16:01; TUBA3C; ENSG00000198033; TAA
TGAGKHVP

SEQ ID NO: 95865 - protein, 8 aa, Homo sapiens
  misc_feature: Table A; Target 95865; HLA-C*16:02; TUBA3C; ENSG00000198033; TAA
TGAGKHVP

SEQ ID NO: 95866 - protein, 9 aa, Homo sapiens
  misc_feature: Table A; Target 95866; HLA-A*11:01; TUBA3C; ENSG00000198033; TAA
TGAGKHVPR

SEQ ID NO: 95867 - protein, 9 aa, Homo sapiens
  misc_feature: Table A; Target 95867; HLA-A*31:01; TUBA3C; ENSG00000198033; TAA
TGAGKHVPR

SEQ ID NO: 95868 - protein, 9 aa, Homo sapiens
  misc_feature: Table A; Target 95868; HLA-A*33:01; TUBA3C; ENSG00000198033; TAA
TGAGKHVPR

SEQ ID NO: 95869 - protein, 9 aa, Homo sapiens
  misc_feature: Table A; Target 95869; HLA-A*33:03; TUBA3C; ENSG00000198033; TAA
TGAGKHVPR

SEQ ID NO: 95870 - protein, 9 aa, Homo sapiens
  misc_feature: Table A; Target 95870; HLA-A*68:01; TUBA3C; ENSG00000198033; TAA
TGAGKHVPR

SEQ ID NO: 95871 - protein, 9 aa, Homo sapiens
  misc_feature: Table A; Target 95871; HLA-B*27:05; TUBA3C; ENSG00000198033; TAA
TGAGKHVPR

SEQ ID NO: 95872 - protein, 9 aa, Homo sapiens
  misc_feature: Table A; Target 95872; HLA-C*04:01; TUBA3C; ENSG00000198033; TAA
TGAGKHVPR

SEQ ID NO: 95873 - protein, 9 aa, Homo sapiens
  misc_feature: Table A; Target 95873; HLA-C*06:02; TUBA3C; ENSG00000198033; TAA
TGAGKHVPR

SEQ ID NO: 95874 - protein, 9 aa, Homo sapiens
  misc_feature: Table A; Target 95874; HLA-C*07:01; TUBA3C; ENSG00000198033; TAA
TGAGKHVPR

SEQ ID NO: 95875 - protein, 9 aa, Homo sapiens
  misc_feature: Table A; Target 95875; HLA-C*07:02; TUBA3C; ENSG00000198033; TAA
TGAGKHVPR

SEQ ID NO: 95876 - protein, 9 aa, Homo sapiens
  misc_feature: Table A; Target 95876; HLA-C*07:04; TUBA3C; ENSG00000198033; TAA
TGAGKHVPR

SEQ ID NO: 95877 - protein, 9 aa, Homo sapiens
  misc_feature: Table A; Target 95877; HLA-C*07:06; TUBA3C; ENSG00000198033; TAA
TGAGKHVPR

SEQ ID NO: 95878 - protein, 9 aa, Homo sapiens
  misc_feature: Table A; Target 95878; HLA-C*16:01; TUBA3C; ENSG00000198033; TAA
TGAGKHVPR

SEQ ID NO: 95879 - protein, 9 aa, Homo sapiens
  misc_feature: Table A; Target 95879; HLA-A*23:01; TUBA3C; ENSG00000198033; TAA
TGFKVGINY

SEQ ID NO: 95880 - protein, 9 aa, Homo sapiens
  misc_feature: Table A; Target 95880; HLA-A*26:01; TUBA3C; ENSG00000198033; TAA
TGFKVGINY

SEQ ID NO: 95881 - protein, 9 aa, Homo sapiens
  misc_feature: Table A; Target 95881; HLA-A*29:02; TUBA3C; ENSG00000198033; TAA
TGFKVGINY

SEQ ID NO: 95882 - protein, 9 aa, Homo sapiens
  misc_feature: Table A; Target 95882; HLA-A*30:02; TUBA3C; ENSG00000198033; TAA
TGFKVGINY

SEQ ID NO: 95883 - protein, 9 aa, Homo sapiens
  misc_feature: Table A; Target 95883; HLA-A*31:01; TUBA3C; ENSG00000198033; TAA
TGFKVGINY

SEQ ID NO: 95884 - protein, 9 aa, Homo sapiens
  misc_feature: Table A; Target 95884; HLA-A*32:01; TUBA3C; ENSG00000198033; TAA
TGFKVGINY

SEQ ID NO: 95885 - protein, 9 aa, Homo sapiens
  misc_feature: Table A; Target 95885; HLA-B*15:01; TUBA3C; ENSG00000198033; TAA
TGFKVGINY

SEQ ID NO: 95886 - protein, 9 aa, Homo sapiens
  misc_feature: Table A; Target 95886; HLA-B*15:03; TUBA3C; ENSG00000198033; TAA
TGFKVGINY

SEQ ID NO: 95887 - protein, 9 aa, Homo sapiens
  misc_feature: Table A; Target 95887; HLA-B*18:01; TUBA3C; ENSG00000198033; TAA
TGFKVGINY

SEQ ID NO: 95888 - protein, 9 aa, Homo sapiens
  misc_feature: Table A; Target 95888; HLA-B*27:02; TUBA3C; ENSG00000198033; TAA
TGFKVGINY

SEQ ID NO: 95889 - protein, 9 aa, Homo sapiens
  misc_feature: Table A; Target 95889; HLA-B*27:05; TUBA3C; ENSG00000198033; TAA
TGFKVGINY

SEQ ID NO: 95890 - protein, 9 aa, Homo sapiens
  misc_feature: Table A; Target 95890; HLA-B*35:01; TUBA3C; ENSG00000198033; TAA
TGFKVGINY

SEQ ID NO: 95891 - protein, 9 aa, Homo sapiens
  misc_feature: Table A; Target 95891; HLA-B*44:02; TUBA3C; ENSG00000198033; TAA
TGFKVGINY

SEQ ID NO: 95892 - protein, 9 aa, Homo sapiens
  misc_feature: Table A; Target 95892; HLA-B*44:03; TUBA3C; ENSG00000198033; TAA
TGFKVGINY

SEQ ID NO: 95893 - protein, 9 aa, Homo sapiens
  misc_feature: Table A; Target 95893; HLA-B*46:01; TUBA3C; ENSG00000198033; TAA
TGFKVGINY

SEQ ID NO: 95894 - protein, 9 aa, Homo sapiens
  misc_feature: Table A; Target 95894; HLA-B*57:01; TUBA3C; ENSG00000198033; TAA
TGFKVGINY

SEQ ID NO: 95895 - protein, 9 aa, Homo sapiens
  misc_feature: Table A; Target 95895; HLA-B*58:01; TUBA3C; ENSG00000198033; TAA
TGFKVGINY

SEQ ID NO: 95896 - protein, 9 aa, Homo sapiens
  misc_feature: Table A; Target 95896; HLA-C*02:02; TUBA3C; ENSG00000198033; TAA
TGFKVGINY

SEQ ID NO: 95897 - protein, 9 aa, Homo sapiens
  misc_feature: Table A; Target 95897; HLA-C*03:03; TUBA3C; ENSG00000198033; TAA
TGFKVGINY

SEQ ID NO: 95898 - protein, 9 aa, Homo sapiens
  misc_feature: Table A; Target 95898; HLA-C*04:01; TUBA3C; ENSG00000198033; TAA
TGFKVGINY

SEQ ID NO: 95899 - protein, 9 aa, Homo sapiens
  misc_feature: Table A; Target 95899; HLA-C*06:02; TUBA3C; ENSG00000198033; TAA
TGFKVGINY

SEQ ID NO: 95900 - protein, 9 aa, Homo sapiens
  misc_feature: Table A; Target 95900; HLA-C*07:01; TUBA3C; ENSG00000198033; TAA
TGFKVGINY

SEQ ID NO: 95901 - protein, 9 aa, Homo sapiens
  misc_feature: Table A; Target 95901; HLA-C*07:02; TUBA3C; ENSG00000198033; TAA
TGFKVGINY

SEQ ID NO: 95902 - protein, 9 aa, Homo sapiens
  misc_feature: Table A; Target 95902; HLA-C*07:04; TUBA3C; ENSG00000198033; TAA
TGFKVGINY

SEQ ID NO: 95903 - protein, 9 aa, Homo sapiens
  misc_feature: Table A; Target 95903; HLA-C*07:06; TUBA3C; ENSG00000198033; TAA
TGFKVGINY

SEQ ID NO: 95904 - protein, 9 aa, Homo sapiens
  misc_feature: Table A; Target 95904; HLA-C*12:03; TUBA3C; ENSG00000198033; TAA
TGFKVGINY

SEQ ID NO: 95905 - protein, 9 aa, Homo sapiens
  misc_feature: Table A; Target 95905; HLA-C*16:01; TUBA3C; ENSG00000198033; TAA
TGFKVGINY

SEQ ID NO: 95906 - protein, 9 aa, Homo sapiens
  misc_feature: Table A; Target 95906; HLA-C*16:02; TUBA3C; ENSG00000198033; TAA
TGFKVGINY

SEQ ID NO: 95907 - protein, 9 aa, Homo sapiens
  misc_feature: Table A; Target 95907; HLA-C*16:04; TUBA3C; ENSG00000198033; TAA
TGFKVGINY

SEQ ID NO: 95908 - protein, 10 aa, Homo sapiens
  misc_feature: Table A; Target 95908; HLA-A*29:02; TUBA3C; ENSG00000198033; TAA
TGKEDAANNY

SEQ ID NO: 95909 - protein, 10 aa, Homo sapiens
  misc_feature: Table A; Target 95909; HLA-A*30:02; TUBA3C; ENSG00000198033; TAA
TGKEDAANNY

SEQ ID NO: 95910 - protein, 10 aa, Homo sapiens
  misc_feature: Table A; Target 95910; HLA-B*15:01; TUBA3C; ENSG00000198033; TAA
TGKEDAANNY

SEQ ID NO: 95911 - protein, 10 aa, Homo sapiens
  misc_feature: Table A; Target 95911; HLA-B*15:03; TUBA3C; ENSG00000198033; TAA
TGKEDAANNY

SEQ ID NO: 95912 - protein, 10 aa, Homo sapiens
  misc_feature: Table A; Target 95912; HLA-B*27:02; TUBA3C; ENSG00000198033; TAA
TGKEDAANNY

SEQ ID NO: 95913 - protein, 10 aa, Homo sapiens
  misc_feature: Table A; Target 95913; HLA-B*35:01; TUBA3C; ENSG00000198033; TAA
TGKEDAANNY

SEQ ID NO: 95914 - protein, 10 aa, Homo sapiens
  misc_feature: Table A; Target 95914; HLA-B*39:01; TUBA3C; ENSG00000198033; TAA
TGKEDAANNY

SEQ ID NO: 95915 - protein, 10 aa, Homo sapiens
  misc_feature: Table A; Target 95915; HLA-B*46:01; TUBA3C; ENSG00000198033; TAA
TGKEDAANNY

SEQ ID NO: 95916 - protein, 10 aa, Homo sapiens
  misc_feature: Table A; Target 95916; HLA-C*01:02; TUBA3C; ENSG00000198033; TAA
TGKEDAANNY

SEQ ID NO: 95917 - protein, 10 aa, Homo sapiens
  misc_feature: Table A; Target 95917; HLA-C*04:01; TUBA3C; ENSG00000198033; TAA
TGKEDAANNY

SEQ ID NO: 95918 - protein, 10 aa, Homo sapiens
  misc_feature: Table A; Target 95918; HLA-C*06:02; TUBA3C; ENSG00000198033; TAA
TGKEDAANNY

SEQ ID NO: 95919 - protein, 10 aa, Homo sapiens
  misc_feature: Table A; Target 95919; HLA-C*07:01; TUBA3C; ENSG00000198033; TAA
TGKEDAANNY

SEQ ID NO: 95920 - protein, 10 aa, Homo sapiens
  misc_feature: Table A; Target 95920; HLA-C*07:02; TUBA3C; ENSG00000198033; TAA
TGKEDAANNY

SEQ ID NO: 95921 - protein, 10 aa, Homo sapiens
  misc_feature: Table A; Target 95921; HLA-C*07:04; TUBA3C; ENSG00000198033; TAA
TGKEDAANNY

SEQ ID NO: 95922 - protein, 10 aa, Homo sapiens
  misc_feature: Table A; Target 95922; HLA-C*12:03; TUBA3C; ENSG00000198033; TAA
TGKEDAANNY

SEQ ID NO: 95923 - protein, 10 aa, Homo sapiens
  misc_feature: Table A; Target 95923; HLA-C*14:02; TUBA3C; ENSG00000198033; TAA
TGKEDAANNY

SEQ ID NO: 95924 - protein, 10 aa, Homo sapiens
  misc_feature: Table A; Target 95924; HLA-C*16:02; TUBA3C; ENSG00000198033; TAA
TGKEDAANNY

SEQ ID NO: 95925 - protein, 10 aa, Homo sapiens
  misc_feature: Table A; Target 95925; HLA-C*16:04; TUBA3C; ENSG00000198033; TAA
TGKEDAANNY

SEQ ID NO: 95926 - protein, 11 aa, Homo sapiens
  misc_feature: Table A; Target 95926; HLA-C*04:01; TUBA3C; ENSG00000198033; TAA
TGKEDAANNYA

SEQ ID NO: 95927 - protein, 11 aa, Homo sapiens
  misc_feature: Table A; Target 95927; HLA-C*06:02; TUBA3C; ENSG00000198033; TAA
TGKEDAANNYA

SEQ ID NO: 95928 - protein, 8 aa, Homo sapiens
  misc_feature: Table A; Target 95928; HLA-A*23:01; TUBA3C; ENSG00000198033; TAA
TGLQGFLI

SEQ ID NO: 95929 - protein, 8 aa, Homo sapiens
  misc_feature: Table A; Target 95929; HLA-B*51:01; TUBA3C; ENSG00000198033; TAA
TGLQGFLI

SEQ ID NO: 95930 - protein, 9 aa, Homo sapiens
  misc_feature: Table A; Target 95930; HLA-A*23:01; TUBA3C; ENSG00000198033; TAA
TGLQGFLIF

SEQ ID NO: 95931 - protein, 9 aa, Homo sapiens
  misc_feature: Table A; Target 95931; HLA-A*24:02; TUBA3C; ENSG00000198033; TAA
TGLQGFLIF

SEQ ID NO: 95932 - protein, 9 aa, Homo sapiens
  misc_feature: Table A; Target 95932; HLA-B*35:01; TUBA3C; ENSG00000198033; TAA
TGLQGFLIF

SEQ ID NO: 95933 - protein, 9 aa, Homo sapiens
  misc_feature: Table A; Target 95933; HLA-B*57:01; TUBA3C; ENSG00000198033; TAA
TGLQGFLIF

SEQ ID NO: 95934 - protein, 9 aa, Homo sapiens
  misc_feature: Table A; Target 95934; HLA-C*04:01; TUBA3C; ENSG00000198033; TAA
TGLQGFLIF

SEQ ID NO: 95935 - protein, 9 aa, Homo sapiens
  misc_feature: Table A; Target 95935; HLA-C*07:01; TUBA3C; ENSG00000198033; TAA
TGLQGFLIF

SEQ ID NO: 95936 - protein, 8 aa, Homo sapiens
  misc_feature: Table A; Target 95936; HLA-C*01:02; TUBA3C; ENSG00000198033; TAA
TGSGFASL

SEQ ID NO: 95937 - protein, 8 aa, Homo sapiens
  misc_feature: Table A; Target 95937; HLA-C*03:04; TUBA3C; ENSG00000198033; TAA
TGSGFASL

SEQ ID NO: 95938 - protein, 9 aa, Homo sapiens
  misc_feature: Table A; Target 95938; HLA-A*30:01; TUBA3C; ENSG00000198033; TAA
TGSGFASLL

SEQ ID NO: 95939 - protein, 9 aa, Homo sapiens
  misc_feature: Table A; Target 95939; HLA-A*68:02; TUBA3C; ENSG00000198033; TAA
TGSGFASLL

SEQ ID NO: 95940 - protein, 9 aa, Homo sapiens
  misc_feature: Table A; Target 95940; HLA-B*07:02; TUBA3C; ENSG00000198033; TAA
TGSGFASLL

SEQ ID NO: 95941 - protein, 9 aa, Homo sapiens
  misc_feature: Table A; Target 95941; HLA-B*13:02; TUBA3C; ENSG00000198033; TAA
TGSGFASLL

SEQ ID NO: 95942 - protein, 9 aa, Homo sapiens
  misc_feature: Table A; Target 95942; HLA-B*27:05; TUBA3C; ENSG00000198033; TAA
TGSGFASLL

SEQ ID NO: 95943 - protein, 9 aa, Homo sapiens
  misc_feature: Table A; Target 95943; HLA-B*35:01; TUBA3C; ENSG00000198033; TAA
TGSGFASLL

SEQ ID NO: 95944 - protein, 9 aa, Homo sapiens
  misc_feature: Table A; Target 95944; HLA-B*35:03; TUBA3C; ENSG00000198033; TAA
TGSGFASLL

SEQ ID NO: 95945 - protein, 9 aa, Homo sapiens
  misc_feature: Table A; Target 95945; HLA-B*38:01; TUBA3C; ENSG00000198033; TAA
TGSGFASLL

SEQ ID NO: 95946 - protein, 9 aa, Homo sapiens
  misc_feature: Table A; Target 95946; HLA-B*39:01; TUBA3C; ENSG00000198033; TAA
TGSGFASLL

SEQ ID NO: 95947 - protein, 9 aa, Homo sapiens
  misc_feature: Table A; Target 95947; HLA-B*40:01; TUBA3C; ENSG00000198033; TAA
TGSGFASLL

SEQ ID NO: 95948 - protein, 9 aa, Homo sapiens
  misc_feature: Table A; Target 95948; HLA-B*40:02; TUBA3C; ENSG00000198033; TAA
TGSGFASLL

SEQ ID NO: 95949 - protein, 9 aa, Homo sapiens
  misc_feature: Table A; Target 95949; HLA-C*01:02; TUBA3C; ENSG00000198033; TAA
TGSGFASLL

SEQ ID NO: 95950 - protein, 9 aa, Homo sapiens
  misc_feature: Table A; Target 95950; HLA-C*02:02; TUBA3C; ENSG00000198033; TAA
TGSGFASLL

SEQ ID NO: 95951 - protein, 9 aa, Homo sapiens
  misc_feature: Table A; Target 95951; HLA-C*03:03; TUBA3C; ENSG00000198033; TAA
TGSGFASLL

SEQ ID NO: 95952 - protein, 9 aa, Homo sapiens
  misc_feature: Table A; Target 95952; HLA-C*03:04; TUBA3C; ENSG00000198033; TAA
TGSGFASLL

SEQ ID NO: 95953 - protein, 9 aa, Homo sapiens
  misc_feature: Table A; Target 95953; HLA-C*04:01; TUBA3C; ENSG00000198033; TAA
TGSGFASLL

SEQ ID NO: 95954 - protein, 9 aa, Homo sapiens
  misc_feature: Table A; Target 95954; HLA-C*05:01; TUBA3C; ENSG00000198033; TAA
TGSGFASLL

SEQ ID NO: 95955 - protein, 9 aa, Homo sapiens
  misc_feature: Table A; Target 95955; HLA-C*06:02; TUBA3C; ENSG00000198033; TAA
TGSGFASLL

SEQ ID NO: 95956 - protein, 9 aa, Homo sapiens
  misc_feature: Table A; Target 95956; HLA-C*07:01; TUBA3C; ENSG00000198033; TAA
TGSGFASLL

SEQ ID NO: 95957 - protein, 9 aa, Homo sapiens
  misc_feature: Table A; Target 95957; HLA-C*07:02; TUBA3C; ENSG00000198033; TAA
TGSGFASLL

SEQ ID NO: 95958 - protein, 9 aa, Homo sapiens
  misc_feature: Table A; Target 95958; HLA-C*07:04; TUBA3C; ENSG00000198033; TAA
TGSGFASLL

SEQ ID NO: 95959 - protein, 9 aa, Homo sapiens
  misc_feature: Table A; Target 95959; HLA-C*07:06; TUBA3C; ENSG00000198033; TAA
TGSGFASLL

SEQ ID NO: 95960 - protein, 9 aa, Homo sapiens
  misc_feature: Table A; Target 95960; HLA-C*12:03; TUBA3C; ENSG00000198033; TAA
TGSGFASLL

SEQ ID NO: 95961 - protein, 9 aa, Homo sapiens
  misc_feature: Table A; Target 95961; HLA-C*14:02; TUBA3C; ENSG00000198033; TAA
TGSGFASLL

SEQ ID NO: 95962 - protein, 9 aa, Homo sapiens
  misc_feature: Table A; Target 95962; HLA-C*16:01; TUBA3C; ENSG00000198033; TAA
TGSGFASLL

SEQ ID NO: 95963 - protein, 9 aa, Homo sapiens
  misc_feature: Table A; Target 95963; HLA-C*16:02; TUBA3C; ENSG00000198033; TAA
TGSGFASLL

SEQ ID NO: 95964 - protein, 10 aa, Homo sapiens
  misc_feature: Table A; Target 95964; HLA-C*04:01; TUBA3C; ENSG00000198033; TAA
TGSGFASLLM

SEQ ID NO: 95965 - protein, 10 aa, Homo sapiens
  misc_feature: Table A; Target 95965; HLA-C*06:02; TUBA3C; ENSG00000198033; TAA
TGSGFASLLM

SEQ ID NO: 95966 - protein, 10 aa, Homo sapiens
  misc_feature: Table A; Target 95966; HLA-C*07:01; TUBA3C; ENSG00000198033; TAA
TGSGFASLLM

SEQ ID NO: 95967 - protein, 10 aa, Homo sapiens
  misc_feature: Table A; Target 95967; HLA-C*07:02; TUBA3C; ENSG00000198033; TAA
TGSGFASLLM

SEQ ID NO: 95968 - protein, 10 aa, Homo sapiens
  misc_feature: Table A; Target 95968; HLA-C*07:04; TUBA3C; ENSG00000198033; TAA
TGSGFASLLM

SEQ ID NO: 95969 - protein, 8 aa, Homo sapiens
  misc_feature: Table A; Target 95969; HLA-B*07:02; TUBA3C; ENSG00000198033; TAA
TGTYRQLF

SEQ ID NO: 95970 - protein, 8 aa, Homo sapiens
  misc_feature: Table A; Target 95970; HLA-B*08:01; TUBA3C; ENSG00000198033; TAA
TGTYRQLF

SEQ ID NO: 95971 - protein, 8 aa, Homo sapiens
  misc_feature: Table A; Target 95971; HLA-C*04:01; TUBA3C; ENSG00000198033; TAA
TGTYRQLF

SEQ ID NO: 95972 - protein, 8 aa, Homo sapiens
  misc_feature: Table A; Target 95972; HLA-C*07:01; TUBA3C; ENSG00000198033; TAA
TGTYRQLF

SEQ ID NO: 95973 - protein, 8 aa, Homo sapiens
  misc_feature: Table A; Target 95973; HLA-C*07:04; TUBA3C; ENSG00000198033; TAA
TGTYRQLF

SEQ ID NO: 95974 - protein, 8 aa, Homo sapiens
  misc_feature: Table A; Target 95974; HLA-C*16:01; TUBA3C; ENSG00000198033; TAA
TGTYRQLF

SEQ ID NO: 95975 - protein, 9 aa, Homo sapiens
  misc_feature: Table A; Target 95975; HLA-B*15:01; TUBA3C; ENSG00000198033; TAA
TIGGGDDSF

SEQ ID NO: 95976 - protein, 9 aa, Homo sapiens
  misc_feature: Table A; Target 95976; HLA-B*27:05; TUBA3C; ENSG00000198033; TAA
TIGGGDDSF

SEQ ID NO: 95977 - protein, 9 aa, Homo sapiens
  misc_feature: Table A; Target 95977; HLA-B*35:01; TUBA3C; ENSG00000198033; TAA
TIGGGDDSF

SEQ ID NO: 95978 - protein, 9 aa, Homo sapiens
  misc_feature: Table A; Target 95978; HLA-B*35:03; TUBA3C; ENSG00000198033; TAA
TIGGGDDSF

SEQ ID NO: 95979 - protein, 9 aa, Homo sapiens
  misc_feature: Table A; Target 95979; HLA-B*38:01; TUBA3C; ENSG00000198033; TAA
TIGGGDDSF

SEQ ID NO: 95980 - protein, 9 aa, Homo sapiens
  misc_feature: Table A; Target 95980; HLA-B*39:01; TUBA3C; ENSG00000198033; TAA
TIGGGDDSF

SEQ ID NO: 95981 - protein, 9 aa, Homo sapiens
  misc_feature: Table A; Target 95981; HLA-B*55:01; TUBA3C; ENSG00000198033; TAA
TIGGGDDSF

SEQ ID NO: 95982 - protein, 9 aa, Homo sapiens
  misc_feature: Table A; Target 95982; HLA-C*01:02; TUBA3C; ENSG00000198033; TAA
TIGGGDDSF

SEQ ID NO: 95983 - protein, 9 aa, Homo sapiens
  misc_feature: Table A; Target 95983; HLA-C*03:03; TUBA3C; ENSG00000198033; TAA
TIGGGDDSF

SEQ ID NO: 95984 - protein, 9 aa, Homo sapiens
  misc_feature: Table A; Target 95984; HLA-C*04:01; TUBA3C; ENSG00000198033; TAA
TIGGGDDSF

SEQ ID NO: 95985 - protein, 9 aa, Homo sapiens
  misc_feature: Table A; Target 95985; HLA-C*05:01; TUBA3C; ENSG00000198033; TAA
TIGGGDDSF

SEQ ID NO: 95986 - protein, 9 aa, Homo sapiens
  misc_feature: Table A; Target 95986; HLA-C*07:04; TUBA3C; ENSG00000198033; TAA
TIGGGDDSF

SEQ ID NO: 95987 - protein, 9 aa, Homo sapiens
  misc_feature: Table A; Target 95987; HLA-C*14:02; TUBA3C; ENSG00000198033; TAA
TIGGGDDSF

SEQ ID NO: 95988 - protein, 9 aa, Homo sapiens
  misc_feature: Table A; Target 95988; HLA-C*07:04; TUBA3C; ENSG00000198033; TAA
TIGKEIVDL

SEQ ID NO: 95989 - protein, 10 aa, Homo sapiens
  misc_feature: Table A; Target 95989; HLA-A*68:02; TUBA3C; ENSG00000198033; TAA
TIGKEIVDLV

SEQ ID NO: 95990 - protein, 8 aa, Homo sapiens
  misc_feature: Table A; Target 95990; HLA-B*08:01; TUBA3C; ENSG00000198033; TAA
TIKTKRTI

SEQ ID NO: 95991 - protein, 9 aa, Homo sapiens
  misc_feature: Table A; Target 95991; HLA-B*35:03; TUBA3C; ENSG00000198033; TAA
TLEHSDCAF

SEQ ID NO: 95992 - protein, 9 aa, Homo sapiens
  misc_feature: Table A; Target 95992; HLA-C*03:03; TUBA3C; ENSG00000198033; TAA
TLEHSDCAF

SEQ ID NO: 95993 - protein, 9 aa, Homo sapiens
  misc_feature: Table A; Target 95993; HLA-C*04:01; TUBA3C; ENSG00000198033; TAA
TLEHSDCAF

SEQ ID NO: 95994 - protein, 9 aa, Homo sapiens
  misc_feature: Table A; Target 95994; HLA-C*07:04; TUBA3C; ENSG00000198033; TAA
TLEHSDCAF

SEQ ID NO: 95995 - protein, 10 aa, Homo sapiens
  misc_feature: Table A; Target 95995; HLA-C*07:01; TUBA3C; ENSG00000198033; TAA
TLEHSDCAFM

SEQ ID NO: 95996 - protein, 11 aa, Homo sapiens
  misc_feature: Table A; Target 95996; HLA-B*39:01; TUBA3C; ENSG00000198033; TAA
TNACFEPANQM

SEQ ID NO: 95997 - protein, 9 aa, Homo sapiens
  misc_feature: Table A; Target 95997; HLA-A*33:01; TUBA3C; ENSG00000198033; TAA
TNLNRLIGQ

SEQ ID NO: 95998 - protein, 8 aa, Homo sapiens
  misc_feature: Table A; Target 95998; HLA-A*31:01; TUBA3C; ENSG00000198033; TAA
TNLVPYPR

SEQ ID NO: 95999 - protein, 8 aa, Homo sapiens
  misc_feature: Table A; Target 95999; HLA-A*33:01; TUBA3C; ENSG00000198033; TAA
TNLVPYPR

SEQ ID NO: 96000 - protein, 8 aa, Homo sapiens
  misc_feature: Table A; Target 96000; HLA-A*33:03; TUBA3C; ENSG00000198033; TAA
TNLVPYPR

SEQ ID NO: 96001 - protein, 9 aa, Homo sapiens
  misc_feature: Table A; Target 96001; HLA-B*51:01; TUBA3C; ENSG00000198033; TAA
TNLVPYPRI

SEQ ID NO: 96002 - protein, 8 aa, Homo sapiens
  misc_feature: Table A; Target 96002; HLA-A*25:01; TUBA3C; ENSG00000198033; TAA
TTAIAEAW

SEQ ID NO: 96003 - protein, 8 aa, Homo sapiens
  misc_feature: Table A; Target 96003; HLA-A*32:01; TUBA3C; ENSG00000198033; TAA
TTAIAEAW

SEQ ID NO: 96004 - protein, 8 aa, Homo sapiens
  misc_feature: Table A; Target 96004; HLA-A*33:03; TUBA3C; ENSG00000198033; TAA
TTAIAEAW

SEQ ID NO: 96005 - protein, 8 aa, Homo sapiens
  misc_feature: Table A; Target 96005; HLA-B*18:01; TUBA3C; ENSG00000198033; TAA
TTAIAEAW

SEQ ID NO: 96006 - protein, 8 aa, Homo sapiens
  misc_feature: Table A; Target 96006; HLA-B*27:02; TUBA3C; ENSG00000198033; TAA
TTAIAEAW

SEQ ID NO: 96007 - protein, 8 aa, Homo sapiens
  misc_feature: Table A; Target 96007; HLA-B*27:05; TUBA3C; ENSG00000198033; TAA
TTAIAEAW

SEQ ID NO: 96008 - protein, 8 aa, Homo sapiens
  misc_feature: Table A; Target 96008; HLA-B*44:02; TUBA3C; ENSG00000198033; TAA
TTAIAEAW

SEQ ID NO: 96009 - protein, 8 aa, Homo sapiens
  misc_feature: Table A; Target 96009; HLA-B*57:01; TUBA3C; ENSG00000198033; TAA
TTAIAEAW

SEQ ID NO: 96010 - protein, 8 aa, Homo sapiens
  misc_feature: Table A; Target 96010; HLA-B*58:01; TUBA3C; ENSG00000198033; TAA
TTAIAEAW

SEQ ID NO: 96011 - protein, 8 aa, Homo sapiens
  misc_feature: Table A; Target 96011; HLA-C*07:01; TUBA3C; ENSG00000198033; TAA
TTAIAEAW

SEQ ID NO: 96012 - protein, 8 aa, Homo sapiens
  misc_feature: Table A; Target 96012; HLA-C*12:03; TUBA3C; ENSG00000198033; TAA
TTAIAEAW

SEQ ID NO: 96013 - protein, 8 aa, Homo sapiens
  misc_feature: Table A; Target 96013; HLA-C*16:04; TUBA3C; ENSG00000198033; TAA
TTAIAEAW

SEQ ID NO: 96014 - protein, 10 aa, Homo sapiens
  misc_feature: Table A; Target 96014; HLA-A*31:01; TUBA3C; ENSG00000198033; TAA
TTAIAEAWAR

SEQ ID NO: 96015 - protein, 10 aa, Homo sapiens
  misc_feature: Table A; Target 96015; HLA-A*33:03; TUBA3C; ENSG00000198033; TAA
TTAIAEAWAR

SEQ ID NO: 96016 - protein, 10 aa, Homo sapiens
  misc_feature: Table A; Target 96016; HLA-A*68:01; TUBA3C; ENSG00000198033; TAA
TTAIAEAWAR

SEQ ID NO: 96017 - protein, 10 aa, Homo sapiens
  misc_feature: Table A; Target 96017; HLA-B*27:02; TUBA3C; ENSG00000198033; TAA
TTAIAEAWAR

SEQ ID NO: 96018 - protein, 10 aa, Homo sapiens
  misc_feature: Table A; Target 96018; HLA-C*07:06; TUBA3C; ENSG00000198033; TAA
TTAIAEAWAR

SEQ ID NO: 96019 - protein, 11 aa, Homo sapiens
  misc_feature: Table A; Target 96019; HLA-A*68:02; TUBA3C; ENSG00000198033; TAA
TTAIAEAWARL

SEQ ID NO: 96020 - protein, 11 aa, Homo sapiens
  misc_feature: Table A; Target 96020; HLA-C*06:02; TUBA3C; ENSG00000198033; TAA
TTAIAEAWARL

SEQ ID NO: 96021 - protein, 8 aa, Homo sapiens
  misc_feature: Table A; Target 96021; HLA-C*03:03; TUBA3C; ENSG00000198033; TAA
TTHTTLEH

SEQ ID NO: 96022 - protein, 8 aa, Homo sapiens
  misc_feature: Table A; Target 96022; HLA-C*04:01; TUBA3C; ENSG00000198033; TAA
TTHTTLEH

SEQ ID NO: 96023 - protein, 8 aa, Homo sapiens
  misc_feature: Table A; Target 96023; HLA-C*06:02; TUBA3C; ENSG00000198033; TAA
TTHTTLEH

SEQ ID NO: 96024 - protein, 8 aa, Homo sapiens
  misc_feature: Table A; Target 96024; HLA-C*07:01; TUBA3C; ENSG00000198033; TAA
TTHTTLEH

SEQ ID NO: 96025 - protein, 8 aa, Homo sapiens
  misc_feature: Table A; Target 96025; HLA-C*12:03; TUBA3C; ENSG00000198033; TAA
TTLEHSDC

SEQ ID NO: 96026 - protein, 10 aa, Homo sapiens
  misc_feature: Table A; Target 96026; HLA-A*23:01; TUBA3C; ENSG00000198033; TAA
TTLEHSDCAF

SEQ ID NO: 96027 - protein, 10 aa, Homo sapiens
  misc_feature: Table A; Target 96027; HLA-A*25:01; TUBA3C; ENSG00000198033; TAA
TTLEHSDCAF

SEQ ID NO: 96028 - protein, 10 aa, Homo sapiens
  misc_feature: Table A; Target 96028; HLA-A*32:01; TUBA3C; ENSG00000198033; TAA
TTLEHSDCAF

SEQ ID NO: 96029 - protein, 10 aa, Homo sapiens
  misc_feature: Table A; Target 96029; HLA-B*35:01; TUBA3C; ENSG00000198033; TAA
TTLEHSDCAF

SEQ ID NO: 96030 - protein, 10 aa, Homo sapiens
  misc_feature: Table A; Target 96030; HLA-B*35:03; TUBA3C; ENSG00000198033; TAA
TTLEHSDCAF

SEQ ID NO: 96031 - protein, 10 aa, Homo sapiens
  misc_feature: Table A; Target 96031; HLA-B*46:01; TUBA3C; ENSG00000198033; TAA
TTLEHSDCAF

SEQ ID NO: 96032 - protein, 10 aa, Homo sapiens
  misc_feature: Table A; Target 96032; HLA-B*57:01; TUBA3C; ENSG00000198033; TAA
TTLEHSDCAF

SEQ ID NO: 96033 - protein, 10 aa, Homo sapiens
  misc_feature: Table A; Target 96033; HLA-B*58:01; TUBA3C; ENSG00000198033; TAA
TTLEHSDCAF

SEQ ID NO: 96034 - protein, 10 aa, Homo sapiens
  misc_feature: Table A; Target 96034; HLA-C*04:01; TUBA3C; ENSG00000198033; TAA
TTLEHSDCAF

SEQ ID NO: 96035 - protein, 10 aa, Homo sapiens
  misc_feature: Table A; Target 96035; HLA-C*06:02; TUBA3C; ENSG00000198033; TAA
TTLEHSDCAF

SEQ ID NO: 96036 - protein, 10 aa, Homo sapiens
  misc_feature: Table A; Target 96036; HLA-C*07:01; TUBA3C; ENSG00000198033; TAA
TTLEHSDCAF

SEQ ID NO: 96037 - protein, 10 aa, Homo sapiens
  misc_feature: Table A; Target 96037; HLA-C*07:04; TUBA3C; ENSG00000198033; TAA
TTLEHSDCAF

SEQ ID NO: 96038 - protein, 9 aa, Homo sapiens
  misc_feature: Table A; Target 96038; HLA-C*06:02; TUBA3C; ENSG00000198033; TAA
TVVDEVRTG

SEQ ID NO: 96039 - protein, 10 aa, Homo sapiens
  misc_feature: Table A; Target 96039; HLA-A*32:01; TUBA3C; ENSG00000198033; TAA
TVVDEVRTGT

SEQ ID NO: 96040 - protein, 10 aa, Homo sapiens
  misc_feature: Table A; Target 96040; HLA-B*58:01; TUBA3C; ENSG00000198033; TAA
TVVDEVRTGT

SEQ ID NO: 96041 - protein, 11 aa, Homo sapiens
  misc_feature: Table A; Target 96041; HLA-A*01:01; TUBA3C; ENSG00000198033; TAA
TVVDEVRTGTY

SEQ ID NO: 96042 - protein, 11 aa, Homo sapiens
  misc_feature: Table A; Target 96042; HLA-A*11:01; TUBA3C; ENSG00000198033; TAA
TVVDEVRTGTY

SEQ ID NO: 96043 - protein, 11 aa, Homo sapiens
  misc_feature: Table A; Target 96043; HLA-A*25:01; TUBA3C; ENSG00000198033; TAA
TVVDEVRTGTY

SEQ ID NO: 96044 - protein, 11 aa, Homo sapiens
  misc_feature: Table A; Target 96044; HLA-A*26:01; TUBA3C; ENSG00000198033; TAA
TVVDEVRTGTY

SEQ ID NO: 96045 - protein, 11 aa, Homo sapiens
  misc_feature: Table A; Target 96045; HLA-A*29:02; TUBA3C; ENSG00000198033; TAA
TVVDEVRTGTY

SEQ ID NO: 96046 - protein, 11 aa, Homo sapiens
  misc_feature: Table A; Target 96046; HLA-A*30:02; TUBA3C; ENSG00000198033; TAA
TVVDEVRTGTY

SEQ ID NO: 96047 - protein, 11 aa, Homo sapiens
  misc_feature: Table A; Target 96047; HLA-A*32:01; TUBA3C; ENSG00000198033; TAA
TVVDEVRTGTY

SEQ ID NO: 96048 - protein, 11 aa, Homo sapiens
  misc_feature: Table A; Target 96048; HLA-A*33:03; TUBA3C; ENSG00000198033; TAA
TVVDEVRTGTY

SEQ ID NO: 96049 - protein, 11 aa, Homo sapiens
  misc_feature: Table A; Target 96049; HLA-A*68:01; TUBA3C; ENSG00000198033; TAA
TVVDEVRTGTY

SEQ ID NO: 96050 - protein, 11 aa, Homo sapiens
  misc_feature: Table A; Target 96050; HLA-B*15:01; TUBA3C; ENSG00000198033; TAA
TVVDEVRTGTY

SEQ ID NO: 96051 - protein, 11 aa, Homo sapiens
  misc_feature: Table A; Target 96051; HLA-B*15:03; TUBA3C; ENSG00000198033; TAA
TVVDEVRTGTY

SEQ ID NO: 96052 - protein, 11 aa, Homo sapiens
  misc_feature: Table A; Target 96052; HLA-B*27:02; TUBA3C; ENSG00000198033; TAA
TVVDEVRTGTY

SEQ ID NO: 96053 - protein, 11 aa, Homo sapiens
  misc_feature: Table A; Target 96053; HLA-B*27:05; TUBA3C; ENSG00000198033; TAA
TVVDEVRTGTY

SEQ ID NO: 96054 - protein, 11 aa, Homo sapiens
  misc_feature: Table A; Target 96054; HLA-B*35:01; TUBA3C; ENSG00000198033; TAA
TVVDEVRTGTY

SEQ ID NO: 96055 - protein, 11 aa, Homo sapiens
  misc_feature: Table A; Target 96055; HLA-B*39:01; TUBA3C; ENSG00000198033; TAA
TVVDEVRTGTY

SEQ ID NO: 96056 - protein, 11 aa, Homo sapiens
  misc_feature: Table A; Target 96056; HLA-B*44:02; TUBA3C; ENSG00000198033; TAA
TVVDEVRTGTY

SEQ ID NO: 96057 - protein, 11 aa, Homo sapiens
  misc_feature: Table A; Target 96057; HLA-B*44:03; TUBA3C; ENSG00000198033; TAA
TVVDEVRTGTY

SEQ ID NO: 96058 - protein, 11 aa, Homo sapiens
  misc_feature: Table A; Target 96058; HLA-B*46:01; TUBA3C; ENSG00000198033; TAA
TVVDEVRTGTY

SEQ ID NO: 96059 - protein, 11 aa, Homo sapiens
  misc_feature: Table A; Target 96059; HLA-B*55:01; TUBA3C; ENSG00000198033; TAA
TVVDEVRTGTY

SEQ ID NO: 96060 - protein, 11 aa, Homo sapiens
  misc_feature: Table A; Target 96060; HLA-B*57:01; TUBA3C; ENSG00000198033; TAA
TVVDEVRTGTY

SEQ ID NO: 96061 - protein, 11 aa, Homo sapiens
  misc_feature: Table A; Target 96061; HLA-B*58:01; TUBA3C; ENSG00000198033; TAA
TVVDEVRTGTY

SEQ ID NO: 96062 - protein, 11 aa, Homo sapiens
  misc_feature: Table A; Target 96062; HLA-C*01:02; TUBA3C; ENSG00000198033; TAA
TVVDEVRTGTY

SEQ ID NO: 96063 - protein, 11 aa, Homo sapiens
  misc_feature: Table A; Target 96063; HLA-C*02:02; TUBA3C; ENSG00000198033; TAA
TVVDEVRTGTY

SEQ ID NO: 96064 - protein, 11 aa, Homo sapiens
  misc_feature: Table A; Target 96064; HLA-C*03:03; TUBA3C; ENSG00000198033; TAA
TVVDEVRTGTY

SEQ ID NO: 96065 - protein, 11 aa, Homo sapiens
  misc_feature: Table A; Target 96065; HLA-C*04:01; TUBA3C; ENSG00000198033; TAA
TVVDEVRTGTY

SEQ ID NO: 96066 - protein, 11 aa, Homo sapiens
  misc_feature: Table A; Target 96066; HLA-C*06:02; TUBA3C; ENSG00000198033; TAA
TVVDEVRTGTY

SEQ ID NO: 96067 - protein, 11 aa, Homo sapiens
  misc_feature: Table A; Target 96067; HLA-C*07:01; TUBA3C; ENSG00000198033; TAA
TVVDEVRTGTY

SEQ ID NO: 96068 - protein, 11 aa, Homo sapiens
  misc_feature: Table A; Target 96068; HLA-C*07:04; TUBA3C; ENSG00000198033; TAA
TVVDEVRTGTY

SEQ ID NO: 96069 - protein, 11 aa, Homo sapiens
  misc_feature: Table A; Target 96069; HLA-C*07:06; TUBA3C; ENSG00000198033; TAA
TVVDEVRTGTY

SEQ ID NO: 96070 - protein, 11 aa, Homo sapiens
  misc_feature: Table A; Target 96070; HLA-C*12:03; TUBA3C; ENSG00000198033; TAA
TVVDEVRTGTY

SEQ ID NO: 96071 - protein, 11 aa, Homo sapiens
  misc_feature: Table A; Target 96071; HLA-C*16:01; TUBA3C; ENSG00000198033; TAA
TVVDEVRTGTY

SEQ ID NO: 96072 - protein, 11 aa, Homo sapiens
  misc_feature: Table A; Target 96072; HLA-C*16:02; TUBA3C; ENSG00000198033; TAA
TVVDEVRTGTY

SEQ ID NO: 96073 - protein, 11 aa, Homo sapiens
  misc_feature: Table A; Target 96073; HLA-C*16:04; TUBA3C; ENSG00000198033; TAA
TVVDEVRTGTY

SEQ ID NO: 96074 - protein, 8 aa, Homo sapiens
  misc_feature: Table A; Target 96074; HLA-B*39:01; TUBA3C; ENSG00000198033; TAA
TVVPGGDL

SEQ ID NO: 96075 - protein, 8 aa, Homo sapiens
  misc_feature: Table A; Target 96075; HLA-C*01:02; TUBA3C; ENSG00000198033; TAA
TVVPGGDL

SEQ ID NO: 96076 - protein, 8 aa, Homo sapiens
  misc_feature: Table A; Target 96076; HLA-C*03:03; TUBA3C; ENSG00000198033; TAA
TVVPGGDL

SEQ ID NO: 96077 - protein, 8 aa, Homo sapiens
  misc_feature: Table A; Target 96077; HLA-C*03:04; TUBA3C; ENSG00000198033; TAA
TVVPGGDL

SEQ ID NO: 96078 - protein, 8 aa, Homo sapiens
  misc_feature: Table A; Target 96078; HLA-C*04:01; TUBA3C; ENSG00000198033; TAA
TVVPGGDL

SEQ ID NO: 96079 - protein, 9 aa, Homo sapiens
  misc_feature: Table A; Target 96079; HLA-B*39:01; TUBA3C; ENSG00000198033; TAA
TVVPGGDLA

SEQ ID NO: 96080 - protein, 10 aa, Homo sapiens
  misc_feature: Table A; Target 96080; HLA-A*03:01; TUBA3C; ENSG00000198033; TAA
TVVPGGDLAK

SEQ ID NO: 96081 - protein, 10 aa, Homo sapiens
  misc_feature: Table A; Target 96081; HLA-A*03:02; TUBA3C; ENSG00000198033; TAA
TVVPGGDLAK

SEQ ID NO: 96082 - protein, 10 aa, Homo sapiens
  misc_feature: Table A; Target 96082; HLA-A*11:01; TUBA3C; ENSG00000198033; TAA
TVVPGGDLAK

SEQ ID NO: 96083 - protein, 10 aa, Homo sapiens
  misc_feature: Table A; Target 96083; HLA-A*68:01; TUBA3C; ENSG00000198033; TAA
TVVPGGDLAK

SEQ ID NO: 96084 - protein, 10 aa, Homo sapiens
  misc_feature: Table A; Target 96084; HLA-B*27:05; TUBA3C; ENSG00000198033; TAA
TVVPGGDLAK

SEQ ID NO: 96085 - protein, 10 aa, Homo sapiens
  misc_feature: Table A; Target 96085; HLA-C*03:03; TUBA3C; ENSG00000198033; TAA
TVVPGGDLAK

SEQ ID NO: 96086 - protein, 10 aa, Homo sapiens
  misc_feature: Table A; Target 96086; HLA-C*04:01; TUBA3C; ENSG00000198033; TAA
TVVPGGDLAK

SEQ ID NO: 96087 - protein, 10 aa, Homo sapiens
  misc_feature: Table A; Target 96087; HLA-C*07:06; TUBA3C; ENSG00000198033; TAA
TVVPGGDLAK

SEQ ID NO: 96088 - protein, 11 aa, Homo sapiens
  misc_feature: Table A; Target 96088; HLA-A*02:01; TUBA3C; ENSG00000198033; TAA
TVVPGGDLAKV

SEQ ID NO: 96089 - protein, 11 aa, Homo sapiens
  misc_feature: Table A; Target 96089; HLA-A*02:03; TUBA3C; ENSG00000198033; TAA
TVVPGGDLAKV

SEQ ID NO: 96090 - protein, 11 aa, Homo sapiens
  misc_feature: Table A; Target 96090; HLA-A*02:04; TUBA3C; ENSG00000198033; TAA
TVVPGGDLAKV

SEQ ID NO: 96091 - protein, 11 aa, Homo sapiens
  misc_feature: Table A; Target 96091; HLA-A*02:07; TUBA3C; ENSG00000198033; TAA
TVVPGGDLAKV

SEQ ID NO: 96092 - protein, 11 aa, Homo sapiens
  misc_feature: Table A; Target 96092; HLA-A*25:01; TUBA3C; ENSG00000198033; TAA
TVVPGGDLAKV

SEQ ID NO: 96093 - protein, 11 aa, Homo sapiens
  misc_feature: Table A; Target 96093; HLA-A*26:01; TUBA3C; ENSG00000198033; TAA
TVVPGGDLAKV

SEQ ID NO: 96094 - protein, 11 aa, Homo sapiens
  misc_feature: Table A; Target 96094; HLA-A*68:01; TUBA3C; ENSG00000198033; TAA
TVVPGGDLAKV

SEQ ID NO: 96095 - protein, 11 aa, Homo sapiens
  misc_feature: Table A; Target 96095; HLA-A*68:02; TUBA3C; ENSG00000198033; TAA
TVVPGGDLAKV

SEQ ID NO: 96096 - protein, 11 aa, Homo sapiens
  misc_feature: Table A; Target 96096; HLA-B*58:01; TUBA3C; ENSG00000198033; TAA
TVVPGGDLAKV

SEQ ID NO: 96097 - protein, 11 aa, Homo sapiens
  misc_feature: Table A; Target 96097; HLA-C*06:02; TUBA3C; ENSG00000198033; TAA
TVVPGGDLAKV

SEQ ID NO: 96098 - protein, 8 aa, Homo sapiens
  misc_feature: Table A; Target 96098; HLA-B*40:02; TUBA3C; ENSG00000198033; TAA
TYAPVISA

SEQ ID NO: 96099 - protein, 8 aa, Homo sapiens
  misc_feature: Table A; Target 96099; HLA-B*54:01; TUBA3C; ENSG00000198033; TAA
TYAPVISA

SEQ ID NO: 96100 - protein, 8 aa, Homo sapiens
  misc_feature: Table A; Target 96100; HLA-B*56:01; TUBA3C; ENSG00000198033; TAA
TYAPVISA

SEQ ID NO: 96101 - protein, 8 aa, Homo sapiens
  misc_feature: Table A; Target 96101; HLA-C*04:01; TUBA3C; ENSG00000198033; TAA
TYAPVISA

SEQ ID NO: 96102 - protein, 8 aa, Homo sapiens
  misc_feature: Table A; Target 96102; HLA-C*06:02; TUBA3C; ENSG00000198033; TAA
TYAPVISA

SEQ ID NO: 96103 - protein, 8 aa, Homo sapiens
  misc_feature: Table A; Target 96103; HLA-C*07:02; TUBA3C; ENSG00000198033; TAA
TYAPVISA

SEQ ID NO: 96104 - protein, 8 aa, Homo sapiens
  misc_feature: Table A; Target 96104; HLA-C*14:02; TUBA3C; ENSG00000198033; TAA
TYAPVISA

SEQ ID NO: 96105 - protein, 9 aa, Homo sapiens
  misc_feature: Table A; Target 96105; HLA-A*24:02; TUBA3C; ENSG00000198033; TAA
TYAPVISAE

SEQ ID NO: 96106 - protein, 9 aa, Homo sapiens
  misc_feature: Table A; Target 96106; HLA-A*31:01; TUBA3C; ENSG00000198033; TAA
TYAPVISAE

SEQ ID NO: 96107 - protein, 9 aa, Homo sapiens
  misc_feature: Table A; Target 96107; HLA-A*33:03; TUBA3C; ENSG00000198033; TAA
TYAPVISAE

SEQ ID NO: 96108 - protein, 9 aa, Homo sapiens
  misc_feature: Table A; Target 96108; HLA-B*27:05; TUBA3C; ENSG00000198033; TAA
TYAPVISAE

SEQ ID NO: 96109 - protein, 9 aa, Homo sapiens
  misc_feature: Table A; Target 96109; HLA-C*04:01; TUBA3C; ENSG00000198033; TAA
TYAPVISAE

SEQ ID NO: 96110 - protein, 9 aa, Homo sapiens
  misc_feature: Table A; Target 96110; HLA-C*06:02; TUBA3C; ENSG00000198033; TAA
TYAPVISAE

SEQ ID NO: 96111 - protein, 9 aa, Homo sapiens
  misc_feature: Table A; Target 96111; HLA-C*07:01; TUBA3C; ENSG00000198033; TAA
TYAPVISAE

SEQ ID NO: 96112 - protein, 9 aa, Homo sapiens
  misc_feature: Table A; Target 96112; HLA-C*07:02; TUBA3C; ENSG00000198033; TAA
TYAPVISAE

SEQ ID NO: 96113 - protein, 9 aa, Homo sapiens
  misc_feature: Table A; Target 96113; HLA-C*14:02; TUBA3C; ENSG00000198033; TAA
TYAPVISAE

SEQ ID NO: 96114 - protein, 10 aa, Homo sapiens
  misc_feature: Table A; Target 96114; HLA-A*03:02; TUBA3C; ENSG00000198033; TAA
TYAPVISAEK

SEQ ID NO: 96115 - protein, 10 aa, Homo sapiens
  misc_feature: Table A; Target 96115; HLA-A*11:01; TUBA3C; ENSG00000198033; TAA
TYAPVISAEK

SEQ ID NO: 96116 - protein, 10 aa, Homo sapiens
  misc_feature: Table A; Target 96116; HLA-A*23:01; TUBA3C; ENSG00000198033; TAA
TYAPVISAEK

SEQ ID NO: 96117 - protein, 10 aa, Homo sapiens
  misc_feature: Table A; Target 96117; HLA-A*24:02; TUBA3C; ENSG00000198033; TAA
TYAPVISAEK

SEQ ID NO: 96118 - protein, 10 aa, Homo sapiens
  misc_feature: Table A; Target 96118; HLA-A*29:02; TUBA3C; ENSG00000198033; TAA
TYAPVISAEK

SEQ ID NO: 96119 - protein, 10 aa, Homo sapiens
  misc_feature: Table A; Target 96119; HLA-A*30:02; TUBA3C; ENSG00000198033; TAA
TYAPVISAEK

SEQ ID NO: 96120 - protein, 10 aa, Homo sapiens
  misc_feature: Table A; Target 96120; HLA-A*31:01; TUBA3C; ENSG00000198033; TAA
TYAPVISAEK

SEQ ID NO: 96121 - protein, 10 aa, Homo sapiens
  misc_feature: Table A; Target 96121; HLA-A*33:01; TUBA3C; ENSG00000198033; TAA
TYAPVISAEK

SEQ ID NO: 96122 - protein, 10 aa, Homo sapiens
  misc_feature: Table A; Target 96122; HLA-A*33:03; TUBA3C; ENSG00000198033; TAA
TYAPVISAEK

SEQ ID NO: 96123 - protein, 10 aa, Homo sapiens
  misc_feature: Table A; Target 96123; HLA-A*68:01; TUBA3C; ENSG00000198033; TAA
TYAPVISAEK

SEQ ID NO: 96124 - protein, 10 aa, Homo sapiens
  misc_feature: Table A; Target 96124; HLA-A*68:02; TUBA3C; ENSG00000198033; TAA
TYAPVISAEK

SEQ ID NO: 96125 - protein, 10 aa, Homo sapiens
  misc_feature: Table A; Target 96125; HLA-B*07:02; TUBA3C; ENSG00000198033; TAA
TYAPVISAEK

SEQ ID NO: 96126 - protein, 10 aa, Homo sapiens
  misc_feature: Table A; Target 96126; HLA-B*27:02; TUBA3C; ENSG00000198033; TAA
TYAPVISAEK

SEQ ID NO: 96127 - protein, 10 aa, Homo sapiens
  misc_feature: Table A; Target 96127; HLA-B*27:05; TUBA3C; ENSG00000198033; TAA
TYAPVISAEK

SEQ ID NO: 96128 - protein, 10 aa, Homo sapiens
  misc_feature: Table A; Target 96128; HLA-B*35:01; TUBA3C; ENSG00000198033; TAA
TYAPVISAEK

SEQ ID NO: 96129 - protein, 10 aa, Homo sapiens
  misc_feature: Table A; Target 96129; HLA-B*35:03; TUBA3C; ENSG00000198033; TAA
TYAPVISAEK

SEQ ID NO: 96130 - protein, 10 aa, Homo sapiens
  misc_feature: Table A; Target 96130; HLA-B*38:01; TUBA3C; ENSG00000198033; TAA
TYAPVISAEK

SEQ ID NO: 96131 - protein, 10 aa, Homo sapiens
  misc_feature: Table A; Target 96131; HLA-B*57:01; TUBA3C; ENSG00000198033; TAA
TYAPVISAEK

SEQ ID NO: 96132 - protein, 10 aa, Homo sapiens
  misc_feature: Table A; Target 96132; HLA-C*01:02; TUBA3C; ENSG00000198033; TAA
TYAPVISAEK

SEQ ID NO: 96133 - protein, 10 aa, Homo sapiens
  misc_feature: Table A; Target 96133; HLA-C*04:01; TUBA3C; ENSG00000198033; TAA
TYAPVISAEK

SEQ ID NO: 96134 - protein, 10 aa, Homo sapiens
  misc_feature: Table A; Target 96134; HLA-C*06:02; TUBA3C; ENSG00000198033; TAA
TYAPVISAEK

SEQ ID NO: 96135 - protein, 10 aa, Homo sapiens
  misc_feature: Table A; Target 96135; HLA-C*07:01; TUBA3C; ENSG00000198033; TAA
TYAPVISAEK

SEQ ID NO: 96136 - protein, 10 aa, Homo sapiens
  misc_feature: Table A; Target 96136; HLA-C*07:02; TUBA3C; ENSG00000198033; TAA
TYAPVISAEK

SEQ ID NO: 96137 - protein, 10 aa, Homo sapiens
  misc_feature: Table A; Target 96137; HLA-C*07:06; TUBA3C; ENSG00000198033; TAA
TYAPVISAEK

SEQ ID NO: 96138 - protein, 10 aa, Homo sapiens
  misc_feature: Table A; Target 96138; HLA-C*14:02; TUBA3C; ENSG00000198033; TAA
TYAPVISAEK

SEQ ID NO: 96139 - protein, 10 aa, Homo sapiens
  misc_feature: Table A; Target 96139; HLA-C*16:02; TUBA3C; ENSG00000198033; TAA
TYAPVISAEK

SEQ ID NO: 96140 - protein, 10 aa, Homo sapiens
  misc_feature: Table A; Target 96140; HLA-C*16:04; TUBA3C; ENSG00000198033; TAA
TYAPVISAEK

SEQ ID NO: 96141 - protein, 11 aa, Homo sapiens
  misc_feature: Table A; Target 96141; HLA-A*24:02; TUBA3C; ENSG00000198033; TAA
TYAPVISAEKA

SEQ ID NO: 96142 - protein, 11 aa, Homo sapiens
  misc_feature: Table A; Target 96142; HLA-C*04:01; TUBA3C; ENSG00000198033; TAA
TYAPVISAEKA

SEQ ID NO: 96143 - protein, 11 aa, Homo sapiens
  misc_feature: Table A; Target 96143; HLA-C*06:02; TUBA3C; ENSG00000198033; TAA
TYAPVISAEKA

SEQ ID NO: 96144 - protein, 8 aa, Homo sapiens
  misc_feature: Table A; Target 96144; HLA-A*23:01; TUBA3C; ENSG00000198033; TAA
TYTNLNRL

SEQ ID NO: 96145 - protein, 8 aa, Homo sapiens
  misc_feature: Table A; Target 96145; HLA-A*24:02; TUBA3C; ENSG00000198033; TAA
TYTNLNRL

SEQ ID NO: 96146 - protein, 8 aa, Homo sapiens
  misc_feature: Table A; Target 96146; HLA-C*07:02; TUBA3C; ENSG00000198033; TAA
TYTNLNRL

SEQ ID NO: 96147 - protein, 8 aa, Homo sapiens
  misc_feature: Table A; Target 96147; HLA-C*14:02; TUBA3C; ENSG00000198033; TAA
TYTNLNRL

SEQ ID NO: 96148 - protein, 8 aa, Homo sapiens
  misc_feature: Table A; Target 96148; HLA-C*16:01; TUBA3C; ENSG00000198033; TAA
TYTNLNRL

SEQ ID NO: 96149 - protein, 8 aa, Homo sapiens
  misc_feature: Table A; Target 96149; HLA-C*16:02; TUBA3C; ENSG00000198033; TAA
TYTNLNRL

SEQ ID NO: 96150 - protein, 9 aa, Homo sapiens
  misc_feature: Table A; Target 96150; HLA-A*23:01; TUBA3C; ENSG00000198033; TAA
TYTNLNRLI

SEQ ID NO: 96151 - protein, 9 aa, Homo sapiens
  misc_feature: Table A; Target 96151; HLA-A*24:02; TUBA3C; ENSG00000198033; TAA
TYTNLNRLI

SEQ ID NO: 96152 - protein, 9 aa, Homo sapiens
  misc_feature: Table A; Target 96152; HLA-B*07:02; TUBA3C; ENSG00000198033; TAA
TYTNLNRLI

SEQ ID NO: 96153 - protein, 9 aa, Homo sapiens
  misc_feature: Table A; Target 96153; HLA-C*06:02; TUBA3C; ENSG00000198033; TAA
TYTNLNRLI

SEQ ID NO: 96154 - protein, 9 aa, Homo sapiens
  misc_feature: Table A; Target 96154; HLA-C*07:01; TUBA3C; ENSG00000198033; TAA
TYTNLNRLI

SEQ ID NO: 96155 - protein, 9 aa, Homo sapiens
  misc_feature: Table A; Target 96155; HLA-C*16:01; TUBA3C; ENSG00000198033; TAA
TYTNLNRLI

SEQ ID NO: 96156 - protein, 9 aa, Homo sapiens
  misc_feature: Table A; Target 96156; HLA-C*16:02; TUBA3C; ENSG00000198033; TAA
TYTNLNRLI

SEQ ID NO: 96157 - protein, 9 aa, Homo sapiens
  misc_feature: Table A; Target 96157; HLA-A*23:01; TUBA3C; ENSG00000198033; TAA
VAEITNACF

SEQ ID NO: 96158 - protein, 9 aa, Homo sapiens
  misc_feature: Table A; Target 96158; HLA-A*24:02; TUBA3C; ENSG00000198033; TAA
VAEITNACF

SEQ ID NO: 96159 - protein, 9 aa, Homo sapiens
  misc_feature: Table A; Target 96159; HLA-A*32:01; TUBA3C; ENSG00000198033; TAA
VAEITNACF

SEQ ID NO: 96160 - protein, 9 aa, Homo sapiens
  misc_feature: Table A; Target 96160; HLA-B*15:01; TUBA3C; ENSG00000198033; TAA
VAEITNACF

SEQ ID NO: 96161 - protein, 9 aa, Homo sapiens
  misc_feature: Table A; Target 96161; HLA-B*15:03; TUBA3C; ENSG00000198033; TAA
VAEITNACF

SEQ ID NO: 96162 - protein, 9 aa, Homo sapiens
  misc_feature: Table A; Target 96162; HLA-B*27:02; TUBA3C; ENSG00000198033; TAA
VAEITNACF

SEQ ID NO: 96163 - protein, 9 aa, Homo sapiens
  misc_feature: Table A; Target 96163; HLA-B*27:05; TUBA3C; ENSG00000198033; TAA
VAEITNACF

SEQ ID NO: 96164 - protein, 9 aa, Homo sapiens
  misc_feature: Table A; Target 96164; HLA-B*35:01; TUBA3C; ENSG00000198033; TAA
VAEITNACF

SEQ ID NO: 96165 - protein, 9 aa, Homo sapiens
  misc_feature: Table A; Target 96165; HLA-B*35:03; TUBA3C; ENSG00000198033; TAA
VAEITNACF

SEQ ID NO: 96166 - protein, 9 aa, Homo sapiens
  misc_feature: Table A; Target 96166; HLA-B*38:01; TUBA3C; ENSG00000198033; TAA
VAEITNACF

SEQ ID NO: 96167 - protein, 9 aa, Homo sapiens
  misc_feature: Table A; Target 96167; HLA-B*39:01; TUBA3C; ENSG00000198033; TAA
VAEITNACF

SEQ ID NO: 96168 - protein, 9 aa, Homo sapiens
  misc_feature: Table A; Target 96168; HLA-B*46:01; TUBA3C; ENSG00000198033; TAA
VAEITNACF

SEQ ID NO: 96169 - protein, 9 aa, Homo sapiens
  misc_feature: Table A; Target 96169; HLA-B*55:01; TUBA3C; ENSG00000198033; TAA
VAEITNACF

SEQ ID NO: 96170 - protein, 9 aa, Homo sapiens
  misc_feature: Table A; Target 96170; HLA-B*57:01; TUBA3C; ENSG00000198033; TAA
VAEITNACF

SEQ ID NO: 96171 - protein, 9 aa, Homo sapiens
  misc_feature: Table A; Target 96171; HLA-B*58:01; TUBA3C; ENSG00000198033; TAA
VAEITNACF

SEQ ID NO: 96172 - protein, 9 aa, Homo sapiens
  misc_feature: Table A; Target 96172; HLA-C*01:02; TUBA3C; ENSG00000198033; TAA
VAEITNACF

SEQ ID NO: 96173 - protein, 9 aa, Homo sapiens
  misc_feature: Table A; Target 96173; HLA-C*03:03; TUBA3C; ENSG00000198033; TAA
VAEITNACF

SEQ ID NO: 96174 - protein, 9 aa, Homo sapiens
  misc_feature: Table A; Target 96174; HLA-C*03:04; TUBA3C; ENSG00000198033; TAA
VAEITNACF

SEQ ID NO: 96175 - protein, 9 aa, Homo sapiens
  misc_feature: Table A; Target 96175; HLA-C*04:01; TUBA3C; ENSG00000198033; TAA
VAEITNACF

SEQ ID NO: 96176 - protein, 9 aa, Homo sapiens
  misc_feature: Table A; Target 96176; HLA-C*05:01; TUBA3C; ENSG00000198033; TAA
VAEITNACF

SEQ ID NO: 96177 - protein, 9 aa, Homo sapiens
  misc_feature: Table A; Target 96177; HLA-C*06:02; TUBA3C; ENSG00000198033; TAA
VAEITNACF

SEQ ID NO: 96178 - protein, 9 aa, Homo sapiens
  misc_feature: Table A; Target 96178; HLA-C*07:01; TUBA3C; ENSG00000198033; TAA
VAEITNACF

SEQ ID NO: 96179 - protein, 9 aa, Homo sapiens
  misc_feature: Table A; Target 96179; HLA-C*07:02; TUBA3C; ENSG00000198033; TAA
VAEITNACF

SEQ ID NO: 96180 - protein, 9 aa, Homo sapiens
  misc_feature: Table A; Target 96180; HLA-C*07:04; TUBA3C; ENSG00000198033; TAA
VAEITNACF

SEQ ID NO: 96181 - protein, 9 aa, Homo sapiens
  misc_feature: Table A; Target 96181; HLA-C*14:02; TUBA3C; ENSG00000198033; TAA
VAEITNACF

SEQ ID NO: 96182 - protein, 9 aa, Homo sapiens
  misc_feature: Table A; Target 96182; HLA-C*16:01; TUBA3C; ENSG00000198033; TAA
VAEITNACF

SEQ ID NO: 96183 - protein, 9 aa, Homo sapiens
  misc_feature: Table A; Target 96183; HLA-C*16:02; TUBA3C; ENSG00000198033; TAA
VAEITNACF

SEQ ID NO: 96184 - protein, 9 aa, Homo sapiens
  misc_feature: Table A; Target 96184; HLA-C*16:04; TUBA3C; ENSG00000198033; TAA
VAEITNACF

SEQ ID NO: 96185 - protein, 10 aa, Homo sapiens
  misc_feature: Table A; Target 96185; HLA-C*07:01; TUBA3C; ENSG00000198033; TAA
VAEITNACFE

SEQ ID NO: 96186 - protein, 9 aa, Homo sapiens
  misc_feature: Table A; Target 96186; HLA-B*54:01; TUBA3C; ENSG00000198033; TAA
VCMLSNTTA

SEQ ID NO: 96187 - protein, 10 aa, Homo sapiens
  misc_feature: Table A; Target 96187; HLA-B*07:02; TUBA3C; ENSG00000198033; TAA
VCMLSNTTAI

SEQ ID NO: 96188 - protein, 10 aa, Homo sapiens
  misc_feature: Table A; Target 96188; HLA-C*07:01; TUBA3C; ENSG00000198033; TAA
VCMLSNTTAI

SEQ ID NO: 96189 - protein, 10 aa, Homo sapiens
  misc_feature: Table A; Target 96189; HLA-C*07:02; TUBA3C; ENSG00000198033; TAA
VCMLSNTTAI

SEQ ID NO: 96190 - protein, 9 aa, Homo sapiens
  misc_feature: Table A; Target 96190; HLA-A*01:01; TUBA3C; ENSG00000198033; TAA
VDEVRTGTY

SEQ ID NO: 96191 - protein, 9 aa, Homo sapiens
  misc_feature: Table A; Target 96191; HLA-A*30:02; TUBA3C; ENSG00000198033; TAA
VDEVRTGTY

SEQ ID NO: 96192 - protein, 9 aa, Homo sapiens
  misc_feature: Table A; Target 96192; HLA-A*32:01; TUBA3C; ENSG00000198033; TAA
VDEVRTGTY

SEQ ID NO: 96193 - protein, 9 aa, Homo sapiens
  misc_feature: Table A; Target 96193; HLA-B*15:01; TUBA3C; ENSG00000198033; TAA
VDEVRTGTY

SEQ ID NO: 96194 - protein, 9 aa, Homo sapiens
  misc_feature: Table A; Target 96194; HLA-B*15:03; TUBA3C; ENSG00000198033; TAA
VDEVRTGTY

SEQ ID NO: 96195 - protein, 9 aa, Homo sapiens
  misc_feature: Table A; Target 96195; HLA-B*18:01; TUBA3C; ENSG00000198033; TAA
VDEVRTGTY

SEQ ID NO: 96196 - protein, 9 aa, Homo sapiens
  misc_feature: Table A; Target 96196; HLA-B*27:02; TUBA3C; ENSG00000198033; TAA
VDEVRTGTY

SEQ ID NO: 96197 - protein, 9 aa, Homo sapiens
  misc_feature: Table A; Target 96197; HLA-B*37:01; TUBA3C; ENSG00000198033; TAA
VDEVRTGTY

SEQ ID NO: 96198 - protein, 9 aa, Homo sapiens
  misc_feature: Table A; Target 96198; HLA-B*44:02; TUBA3C; ENSG00000198033; TAA
VDEVRTGTY

SEQ ID NO: 96199 - protein, 9 aa, Homo sapiens
  misc_feature: Table A; Target 96199; HLA-B*44:03; TUBA3C; ENSG00000198033; TAA
VDEVRTGTY

SEQ ID NO: 96200 - protein, 9 aa, Homo sapiens
  misc_feature: Table A; Target 96200; HLA-B*46:01; TUBA3C; ENSG00000198033; TAA
VDEVRTGTY

SEQ ID NO: 96201 - protein, 9 aa, Homo sapiens
  misc_feature: Table A; Target 96201; HLA-C*04:01; TUBA3C; ENSG00000198033; TAA
VDEVRTGTY

SEQ ID NO: 96202 - protein, 9 aa, Homo sapiens
  misc_feature: Table A; Target 96202; HLA-C*06:02; TUBA3C; ENSG00000198033; TAA
VDEVRTGTY

SEQ ID NO: 96203 - protein, 9 aa, Homo sapiens
  misc_feature: Table A; Target 96203; HLA-C*07:01; TUBA3C; ENSG00000198033; TAA
VDEVRTGTY

SEQ ID NO: 96204 - protein, 9 aa, Homo sapiens
  misc_feature: Table A; Target 96204; HLA-C*07:02; TUBA3C; ENSG00000198033; TAA
VDEVRTGTY

SEQ ID NO: 96205 - protein, 9 aa, Homo sapiens
  misc_feature: Table A; Target 96205; HLA-C*07:04; TUBA3C; ENSG00000198033; TAA
VDEVRTGTY

SEQ ID NO: 96206 - protein, 9 aa, Homo sapiens
  misc_feature: Table A; Target 96206; HLA-C*12:03; TUBA3C; ENSG00000198033; TAA
VDEVRTGTY

SEQ ID NO: 96207 - protein, 9 aa, Homo sapiens
  misc_feature: Table A; Target 96207; HLA-C*16:01; TUBA3C; ENSG00000198033; TAA
VDEVRTGTY

SEQ ID NO: 96208 - protein, 9 aa, Homo sapiens
  misc_feature: Table A; Target 96208; HLA-C*16:02; TUBA3C; ENSG00000198033; TAA
VDEVRTGTY

SEQ ID NO: 96209 - protein, 9 aa, Homo sapiens
  misc_feature: Table A; Target 96209; HLA-C*16:04; TUBA3C; ENSG00000198033; TAA
VDEVRTGTY

SEQ ID NO: 96210 - protein, 10 aa, Homo sapiens
  misc_feature: Table A; Target 96210; HLA-A*31:01; TUBA3C; ENSG00000198033; TAA
VDEVRTGTYR

SEQ ID NO: 96211 - protein, 10 aa, Homo sapiens
  misc_feature: Table A; Target 96211; HLA-A*33:01; TUBA3C; ENSG00000198033; TAA
VDEVRTGTYR

SEQ ID NO: 96212 - protein, 10 aa, Homo sapiens
  misc_feature: Table A; Target 96212; HLA-C*04:01; TUBA3C; ENSG00000198033; TAA
VDEVRTGTYR

SEQ ID NO: 96213 - protein, 10 aa, Homo sapiens
  misc_feature: Table A; Target 96213; HLA-C*06:02; TUBA3C; ENSG00000198033; TAA
VDEVRTGTYR

SEQ ID NO: 96214 - protein, 8 aa, Homo sapiens
  misc_feature: Table A; Target 96214; HLA-A*30:01; TUBA3C; ENSG00000198033; TAA
VDLEPTVV

SEQ ID NO: 96215 - protein, 8 aa, Homo sapiens
  misc_feature: Table A; Target 96215; HLA-B*18:01; TUBA3C; ENSG00000198033; TAA
VDLEPTVV

SEQ ID NO: 96216 - protein, 8 aa, Homo sapiens
  misc_feature: Table A; Target 96216; HLA-B*37:01; TUBA3C; ENSG00000198033; TAA
VDLEPTVV

SEQ ID NO: 96217 - protein, 8 aa, Homo sapiens
  misc_feature: Table A; Target 96217; HLA-B*40:02; TUBA3C; ENSG00000198033; TAA
VDLEPTVV

SEQ ID NO: 96218 - protein, 8 aa, Homo sapiens
  misc_feature: Table A; Target 96218; HLA-B*49:01; TUBA3C; ENSG00000198033; TAA
VDLEPTVV

SEQ ID NO: 96219 - protein, 8 aa, Homo sapiens
  misc_feature: Table A; Target 96219; HLA-B*51:01; TUBA3C; ENSG00000198033; TAA
VDLEPTVV

SEQ ID NO: 96220 - protein, 8 aa, Homo sapiens
  misc_feature: Table A; Target 96220; HLA-C*04:01; TUBA3C; ENSG00000198033; TAA
VDLEPTVV

SEQ ID NO: 96221 - protein, 8 aa, Homo sapiens
  misc_feature: Table A; Target 96221; HLA-C*06:02; TUBA3C; ENSG00000198033; TAA
VDLEPTVV

SEQ ID NO: 96222 - protein, 8 aa, Homo sapiens
  misc_feature: Table A; Target 96222; HLA-C*07:01; TUBA3C; ENSG00000198033; TAA
VDLEPTVV

SEQ ID NO: 96223 - protein, 8 aa, Homo sapiens
  misc_feature: Table A; Target 96223; HLA-C*12:03; TUBA3C; ENSG00000198033; TAA
VDLEPTVV

SEQ ID NO: 96224 - protein, 11 aa, Homo sapiens
  misc_feature: Table A; Target 96224; HLA-A*02:01; TUBA3C; ENSG00000198033; TAA
VDLEPTVVDEV

SEQ ID NO: 96225 - protein, 11 aa, Homo sapiens
  misc_feature: Table A; Target 96225; HLA-A*30:01; TUBA3C; ENSG00000198033; TAA
VDLEPTVVDEV

SEQ ID NO: 96226 - protein, 9 aa, Homo sapiens
  misc_feature: Table A; Target 96226; HLA-C*07:01; TUBA3C; ENSG00000198033; TAA
VDLTEFQTN

SEQ ID NO: 96227 - protein, 10 aa, Homo sapiens
  misc_feature: Table A; Target 96227; HLA-A*30:01; TUBA3C; ENSG00000198033; TAA
VDLTEFQTNL

SEQ ID NO: 96228 - protein, 10 aa, Homo sapiens
  misc_feature: Table A; Target 96228; HLA-B*39:01; TUBA3C; ENSG00000198033; TAA
VDLTEFQTNL

SEQ ID NO: 96229 - protein, 10 aa, Homo sapiens
  misc_feature: Table A; Target 96229; HLA-B*40:02; TUBA3C; ENSG00000198033; TAA
VDLTEFQTNL

SEQ ID NO: 96230 - protein, 8 aa, Homo sapiens
  misc_feature: Table A; Target 96230; HLA-B*40:02; TUBA3C; ENSG00000198033; TAA
VDLVLDRI

SEQ ID NO: 96231 - protein, 9 aa, Homo sapiens
  misc_feature: Table A; Target 96231; HLA-A*30:01; TUBA3C; ENSG00000198033; TAA
VDNEAIYDI

SEQ ID NO: 96232 - protein, 9 aa, Homo sapiens
  misc_feature: Table A; Target 96232; HLA-B*13:02; TUBA3C; ENSG00000198033; TAA
VDNEAIYDI

SEQ ID NO: 96233 - protein, 9 aa, Homo sapiens
  misc_feature: Table A; Target 96233; HLA-B*27:02; TUBA3C; ENSG00000198033; TAA
VDNEAIYDI

SEQ ID NO: 96234 - protein, 9 aa, Homo sapiens
  misc_feature: Table A; Target 96234; HLA-B*37:01; TUBA3C; ENSG00000198033; TAA
VDNEAIYDI

SEQ ID NO: 96235 - protein, 9 aa, Homo sapiens
  misc_feature: Table A; Target 96235; HLA-B*38:01; TUBA3C; ENSG00000198033; TAA
VDNEAIYDI

SEQ ID NO: 96236 - protein, 9 aa, Homo sapiens
  misc_feature: Table A; Target 96236; HLA-B*40:02; TUBA3C; ENSG00000198033; TAA
VDNEAIYDI

SEQ ID NO: 96237 - protein, 9 aa, Homo sapiens
  misc_feature: Table A; Target 96237; HLA-B*44:02; TUBA3C; ENSG00000198033; TAA
VDNEAIYDI

SEQ ID NO: 96238 - protein, 9 aa, Homo sapiens
  misc_feature: Table A; Target 96238; HLA-C*06:02; TUBA3C; ENSG00000198033; TAA
VDNEAIYDI

SEQ ID NO: 96239 - protein, 9 aa, Homo sapiens
  misc_feature: Table A; Target 96239; HLA-C*07:01; TUBA3C; ENSG00000198033; TAA
VDNEAIYDI

SEQ ID NO: 96240 - protein, 9 aa, Homo sapiens
  misc_feature: Table A; Target 96240; HLA-C*07:04; TUBA3C; ENSG00000198033; TAA
VDNEAIYDI

SEQ ID NO: 96241 - protein, 9 aa, Homo sapiens
  misc_feature: Table A; Target 96241; HLA-C*12:03; TUBA3C; ENSG00000198033; TAA
VDNEAIYDI

SEQ ID NO: 96242 - protein, 11 aa, Homo sapiens
  misc_feature: Table A; Target 96242; HLA-A*31:01; TUBA3C; ENSG00000198033; TAA
VDNEAIYDICR

SEQ ID NO: 96243 - protein, 11 aa, Homo sapiens
  misc_feature: Table A; Target 96243; HLA-A*33:03; TUBA3C; ENSG00000198033; TAA
VDNEAIYDICR

SEQ ID NO: 96244 - protein, 11 aa, Homo sapiens
  misc_feature: Table A; Target 96244; HLA-B*27:02; TUBA3C; ENSG00000198033; TAA
VDNEAIYDICR

SEQ ID NO: 96245 - protein, 11 aa, Homo sapiens
  misc_feature: Table A; Target 96245; HLA-C*04:01; TUBA3C; ENSG00000198033; TAA
VDNEAIYDICR

SEQ ID NO: 96246 - protein, 8 aa, Homo sapiens
  misc_feature: Table A; Target 96246; HLA-A*30:01; TUBA3C; ENSG00000198033; TAA
VDWCPTGF

SEQ ID NO: 96247 - protein, 8 aa, Homo sapiens
  misc_feature: Table A; Target 96247; HLA-B*37:01; TUBA3C; ENSG00000198033; TAA
VDWCPTGF

SEQ ID NO: 96248 - protein, 8 aa, Homo sapiens
  misc_feature: Table A; Target 96248; HLA-C*04:01; TUBA3C; ENSG00000198033; TAA
VDWCPTGF

SEQ ID NO: 96249 - protein, 8 aa, Homo sapiens
  misc_feature: Table A; Target 96249; HLA-C*07:01; TUBA3C; ENSG00000198033; TAA
VDWCPTGF

SEQ ID NO: 96250 - protein, 9 aa, Homo sapiens
  misc_feature: Table A; Target 96250; HLA-A*03:01; TUBA3C; ENSG00000198033; TAA
VDWCPTGFK

SEQ ID NO: 96251 - protein, 8 aa, Homo sapiens
  misc_feature: Table A; Target 96251; HLA-B*27:05; TUBA3C; ENSG00000198033; TAA
VDYGKKSK

SEQ ID NO: 96252 - protein, 8 aa, Homo sapiens
  misc_feature: Table A; Target 96252; HLA-B*37:01; TUBA3C; ENSG00000198033; TAA
VDYGKKSK

SEQ ID NO: 96253 - protein, 8 aa, Homo sapiens
  misc_feature: Table A; Target 96253; HLA-B*40:02; TUBA3C; ENSG00000198033; TAA
VDYGKKSK

SEQ ID NO: 96254 - protein, 8 aa, Homo sapiens
  misc_feature: Table A; Target 96254; HLA-C*04:01; TUBA3C; ENSG00000198033; TAA
VDYGKKSK

SEQ ID NO: 96255 - protein, 8 aa, Homo sapiens
  misc_feature: Table A; Target 96255; HLA-C*06:02; TUBA3C; ENSG00000198033; TAA
VDYGKKSK

SEQ ID NO: 96256 - protein, 8 aa, Homo sapiens
  misc_feature: Table A; Target 96256; HLA-C*07:01; TUBA3C; ENSG00000198033; TAA
VDYGKKSK

SEQ ID NO: 96257 - protein, 8 aa, Homo sapiens
  misc_feature: Table A; Target 96257; HLA-C*07:02; TUBA3C; ENSG00000198033; TAA
VDYGKKSK

SEQ ID NO: 96258 - protein, 8 aa, Homo sapiens
  misc_feature: Table A; Target 96258; HLA-C*16:01; TUBA3C; ENSG00000198033; TAA
VDYGKKSK

SEQ ID NO: 96259 - protein, 9 aa, Homo sapiens
  misc_feature: Table A; Target 96259; HLA-A*03:01; TUBA3C; ENSG00000198033; TAA
VDYGKKSKL

SEQ ID NO: 96260 - protein, 9 aa, Homo sapiens
  misc_feature: Table A; Target 96260; HLA-B*08:01; TUBA3C; ENSG00000198033; TAA
VDYGKKSKL

SEQ ID NO: 96261 - protein, 9 aa, Homo sapiens
  misc_feature: Table A; Target 96261; HLA-B*37:01; TUBA3C; ENSG00000198033; TAA
VDYGKKSKL

SEQ ID NO: 96262 - protein, 9 aa, Homo sapiens
  misc_feature: Table A; Target 96262; HLA-B*40:02; TUBA3C; ENSG00000198033; TAA
VDYGKKSKL

SEQ ID NO: 96263 - protein, 9 aa, Homo sapiens
  misc_feature: Table A; Target 96263; HLA-C*04:01; TUBA3C; ENSG00000198033; TAA
VDYGKKSKL

SEQ ID NO: 96264 - protein, 9 aa, Homo sapiens
  misc_feature: Table A; Target 96264; HLA-C*06:02; TUBA3C; ENSG00000198033; TAA
VDYGKKSKL

SEQ ID NO: 96265 - protein, 11 aa, Homo sapiens
  misc_feature: Table A; Target 96265; HLA-A*01:01; TUBA3C; ENSG00000198033; TAA
VEAEAEEGEEY

SEQ ID NO: 96266 - protein, 11 aa, Homo sapiens
  misc_feature: Table A; Target 96266; HLA-A*25:01; TUBA3C; ENSG00000198033; TAA
VEAEAEEGEEY

SEQ ID NO: 96267 - protein, 11 aa, Homo sapiens
  misc_feature: Table A; Target 96267; HLA-A*26:01; TUBA3C; ENSG00000198033; TAA
VEAEAEEGEEY

SEQ ID NO: 96268 - protein, 11 aa, Homo sapiens
  misc_feature: Table A; Target 96268; HLA-A*29:02; TUBA3C; ENSG00000198033; TAA
VEAEAEEGEEY

SEQ ID NO: 96269 - protein, 11 aa, Homo sapiens
  misc_feature: Table A; Target 96269; HLA-A*30:01; TUBA3C; ENSG00000198033; TAA
VEAEAEEGEEY

SEQ ID NO: 96270 - protein, 11 aa, Homo sapiens
  misc_feature: Table A; Target 96270; HLA-A*30:02; TUBA3C; ENSG00000198033; TAA
VEAEAEEGEEY

SEQ ID NO: 96271 - protein, 11 aa, Homo sapiens
  misc_feature: Table A; Target 96271; HLA-A*32:01; TUBA3C; ENSG00000198033; TAA
VEAEAEEGEEY

SEQ ID NO: 96272 - protein, 11 aa, Homo sapiens
  misc_feature: Table A; Target 96272; HLA-B*15:01; TUBA3C; ENSG00000198033; TAA
VEAEAEEGEEY

SEQ ID NO: 96273 - protein, 11 aa, Homo sapiens
  misc_feature: Table A; Target 96273; HLA-B*15:03; TUBA3C; ENSG00000198033; TAA
VEAEAEEGEEY

SEQ ID NO: 96274 - protein, 11 aa, Homo sapiens
  misc_feature: Table A; Target 96274; HLA-B*18:01; TUBA3C; ENSG00000198033; TAA
VEAEAEEGEEY

SEQ ID NO: 96275 - protein, 11 aa, Homo sapiens
  misc_feature: Table A; Target 96275; HLA-B*27:02; TUBA3C; ENSG00000198033; TAA
VEAEAEEGEEY

SEQ ID NO: 96276 - protein, 11 aa, Homo sapiens
  misc_feature: Table A; Target 96276; HLA-B*27:05; TUBA3C; ENSG00000198033; TAA
VEAEAEEGEEY

SEQ ID NO: 96277 - protein, 11 aa, Homo sapiens
  misc_feature: Table A; Target 96277; HLA-B*35:01; TUBA3C; ENSG00000198033; TAA
VEAEAEEGEEY

SEQ ID NO: 96278 - protein, 11 aa, Homo sapiens
  misc_feature: Table A; Target 96278; HLA-B*38:01; TUBA3C; ENSG00000198033; TAA
VEAEAEEGEEY

SEQ ID NO: 96279 - protein, 11 aa, Homo sapiens
  misc_feature: Table A; Target 96279; HLA-B*39:01; TUBA3C; ENSG00000198033; TAA
VEAEAEEGEEY

SEQ ID NO: 96280 - protein, 11 aa, Homo sapiens
  misc_feature: Table A; Target 96280; HLA-B*40:01; TUBA3C; ENSG00000198033; TAA
VEAEAEEGEEY

SEQ ID NO: 96281 - protein, 11 aa, Homo sapiens
  misc_feature: Table A; Target 96281; HLA-B*40:02; TUBA3C; ENSG00000198033; TAA
VEAEAEEGEEY

SEQ ID NO: 96282 - protein, 11 aa, Homo sapiens
  misc_feature: Table A; Target 96282; HLA-B*44:02; TUBA3C; ENSG00000198033; TAA
VEAEAEEGEEY

SEQ ID NO: 96283 - protein, 11 aa, Homo sapiens
  misc_feature: Table A; Target 96283; HLA-B*44:03; TUBA3C; ENSG00000198033; TAA
VEAEAEEGEEY

SEQ ID NO: 96284 - protein, 11 aa, Homo sapiens
  misc_feature: Table A; Target 96284; HLA-B*46:01; TUBA3C; ENSG00000198033; TAA
VEAEAEEGEEY

SEQ ID NO: 96285 - protein, 11 aa, Homo sapiens
  misc_feature: Table A; Target 96285; HLA-B*55:01; TUBA3C; ENSG00000198033; TAA
VEAEAEEGEEY

SEQ ID NO: 96286 - protein, 11 aa, Homo sapiens
  misc_feature: Table A; Target 96286; HLA-B*57:01; TUBA3C; ENSG00000198033; TAA
VEAEAEEGEEY

SEQ ID NO: 96287 - protein, 11 aa, Homo sapiens
  misc_feature: Table A; Target 96287; HLA-B*58:01; TUBA3C; ENSG00000198033; TAA
VEAEAEEGEEY

SEQ ID NO: 96288 - protein, 11 aa, Homo sapiens
  misc_feature: Table A; Target 96288; HLA-C*01:02; TUBA3C; ENSG00000198033; TAA
VEAEAEEGEEY

SEQ ID NO: 96289 - protein, 11 aa, Homo sapiens
  misc_feature: Table A; Target 96289; HLA-C*02:02; TUBA3C; ENSG00000198033; TAA
VEAEAEEGEEY

SEQ ID NO: 96290 - protein, 11 aa, Homo sapiens
  misc_feature: Table A; Target 96290; HLA-C*03:03; TUBA3C; ENSG00000198033; TAA
VEAEAEEGEEY

SEQ ID NO: 96291 - protein, 11 aa, Homo sapiens
  misc_feature: Table A; Target 96291; HLA-C*04:01; TUBA3C; ENSG00000198033; TAA
VEAEAEEGEEY

SEQ ID NO: 96292 - protein, 11 aa, Homo sapiens
  misc_feature: Table A; Target 96292; HLA-C*07:01; TUBA3C; ENSG00000198033; TAA
VEAEAEEGEEY

SEQ ID NO: 96293 - protein, 11 aa, Homo sapiens
  misc_feature: Table A; Target 96293; HLA-C*07:04; TUBA3C; ENSG00000198033; TAA
VEAEAEEGEEY

SEQ ID NO: 96294 - protein, 11 aa, Homo sapiens
  misc_feature: Table A; Target 96294; HLA-C*12:03; TUBA3C; ENSG00000198033; TAA
VEAEAEEGEEY

SEQ ID NO: 96295 - protein, 11 aa, Homo sapiens
  misc_feature: Table A; Target 96295; HLA-C*14:02; TUBA3C; ENSG00000198033; TAA
VEAEAEEGEEY

SEQ ID NO: 96296 - protein, 11 aa, Homo sapiens
  misc_feature: Table A; Target 96296; HLA-C*16:02; TUBA3C; ENSG00000198033; TAA
VEAEAEEGEEY

SEQ ID NO: 96297 - protein, 11 aa, Homo sapiens
  misc_feature: Table A; Target 96297; HLA-C*16:04; TUBA3C; ENSG00000198033; TAA
VEAEAEEGEEY

SEQ ID NO: 96298 - protein, 8 aa, Homo sapiens
  misc_feature: Table A; Target 96298; HLA-B*40:01; TUBA3C; ENSG00000198033; TAA
VEPYNSIL

SEQ ID NO: 96299 - protein, 8 aa, Homo sapiens
  misc_feature: Table A; Target 96299; HLA-B*49:01; TUBA3C; ENSG00000198033; TAA
VEPYNSIL

SEQ ID NO: 96300 - protein, 8 aa, Homo sapiens
  misc_feature: Table A; Target 96300; HLA-C*04:01; TUBA3C; ENSG00000198033; TAA
VEPYNSIL

SEQ ID NO: 96301 - protein, 8 aa, Homo sapiens
  misc_feature: Table A; Target 96301; HLA-C*07:01; TUBA3C; ENSG00000198033; TAA
VEPYNSIL

SEQ ID NO: 96302 - protein, 9 aa, Homo sapiens
  misc_feature: Table A; Target 96302; HLA-B*49:01; TUBA3C; ENSG00000198033; TAA
VEPYNSILT

SEQ ID NO: 96303 - protein, 9 aa, Homo sapiens
  misc_feature: Table A; Target 96303; HLA-C*04:01; TUBA3C; ENSG00000198033; TAA
VEPYNSILT

SEQ ID NO: 96304 - protein, 9 aa, Homo sapiens
  misc_feature: Table A; Target 96304; HLA-C*07:01; TUBA3C; ENSG00000198033; TAA
VEPYNSILT

SEQ ID NO: 96305 - protein, 10 aa, Homo sapiens
  misc_feature: Table A; Target 96305; HLA-C*04:01; TUBA3C; ENSG00000198033; TAA
VEPYNSILTT

SEQ ID NO: 96306 - protein, 10 aa, Homo sapiens
  misc_feature: Table A; Target 96306; HLA-C*07:01; TUBA3C; ENSG00000198033; TAA
VEPYNSILTT

SEQ ID NO: 96307 - protein, 10 aa, Homo sapiens
  misc_feature: Table A; Target 96307; HLA-C*07:02; TUBA3C; ENSG00000198033; TAA
VEPYNSILTT

SEQ ID NO: 96308 - protein, 11 aa, Homo sapiens
  misc_feature: Table A; Target 96308; HLA-C*04:01; TUBA3C; ENSG00000198033; TAA
VEPYNSILTTH

SEQ ID NO: 96309 - protein, 11 aa, Homo sapiens
  misc_feature: Table A; Target 96309; HLA-C*07:01; TUBA3C; ENSG00000198033; TAA
VEPYNSILTTH

SEQ ID NO: 96310 - protein, 9 aa, Homo sapiens
  misc_feature: Table A; Target 96310; HLA-A*02:01; TUBA3C; ENSG00000198033; TAA
VFVDLEPTV

SEQ ID NO: 96311 - protein, 9 aa, Homo sapiens
  misc_feature: Table A; Target 96311; HLA-A*02:07; TUBA3C; ENSG00000198033; TAA
VFVDLEPTV

SEQ ID NO: 96312 - protein, 9 aa, Homo sapiens
  misc_feature: Table A; Target 96312; HLA-A*23:01; TUBA3C; ENSG00000198033; TAA
VFVDLEPTV

SEQ ID NO: 96313 - protein, 9 aa, Homo sapiens
  misc_feature: Table A; Target 96313; HLA-A*24:02; TUBA3C; ENSG00000198033; TAA
VFVDLEPTV

SEQ ID NO: 96314 - protein, 9 aa, Homo sapiens
  misc_feature: Table A; Target 96314; HLA-A*29:02; TUBA3C; ENSG00000198033; TAA
VFVDLEPTV

SEQ ID NO: 96315 - protein, 9 aa, Homo sapiens
  misc_feature: Table A; Target 96315; HLA-A*30:01; TUBA3C; ENSG00000198033; TAA
VFVDLEPTV

SEQ ID NO: 96316 - protein, 9 aa, Homo sapiens
  misc_feature: Table A; Target 96316; HLA-B*13:02; TUBA3C; ENSG00000198033; TAA
VFVDLEPTV

SEQ ID NO: 96317 - protein, 9 aa, Homo sapiens
  misc_feature: Table A; Target 96317; HLA-B*27:05; TUBA3C; ENSG00000198033; TAA
VFVDLEPTV

SEQ ID NO: 96318 - protein, 9 aa, Homo sapiens
  misc_feature: Table A; Target 96318; HLA-B*35:03; TUBA3C; ENSG00000198033; TAA
VFVDLEPTV

SEQ ID NO: 96319 - protein, 9 aa, Homo sapiens
  misc_feature: Table A; Target 96319; HLA-B*39:01; TUBA3C; ENSG00000198033; TAA
VFVDLEPTV

SEQ ID NO: 96320 - protein, 9 aa, Homo sapiens
  misc_feature: Table A; Target 96320; HLA-B*40:02; TUBA3C; ENSG00000198033; TAA
VFVDLEPTV

SEQ ID NO: 96321 - protein, 9 aa, Homo sapiens
  misc_feature: Table A; Target 96321; HLA-B*46:01; TUBA3C; ENSG00000198033; TAA
VFVDLEPTV

SEQ ID NO: 96322 - protein, 9 aa, Homo sapiens
  misc_feature: Table A; Target 96322; HLA-B*49:01; TUBA3C; ENSG00000198033; TAA
VFVDLEPTV

SEQ ID NO: 96323 - protein, 9 aa, Homo sapiens
  misc_feature: Table A; Target 96323; HLA-B*51:01; TUBA3C; ENSG00000198033; TAA
VFVDLEPTV

SEQ ID NO: 96324 - protein, 9 aa, Homo sapiens
  misc_feature: Table A; Target 96324; HLA-B*55:01; TUBA3C; ENSG00000198033; TAA
VFVDLEPTV

SEQ ID NO: 96325 - protein, 9 aa, Homo sapiens
  misc_feature: Table A; Target 96325; HLA-C*02:02; TUBA3C; ENSG00000198033; TAA
VFVDLEPTV

SEQ ID NO: 96326 - protein, 9 aa, Homo sapiens
  misc_feature: Table A; Target 96326; HLA-C*04:01; TUBA3C; ENSG00000198033; TAA
VFVDLEPTV

SEQ ID NO: 96327 - protein, 9 aa, Homo sapiens
  misc_feature: Table A; Target 96327; HLA-C*06:02; TUBA3C; ENSG00000198033; TAA
VFVDLEPTV

SEQ ID NO: 96328 - protein, 9 aa, Homo sapiens
  misc_feature: Table A; Target 96328; HLA-C*07:01; TUBA3C; ENSG00000198033; TAA
VFVDLEPTV

SEQ ID NO: 96329 - protein, 9 aa, Homo sapiens
  misc_feature: Table A; Target 96329; HLA-C*12:03; TUBA3C; ENSG00000198033; TAA
VFVDLEPTV

SEQ ID NO: 96330 - protein, 9 aa, Homo sapiens
  misc_feature: Table A; Target 96330; HLA-C*14:02; TUBA3C; ENSG00000198033; TAA
VFVDLEPTV

SEQ ID NO: 96331 - protein, 9 aa, Homo sapiens
  misc_feature: Table A; Target 96331; HLA-C*16:01; TUBA3C; ENSG00000198033; TAA
VFVDLEPTV

SEQ ID NO: 96332 - protein, 9 aa, Homo sapiens
  misc_feature: Table A; Target 96332; HLA-C*16:02; TUBA3C; ENSG00000198033; TAA
VFVDLEPTV

SEQ ID NO: 96333 - protein, 9 aa, Homo sapiens
  misc_feature: Table A; Target 96333; HLA-C*16:04; TUBA3C; ENSG00000198033; TAA
VFVDLEPTV

SEQ ID NO: 96334 - protein, 10 aa, Homo sapiens
  misc_feature: Table A; Target 96334; HLA-A*23:01; TUBA3C; ENSG00000198033; TAA
VFVDLEPTVV

SEQ ID NO: 96335 - protein, 10 aa, Homo sapiens
  misc_feature: Table A; Target 96335; HLA-A*30:01; TUBA3C; ENSG00000198033; TAA
VFVDLEPTVV

SEQ ID NO: 96336 - protein, 10 aa, Homo sapiens
  misc_feature: Table A; Target 96336; HLA-C*04:01; TUBA3C; ENSG00000198033; TAA
VFVDLEPTVV

SEQ ID NO: 96337 - protein, 10 aa, Homo sapiens
  misc_feature: Table A; Target 96337; HLA-C*12:03; TUBA3C; ENSG00000198033; TAA
VFVDLEPTVV

SEQ ID NO: 96338 - protein, 10 aa, Homo sapiens
  misc_feature: Table A; Target 96338; HLA-B*39:01; TUBA3C; ENSG00000198033; TAA
VGEGMEEGEF

SEQ ID NO: 96339 - protein, 10 aa, Homo sapiens
  misc_feature: Table A; Target 96339; HLA-C*04:01; TUBA3C; ENSG00000198033; TAA
VGEGMEEGEF

SEQ ID NO: 96340 - protein, 10 aa, Homo sapiens
  misc_feature: Table A; Target 96340; HLA-C*05:01; TUBA3C; ENSG00000198033; TAA
VGEGMEEGEF

SEQ ID NO: 96341 - protein, 10 aa, Homo sapiens
  misc_feature: Table A; Target 96341; HLA-C*07:01; TUBA3C; ENSG00000198033; TAA
VGEGMEEGEF

SEQ ID NO: 96342 - protein, 9 aa, Homo sapiens
  misc_feature: Table A; Target 96342; HLA-C*04:01; TUBA3C; ENSG00000198033; TAA
VGINYQPPT

SEQ ID NO: 96343 - protein, 9 aa, Homo sapiens
  misc_feature: Table A; Target 96343; HLA-C*06:02; TUBA3C; ENSG00000198033; TAA
VGINYQPPT

SEQ ID NO: 96344 - protein, 9 aa, Homo sapiens
  misc_feature: Table A; Target 96344; HLA-C*12:03; TUBA3C; ENSG00000198033; TAA
VGINYQPPT

SEQ ID NO: 96345 - protein, 9 aa, Homo sapiens
  misc_feature: Table A; Target 96345; HLA-C*16:01; TUBA3C; ENSG00000198033; TAA
VGINYQPPT

SEQ ID NO: 96346 - protein, 9 aa, Homo sapiens
  misc_feature: Table A; Target 96346; HLA-C*16:02; TUBA3C; ENSG00000198033; TAA
VGINYQPPT

SEQ ID NO: 96347 - protein, 10 aa, Homo sapiens
  misc_feature: Table A; Target 96347; HLA-A*02:01; TUBA3C; ENSG00000198033; TAA
VGINYQPPTV

SEQ ID NO: 96348 - protein, 10 aa, Homo sapiens
  misc_feature: Table A; Target 96348; HLA-B*51:01; TUBA3C; ENSG00000198033; TAA
VGINYQPPTV

SEQ ID NO: 96349 - protein, 10 aa, Homo sapiens
  misc_feature: Table A; Target 96349; HLA-C*04:01; TUBA3C; ENSG00000198033; TAA
VGINYQPPTV

SEQ ID NO: 96350 - protein, 10 aa, Homo sapiens
  misc_feature: Table A; Target 96350; HLA-C*06:02; TUBA3C; ENSG00000198033; TAA
VGINYQPPTV

SEQ ID NO: 96351 - protein, 10 aa, Homo sapiens
  misc_feature: Table A; Target 96351; HLA-C*12:03; TUBA3C; ENSG00000198033; TAA
VGINYQPPTV

SEQ ID NO: 96352 - protein, 10 aa, Homo sapiens
  misc_feature: Table A; Target 96352; HLA-C*16:02; TUBA3C; ENSG00000198033; TAA
VGINYQPPTV

SEQ ID NO: 96353 - protein, 8 aa, Homo sapiens
  misc_feature: Table A; Target 96353; HLA-C*04:01; TUBA3C; ENSG00000198033; TAA
VGQAGVQI

SEQ ID NO: 96354 - protein, 9 aa, Homo sapiens
  misc_feature: Table A; Target 96354; HLA-C*12:03; TUBA3C; ENSG00000198033; TAA
VGQAGVQIG

SEQ ID NO: 96355 - protein, 10 aa, Homo sapiens
  misc_feature: Table A; Target 96355; HLA-A*31:01; TUBA3C; ENSG00000198033; TAA
VGQAGVQIGN

SEQ ID NO: 96356 - protein, 10 aa, Homo sapiens
  misc_feature: Table A; Target 96356; HLA-C*04:01; TUBA3C; ENSG00000198033; TAA
VGQAGVQIGN

SEQ ID NO: 96357 - protein, 10 aa, Homo sapiens
  misc_feature: Table A; Target 96357; HLA-C*06:02; TUBA3C; ENSG00000198033; TAA
VGQAGVQIGN

SEQ ID NO: 96358 - protein, 10 aa, Homo sapiens
  misc_feature: Table A; Target 96358; HLA-C*07:01; TUBA3C; ENSG00000198033; TAA
VGQAGVQIGN

SEQ ID NO: 96359 - protein, 10 aa, Homo sapiens
  misc_feature: Table A; Target 96359; HLA-C*07:02; TUBA3C; ENSG00000198033; TAA
VGQAGVQIGN

SEQ ID NO: 96360 - protein, 10 aa, Homo sapiens
  misc_feature: Table A; Target 96360; HLA-C*12:03; TUBA3C; ENSG00000198033; TAA
VGQAGVQIGN

SEQ ID NO: 96361 - protein, 11 aa, Homo sapiens
  misc_feature: Table A; Target 96361; HLA-C*06:02; TUBA3C; ENSG00000198033; TAA
VGQAGVQIGNA

SEQ ID NO: 96362 - protein, 11 aa, Homo sapiens
  misc_feature: Table A; Target 96362; HLA-C*12:03; TUBA3C; ENSG00000198033; TAA
VGQAGVQIGNA

SEQ ID NO: 96363 - protein, 8 aa, Homo sapiens
  misc_feature: Table A; Target 96363; HLA-B*46:01; TUBA3C; ENSG00000198033; TAA
VGVDSVEA

SEQ ID NO: 96364 - protein, 9 aa, Homo sapiens
  misc_feature: Table A; Target 96364; HLA-B*38:01; TUBA3C; ENSG00000198033; TAA
VHWYVGEGM

SEQ ID NO: 96365 - protein, 8 aa, Homo sapiens
  misc_feature: Table A; Target 96365; HLA-A*32:01; TUBA3C; ENSG00000198033; TAA
VISAEKAY

SEQ ID NO: 96366 - protein, 8 aa, Homo sapiens
  misc_feature: Table A; Target 96366; HLA-B*15:01; TUBA3C; ENSG00000198033; TAA
VISAEKAY

SEQ ID NO: 96367 - protein, 8 aa, Homo sapiens
  misc_feature: Table A; Target 96367; HLA-B*39:01; TUBA3C; ENSG00000198033; TAA
VISAEKAY

SEQ ID NO: 96368 - protein, 8 aa, Homo sapiens
  misc_feature: Table A; Target 96368; HLA-C*07:04; TUBA3C; ENSG00000198033; TAA
VISAEKAY

SEQ ID NO: 96369 - protein, 8 aa, Homo sapiens
  misc_feature: Table A; Target 96369; HLA-C*16:01; TUBA3C; ENSG00000198033; TAA
VISAEKAY

SEQ ID NO: 96370 - protein, 8 aa, Homo sapiens
  misc_feature: Table A; Target 96370; HLA-C*16:02; TUBA3C; ENSG00000198033; TAA
VISAEKAY

SEQ ID NO: 96371 - protein, 9 aa, Homo sapiens
  misc_feature: Table A; Target 96371; HLA-A*03:02; TUBA3C; ENSG00000198033; TAA
VISAEKAYH

SEQ ID NO: 96372 - protein, 8 aa, Homo sapiens
  misc_feature: Table A; Target 96372; HLA-A*02:04; TUBA3C; ENSG00000198033; TAA
VLDRIRKL

SEQ ID NO: 96373 - protein, 8 aa, Homo sapiens
  misc_feature: Table A; Target 96373; HLA-A*02:07; TUBA3C; ENSG00000198033; TAA
VLDRIRKL

SEQ ID NO: 96374 - protein, 8 aa, Homo sapiens
  misc_feature: Table A; Target 96374; HLA-A*03:01; TUBA3C; ENSG00000198033; TAA
VLDRIRKL

SEQ ID NO: 96375 - protein, 8 aa, Homo sapiens
  misc_feature: Table A; Target 96375; HLA-B*08:01; TUBA3C; ENSG00000198033; TAA
VLDRIRKL

SEQ ID NO: 96376 - protein, 8 aa, Homo sapiens
  misc_feature: Table A; Target 96376; HLA-C*04:01; TUBA3C; ENSG00000198033; TAA
VLDRIRKL

SEQ ID NO: 96377 - protein, 8 aa, Homo sapiens
  misc_feature: Table A; Target 96377; HLA-A*23:01; TUBA3C; ENSG00000198033; TAA
VNAAIATI

SEQ ID NO: 96378 - protein, 8 aa, Homo sapiens
  misc_feature: Table A; Target 96378; HLA-B*51:01; TUBA3C; ENSG00000198033; TAA
VNAAIATI

SEQ ID NO: 96379 - protein, 8 aa, Homo sapiens
  misc_feature: Table A; Target 96379; HLA-C*04:01; TUBA3C; ENSG00000198033; TAA
VNAAIATI

SEQ ID NO: 96380 - protein, 8 aa, Homo sapiens
  misc_feature: Table A; Target 96380; HLA-C*06:02; TUBA3C; ENSG00000198033; TAA
VNAAIATI

SEQ ID NO: 96381 - protein, 9 aa, Homo sapiens
  misc_feature: Table A; Target 96381; HLA-A*03:01; TUBA3C; ENSG00000198033; TAA
VNAAIATIK

SEQ ID NO: 96382 - protein, 9 aa, Homo sapiens
  misc_feature: Table A; Target 96382; HLA-A*03:02; TUBA3C; ENSG00000198033; TAA
VNAAIATIK

SEQ ID NO: 96383 - protein, 9 aa, Homo sapiens
  misc_feature: Table A; Target 96383; HLA-A*11:01; TUBA3C; ENSG00000198033; TAA
VNAAIATIK

SEQ ID NO: 96384 - protein, 9 aa, Homo sapiens
  misc_feature: Table A; Target 96384; HLA-A*33:01; TUBA3C; ENSG00000198033; TAA
VNAAIATIK

SEQ ID NO: 96385 - protein, 9 aa, Homo sapiens
  misc_feature: Table A; Target 96385; HLA-A*33:03; TUBA3C; ENSG00000198033; TAA
VNAAIATIK

SEQ ID NO: 96386 - protein, 9 aa, Homo sapiens
  misc_feature: Table A; Target 96386; HLA-A*68:01; TUBA3C; ENSG00000198033; TAA
VNAAIATIK

SEQ ID NO: 96387 - protein, 9 aa, Homo sapiens
  misc_feature: Table A; Target 96387; HLA-B*27:02; TUBA3C; ENSG00000198033; TAA
VNAAIATIK

SEQ ID NO: 96388 - protein, 9 aa, Homo sapiens
  misc_feature: Table A; Target 96388; HLA-B*27:05; TUBA3C; ENSG00000198033; TAA
VNAAIATIK

SEQ ID NO: 96389 - protein, 9 aa, Homo sapiens
  misc_feature: Table A; Target 96389; HLA-C*04:01; TUBA3C; ENSG00000198033; TAA
VNAAIATIK

SEQ ID NO: 96390 - protein, 9 aa, Homo sapiens
  misc_feature: Table A; Target 96390; HLA-C*07:01; TUBA3C; ENSG00000198033; TAA
VNAAIATIK

SEQ ID NO: 96391 - protein, 9 aa, Homo sapiens
  misc_feature: Table A; Target 96391; HLA-C*07:06; TUBA3C; ENSG00000198033; TAA
VNAAIATIK

SEQ ID NO: 96392 - protein, 9 aa, Homo sapiens
  misc_feature: Table A; Target 96392; HLA-C*12:03; TUBA3C; ENSG00000198033; TAA
VNAAIATIK

SEQ ID NO: 96393 - protein, 10 aa, Homo sapiens
  misc_feature: Table A; Target 96393; HLA-C*07:01; TUBA3C; ENSG00000198033; TAA
VNAAIATIKT

SEQ ID NO: 96394 - protein, 10 aa, Homo sapiens
  misc_feature: Table A; Target 96394; HLA-C*07:02; TUBA3C; ENSG00000198033; TAA
VNAAIATIKT

SEQ ID NO: 96395 - protein, 11 aa, Homo sapiens
  misc_feature: Table A; Target 96395; HLA-A*03:02; TUBA3C; ENSG00000198033; TAA
VNAAIATIKTK

SEQ ID NO: 96396 - protein, 11 aa, Homo sapiens
  misc_feature: Table A; Target 96396; HLA-B*27:02; TUBA3C; ENSG00000198033; TAA
VNAAIATIKTK

SEQ ID NO: 96397 - protein, 11 aa, Homo sapiens
  misc_feature: Table A; Target 96397; HLA-C*04:01; TUBA3C; ENSG00000198033; TAA
VNAAIATIKTK

SEQ ID NO: 96398 - protein, 11 aa, Homo sapiens
  misc_feature: Table A; Target 96398; HLA-C*06:02; TUBA3C; ENSG00000198033; TAA
VNAAIATIKTK

SEQ ID NO: 96399 - protein, 11 aa, Homo sapiens
  misc_feature: Table A; Target 96399; HLA-C*07:01; TUBA3C; ENSG00000198033; TAA
VNAAIATIKTK

SEQ ID NO: 96400 - protein, 9 aa, Homo sapiens
  misc_feature: Table A; Target 96400; HLA-B*07:02; TUBA3C; ENSG00000198033; TAA
VPGGDLAKV

SEQ ID NO: 96401 - protein, 9 aa, Homo sapiens
  misc_feature: Table A; Target 96401; HLA-B*35:03; TUBA3C; ENSG00000198033; TAA
VPGGDLAKV

SEQ ID NO: 96402 - protein, 9 aa, Homo sapiens
  misc_feature: Table A; Target 96402; HLA-B*51:01; TUBA3C; ENSG00000198033; TAA
VPGGDLAKV

SEQ ID NO: 96403 - protein, 9 aa, Homo sapiens
  misc_feature: Table A; Target 96403; HLA-B*55:01; TUBA3C; ENSG00000198033; TAA
VPGGDLAKV

SEQ ID NO: 96404 - protein, 9 aa, Homo sapiens
  misc_feature: Table A; Target 96404; HLA-B*56:01; TUBA3C; ENSG00000198033; TAA
VPGGDLAKV

SEQ ID NO: 96405 - protein, 11 aa, Homo sapiens
  misc_feature: Table A; Target 96405; HLA-A*68:01; TUBA3C; ENSG00000198033; TAA
VPGGDLAKVQR

SEQ ID NO: 96406 - protein, 8 aa, Homo sapiens
  misc_feature: Table A; Target 96406; HLA-B*54:01; TUBA3C; ENSG00000198033; TAA
VPKDVNAA

SEQ ID NO: 96407 - protein, 8 aa, Homo sapiens
  misc_feature: Table A; Target 96407; HLA-B*55:01; TUBA3C; ENSG00000198033; TAA
VPKDVNAA

SEQ ID NO: 96408 - protein, 8 aa, Homo sapiens
  misc_feature: Table A; Target 96408; HLA-B*56:01; TUBA3C; ENSG00000198033; TAA
VPKDVNAA

SEQ ID NO: 96409 - protein, 9 aa, Homo sapiens
  misc_feature: Table A; Target 96409; HLA-A*02:03; TUBA3C; ENSG00000198033; TAA
VPKDVNAAI

SEQ ID NO: 96410 - protein, 9 aa, Homo sapiens
  misc_feature: Table A; Target 96410; HLA-A*23:01; TUBA3C; ENSG00000198033; TAA
VPKDVNAAI

SEQ ID NO: 96411 - protein, 9 aa, Homo sapiens
  misc_feature: Table A; Target 96411; HLA-A*24:02; TUBA3C; ENSG00000198033; TAA
VPKDVNAAI

SEQ ID NO: 96412 - protein, 9 aa, Homo sapiens
  misc_feature: Table A; Target 96412; HLA-A*25:01; TUBA3C; ENSG00000198033; TAA
VPKDVNAAI

SEQ ID NO: 96413 - protein, 9 aa, Homo sapiens
  misc_feature: Table A; Target 96413; HLA-A*30:01; TUBA3C; ENSG00000198033; TAA
VPKDVNAAI

SEQ ID NO: 96414 - protein, 9 aa, Homo sapiens
  misc_feature: Table A; Target 96414; HLA-A*31:01; TUBA3C; ENSG00000198033; TAA
VPKDVNAAI

SEQ ID NO: 96415 - protein, 9 aa, Homo sapiens
  misc_feature: Table A; Target 96415; HLA-A*32:01; TUBA3C; ENSG00000198033; TAA
VPKDVNAAI

SEQ ID NO: 96416 - protein, 9 aa, Homo sapiens
  misc_feature: Table A; Target 96416; HLA-A*33:01; TUBA3C; ENSG00000198033; TAA
VPKDVNAAI

SEQ ID NO: 96417 - protein, 9 aa, Homo sapiens
  misc_feature: Table A; Target 96417; HLA-A*33:03; TUBA3C; ENSG00000198033; TAA
VPKDVNAAI

SEQ ID NO: 96418 - protein, 9 aa, Homo sapiens
  misc_feature: Table A; Target 96418; HLA-A*68:01; TUBA3C; ENSG00000198033; TAA
VPKDVNAAI

SEQ ID NO: 96419 - protein, 9 aa, Homo sapiens
  misc_feature: Table A; Target 96419; HLA-A*68:02; TUBA3C; ENSG00000198033; TAA
VPKDVNAAI

SEQ ID NO: 96420 - protein, 9 aa, Homo sapiens
  misc_feature: Table A; Target 96420; HLA-B*07:02; TUBA3C; ENSG00000198033; TAA
VPKDVNAAI

SEQ ID NO: 96421 - protein, 9 aa, Homo sapiens
  misc_feature: Table A; Target 96421; HLA-B*08:01; TUBA3C; ENSG00000198033; TAA
VPKDVNAAI

SEQ ID NO: 96422 - protein, 9 aa, Homo sapiens
  misc_feature: Table A; Target 96422; HLA-B*13:02; TUBA3C; ENSG00000198033; TAA
VPKDVNAAI

SEQ ID NO: 96423 - protein, 9 aa, Homo sapiens
  misc_feature: Table A; Target 96423; HLA-B*35:01; TUBA3C; ENSG00000198033; TAA
VPKDVNAAI

SEQ ID NO: 96424 - protein, 9 aa, Homo sapiens
  misc_feature: Table A; Target 96424; HLA-B*35:03; TUBA3C; ENSG00000198033; TAA
VPKDVNAAI

SEQ ID NO: 96425 - protein, 9 aa, Homo sapiens
  misc_feature: Table A; Target 96425; HLA-B*40:02; TUBA3C; ENSG00000198033; TAA
VPKDVNAAI

SEQ ID NO: 96426 - protein, 9 aa, Homo sapiens
  misc_feature: Table A; Target 96426; HLA-B*44:02; TUBA3C; ENSG00000198033; TAA
VPKDVNAAI

SEQ ID NO: 96427 - protein, 9 aa, Homo sapiens
  misc_feature: Table A; Target 96427; HLA-B*46:01; TUBA3C; ENSG00000198033; TAA
VPKDVNAAI

SEQ ID NO: 96428 - protein, 9 aa, Homo sapiens
  misc_feature: Table A; Target 96428; HLA-B*51:01; TUBA3C; ENSG00000198033; TAA
VPKDVNAAI

SEQ ID NO: 96429 - protein, 9 aa, Homo sapiens
  misc_feature: Table A; Target 96429; HLA-B*54:01; TUBA3C; ENSG00000198033; TAA
VPKDVNAAI

SEQ ID NO: 96430 - protein, 9 aa, Homo sapiens
  misc_feature: Table A; Target 96430; HLA-B*55:01; TUBA3C; ENSG00000198033; TAA
VPKDVNAAI

SEQ ID NO: 96431 - protein, 9 aa, Homo sapiens
  misc_feature: Table A; Target 96431; HLA-B*56:01; TUBA3C; ENSG00000198033; TAA
VPKDVNAAI

SEQ ID NO: 96432 - protein, 9 aa, Homo sapiens
  misc_feature: Table A; Target 96432; HLA-B*57:01; TUBA3C; ENSG00000198033; TAA
VPKDVNAAI

SEQ ID NO: 96433 - protein, 9 aa, Homo sapiens
  misc_feature: Table A; Target 96433; HLA-B*58:01; TUBA3C; ENSG00000198033; TAA
VPKDVNAAI

SEQ ID NO: 96434 - protein, 9 aa, Homo sapiens
  misc_feature: Table A; Target 96434; HLA-C*01:02; TUBA3C; ENSG00000198033; TAA
VPKDVNAAI

SEQ ID NO: 96435 - protein, 9 aa, Homo sapiens
  misc_feature: Table A; Target 96435; HLA-C*02:02; TUBA3C; ENSG00000198033; TAA
VPKDVNAAI

SEQ ID NO: 96436 - protein, 9 aa, Homo sapiens
  misc_feature: Table A; Target 96436; HLA-C*03:03; TUBA3C; ENSG00000198033; TAA
VPKDVNAAI

SEQ ID NO: 96437 - protein, 9 aa, Homo sapiens
  misc_feature: Table A; Target 96437; HLA-C*03:04; TUBA3C; ENSG00000198033; TAA
VPKDVNAAI

SEQ ID NO: 96438 - protein, 9 aa, Homo sapiens
  misc_feature: Table A; Target 96438; HLA-C*04:01; TUBA3C; ENSG00000198033; TAA
VPKDVNAAI

SEQ ID NO: 96439 - protein, 9 aa, Homo sapiens
  misc_feature: Table A; Target 96439; HLA-C*06:02; TUBA3C; ENSG00000198033; TAA
VPKDVNAAI

SEQ ID NO: 96440 - protein, 9 aa, Homo sapiens
  misc_feature: Table A; Target 96440; HLA-C*07:01; TUBA3C; ENSG00000198033; TAA
VPKDVNAAI

SEQ ID NO: 96441 - protein, 9 aa, Homo sapiens
  misc_feature: Table A; Target 96441; HLA-C*07:02; TUBA3C; ENSG00000198033; TAA
VPKDVNAAI

SEQ ID NO: 96442 - protein, 9 aa, Homo sapiens
  misc_feature: Table A; Target 96442; HLA-C*07:06; TUBA3C; ENSG00000198033; TAA
VPKDVNAAI

SEQ ID NO: 96443 - protein, 9 aa, Homo sapiens
  misc_feature: Table A; Target 96443; HLA-C*12:03; TUBA3C; ENSG00000198033; TAA
VPKDVNAAI

SEQ ID NO: 96444 - protein, 9 aa, Homo sapiens
  misc_feature: Table A; Target 96444; HLA-C*14:02; TUBA3C; ENSG00000198033; TAA
VPKDVNAAI

SEQ ID NO: 96445 - protein, 9 aa, Homo sapiens
  misc_feature: Table A; Target 96445; HLA-C*16:01; TUBA3C; ENSG00000198033; TAA
VPKDVNAAI

SEQ ID NO: 96446 - protein, 9 aa, Homo sapiens
  misc_feature: Table A; Target 96446; HLA-C*16:02; TUBA3C; ENSG00000198033; TAA
VPKDVNAAI

SEQ ID NO: 96447 - protein, 10 aa, Homo sapiens
  misc_feature: Table A; Target 96447; HLA-B*07:02; TUBA3C; ENSG00000198033; TAA
VPKDVNAAIA

SEQ ID NO: 96448 - protein, 10 aa, Homo sapiens
  misc_feature: Table A; Target 96448; HLA-B*54:01; TUBA3C; ENSG00000198033; TAA
VPKDVNAAIA

SEQ ID NO: 96449 - protein, 10 aa, Homo sapiens
  misc_feature: Table A; Target 96449; HLA-B*55:01; TUBA3C; ENSG00000198033; TAA
VPKDVNAAIA

SEQ ID NO: 96450 - protein, 10 aa, Homo sapiens
  misc_feature: Table A; Target 96450; HLA-B*56:01; TUBA3C; ENSG00000198033; TAA
VPKDVNAAIA

SEQ ID NO: 96451 - protein, 10 aa, Homo sapiens
  misc_feature: Table A; Target 96451; HLA-C*07:02; TUBA3C; ENSG00000198033; TAA
VPKDVNAAIA

SEQ ID NO: 96452 - protein, 11 aa, Homo sapiens
  misc_feature: Table A; Target 96452; HLA-B*54:01; TUBA3C; ENSG00000198033; TAA
VPKDVNAAIAT

SEQ ID NO: 96453 - protein, 11 aa, Homo sapiens
  misc_feature: Table A; Target 96453; HLA-B*55:01; TUBA3C; ENSG00000198033; TAA
VPKDVNAAIAT

SEQ ID NO: 96454 - protein, 11 aa, Homo sapiens
  misc_feature: Table A; Target 96454; HLA-B*56:01; TUBA3C; ENSG00000198033; TAA
VPKDVNAAIAT

SEQ ID NO: 96455 - protein, 11 aa, Homo sapiens
  misc_feature: Table A; Target 96455; HLA-C*06:02; TUBA3C; ENSG00000198033; TAA
VPKDVNAAIAT

SEQ ID NO: 96456 - protein, 11 aa, Homo sapiens
  misc_feature: Table A; Target 96456; HLA-C*07:02; TUBA3C; ENSG00000198033; TAA
VPKDVNAAIAT

SEQ ID NO: 96457 - protein, 9 aa, Homo sapiens
  misc_feature: Table A; Target 96457; HLA-B*07:02; TUBA3C; ENSG00000198033; TAA
VPRAVFVDL

SEQ ID NO: 96458 - protein, 9 aa, Homo sapiens
  misc_feature: Table A; Target 96458; HLA-B*08:01; TUBA3C; ENSG00000198033; TAA
VPRAVFVDL

SEQ ID NO: 96459 - protein, 9 aa, Homo sapiens
  misc_feature: Table A; Target 96459; HLA-B*35:01; TUBA3C; ENSG00000198033; TAA
VPRAVFVDL

SEQ ID NO: 96460 - protein, 9 aa, Homo sapiens
  misc_feature: Table A; Target 96460; HLA-B*35:03; TUBA3C; ENSG00000198033; TAA
VPRAVFVDL

SEQ ID NO: 96461 - protein, 9 aa, Homo sapiens
  misc_feature: Table A; Target 96461; HLA-B*40:02; TUBA3C; ENSG00000198033; TAA
VPRAVFVDL

SEQ ID NO: 96462 - protein, 9 aa, Homo sapiens
  misc_feature: Table A; Target 96462; HLA-B*51:01; TUBA3C; ENSG00000198033; TAA
VPRAVFVDL

SEQ ID NO: 96463 - protein, 9 aa, Homo sapiens
  misc_feature: Table A; Target 96463; HLA-B*54:01; TUBA3C; ENSG00000198033; TAA
VPRAVFVDL

SEQ ID NO: 96464 - protein, 9 aa, Homo sapiens
  misc_feature: Table A; Target 96464; HLA-B*56:01; TUBA3C; ENSG00000198033; TAA
VPRAVFVDL

SEQ ID NO: 96465 - protein, 9 aa, Homo sapiens
  misc_feature: Table A; Target 96465; HLA-C*07:02; TUBA3C; ENSG00000198033; TAA
VPRAVFVDL

SEQ ID NO: 96466 - protein, 8 aa, Homo sapiens
  misc_feature: Table A; Target 96466; HLA-A*23:01; TUBA3C; ENSG00000198033; TAA
VPYPRIHF

SEQ ID NO: 96467 - protein, 8 aa, Homo sapiens
  misc_feature: Table A; Target 96467; HLA-B*07:02; TUBA3C; ENSG00000198033; TAA
VPYPRIHF

SEQ ID NO: 96468 - protein, 8 aa, Homo sapiens
  misc_feature: Table A; Target 96468; HLA-B*08:01; TUBA3C; ENSG00000198033; TAA
VPYPRIHF

SEQ ID NO: 96469 - protein, 8 aa, Homo sapiens
  misc_feature: Table A; Target 96469; HLA-B*51:01; TUBA3C; ENSG00000198033; TAA
VPYPRIHF

SEQ ID NO: 96470 - protein, 8 aa, Homo sapiens
  misc_feature: Table A; Target 96470; HLA-B*54:01; TUBA3C; ENSG00000198033; TAA
VPYPRIHF

SEQ ID NO: 96471 - protein, 8 aa, Homo sapiens
  misc_feature: Table A; Target 96471; HLA-B*56:01; TUBA3C; ENSG00000198033; TAA
VPYPRIHF

SEQ ID NO: 96472 - protein, 8 aa, Homo sapiens
  misc_feature: Table A; Target 96472; HLA-B*57:01; TUBA3C; ENSG00000198033; TAA
VPYPRIHF

SEQ ID NO: 96473 - protein, 8 aa, Homo sapiens
  misc_feature: Table A; Target 96473; HLA-C*04:01; TUBA3C; ENSG00000198033; TAA
VPYPRIHF

SEQ ID NO: 96474 - protein, 8 aa, Homo sapiens
  misc_feature: Table A; Target 96474; HLA-C*07:01; TUBA3C; ENSG00000198033; TAA
VPYPRIHF

SEQ ID NO: 96475 - protein, 8 aa, Homo sapiens
  misc_feature: Table A; Target 96475; HLA-C*07:02; TUBA3C; ENSG00000198033; TAA
VPYPRIHF

SEQ ID NO: 96476 - protein, 8 aa, Homo sapiens
  misc_feature: Table A; Target 96476; HLA-C*16:01; TUBA3C; ENSG00000198033; TAA
VPYPRIHF

SEQ ID NO: 96477 - protein, 9 aa, Homo sapiens
  misc_feature: Table A; Target 96477; HLA-B*07:02; TUBA3C; ENSG00000198033; TAA
VPYPRIHFP

SEQ ID NO: 96478 - protein, 9 aa, Homo sapiens
  misc_feature: Table A; Target 96478; HLA-B*51:01; TUBA3C; ENSG00000198033; TAA
VPYPRIHFP

SEQ ID NO: 96479 - protein, 9 aa, Homo sapiens
  misc_feature: Table A; Target 96479; HLA-B*54:01; TUBA3C; ENSG00000198033; TAA
VPYPRIHFP

SEQ ID NO: 96480 - protein, 9 aa, Homo sapiens
  misc_feature: Table A; Target 96480; HLA-B*55:01; TUBA3C; ENSG00000198033; TAA
VPYPRIHFP

SEQ ID NO: 96481 - protein, 9 aa, Homo sapiens
  misc_feature: Table A; Target 96481; HLA-B*56:01; TUBA3C; ENSG00000198033; TAA
VPYPRIHFP

SEQ ID NO: 96482 - protein, 10 aa, Homo sapiens
  misc_feature: Table A; Target 96482; HLA-A*24:02; TUBA3C; ENSG00000198033; TAA
VPYPRIHFPL

SEQ ID NO: 96483 - protein, 10 aa, Homo sapiens
  misc_feature: Table A; Target 96483; HLA-A*31:01; TUBA3C; ENSG00000198033; TAA
VPYPRIHFPL

SEQ ID NO: 96484 - protein, 10 aa, Homo sapiens
  misc_feature: Table A; Target 96484; HLA-B*54:01; TUBA3C; ENSG00000198033; TAA
VPYPRIHFPL

SEQ ID NO: 96485 - protein, 11 aa, Homo sapiens
  misc_feature: Table A; Target 96485; HLA-B*51:01; TUBA3C; ENSG00000198033; TAA
VPYPRIHFPLA

SEQ ID NO: 96486 - protein, 11 aa, Homo sapiens
  misc_feature: Table A; Target 96486; HLA-B*54:01; TUBA3C; ENSG00000198033; TAA
VPYPRIHFPLA

SEQ ID NO: 96487 - protein, 8 aa, Homo sapiens
  misc_feature: Table A; Target 96487; HLA-A*32:01; TUBA3C; ENSG00000198033; TAA
VQIGNACW

SEQ ID NO: 96488 - protein, 8 aa, Homo sapiens
  misc_feature: Table A; Target 96488; HLA-B*15:01; TUBA3C; ENSG00000198033; TAA
VQIGNACW

SEQ ID NO: 96489 - protein, 8 aa, Homo sapiens
  misc_feature: Table A; Target 96489; HLA-B*58:01; TUBA3C; ENSG00000198033; TAA
VQIGNACW

SEQ ID NO: 96490 - protein, 10 aa, Homo sapiens
  misc_feature: Table A; Target 96490; HLA-B*27:05; TUBA3C; ENSG00000198033; TAA
VQIGNACWEL

SEQ ID NO: 96491 - protein, 8 aa, Homo sapiens
  misc_feature: Table A; Target 96491; HLA-B*08:01; TUBA3C; ENSG00000198033; TAA
VQRAVCML

SEQ ID NO: 96492 - protein, 8 aa, Homo sapiens
  misc_feature: Table A; Target 96492; HLA-B*15:01; TUBA3C; ENSG00000198033; TAA
VQRAVCML

SEQ ID NO: 96493 - protein, 8 aa, Homo sapiens
  misc_feature: Table A; Target 96493; HLA-B*15:03; TUBA3C; ENSG00000198033; TAA
VQRAVCML

SEQ ID NO: 96494 - protein, 8 aa, Homo sapiens
  misc_feature: Table A; Target 96494; HLA-B*40:02; TUBA3C; ENSG00000198033; TAA
VQRAVCML

SEQ ID NO: 96495 - protein, 8 aa, Homo sapiens
  misc_feature: Table A; Target 96495; HLA-C*06:02; TUBA3C; ENSG00000198033; TAA
VQRAVCML

SEQ ID NO: 96496 - protein, 8 aa, Homo sapiens
  misc_feature: Table A; Target 96496; HLA-C*07:04; TUBA3C; ENSG00000198033; TAA
VQRAVCML

SEQ ID NO: 96497 - protein, 9 aa, Homo sapiens
  misc_feature: Table A; Target 96497; HLA-B*07:02; TUBA3C; ENSG00000198033; TAA
VRTGTYRQL

SEQ ID NO: 96498 - protein, 9 aa, Homo sapiens
  misc_feature: Table A; Target 96498; HLA-B*27:05; TUBA3C; ENSG00000198033; TAA
VRTGTYRQL

SEQ ID NO: 96499 - protein, 9 aa, Homo sapiens
  misc_feature: Table A; Target 96499; HLA-C*06:02; TUBA3C; ENSG00000198033; TAA
VRTGTYRQL

SEQ ID NO: 96500 - protein, 9 aa, Homo sapiens
  misc_feature: Table A; Target 96500; HLA-C*07:01; TUBA3C; ENSG00000198033; TAA
VRTGTYRQL

SEQ ID NO: 96501 - protein, 9 aa, Homo sapiens
  misc_feature: Table A; Target 96501; HLA-C*07:02; TUBA3C; ENSG00000198033; TAA
VRTGTYRQL

SEQ ID NO: 96502 - protein, 9 aa, Homo sapiens
  misc_feature: Table A; Target 96502; HLA-C*12:03; TUBA3C; ENSG00000198033; TAA
VRTGTYRQL

SEQ ID NO: 96503 - protein, 9 aa, Homo sapiens
  misc_feature: Table A; Target 96503; HLA-C*16:01; TUBA3C; ENSG00000198033; TAA
VRTGTYRQL

SEQ ID NO: 96504 - protein, 9 aa, Homo sapiens
  misc_feature: Table A; Target 96504; HLA-C*16:02; TUBA3C; ENSG00000198033; TAA
VRTGTYRQL

SEQ ID NO: 96505 - protein, 10 aa, Homo sapiens
  misc_feature: Table A; Target 96505; HLA-C*07:01; TUBA3C; ENSG00000198033; TAA
VRTGTYRQLF

SEQ ID NO: 96506 - protein, 8 aa, Homo sapiens
  misc_feature: Table A; Target 96506; HLA-B*07:02; TUBA3C; ENSG00000198033; TAA
VSSITASL

SEQ ID NO: 96507 - protein, 8 aa, Homo sapiens
  misc_feature: Table A; Target 96507; HLA-B*08:01; TUBA3C; ENSG00000198033; TAA
VSSITASL

SEQ ID NO: 96508 - protein, 8 aa, Homo sapiens
  misc_feature: Table A; Target 96508; HLA-B*15:01; TUBA3C; ENSG00000198033; TAA
VSSITASL

SEQ ID NO: 96509 - protein, 8 aa, Homo sapiens
  misc_feature: Table A; Target 96509; HLA-B*37:01; TUBA3C; ENSG00000198033; TAA
VSSITASL

SEQ ID NO: 96510 - protein, 8 aa, Homo sapiens
  misc_feature: Table A; Target 96510; HLA-B*46:01; TUBA3C; ENSG00000198033; TAA
VSSITASL

SEQ ID NO: 96511 - protein, 8 aa, Homo sapiens
  misc_feature: Table A; Target 96511; HLA-B*58:01; TUBA3C; ENSG00000198033; TAA
VSSITASL

SEQ ID NO: 96512 - protein, 8 aa, Homo sapiens
  misc_feature: Table A; Target 96512; HLA-C*01:02; TUBA3C; ENSG00000198033; TAA
VSSITASL

SEQ ID NO: 96513 - protein, 8 aa, Homo sapiens
  misc_feature: Table A; Target 96513; HLA-C*03:03; TUBA3C; ENSG00000198033; TAA
VSSITASL

SEQ ID NO: 96514 - protein, 8 aa, Homo sapiens
  misc_feature: Table A; Target 96514; HLA-C*03:04; TUBA3C; ENSG00000198033; TAA
VSSITASL

SEQ ID NO: 96515 - protein, 8 aa, Homo sapiens
  misc_feature: Table A; Target 96515; HLA-C*05:01; TUBA3C; ENSG00000198033; TAA
VSSITASL

SEQ ID NO: 96516 - protein, 8 aa, Homo sapiens
  misc_feature: Table A; Target 96516; HLA-C*14:02; TUBA3C; ENSG00000198033; TAA
VSSITASL

SEQ ID NO: 96517 - protein, 8 aa, Homo sapiens
  misc_feature: Table A; Target 96517; HLA-C*16:01; TUBA3C; ENSG00000198033; TAA
VSSITASL

SEQ ID NO: 96518 - protein, 9 aa, Homo sapiens
  misc_feature: Table A; Target 96518; HLA-A*01:01; TUBA3C; ENSG00000198033; TAA
VSSITASLR

SEQ ID NO: 96519 - protein, 9 aa, Homo sapiens
  misc_feature: Table A; Target 96519; HLA-A*03:01; TUBA3C; ENSG00000198033; TAA
VSSITASLR

SEQ ID NO: 96520 - protein, 9 aa, Homo sapiens
  misc_feature: Table A; Target 96520; HLA-A*03:02; TUBA3C; ENSG00000198033; TAA
VSSITASLR

SEQ ID NO: 96521 - protein, 9 aa, Homo sapiens
  misc_feature: Table A; Target 96521; HLA-A*11:01; TUBA3C; ENSG00000198033; TAA
VSSITASLR

SEQ ID NO: 96522 - protein, 9 aa, Homo sapiens
  misc_feature: Table A; Target 96522; HLA-A*31:01; TUBA3C; ENSG00000198033; TAA
VSSITASLR

SEQ ID NO: 96523 - protein, 9 aa, Homo sapiens
  misc_feature: Table A; Target 96523; HLA-A*33:01; TUBA3C; ENSG00000198033; TAA
VSSITASLR

SEQ ID NO: 96524 - protein, 9 aa, Homo sapiens
  misc_feature: Table A; Target 96524; HLA-A*33:03; TUBA3C; ENSG00000198033; TAA
VSSITASLR

SEQ ID NO: 96525 - protein, 9 aa, Homo sapiens
  misc_feature: Table A; Target 96525; HLA-A*68:01; TUBA3C; ENSG00000198033; TAA
VSSITASLR

SEQ ID NO: 96526 - protein, 9 aa, Homo sapiens
  misc_feature: Table A; Target 96526; HLA-B*27:02; TUBA3C; ENSG00000198033; TAA
VSSITASLR

SEQ ID NO: 96527 - protein, 9 aa, Homo sapiens
  misc_feature: Table A; Target 96527; HLA-B*57:01; TUBA3C; ENSG00000198033; TAA
VSSITASLR

SEQ ID NO: 96528 - protein, 9 aa, Homo sapiens
  misc_feature: Table A; Target 96528; HLA-C*06:02; TUBA3C; ENSG00000198033; TAA
VSSITASLR

SEQ ID NO: 96529 - protein, 9 aa, Homo sapiens
  misc_feature: Table A; Target 96529; HLA-C*07:06; TUBA3C; ENSG00000198033; TAA
VSSITASLR

SEQ ID NO: 96530 - protein, 10 aa, Homo sapiens
  misc_feature: Table A; Target 96530; HLA-A*01:01; TUBA3C; ENSG00000198033; TAA
VSSITASLRF

SEQ ID NO: 96531 - protein, 10 aa, Homo sapiens
  misc_feature: Table A; Target 96531; HLA-B*57:01; TUBA3C; ENSG00000198033; TAA
VSSITASLRF

SEQ ID NO: 96532 - protein, 10 aa, Homo sapiens
  misc_feature: Table A; Target 96532; HLA-B*58:01; TUBA3C; ENSG00000198033; TAA
VSSITASLRF

SEQ ID NO: 96533 - protein, 10 aa, Homo sapiens
  misc_feature: Table A; Target 96533; HLA-C*04:01; TUBA3C; ENSG00000198033; TAA
VSSITASLRF

SEQ ID NO: 96534 - protein, 10 aa, Homo sapiens
  misc_feature: Table A; Target 96534; HLA-C*07:01; TUBA3C; ENSG00000198033; TAA
VSSITASLRF

SEQ ID NO: 96535 - protein, 9 aa, Homo sapiens
  misc_feature: Table A; Target 96535; HLA-A*01:01; TUBA3C; ENSG00000198033; TAA
VSTAVVEPY

SEQ ID NO: 96536 - protein, 9 aa, Homo sapiens
  misc_feature: Table A; Target 96536; HLA-A*02:01; TUBA3C; ENSG00000198033; TAA
VSTAVVEPY

SEQ ID NO: 96537 - protein, 9 aa, Homo sapiens
  misc_feature: Table A; Target 96537; HLA-A*03:01; TUBA3C; ENSG00000198033; TAA
VSTAVVEPY

SEQ ID NO: 96538 - protein, 9 aa, Homo sapiens
  misc_feature: Table A; Target 96538; HLA-A*03:02; TUBA3C; ENSG00000198033; TAA
VSTAVVEPY

SEQ ID NO: 96539 - protein, 9 aa, Homo sapiens
  misc_feature: Table A; Target 96539; HLA-A*11:01; TUBA3C; ENSG00000198033; TAA
VSTAVVEPY

SEQ ID NO: 96540 - protein, 9 aa, Homo sapiens
  misc_feature: Table A; Target 96540; HLA-A*23:01; TUBA3C; ENSG00000198033; TAA
VSTAVVEPY

SEQ ID NO: 96541 - protein, 9 aa, Homo sapiens
  misc_feature: Table A; Target 96541; HLA-A*24:02; TUBA3C; ENSG00000198033; TAA
VSTAVVEPY

SEQ ID NO: 96542 - protein, 9 aa, Homo sapiens
  misc_feature: Table A; Target 96542; HLA-A*26:01; TUBA3C; ENSG00000198033; TAA
VSTAVVEPY

SEQ ID NO: 96543 - protein, 9 aa, Homo sapiens
  misc_feature: Table A; Target 96543; HLA-A*29:02; TUBA3C; ENSG00000198033; TAA
VSTAVVEPY

SEQ ID NO: 96544 - protein, 9 aa, Homo sapiens
  misc_feature: Table A; Target 96544; HLA-A*30:02; TUBA3C; ENSG00000198033; TAA
VSTAVVEPY

SEQ ID NO: 96545 - protein, 9 aa, Homo sapiens
  misc_feature: Table A; Target 96545; HLA-A*31:01; TUBA3C; ENSG00000198033; TAA
VSTAVVEPY

SEQ ID NO: 96546 - protein, 9 aa, Homo sapiens
  misc_feature: Table A; Target 96546; HLA-A*32:01; TUBA3C; ENSG00000198033; TAA
VSTAVVEPY

SEQ ID NO: 96547 - protein, 9 aa, Homo sapiens
  misc_feature: Table A; Target 96547; HLA-A*33:01; TUBA3C; ENSG00000198033; TAA
VSTAVVEPY

SEQ ID NO: 96548 - protein, 9 aa, Homo sapiens
  misc_feature: Table A; Target 96548; HLA-A*33:03; TUBA3C; ENSG00000198033; TAA
VSTAVVEPY

SEQ ID NO: 96549 - protein, 9 aa, Homo sapiens
  misc_feature: Table A; Target 96549; HLA-A*68:01; TUBA3C; ENSG00000198033; TAA
VSTAVVEPY

SEQ ID NO: 96550 - protein, 9 aa, Homo sapiens
  misc_feature: Table A; Target 96550; HLA-B*07:02; TUBA3C; ENSG00000198033; TAA
VSTAVVEPY

SEQ ID NO: 96551 - protein, 9 aa, Homo sapiens
  misc_feature: Table A; Target 96551; HLA-B*15:01; TUBA3C; ENSG00000198033; TAA
VSTAVVEPY

SEQ ID NO: 96552 - protein, 9 aa, Homo sapiens
  misc_feature: Table A; Target 96552; HLA-B*15:03; TUBA3C; ENSG00000198033; TAA
VSTAVVEPY

SEQ ID NO: 96553 - protein, 9 aa, Homo sapiens
  misc_feature: Table A; Target 96553; HLA-B*18:01; TUBA3C; ENSG00000198033; TAA
VSTAVVEPY

SEQ ID NO: 96554 - protein, 9 aa, Homo sapiens
  misc_feature: Table A; Target 96554; HLA-B*27:02; TUBA3C; ENSG00000198033; TAA
VSTAVVEPY

SEQ ID NO: 96555 - protein, 9 aa, Homo sapiens
  misc_feature: Table A; Target 96555; HLA-B*27:05; TUBA3C; ENSG00000198033; TAA
VSTAVVEPY

SEQ ID NO: 96556 - protein, 9 aa, Homo sapiens
  misc_feature: Table A; Target 96556; HLA-B*35:01; TUBA3C; ENSG00000198033; TAA
VSTAVVEPY

SEQ ID NO: 96557 - protein, 9 aa, Homo sapiens
  misc_feature: Table A; Target 96557; HLA-B*39:01; TUBA3C; ENSG00000198033; TAA
VSTAVVEPY

SEQ ID NO: 96558 - protein, 9 aa, Homo sapiens
  misc_feature: Table A; Target 96558; HLA-B*40:02; TUBA3C; ENSG00000198033; TAA
VSTAVVEPY

SEQ ID NO: 96559 - protein, 9 aa, Homo sapiens
  misc_feature: Table A; Target 96559; HLA-B*46:01; TUBA3C; ENSG00000198033; TAA
VSTAVVEPY

SEQ ID NO: 96560 - protein, 9 aa, Homo sapiens
  misc_feature: Table A; Target 96560; HLA-B*54:01; TUBA3C; ENSG00000198033; TAA
VSTAVVEPY

SEQ ID NO: 96561 - protein, 9 aa, Homo sapiens
  misc_feature: Table A; Target 96561; HLA-B*55:01; TUBA3C; ENSG00000198033; TAA
VSTAVVEPY

SEQ ID NO: 96562 - protein, 9 aa, Homo sapiens
  misc_feature: Table A; Target 96562; HLA-B*57:01; TUBA3C; ENSG00000198033; TAA
VSTAVVEPY

SEQ ID NO: 96563 - protein, 9 aa, Homo sapiens
  misc_feature: Table A; Target 96563; HLA-B*58:01; TUBA3C; ENSG00000198033; TAA
VSTAVVEPY

SEQ ID NO: 96564 - protein, 9 aa, Homo sapiens
  misc_feature: Table A; Target 96564; HLA-C*01:02; TUBA3C; ENSG00000198033; TAA
VSTAVVEPY

SEQ ID NO: 96565 - protein, 9 aa, Homo sapiens
  misc_feature: Table A; Target 96565; HLA-C*02:02; TUBA3C; ENSG00000198033; TAA
VSTAVVEPY

SEQ ID NO: 96566 - protein, 9 aa, Homo sapiens
  misc_feature: Table A; Target 96566; HLA-C*03:03; TUBA3C; ENSG00000198033; TAA
VSTAVVEPY

SEQ ID NO: 96567 - protein, 9 aa, Homo sapiens
  misc_feature: Table A; Target 96567; HLA-C*03:04; TUBA3C; ENSG00000198033; TAA
VSTAVVEPY

SEQ ID NO: 96568 - protein, 9 aa, Homo sapiens
  misc_feature: Table A; Target 96568; HLA-C*04:01; TUBA3C; ENSG00000198033; TAA
VSTAVVEPY

SEQ ID NO: 96569 - protein, 9 aa, Homo sapiens
  misc_feature: Table A; Target 96569; HLA-C*06:02; TUBA3C; ENSG00000198033; TAA
VSTAVVEPY

SEQ ID NO: 96570 - protein, 9 aa, Homo sapiens
  misc_feature: Table A; Target 96570; HLA-C*07:01; TUBA3C; ENSG00000198033; TAA
VSTAVVEPY

SEQ ID NO: 96571 - protein, 9 aa, Homo sapiens
  misc_feature: Table A; Target 96571; HLA-C*07:02; TUBA3C; ENSG00000198033; TAA
VSTAVVEPY

SEQ ID NO: 96572 - protein, 9 aa, Homo sapiens
  misc_feature: Table A; Target 96572; HLA-C*07:04; TUBA3C; ENSG00000198033; TAA
VSTAVVEPY

SEQ ID NO: 96573 - protein, 9 aa, Homo sapiens
  misc_feature: Table A; Target 96573; HLA-C*07:06; TUBA3C; ENSG00000198033; TAA
VSTAVVEPY

SEQ ID NO: 96574 - protein, 9 aa, Homo sapiens
  misc_feature: Table A; Target 96574; HLA-C*12:03; TUBA3C; ENSG00000198033; TAA
VSTAVVEPY

SEQ ID NO: 96575 - protein, 9 aa, Homo sapiens
  misc_feature: Table A; Target 96575; HLA-C*14:02; TUBA3C; ENSG00000198033; TAA
VSTAVVEPY

SEQ ID NO: 96576 - protein, 9 aa, Homo sapiens
  misc_feature: Table A; Target 96576; HLA-C*16:01; TUBA3C; ENSG00000198033; TAA
VSTAVVEPY

SEQ ID NO: 96577 - protein, 9 aa, Homo sapiens
  misc_feature: Table A; Target 96577; HLA-C*16:02; TUBA3C; ENSG00000198033; TAA
VSTAVVEPY

SEQ ID NO: 96578 - protein, 9 aa, Homo sapiens
  misc_feature: Table A; Target 96578; HLA-C*16:04; TUBA3C; ENSG00000198033; TAA
VSTAVVEPY

SEQ ID NO: 96579 - protein, 10 aa, Homo sapiens
  misc_feature: Table A; Target 96579; HLA-A*01:01; TUBA3C; ENSG00000198033; TAA
VSTAVVEPYN

SEQ ID NO: 96580 - protein, 10 aa, Homo sapiens
  misc_feature: Table A; Target 96580; HLA-C*06:02; TUBA3C; ENSG00000198033; TAA
VSTAVVEPYN

SEQ ID NO: 96581 - protein, 8 aa, Homo sapiens
  misc_feature: Table A; Target 96581; HLA-C*05:01; TUBA3C; ENSG00000198033; TAA
VVDEVRTG

SEQ ID NO: 96582 - protein, 9 aa, Homo sapiens
  misc_feature: Table A; Target 96582; HLA-A*02:07; TUBA3C; ENSG00000198033; TAA
VVDEVRTGT

SEQ ID NO: 96583 - protein, 9 aa, Homo sapiens
  misc_feature: Table A; Target 96583; HLA-A*32:01; TUBA3C; ENSG00000198033; TAA
VVDEVRTGT

SEQ ID NO: 96584 - protein, 9 aa, Homo sapiens
  misc_feature: Table A; Target 96584; HLA-B*58:01; TUBA3C; ENSG00000198033; TAA
VVDEVRTGT

SEQ ID NO: 96585 - protein, 9 aa, Homo sapiens
  misc_feature: Table A; Target 96585; HLA-C*05:01; TUBA3C; ENSG00000198033; TAA
VVDEVRTGT

SEQ ID NO: 96586 - protein, 10 aa, Homo sapiens
  misc_feature: Table A; Target 96586; HLA-A*01:01; TUBA3C; ENSG00000198033; TAA
VVDEVRTGTY

SEQ ID NO: 96587 - protein, 10 aa, Homo sapiens
  misc_feature: Table A; Target 96587; HLA-A*02:07; TUBA3C; ENSG00000198033; TAA
VVDEVRTGTY

SEQ ID NO: 96588 - protein, 10 aa, Homo sapiens
  misc_feature: Table A; Target 96588; HLA-A*03:01; TUBA3C; ENSG00000198033; TAA
VVDEVRTGTY

SEQ ID NO: 96589 - protein, 10 aa, Homo sapiens
  misc_feature: Table A; Target 96589; HLA-A*03:02; TUBA3C; ENSG00000198033; TAA
VVDEVRTGTY

SEQ ID NO: 96590 - protein, 10 aa, Homo sapiens
  misc_feature: Table A; Target 96590; HLA-A*11:01; TUBA3C; ENSG00000198033; TAA
VVDEVRTGTY

SEQ ID NO: 96591 - protein, 10 aa, Homo sapiens
  misc_feature: Table A; Target 96591; HLA-A*23:01; TUBA3C; ENSG00000198033; TAA
VVDEVRTGTY

SEQ ID NO: 96592 - protein, 10 aa, Homo sapiens
  misc_feature: Table A; Target 96592; HLA-A*25:01; TUBA3C; ENSG00000198033; TAA
VVDEVRTGTY

SEQ ID NO: 96593 - protein, 10 aa, Homo sapiens
  misc_feature: Table A; Target 96593; HLA-A*26:01; TUBA3C; ENSG00000198033; TAA
VVDEVRTGTY

SEQ ID NO: 96594 - protein, 10 aa, Homo sapiens
  misc_feature: Table A; Target 96594; HLA-A*29:02; TUBA3C; ENSG00000198033; TAA
VVDEVRTGTY

SEQ ID NO: 96595 - protein, 10 aa, Homo sapiens
  misc_feature: Table A; Target 96595; HLA-A*30:02; TUBA3C; ENSG00000198033; TAA
VVDEVRTGTY

SEQ ID NO: 96596 - protein, 10 aa, Homo sapiens
  misc_feature: Table A; Target 96596; HLA-A*32:01; TUBA3C; ENSG00000198033; TAA
VVDEVRTGTY

SEQ ID NO: 96597 - protein, 10 aa, Homo sapiens
  misc_feature: Table A; Target 96597; HLA-A*33:03; TUBA3C; ENSG00000198033; TAA
VVDEVRTGTY

SEQ ID NO: 96598 - protein, 10 aa, Homo sapiens
  misc_feature: Table A; Target 96598; HLA-A*68:01; TUBA3C; ENSG00000198033; TAA
VVDEVRTGTY

SEQ ID NO: 96599 - protein, 10 aa, Homo sapiens
  misc_feature: Table A; Target 96599; HLA-B*07:02; TUBA3C; ENSG00000198033; TAA
VVDEVRTGTY

SEQ ID NO: 96600 - protein, 10 aa, Homo sapiens
  misc_feature: Table A; Target 96600; HLA-B*15:01; TUBA3C; ENSG00000198033; TAA
VVDEVRTGTY

SEQ ID NO: 96601 - protein, 10 aa, Homo sapiens
  misc_feature: Table A; Target 96601; HLA-B*15:03; TUBA3C; ENSG00000198033; TAA
VVDEVRTGTY

SEQ ID NO: 96602 - protein, 10 aa, Homo sapiens
  misc_feature: Table A; Target 96602; HLA-B*18:01; TUBA3C; ENSG00000198033; TAA
VVDEVRTGTY

SEQ ID NO: 96603 - protein, 10 aa, Homo sapiens
  misc_feature: Table A; Target 96603; HLA-B*27:02; TUBA3C; ENSG00000198033; TAA
VVDEVRTGTY

SEQ ID NO: 96604 - protein, 10 aa, Homo sapiens
  misc_feature: Table A; Target 96604; HLA-B*27:05; TUBA3C; ENSG00000198033; TAA
VVDEVRTGTY

SEQ ID NO: 96605 - protein, 10 aa, Homo sapiens
  misc_feature: Table A; Target 96605; HLA-B*35:01; TUBA3C; ENSG00000198033; TAA
VVDEVRTGTY

SEQ ID NO: 96606 - protein, 10 aa, Homo sapiens
  misc_feature: Table A; Target 96606; HLA-B*38:01; TUBA3C; ENSG00000198033; TAA
VVDEVRTGTY

SEQ ID NO: 96607 - protein, 10 aa, Homo sapiens
  misc_feature: Table A; Target 96607; HLA-B*39:01; TUBA3C; ENSG00000198033; TAA
VVDEVRTGTY

SEQ ID NO: 96608 - protein, 10 aa, Homo sapiens
  misc_feature: Table A; Target 96608; HLA-B*44:02; TUBA3C; ENSG00000198033; TAA
VVDEVRTGTY

SEQ ID NO: 96609 - protein, 10 aa, Homo sapiens
  misc_feature: Table A; Target 96609; HLA-B*44:03; TUBA3C; ENSG00000198033; TAA
VVDEVRTGTY

SEQ ID NO: 96610 - protein, 10 aa, Homo sapiens
  misc_feature: Table A; Target 96610; HLA-B*46:01; TUBA3C; ENSG00000198033; TAA
VVDEVRTGTY

SEQ ID NO: 96611 - protein, 10 aa, Homo sapiens
  misc_feature: Table A; Target 96611; HLA-B*55:01; TUBA3C; ENSG00000198033; TAA
VVDEVRTGTY

SEQ ID NO: 96612 - protein, 10 aa, Homo sapiens
  misc_feature: Table A; Target 96612; HLA-B*57:01; TUBA3C; ENSG00000198033; TAA
VVDEVRTGTY

SEQ ID NO: 96613 - protein, 10 aa, Homo sapiens
  misc_feature: Table A; Target 96613; HLA-B*58:01; TUBA3C; ENSG00000198033; TAA
VVDEVRTGTY

SEQ ID NO: 96614 - protein, 10 aa, Homo sapiens
  misc_feature: Table A; Target 96614; HLA-C*01:02; TUBA3C; ENSG00000198033; TAA
VVDEVRTGTY

SEQ ID NO: 96615 - protein, 10 aa, Homo sapiens
  misc_feature: Table A; Target 96615; HLA-C*02:02; TUBA3C; ENSG00000198033; TAA
VVDEVRTGTY

SEQ ID NO: 96616 - protein, 10 aa, Homo sapiens
  misc_feature: Table A; Target 96616; HLA-C*03:03; TUBA3C; ENSG00000198033; TAA
VVDEVRTGTY

SEQ ID NO: 96617 - protein, 10 aa, Homo sapiens
  misc_feature: Table A; Target 96617; HLA-C*03:04; TUBA3C; ENSG00000198033; TAA
VVDEVRTGTY

SEQ ID NO: 96618 - protein, 10 aa, Homo sapiens
  misc_feature: Table A; Target 96618; HLA-C*04:01; TUBA3C; ENSG00000198033; TAA
VVDEVRTGTY

SEQ ID NO: 96619 - protein, 10 aa, Homo sapiens
  misc_feature: Table A; Target 96619; HLA-C*05:01; TUBA3C; ENSG00000198033; TAA
VVDEVRTGTY

SEQ ID NO: 96620 - protein, 10 aa, Homo sapiens
  misc_feature: Table A; Target 96620; HLA-C*06:02; TUBA3C; ENSG00000198033; TAA
VVDEVRTGTY

SEQ ID NO: 96621 - protein, 10 aa, Homo sapiens
  misc_feature: Table A; Target 96621; HLA-C*07:01; TUBA3C; ENSG00000198033; TAA
VVDEVRTGTY

SEQ ID NO: 96622 - protein, 10 aa, Homo sapiens
  misc_feature: Table A; Target 96622; HLA-C*07:02; TUBA3C; ENSG00000198033; TAA
VVDEVRTGTY

SEQ ID NO: 96623 - protein, 10 aa, Homo sapiens
  misc_feature: Table A; Target 96623; HLA-C*07:04; TUBA3C; ENSG00000198033; TAA
VVDEVRTGTY

SEQ ID NO: 96624 - protein, 10 aa, Homo sapiens
  misc_feature: Table A; Target 96624; HLA-C*07:06; TUBA3C; ENSG00000198033; TAA
VVDEVRTGTY

SEQ ID NO: 96625 - protein, 10 aa, Homo sapiens
  misc_feature: Table A; Target 96625; HLA-C*12:03; TUBA3C; ENSG00000198033; TAA
VVDEVRTGTY

SEQ ID NO: 96626 - protein, 10 aa, Homo sapiens
  misc_feature: Table A; Target 96626; HLA-C*14:02; TUBA3C; ENSG00000198033; TAA
VVDEVRTGTY

SEQ ID NO: 96627 - protein, 10 aa, Homo sapiens
  misc_feature: Table A; Target 96627; HLA-C*16:01; TUBA3C; ENSG00000198033; TAA
VVDEVRTGTY

SEQ ID NO: 96628 - protein, 10 aa, Homo sapiens
  misc_feature: Table A; Target 96628; HLA-C*16:02; TUBA3C; ENSG00000198033; TAA
VVDEVRTGTY

SEQ ID NO: 96629 - protein, 10 aa, Homo sapiens
  misc_feature: Table A; Target 96629; HLA-C*16:04; TUBA3C; ENSG00000198033; TAA
VVDEVRTGTY

SEQ ID NO: 96630 - protein, 11 aa, Homo sapiens
  misc_feature: Table A; Target 96630; HLA-A*01:01; TUBA3C; ENSG00000198033; TAA
VVDEVRTGTYR

SEQ ID NO: 96631 - protein, 11 aa, Homo sapiens
  misc_feature: Table A; Target 96631; HLA-A*02:07; TUBA3C; ENSG00000198033; TAA
VVDEVRTGTYR

SEQ ID NO: 96632 - protein, 11 aa, Homo sapiens
  misc_feature: Table A; Target 96632; HLA-A*03:01; TUBA3C; ENSG00000198033; TAA
VVDEVRTGTYR

SEQ ID NO: 96633 - protein, 11 aa, Homo sapiens
  misc_feature: Table A; Target 96633; HLA-A*03:02; TUBA3C; ENSG00000198033; TAA
VVDEVRTGTYR

SEQ ID NO: 96634 - protein, 11 aa, Homo sapiens
  misc_feature: Table A; Target 96634; HLA-A*11:01; TUBA3C; ENSG00000198033; TAA
VVDEVRTGTYR

SEQ ID NO: 96635 - protein, 11 aa, Homo sapiens
  misc_feature: Table A; Target 96635; HLA-A*31:01; TUBA3C; ENSG00000198033; TAA
VVDEVRTGTYR

SEQ ID NO: 96636 - protein, 11 aa, Homo sapiens
  misc_feature: Table A; Target 96636; HLA-A*33:01; TUBA3C; ENSG00000198033; TAA
VVDEVRTGTYR

SEQ ID NO: 96637 - protein, 11 aa, Homo sapiens
  misc_feature: Table A; Target 96637; HLA-A*33:03; TUBA3C; ENSG00000198033; TAA
VVDEVRTGTYR

SEQ ID NO: 96638 - protein, 11 aa, Homo sapiens
  misc_feature: Table A; Target 96638; HLA-A*68:01; TUBA3C; ENSG00000198033; TAA
VVDEVRTGTYR

SEQ ID NO: 96639 - protein, 11 aa, Homo sapiens
  misc_feature: Table A; Target 96639; HLA-A*68:02; TUBA3C; ENSG00000198033; TAA
VVDEVRTGTYR

SEQ ID NO: 96640 - protein, 11 aa, Homo sapiens
  misc_feature: Table A; Target 96640; HLA-B*27:02; TUBA3C; ENSG00000198033; TAA
VVDEVRTGTYR

SEQ ID NO: 96641 - protein, 11 aa, Homo sapiens
  misc_feature: Table A; Target 96641; HLA-B*27:05; TUBA3C; ENSG00000198033; TAA
VVDEVRTGTYR

SEQ ID NO: 96642 - protein, 11 aa, Homo sapiens
  misc_feature: Table A; Target 96642; HLA-C*04:01; TUBA3C; ENSG00000198033; TAA
VVDEVRTGTYR

SEQ ID NO: 96643 - protein, 11 aa, Homo sapiens
  misc_feature: Table A; Target 96643; HLA-C*05:01; TUBA3C; ENSG00000198033; TAA
VVDEVRTGTYR

SEQ ID NO: 96644 - protein, 11 aa, Homo sapiens
  misc_feature: Table A; Target 96644; HLA-C*06:02; TUBA3C; ENSG00000198033; TAA
VVDEVRTGTYR

SEQ ID NO: 96645 - protein, 11 aa, Homo sapiens
  misc_feature: Table A; Target 96645; HLA-C*07:06; TUBA3C; ENSG00000198033; TAA
VVDEVRTGTYR

SEQ ID NO: 96646 - protein, 8 aa, Homo sapiens
  misc_feature: Table A; Target 96646; HLA-C*05:01; TUBA3C; ENSG00000198033; TAA
VVEPYNSI

SEQ ID NO: 96647 - protein, 9 aa, Homo sapiens
  misc_feature: Table A; Target 96647; HLA-A*01:01; TUBA3C; ENSG00000198033; TAA
VVEPYNSIL

SEQ ID NO: 96648 - protein, 9 aa, Homo sapiens
  misc_feature: Table A; Target 96648; HLA-A*02:07; TUBA3C; ENSG00000198033; TAA
VVEPYNSIL

SEQ ID NO: 96649 - protein, 9 aa, Homo sapiens
  misc_feature: Table A; Target 96649; HLA-A*68:02; TUBA3C; ENSG00000198033; TAA
VVEPYNSIL

SEQ ID NO: 96650 - protein, 9 aa, Homo sapiens
  misc_feature: Table A; Target 96650; HLA-B*07:02; TUBA3C; ENSG00000198033; TAA
VVEPYNSIL

SEQ ID NO: 96651 - protein, 9 aa, Homo sapiens
  misc_feature: Table A; Target 96651; HLA-B*27:05; TUBA3C; ENSG00000198033; TAA
VVEPYNSIL

SEQ ID NO: 96652 - protein, 9 aa, Homo sapiens
  misc_feature: Table A; Target 96652; HLA-B*35:03; TUBA3C; ENSG00000198033; TAA
VVEPYNSIL

SEQ ID NO: 96653 - protein, 9 aa, Homo sapiens
  misc_feature: Table A; Target 96653; HLA-B*38:01; TUBA3C; ENSG00000198033; TAA
VVEPYNSIL

SEQ ID NO: 96654 - protein, 9 aa, Homo sapiens
  misc_feature: Table A; Target 96654; HLA-B*39:01; TUBA3C; ENSG00000198033; TAA
VVEPYNSIL

SEQ ID NO: 96655 - protein, 9 aa, Homo sapiens
  misc_feature: Table A; Target 96655; HLA-B*40:01; TUBA3C; ENSG00000198033; TAA
VVEPYNSIL

SEQ ID NO: 96656 - protein, 9 aa, Homo sapiens
  misc_feature: Table A; Target 96656; HLA-B*58:01; TUBA3C; ENSG00000198033; TAA
VVEPYNSIL

SEQ ID NO: 96657 - protein, 9 aa, Homo sapiens
  misc_feature: Table A; Target 96657; HLA-C*01:02; TUBA3C; ENSG00000198033; TAA
VVEPYNSIL

SEQ ID NO: 96658 - protein, 9 aa, Homo sapiens
  misc_feature: Table A; Target 96658; HLA-C*03:03; TUBA3C; ENSG00000198033; TAA
VVEPYNSIL

SEQ ID NO: 96659 - protein, 9 aa, Homo sapiens
  misc_feature: Table A; Target 96659; HLA-C*03:04; TUBA3C; ENSG00000198033; TAA
VVEPYNSIL

SEQ ID NO: 96660 - protein, 9 aa, Homo sapiens
  misc_feature: Table A; Target 96660; HLA-C*04:01; TUBA3C; ENSG00000198033; TAA
VVEPYNSIL

SEQ ID NO: 96661 - protein, 9 aa, Homo sapiens
  misc_feature: Table A; Target 96661; HLA-C*05:01; TUBA3C; ENSG00000198033; TAA
VVEPYNSIL

SEQ ID NO: 96662 - protein, 9 aa, Homo sapiens
  misc_feature: Table A; Target 96662; HLA-C*06:02; TUBA3C; ENSG00000198033; TAA
VVEPYNSIL

SEQ ID NO: 96663 - protein, 9 aa, Homo sapiens
  misc_feature: Table A; Target 96663; HLA-C*07:01; TUBA3C; ENSG00000198033; TAA
VVEPYNSIL

SEQ ID NO: 96664 - protein, 9 aa, Homo sapiens
  misc_feature: Table A; Target 96664; HLA-C*07:04; TUBA3C; ENSG00000198033; TAA
VVEPYNSIL

SEQ ID NO: 96665 - protein, 9 aa, Homo sapiens
  misc_feature: Table A; Target 96665; HLA-C*12:03; TUBA3C; ENSG00000198033; TAA
VVEPYNSIL

SEQ ID NO: 96666 - protein, 9 aa, Homo sapiens
  misc_feature: Table A; Target 96666; HLA-C*16:02; TUBA3C; ENSG00000198033; TAA
VVEPYNSIL

SEQ ID NO: 96667 - protein, 10 aa, Homo sapiens
  misc_feature: Table A; Target 96667; HLA-A*01:01; TUBA3C; ENSG00000198033; TAA
VVEPYNSILT

SEQ ID NO: 96668 - protein, 10 aa, Homo sapiens
  misc_feature: Table A; Target 96668; HLA-C*06:02; TUBA3C; ENSG00000198033; TAA
VVEPYNSILT

SEQ ID NO: 96669 - protein, 10 aa, Homo sapiens
  misc_feature: Table A; Target 96669; HLA-C*07:01; TUBA3C; ENSG00000198033; TAA
VVEPYNSILT

SEQ ID NO: 96670 - protein, 11 aa, Homo sapiens
  misc_feature: Table A; Target 96670; HLA-C*04:01; TUBA3C; ENSG00000198033; TAA
VVEPYNSILTT

SEQ ID NO: 96671 - protein, 11 aa, Homo sapiens
  misc_feature: Table A; Target 96671; HLA-C*06:02; TUBA3C; ENSG00000198033; TAA
VVEPYNSILTT

SEQ ID NO: 96672 - protein, 11 aa, Homo sapiens
  misc_feature: Table A; Target 96672; HLA-C*07:01; TUBA3C; ENSG00000198033; TAA
VVEPYNSILTT

SEQ ID NO: 96673 - protein, 9 aa, Homo sapiens
  misc_feature: Table A; Target 96673; HLA-A*03:01; TUBA3C; ENSG00000198033; TAA
VVPGGDLAK

SEQ ID NO: 96674 - protein, 9 aa, Homo sapiens
  misc_feature: Table A; Target 96674; HLA-A*03:02; TUBA3C; ENSG00000198033; TAA
VVPGGDLAK

SEQ ID NO: 96675 - protein, 9 aa, Homo sapiens
  misc_feature: Table A; Target 96675; HLA-A*11:01; TUBA3C; ENSG00000198033; TAA
VVPGGDLAK

SEQ ID NO: 96676 - protein, 9 aa, Homo sapiens
  misc_feature: Table A; Target 96676; HLA-C*01:02; TUBA3C; ENSG00000198033; TAA
VVPGGDLAK

SEQ ID NO: 96677 - protein, 10 aa, Homo sapiens
  misc_feature: Table A; Target 96677; HLA-A*02:01; TUBA3C; ENSG00000198033; TAA
VVPGGDLAKV

SEQ ID NO: 96678 - protein, 10 aa, Homo sapiens
  misc_feature: Table A; Target 96678; HLA-A*02:03; TUBA3C; ENSG00000198033; TAA
VVPGGDLAKV

SEQ ID NO: 96679 - protein, 10 aa, Homo sapiens
  misc_feature: Table A; Target 96679; HLA-A*02:07; TUBA3C; ENSG00000198033; TAA
VVPGGDLAKV

SEQ ID NO: 96680 - protein, 10 aa, Homo sapiens
  misc_feature: Table A; Target 96680; HLA-A*25:01; TUBA3C; ENSG00000198033; TAA
VVPGGDLAKV

SEQ ID NO: 96681 - protein, 10 aa, Homo sapiens
  misc_feature: Table A; Target 96681; HLA-A*26:01; TUBA3C; ENSG00000198033; TAA
VVPGGDLAKV

SEQ ID NO: 96682 - protein, 10 aa, Homo sapiens
  misc_feature: Table A; Target 96682; HLA-A*68:02; TUBA3C; ENSG00000198033; TAA
VVPGGDLAKV

SEQ ID NO: 96683 - protein, 8 aa, Homo sapiens
  misc_feature: Table A; Target 96683; HLA-C*06:02; TUBA3C; ENSG00000198033; TAA
VVPKDVNA

SEQ ID NO: 96684 - protein, 9 aa, Homo sapiens
  misc_feature: Table A; Target 96684; HLA-A*02:03; TUBA3C; ENSG00000198033; TAA
VVPKDVNAA

SEQ ID NO: 96685 - protein, 9 aa, Homo sapiens
  misc_feature: Table A; Target 96685; HLA-A*02:07; TUBA3C; ENSG00000198033; TAA
VVPKDVNAA

SEQ ID NO: 96686 - protein, 9 aa, Homo sapiens
  misc_feature: Table A; Target 96686; HLA-B*55:01; TUBA3C; ENSG00000198033; TAA
VVPKDVNAA

SEQ ID NO: 96687 - protein, 9 aa, Homo sapiens
  misc_feature: Table A; Target 96687; HLA-C*01:02; TUBA3C; ENSG00000198033; TAA
VVPKDVNAA

SEQ ID NO: 96688 - protein, 10 aa, Homo sapiens
  misc_feature: Table A; Target 96688; HLA-A*02:07; TUBA3C; ENSG00000198033; TAA
VVPKDVNAAI

SEQ ID NO: 96689 - protein, 10 aa, Homo sapiens
  misc_feature: Table A; Target 96689; HLA-A*25:01; TUBA3C; ENSG00000198033; TAA
VVPKDVNAAI

SEQ ID NO: 96690 - protein, 10 aa, Homo sapiens
  misc_feature: Table A; Target 96690; HLA-A*68:02; TUBA3C; ENSG00000198033; TAA
VVPKDVNAAI

SEQ ID NO: 96691 - protein, 10 aa, Homo sapiens
  misc_feature: Table A; Target 96691; HLA-B*07:02; TUBA3C; ENSG00000198033; TAA
VVPKDVNAAI

SEQ ID NO: 96692 - protein, 10 aa, Homo sapiens
  misc_feature: Table A; Target 96692; HLA-B*13:02; TUBA3C; ENSG00000198033; TAA
VVPKDVNAAI

SEQ ID NO: 96693 - protein, 10 aa, Homo sapiens
  misc_feature: Table A; Target 96693; HLA-B*58:01; TUBA3C; ENSG00000198033; TAA
VVPKDVNAAI

SEQ ID NO: 96694 - protein, 10 aa, Homo sapiens
  misc_feature: Table A; Target 96694; HLA-C*01:02; TUBA3C; ENSG00000198033; TAA
VVPKDVNAAI

SEQ ID NO: 96695 - protein, 10 aa, Homo sapiens
  misc_feature: Table A; Target 96695; HLA-C*06:02; TUBA3C; ENSG00000198033; TAA
VVPKDVNAAI

SEQ ID NO: 96696 - protein, 10 aa, Homo sapiens
  misc_feature: Table A; Target 96696; HLA-C*07:02; TUBA3C; ENSG00000198033; TAA
VVPKDVNAAI

SEQ ID NO: 96697 - protein, 11 aa, Homo sapiens
  misc_feature: Table A; Target 96697; HLA-A*02:07; TUBA3C; ENSG00000198033; TAA
VVPKDVNAAIA

SEQ ID NO: 96698 - protein, 9 aa, Homo sapiens
  misc_feature: Table A; Target 96698; HLA-A*24:02; TUBA3C; ENSG00000198033; TAA
YAKRAFVHW

SEQ ID NO: 96699 - protein, 9 aa, Homo sapiens
  misc_feature: Table A; Target 96699; HLA-A*31:01; TUBA3C; ENSG00000198033; TAA
YAKRAFVHW

SEQ ID NO: 96700 - protein, 9 aa, Homo sapiens
  misc_feature: Table A; Target 96700; HLA-A*33:01; TUBA3C; ENSG00000198033; TAA
YAKRAFVHW

SEQ ID NO: 96701 - protein, 9 aa, Homo sapiens
  misc_feature: Table A; Target 96701; HLA-B*57:01; TUBA3C; ENSG00000198033; TAA
YAKRAFVHW

SEQ ID NO: 96702 - protein, 9 aa, Homo sapiens
  misc_feature: Table A; Target 96702; HLA-C*02:02; TUBA3C; ENSG00000198033; TAA
YAKRAFVHW

SEQ ID NO: 96703 - protein, 8 aa, Homo sapiens
  misc_feature: Table A; Target 96703; HLA-C*07:01; TUBA3C; ENSG00000198033; TAA
YAPVISAE

SEQ ID NO: 96704 - protein, 8 aa, Homo sapiens
  misc_feature: Table A; Target 96704; HLA-C*12:03; TUBA3C; ENSG00000198033; TAA
YAPVISAE

SEQ ID NO: 96705 - protein, 9 aa, Homo sapiens
  misc_feature: Table A; Target 96705; HLA-A*01:01; TUBA3C; ENSG00000198033; TAA
YAPVISAEK

SEQ ID NO: 96706 - protein, 9 aa, Homo sapiens
  misc_feature: Table A; Target 96706; HLA-A*02:07; TUBA3C; ENSG00000198033; TAA
YAPVISAEK

SEQ ID NO: 96707 - protein, 9 aa, Homo sapiens
  misc_feature: Table A; Target 96707; HLA-A*03:01; TUBA3C; ENSG00000198033; TAA
YAPVISAEK

SEQ ID NO: 96708 - protein, 9 aa, Homo sapiens
  misc_feature: Table A; Target 96708; HLA-A*03:02; TUBA3C; ENSG00000198033; TAA
YAPVISAEK

SEQ ID NO: 96709 - protein, 9 aa, Homo sapiens
  misc_feature: Table A; Target 96709; HLA-A*11:01; TUBA3C; ENSG00000198033; TAA
YAPVISAEK

SEQ ID NO: 96710 - protein, 9 aa, Homo sapiens
  misc_feature: Table A; Target 96710; HLA-A*24:02; TUBA3C; ENSG00000198033; TAA
YAPVISAEK

SEQ ID NO: 96711 - protein, 9 aa, Homo sapiens
  misc_feature: Table A; Target 96711; HLA-A*26:01; TUBA3C; ENSG00000198033; TAA
YAPVISAEK

SEQ ID NO: 96712 - protein, 9 aa, Homo sapiens
  misc_feature: Table A; Target 96712; HLA-A*29:02; TUBA3C; ENSG00000198033; TAA
YAPVISAEK

SEQ ID NO: 96713 - protein, 9 aa, Homo sapiens
  misc_feature: Table A; Target 96713; HLA-A*31:01; TUBA3C; ENSG00000198033; TAA
YAPVISAEK

SEQ ID NO: 96714 - protein, 9 aa, Homo sapiens
  misc_feature: Table A; Target 96714; HLA-A*33:01; TUBA3C; ENSG00000198033; TAA
YAPVISAEK

SEQ ID NO: 96715 - protein, 9 aa, Homo sapiens
  misc_feature: Table A; Target 96715; HLA-A*33:03; TUBA3C; ENSG00000198033; TAA
YAPVISAEK

SEQ ID NO: 96716 - protein, 9 aa, Homo sapiens
  misc_feature: Table A; Target 96716; HLA-A*68:01; TUBA3C; ENSG00000198033; TAA
YAPVISAEK

SEQ ID NO: 96717 - protein, 9 aa, Homo sapiens
  misc_feature: Table A; Target 96717; HLA-A*68:02; TUBA3C; ENSG00000198033; TAA
YAPVISAEK

SEQ ID NO: 96718 - protein, 9 aa, Homo sapiens
  misc_feature: Table A; Target 96718; HLA-B*07:02; TUBA3C; ENSG00000198033; TAA
YAPVISAEK

SEQ ID NO: 96719 - protein, 9 aa, Homo sapiens
  misc_feature: Table A; Target 96719; HLA-B*13:02; TUBA3C; ENSG00000198033; TAA
YAPVISAEK

SEQ ID NO: 96720 - protein, 9 aa, Homo sapiens
  misc_feature: Table A; Target 96720; HLA-B*27:02; TUBA3C; ENSG00000198033; TAA
YAPVISAEK

SEQ ID NO: 96721 - protein, 9 aa, Homo sapiens
  misc_feature: Table A; Target 96721; HLA-B*27:05; TUBA3C; ENSG00000198033; TAA
YAPVISAEK

SEQ ID NO: 96722 - protein, 9 aa, Homo sapiens
  misc_feature: Table A; Target 96722; HLA-B*35:01; TUBA3C; ENSG00000198033; TAA
YAPVISAEK

SEQ ID NO: 96723 - protein, 9 aa, Homo sapiens
  misc_feature: Table A; Target 96723; HLA-B*35:03; TUBA3C; ENSG00000198033; TAA
YAPVISAEK

SEQ ID NO: 96724 - protein, 9 aa, Homo sapiens
  misc_feature: Table A; Target 96724; HLA-B*46:01; TUBA3C; ENSG00000198033; TAA
YAPVISAEK

SEQ ID NO: 96725 - protein, 9 aa, Homo sapiens
  misc_feature: Table A; Target 96725; HLA-B*51:01; TUBA3C; ENSG00000198033; TAA
YAPVISAEK

SEQ ID NO: 96726 - protein, 9 aa, Homo sapiens
  misc_feature: Table A; Target 96726; HLA-B*54:01; TUBA3C; ENSG00000198033; TAA
YAPVISAEK

SEQ ID NO: 96727 - protein, 9 aa, Homo sapiens
  misc_feature: Table A; Target 96727; HLA-B*57:01; TUBA3C; ENSG00000198033; TAA
YAPVISAEK

SEQ ID NO: 96728 - protein, 9 aa, Homo sapiens
  misc_feature: Table A; Target 96728; HLA-C*01:02; TUBA3C; ENSG00000198033; TAA
YAPVISAEK

SEQ ID NO: 96729 - protein, 9 aa, Homo sapiens
  misc_feature: Table A; Target 96729; HLA-C*02:02; TUBA3C; ENSG00000198033; TAA
YAPVISAEK

SEQ ID NO: 96730 - protein, 9 aa, Homo sapiens
  misc_feature: Table A; Target 96730; HLA-C*03:03; TUBA3C; ENSG00000198033; TAA
YAPVISAEK

SEQ ID NO: 96731 - protein, 9 aa, Homo sapiens
  misc_feature: Table A; Target 96731; HLA-C*03:04; TUBA3C; ENSG00000198033; TAA
YAPVISAEK

SEQ ID NO: 96732 - protein, 9 aa, Homo sapiens
  misc_feature: Table A; Target 96732; HLA-C*04:01; TUBA3C; ENSG00000198033; TAA
YAPVISAEK

SEQ ID NO: 96733 - protein, 9 aa, Homo sapiens
  misc_feature: Table A; Target 96733; HLA-C*05:01; TUBA3C; ENSG00000198033; TAA
YAPVISAEK

SEQ ID NO: 96734 - protein, 9 aa, Homo sapiens
  misc_feature: Table A; Target 96734; HLA-C*06:02; TUBA3C; ENSG00000198033; TAA
YAPVISAEK

SEQ ID NO: 96735 - protein, 9 aa, Homo sapiens
  misc_feature: Table A; Target 96735; HLA-C*07:01; TUBA3C; ENSG00000198033; TAA
YAPVISAEK

SEQ ID NO: 96736 - protein, 9 aa, Homo sapiens
  misc_feature: Table A; Target 96736; HLA-C*07:02; TUBA3C; ENSG00000198033; TAA
YAPVISAEK

SEQ ID NO: 96737 - protein, 9 aa, Homo sapiens
  misc_feature: Table A; Target 96737; HLA-C*07:04; TUBA3C; ENSG00000198033; TAA
YAPVISAEK

SEQ ID NO: 96738 - protein, 9 aa, Homo sapiens
  misc_feature: Table A; Target 96738; HLA-C*07:06; TUBA3C; ENSG00000198033; TAA
YAPVISAEK

SEQ ID NO: 96739 - protein, 9 aa, Homo sapiens
  misc_feature: Table A; Target 96739; HLA-C*12:03; TUBA3C; ENSG00000198033; TAA
YAPVISAEK

SEQ ID NO: 96740 - protein, 9 aa, Homo sapiens
  misc_feature: Table A; Target 96740; HLA-C*16:01; TUBA3C; ENSG00000198033; TAA
YAPVISAEK

SEQ ID NO: 96741 - protein, 9 aa, Homo sapiens
  misc_feature: Table A; Target 96741; HLA-C*16:04; TUBA3C; ENSG00000198033; TAA
YAPVISAEK

SEQ ID NO: 96742 - protein, 10 aa, Homo sapiens
  misc_feature: Table A; Target 96742; HLA-A*02:07; TUBA3C; ENSG00000198033; TAA
YAPVISAEKA

SEQ ID NO: 96743 - protein, 10 aa, Homo sapiens
  misc_feature: Table A; Target 96743; HLA-B*54:01; TUBA3C; ENSG00000198033; TAA
YAPVISAEKA

SEQ ID NO: 96744 - protein, 11 aa, Homo sapiens
  misc_feature: Table A; Target 96744; HLA-A*01:01; TUBA3C; ENSG00000198033; TAA
YAPVISAEKAY

SEQ ID NO: 96745 - protein, 11 aa, Homo sapiens
  misc_feature: Table A; Target 96745; HLA-A*25:01; TUBA3C; ENSG00000198033; TAA
YAPVISAEKAY

SEQ ID NO: 96746 - protein, 11 aa, Homo sapiens
  misc_feature: Table A; Target 96746; HLA-A*26:01; TUBA3C; ENSG00000198033; TAA
YAPVISAEKAY

SEQ ID NO: 96747 - protein, 11 aa, Homo sapiens
  misc_feature: Table A; Target 96747; HLA-A*29:02; TUBA3C; ENSG00000198033; TAA
YAPVISAEKAY

SEQ ID NO: 96748 - protein, 11 aa, Homo sapiens
  misc_feature: Table A; Target 96748; HLA-A*30:02; TUBA3C; ENSG00000198033; TAA
YAPVISAEKAY

SEQ ID NO: 96749 - protein, 11 aa, Homo sapiens
  misc_feature: Table A; Target 96749; HLA-B*15:01; TUBA3C; ENSG00000198033; TAA
YAPVISAEKAY

SEQ ID NO: 96750 - protein, 11 aa, Homo sapiens
  misc_feature: Table A; Target 96750; HLA-B*15:03; TUBA3C; ENSG00000198033; TAA
YAPVISAEKAY

SEQ ID NO: 96751 - protein, 11 aa, Homo sapiens
  misc_feature: Table A; Target 96751; HLA-B*35:01; TUBA3C; ENSG00000198033; TAA
YAPVISAEKAY

SEQ ID NO: 96752 - protein, 11 aa, Homo sapiens
  misc_feature: Table A; Target 96752; HLA-B*46:01; TUBA3C; ENSG00000198033; TAA
YAPVISAEKAY

SEQ ID NO: 96753 - protein, 11 aa, Homo sapiens
  misc_feature: Table A; Target 96753; HLA-C*01:02; TUBA3C; ENSG00000198033; TAA
YAPVISAEKAY

SEQ ID NO: 96754 - protein, 11 aa, Homo sapiens
  misc_feature: Table A; Target 96754; HLA-C*02:02; TUBA3C; ENSG00000198033; TAA
YAPVISAEKAY

SEQ ID NO: 96755 - protein, 11 aa, Homo sapiens
  misc_feature: Table A; Target 96755; HLA-C*03:03; TUBA3C; ENSG00000198033; TAA
YAPVISAEKAY

SEQ ID NO: 96756 - protein, 11 aa, Homo sapiens
  misc_feature: Table A; Target 96756; HLA-C*04:01; TUBA3C; ENSG00000198033; TAA
YAPVISAEKAY

SEQ ID NO: 96757 - protein, 11 aa, Homo sapiens
  misc_feature: Table A; Target 96757; HLA-C*07:01; TUBA3C; ENSG00000198033; TAA
YAPVISAEKAY

SEQ ID NO: 96758 - protein, 11 aa, Homo sapiens
  misc_feature: Table A; Target 96758; HLA-C*16:01; TUBA3C; ENSG00000198033; TAA
YAPVISAEKAY

SEQ ID NO: 96759 - protein, 11 aa, Homo sapiens
  misc_feature: Table A; Target 96759; HLA-C*16:02; TUBA3C; ENSG00000198033; TAA
YAPVISAEKAY

SEQ ID NO: 96760 - protein, 11 aa, Homo sapiens
  misc_feature: Table A; Target 96760; HLA-C*16:04; TUBA3C; ENSG00000198033; TAA
YAPVISAEKAY

SEQ ID NO: 96761 - protein, 8 aa, Homo sapiens
  misc_feature: Table A; Target 96761; HLA-A*23:01; TUBA3C; ENSG00000198033; TAA
YARGHYTI

SEQ ID NO: 96762 - protein, 8 aa, Homo sapiens
  misc_feature: Table A; Target 96762; HLA-B*08:01; TUBA3C; ENSG00000198033; TAA
YARGHYTI

SEQ ID NO: 96763 - protein, 8 aa, Homo sapiens
  misc_feature: Table A; Target 96763; HLA-B*40:02; TUBA3C; ENSG00000198033; TAA
YARGHYTI

SEQ ID NO: 96764 - protein, 8 aa, Homo sapiens
  misc_feature: Table A; Target 96764; HLA-B*51:01; TUBA3C; ENSG00000198033; TAA
YARGHYTI

SEQ ID NO: 96765 - protein, 8 aa, Homo sapiens
  misc_feature: Table A; Target 96765; HLA-B*54:01; TUBA3C; ENSG00000198033; TAA
YARGHYTI

SEQ ID NO: 96766 - protein, 8 aa, Homo sapiens
  misc_feature: Table A; Target 96766; HLA-B*57:01; TUBA3C; ENSG00000198033; TAA
YARGHYTI

SEQ ID NO: 96767 - protein, 8 aa, Homo sapiens
  misc_feature: Table A; Target 96767; HLA-C*06:02; TUBA3C; ENSG00000198033; TAA
YARGHYTI

SEQ ID NO: 96768 - protein, 8 aa, Homo sapiens
  misc_feature: Table A; Target 96768; HLA-C*07:01; TUBA3C; ENSG00000198033; TAA
YARGHYTI

SEQ ID NO: 96769 - protein, 8 aa, Homo sapiens
  misc_feature: Table A; Target 96769; HLA-C*07:02; TUBA3C; ENSG00000198033; TAA
YARGHYTI

SEQ ID NO: 96770 - protein, 10 aa, Homo sapiens
  misc_feature: Table A; Target 96770; HLA-A*03:01; TUBA3C; ENSG00000198033; TAA
YARGHYTIGK

SEQ ID NO: 96771 - protein, 10 aa, Homo sapiens
  misc_feature: Table A; Target 96771; HLA-A*31:01; TUBA3C; ENSG00000198033; TAA
YARGHYTIGK

SEQ ID NO: 96772 - protein, 9 aa, Homo sapiens
  misc_feature: Table A; Target 96772; HLA-A*30:01; TUBA3C; ENSG00000198033; TAA
YEEVGVDSV

SEQ ID NO: 96773 - protein, 9 aa, Homo sapiens
  misc_feature: Table A; Target 96773; HLA-A*68:02; TUBA3C; ENSG00000198033; TAA
YEEVGVDSV

SEQ ID NO: 96774 - protein, 9 aa, Homo sapiens
  misc_feature: Table A; Target 96774; HLA-B*13:02; TUBA3C; ENSG00000198033; TAA
YEEVGVDSV

SEQ ID NO: 96775 - protein, 9 aa, Homo sapiens
  misc_feature: Table A; Target 96775; HLA-B*18:01; TUBA3C; ENSG00000198033; TAA
YEEVGVDSV

SEQ ID NO: 96776 - protein, 9 aa, Homo sapiens
  misc_feature: Table A; Target 96776; HLA-B*27:05; TUBA3C; ENSG00000198033; TAA
YEEVGVDSV

SEQ ID NO: 96777 - protein, 9 aa, Homo sapiens
  misc_feature: Table A; Target 96777; HLA-B*37:01; TUBA3C; ENSG00000198033; TAA
YEEVGVDSV

SEQ ID NO: 96778 - protein, 9 aa, Homo sapiens
  misc_feature: Table A; Target 96778; HLA-B*38:01; TUBA3C; ENSG00000198033; TAA
YEEVGVDSV

SEQ ID NO: 96779 - protein, 9 aa, Homo sapiens
  misc_feature: Table A; Target 96779; HLA-B*39:01; TUBA3C; ENSG00000198033; TAA
YEEVGVDSV

SEQ ID NO: 96780 - protein, 9 aa, Homo sapiens
  misc_feature: Table A; Target 96780; HLA-B*40:01; TUBA3C; ENSG00000198033; TAA
YEEVGVDSV

SEQ ID NO: 96781 - protein, 9 aa, Homo sapiens
  misc_feature: Table A; Target 96781; HLA-B*40:02; TUBA3C; ENSG00000198033; TAA
YEEVGVDSV

SEQ ID NO: 96782 - protein, 9 aa, Homo sapiens
  misc_feature: Table A; Target 96782; HLA-B*49:01; TUBA3C; ENSG00000198033; TAA
YEEVGVDSV

SEQ ID NO: 96783 - protein, 9 aa, Homo sapiens
  misc_feature: Table A; Target 96783; HLA-B*55:01; TUBA3C; ENSG00000198033; TAA
YEEVGVDSV

SEQ ID NO: 96784 - protein, 9 aa, Homo sapiens
  misc_feature: Table A; Target 96784; HLA-C*03:03; TUBA3C; ENSG00000198033; TAA
YEEVGVDSV

SEQ ID NO: 96785 - protein, 9 aa, Homo sapiens
  misc_feature: Table A; Target 96785; HLA-C*04:01; TUBA3C; ENSG00000198033; TAA
YEEVGVDSV

SEQ ID NO: 96786 - protein, 9 aa, Homo sapiens
  misc_feature: Table A; Target 96786; HLA-C*05:01; TUBA3C; ENSG00000198033; TAA
YEEVGVDSV

SEQ ID NO: 96787 - protein, 9 aa, Homo sapiens
  misc_feature: Table A; Target 96787; HLA-C*07:04; TUBA3C; ENSG00000198033; TAA
YEEVGVDSV

SEQ ID NO: 96788 - protein, 9 aa, Homo sapiens
  misc_feature: Table A; Target 96788; HLA-C*12:03; TUBA3C; ENSG00000198033; TAA
YEEVGVDSV

SEQ ID NO: 96789 - protein, 9 aa, Homo sapiens
  misc_feature: Table A; Target 96789; HLA-C*16:02; TUBA3C; ENSG00000198033; TAA
YEEVGVDSV

SEQ ID NO: 96790 - protein, 11 aa, Homo sapiens
  misc_feature: Table A; Target 96790; HLA-B*18:01; TUBA3C; ENSG00000198033; TAA
YEEVGVDSVEA

SEQ ID NO: 96791 - protein, 11 aa, Homo sapiens
  misc_feature: Table A; Target 96791; HLA-B*27:05; TUBA3C; ENSG00000198033; TAA
YEEVGVDSVEA

SEQ ID NO: 96792 - protein, 11 aa, Homo sapiens
  misc_feature: Table A; Target 96792; HLA-B*39:01; TUBA3C; ENSG00000198033; TAA
YEEVGVDSVEA

SEQ ID NO: 96793 - protein, 11 aa, Homo sapiens
  misc_feature: Table A; Target 96793; HLA-B*40:01; TUBA3C; ENSG00000198033; TAA
YEEVGVDSVEA

SEQ ID NO: 96794 - protein, 11 aa, Homo sapiens
  misc_feature: Table A; Target 96794; HLA-B*40:02; TUBA3C; ENSG00000198033; TAA
YEEVGVDSVEA

SEQ ID NO: 96795 - protein, 11 aa, Homo sapiens
  misc_feature: Table A; Target 96795; HLA-C*07:04; TUBA3C; ENSG00000198033; TAA
YEEVGVDSVEA

SEQ ID NO: 96796 - protein, 11 aa, Homo sapiens
  misc_feature: Table A; Target 96796; HLA-C*12:03; TUBA3C; ENSG00000198033; TAA
YEEVGVDSVEA

SEQ ID NO: 96797 - protein, 9 aa, Homo sapiens
  misc_feature: Table A; Target 96797; HLA-B*08:01; TUBA3C; ENSG00000198033; TAA
YGKKSKLEF

SEQ ID NO: 96798 - protein, 9 aa, Homo sapiens
  misc_feature: Table A; Target 96798; HLA-C*07:01; TUBA3C; ENSG00000198033; TAA
YGKKSKLEF

SEQ ID NO: 96799 - protein, 8 aa, Homo sapiens
  misc_feature: Table A; Target 96799; HLA-B*39:01; TUBA3C; ENSG00000198033; TAA
YHEQLSVA

SEQ ID NO: 96800 - protein, 10 aa, Homo sapiens
  misc_feature: Table A; Target 96800; HLA-B*27:05; TUBA3C; ENSG00000198033; TAA
YHEQLSVAEI

SEQ ID NO: 96801 - protein, 10 aa, Homo sapiens
  misc_feature: Table A; Target 96801; HLA-B*38:01; TUBA3C; ENSG00000198033; TAA
YHEQLSVAEI

SEQ ID NO: 96802 - protein, 10 aa, Homo sapiens
  misc_feature: Table A; Target 96802; HLA-B*39:01; TUBA3C; ENSG00000198033; TAA
YHEQLSVAEI

SEQ ID NO: 96803 - protein, 10 aa, Homo sapiens
  misc_feature: Table A; Target 96803; HLA-C*04:01; TUBA3C; ENSG00000198033; TAA
YHEQLSVAEI

SEQ ID NO: 96804 - protein, 10 aa, Homo sapiens
  misc_feature: Table A; Target 96804; HLA-C*07:01; TUBA3C; ENSG00000198033; TAA
YHEQLSVAEI

SEQ ID NO: 96805 - protein, 10 aa, Homo sapiens
  misc_feature: Table A; Target 96805; HLA-C*07:04; TUBA3C; ENSG00000198033; TAA
YHEQLSVAEI

SEQ ID NO: 96806 - protein, 8 aa, Homo sapiens
  misc_feature: Table A; Target 96806; HLA-C*07:01; TUBA3C; ENSG00000198033; TAA
YMACCMLY

SEQ ID NO: 96807 - protein, 8 aa, Homo sapiens
  misc_feature: Table A; Target 96807; HLA-C*07:01; TUBA3C; ENSG00000198033; TAA
YNSILTTH

SEQ ID NO: 96808 - protein, 9 aa, Homo sapiens
  misc_feature: Table A; Target 96808; HLA-C*04:01; TUBA3C; ENSG00000198033; TAA
YNSILTTHT

SEQ ID NO: 96809 - protein, 9 aa, Homo sapiens
  misc_feature: Table A; Target 96809; HLA-C*06:02; TUBA3C; ENSG00000198033; TAA
YNSILTTHT

SEQ ID NO: 96810 - protein, 9 aa, Homo sapiens
  misc_feature: Table A; Target 96810; HLA-C*07:01; TUBA3C; ENSG00000198033; TAA
YNSILTTHT

SEQ ID NO: 96811 - protein, 10 aa, Homo sapiens
  misc_feature: Table A; Target 96811; HLA-C*04:01; TUBA3C; ENSG00000198033; TAA
YNSILTTHTT

SEQ ID NO: 96812 - protein, 11 aa, Homo sapiens
  misc_feature: Table A; Target 96812; HLA-B*40:02; TUBA3C; ENSG00000198033; TAA
YNSILTTHTTL

SEQ ID NO: 96813 - protein, 11 aa, Homo sapiens
  misc_feature: Table A; Target 96813; HLA-C*06:02; TUBA3C; ENSG00000198033; TAA
YNSILTTHTTL

SEQ ID NO: 96814 - protein, 11 aa, Homo sapiens
  misc_feature: Table A; Target 96814; HLA-C*07:01; TUBA3C; ENSG00000198033; TAA
YNSILTTHTTL

SEQ ID NO: 96815 - protein, 8 aa, Homo sapiens
  misc_feature: Table A; Target 96815; HLA-B*35:01; TUBA3C; ENSG00000198033; TAA
YPAPQVST

SEQ ID NO: 96816 - protein, 8 aa, Homo sapiens
  misc_feature: Table A; Target 96816; HLA-B*35:03; TUBA3C; ENSG00000198033; TAA
YPAPQVST

SEQ ID NO: 96817 - protein, 8 aa, Homo sapiens
  misc_feature: Table A; Target 96817; HLA-B*51:01; TUBA3C; ENSG00000198033; TAA
YPAPQVST

SEQ ID NO: 96818 - protein, 8 aa, Homo sapiens
  misc_feature: Table A; Target 96818; HLA-B*54:01; TUBA3C; ENSG00000198033; TAA
YPAPQVST

SEQ ID NO: 96819 - protein, 8 aa, Homo sapiens
  misc_feature: Table A; Target 96819; HLA-B*55:01; TUBA3C; ENSG00000198033; TAA
YPAPQVST

SEQ ID NO: 96820 - protein, 8 aa, Homo sapiens
  misc_feature: Table A; Target 96820; HLA-B*56:01; TUBA3C; ENSG00000198033; TAA
YPAPQVST

SEQ ID NO: 96821 - protein, 8 aa, Homo sapiens
  misc_feature: Table A; Target 96821; HLA-C*04:01; TUBA3C; ENSG00000198033; TAA
YPAPQVST

SEQ ID NO: 96822 - protein, 8 aa, Homo sapiens
  misc_feature: Table A; Target 96822; HLA-C*07:02; TUBA3C; ENSG00000198033; TAA
YPAPQVST

SEQ ID NO: 96823 - protein, 8 aa, Homo sapiens
  misc_feature: Table A; Target 96823; HLA-C*16:02; TUBA3C; ENSG00000198033; TAA
YPAPQVST

SEQ ID NO: 96824 - protein, 9 aa, Homo sapiens
  misc_feature: Table A; Target 96824; HLA-A*02:01; TUBA3C; ENSG00000198033; TAA
YPAPQVSTA

SEQ ID NO: 96825 - protein, 9 aa, Homo sapiens
  misc_feature: Table A; Target 96825; HLA-A*02:03; TUBA3C; ENSG00000198033; TAA
YPAPQVSTA

SEQ ID NO: 96826 - protein, 9 aa, Homo sapiens
  misc_feature: Table A; Target 96826; HLA-A*02:04; TUBA3C; ENSG00000198033; TAA
YPAPQVSTA

SEQ ID NO: 96827 - protein, 9 aa, Homo sapiens
  misc_feature: Table A; Target 96827; HLA-A*02:07; TUBA3C; ENSG00000198033; TAA
YPAPQVSTA

SEQ ID NO: 96828 - protein, 9 aa, Homo sapiens
  misc_feature: Table A; Target 96828; HLA-A*23:01; TUBA3C; ENSG00000198033; TAA
YPAPQVSTA

SEQ ID NO: 96829 - protein, 9 aa, Homo sapiens
  misc_feature: Table A; Target 96829; HLA-A*24:02; TUBA3C; ENSG00000198033; TAA
YPAPQVSTA

SEQ ID NO: 96830 - protein, 9 aa, Homo sapiens
  misc_feature: Table A; Target 96830; HLA-A*25:01; TUBA3C; ENSG00000198033; TAA
YPAPQVSTA

SEQ ID NO: 96831 - protein, 9 aa, Homo sapiens
  misc_feature: Table A; Target 96831; HLA-A*26:01; TUBA3C; ENSG00000198033; TAA
YPAPQVSTA

SEQ ID NO: 96832 - protein, 9 aa, Homo sapiens
  misc_feature: Table A; Target 96832; HLA-A*30:01; TUBA3C; ENSG00000198033; TAA
YPAPQVSTA

SEQ ID NO: 96833 - protein, 9 aa, Homo sapiens
  misc_feature: Table A; Target 96833; HLA-A*32:01; TUBA3C; ENSG00000198033; TAA
YPAPQVSTA

SEQ ID NO: 96834 - protein, 9 aa, Homo sapiens
  misc_feature: Table A; Target 96834; HLA-A*68:01; TUBA3C; ENSG00000198033; TAA
YPAPQVSTA

SEQ ID NO: 96835 - protein, 9 aa, Homo sapiens
  misc_feature: Table A; Target 96835; HLA-A*68:02; TUBA3C; ENSG00000198033; TAA
YPAPQVSTA

SEQ ID NO: 96836 - protein, 9 aa, Homo sapiens
  misc_feature: Table A; Target 96836; HLA-B*07:02; TUBA3C; ENSG00000198033; TAA
YPAPQVSTA

SEQ ID NO: 96837 - protein, 9 aa, Homo sapiens
  misc_feature: Table A; Target 96837; HLA-B*08:01; TUBA3C; ENSG00000198033; TAA
YPAPQVSTA

SEQ ID NO: 96838 - protein, 9 aa, Homo sapiens
  misc_feature: Table A; Target 96838; HLA-B*13:02; TUBA3C; ENSG00000198033; TAA
YPAPQVSTA

SEQ ID NO: 96839 - protein, 9 aa, Homo sapiens
  misc_feature: Table A; Target 96839; HLA-B*15:01; TUBA3C; ENSG00000198033; TAA
YPAPQVSTA

SEQ ID NO: 96840 - protein, 9 aa, Homo sapiens
  misc_feature: Table A; Target 96840; HLA-B*15:03; TUBA3C; ENSG00000198033; TAA
YPAPQVSTA

SEQ ID NO: 96841 - protein, 9 aa, Homo sapiens
  misc_feature: Table A; Target 96841; HLA-B*18:01; TUBA3C; ENSG00000198033; TAA
YPAPQVSTA

SEQ ID NO: 96842 - protein, 9 aa, Homo sapiens
  misc_feature: Table A; Target 96842; HLA-B*27:05; TUBA3C; ENSG00000198033; TAA
YPAPQVSTA

SEQ ID NO: 96843 - protein, 9 aa, Homo sapiens
  misc_feature: Table A; Target 96843; HLA-B*35:01; TUBA3C; ENSG00000198033; TAA
YPAPQVSTA

SEQ ID NO: 96844 - protein, 9 aa, Homo sapiens
  misc_feature: Table A; Target 96844; HLA-B*35:03; TUBA3C; ENSG00000198033; TAA
YPAPQVSTA

SEQ ID NO: 96845 - protein, 9 aa, Homo sapiens
  misc_feature: Table A; Target 96845; HLA-B*37:01; TUBA3C; ENSG00000198033; TAA
YPAPQVSTA

SEQ ID NO: 96846 - protein, 9 aa, Homo sapiens
  misc_feature: Table A; Target 96846; HLA-B*38:01; TUBA3C; ENSG00000198033; TAA
YPAPQVSTA

SEQ ID NO: 96847 - protein, 9 aa, Homo sapiens
  misc_feature: Table A; Target 96847; HLA-B*39:01; TUBA3C; ENSG00000198033; TAA
YPAPQVSTA

SEQ ID NO: 96848 - protein, 9 aa, Homo sapiens
  misc_feature: Table A; Target 96848; HLA-B*40:02; TUBA3C; ENSG00000198033; TAA
YPAPQVSTA

SEQ ID NO: 96849 - protein, 9 aa, Homo sapiens
  misc_feature: Table A; Target 96849; HLA-B*46:01; TUBA3C; ENSG00000198033; TAA
YPAPQVSTA

SEQ ID NO: 96850 - protein, 9 aa, Homo sapiens
  misc_feature: Table A; Target 96850; HLA-B*49:01; TUBA3C; ENSG00000198033; TAA
YPAPQVSTA

SEQ ID NO: 96851 - protein, 9 aa, Homo sapiens
  misc_feature: Table A; Target 96851; HLA-B*51:01; TUBA3C; ENSG00000198033; TAA
YPAPQVSTA

SEQ ID NO: 96852 - protein, 9 aa, Homo sapiens
  misc_feature: Table A; Target 96852; HLA-B*54:01; TUBA3C; ENSG00000198033; TAA
YPAPQVSTA

SEQ ID NO: 96853 - protein, 9 aa, Homo sapiens
  misc_feature: Table A; Target 96853; HLA-B*55:01; TUBA3C; ENSG00000198033; TAA
YPAPQVSTA

SEQ ID NO: 96854 - protein, 9 aa, Homo sapiens
  misc_feature: Table A; Target 96854; HLA-B*56:01; TUBA3C; ENSG00000198033; TAA
YPAPQVSTA

SEQ ID NO: 96855 - protein, 9 aa, Homo sapiens
  misc_feature: Table A; Target 96855; HLA-B*58:01; TUBA3C; ENSG00000198033; TAA
YPAPQVSTA

SEQ ID NO: 96856 - protein, 9 aa, Homo sapiens
  misc_feature: Table A; Target 96856; HLA-C*01:02; TUBA3C; ENSG00000198033; TAA
YPAPQVSTA

SEQ ID NO: 96857 - protein, 9 aa, Homo sapiens
  misc_feature: Table A; Target 96857; HLA-C*02:02; TUBA3C; ENSG00000198033; TAA
YPAPQVSTA

SEQ ID NO: 96858 - protein, 9 aa, Homo sapiens
  misc_feature: Table A; Target 96858; HLA-C*03:03; TUBA3C; ENSG00000198033; TAA
YPAPQVSTA

SEQ ID NO: 96859 - protein, 9 aa, Homo sapiens
  misc_feature: Table A; Target 96859; HLA-C*03:04; TUBA3C; ENSG00000198033; TAA
YPAPQVSTA

SEQ ID NO: 96860 - protein, 9 aa, Homo sapiens
  misc_feature: Table A; Target 96860; HLA-C*04:01; TUBA3C; ENSG00000198033; TAA
YPAPQVSTA

SEQ ID NO: 96861 - protein, 9 aa, Homo sapiens
  misc_feature: Table A; Target 96861; HLA-C*05:01; TUBA3C; ENSG00000198033; TAA
YPAPQVSTA

SEQ ID NO: 96862 - protein, 9 aa, Homo sapiens
  misc_feature: Table A; Target 96862; HLA-C*06:02; TUBA3C; ENSG00000198033; TAA
YPAPQVSTA

SEQ ID NO: 96863 - protein, 9 aa, Homo sapiens
  misc_feature: Table A; Target 96863; HLA-C*07:01; TUBA3C; ENSG00000198033; TAA
YPAPQVSTA

SEQ ID NO: 96864 - protein, 9 aa, Homo sapiens
  misc_feature: Table A; Target 96864; HLA-C*07:02; TUBA3C; ENSG00000198033; TAA
YPAPQVSTA

SEQ ID NO: 96865 - protein, 9 aa, Homo sapiens
  misc_feature: Table A; Target 96865; HLA-C*07:04; TUBA3C; ENSG00000198033; TAA
YPAPQVSTA

SEQ ID NO: 96866 - protein, 9 aa, Homo sapiens
  misc_feature: Table A; Target 96866; HLA-C*07:06; TUBA3C; ENSG00000198033; TAA
YPAPQVSTA

SEQ ID NO: 96867 - protein, 9 aa, Homo sapiens
  misc_feature: Table A; Target 96867; HLA-C*12:03; TUBA3C; ENSG00000198033; TAA
YPAPQVSTA

SEQ ID NO: 96868 - protein, 9 aa, Homo sapiens
  misc_feature: Table A; Target 96868; HLA-C*14:02; TUBA3C; ENSG00000198033; TAA
YPAPQVSTA

SEQ ID NO: 96869 - protein, 9 aa, Homo sapiens
  misc_feature: Table A; Target 96869; HLA-C*16:01; TUBA3C; ENSG00000198033; TAA
YPAPQVSTA

SEQ ID NO: 96870 - protein, 9 aa, Homo sapiens
  misc_feature: Table A; Target 96870; HLA-C*16:02; TUBA3C; ENSG00000198033; TAA
YPAPQVSTA

SEQ ID NO: 96871 - protein, 9 aa, Homo sapiens
  misc_feature: Table A; Target 96871; HLA-C*16:04; TUBA3C; ENSG00000198033; TAA
YPAPQVSTA

SEQ ID NO: 96872 - protein, 10 aa, Homo sapiens
  misc_feature: Table A; Target 96872; HLA-A*02:01; TUBA3C; ENSG00000198033; TAA
YPAPQVSTAV

SEQ ID NO: 96873 - protein, 10 aa, Homo sapiens
  misc_feature: Table A; Target 96873; HLA-A*02:03; TUBA3C; ENSG00000198033; TAA
YPAPQVSTAV

SEQ ID NO: 96874 - protein, 10 aa, Homo sapiens
  misc_feature: Table A; Target 96874; HLA-A*23:01; TUBA3C; ENSG00000198033; TAA
YPAPQVSTAV

SEQ ID NO: 96875 - protein, 10 aa, Homo sapiens
  misc_feature: Table A; Target 96875; HLA-A*25:01; TUBA3C; ENSG00000198033; TAA
YPAPQVSTAV

SEQ ID NO: 96876 - protein, 10 aa, Homo sapiens
  misc_feature: Table A; Target 96876; HLA-A*26:01; TUBA3C; ENSG00000198033; TAA
YPAPQVSTAV

SEQ ID NO: 96877 - protein, 10 aa, Homo sapiens
  misc_feature: Table A; Target 96877; HLA-A*30:01; TUBA3C; ENSG00000198033; TAA
YPAPQVSTAV

SEQ ID NO: 96878 - protein, 10 aa, Homo sapiens
  misc_feature: Table A; Target 96878; HLA-A*68:01; TUBA3C; ENSG00000198033; TAA
YPAPQVSTAV

SEQ ID NO: 96879 - protein, 10 aa, Homo sapiens
  misc_feature: Table A; Target 96879; HLA-A*68:02; TUBA3C; ENSG00000198033; TAA
YPAPQVSTAV

SEQ ID NO: 96880 - protein, 10 aa, Homo sapiens
  misc_feature: Table A; Target 96880; HLA-B*07:02; TUBA3C; ENSG00000198033; TAA
YPAPQVSTAV

SEQ ID NO: 96881 - protein, 10 aa, Homo sapiens
  misc_feature: Table A; Target 96881; HLA-B*13:02; TUBA3C; ENSG00000198033; TAA
YPAPQVSTAV

SEQ ID NO: 96882 - protein, 10 aa, Homo sapiens
  misc_feature: Table A; Target 96882; HLA-B*35:01; TUBA3C; ENSG00000198033; TAA
YPAPQVSTAV

SEQ ID NO: 96883 - protein, 10 aa, Homo sapiens
  misc_feature: Table A; Target 96883; HLA-B*35:03; TUBA3C; ENSG00000198033; TAA
YPAPQVSTAV

SEQ ID NO: 96884 - protein, 10 aa, Homo sapiens
  misc_feature: Table A; Target 96884; HLA-B*38:01; TUBA3C; ENSG00000198033; TAA
YPAPQVSTAV

SEQ ID NO: 96885 - protein, 10 aa, Homo sapiens
  misc_feature: Table A; Target 96885; HLA-B*39:01; TUBA3C; ENSG00000198033; TAA
YPAPQVSTAV

SEQ ID NO: 96886 - protein, 10 aa, Homo sapiens
  misc_feature: Table A; Target 96886; HLA-B*49:01; TUBA3C; ENSG00000198033; TAA
YPAPQVSTAV

SEQ ID NO: 96887 - protein, 10 aa, Homo sapiens
  misc_feature: Table A; Target 96887; HLA-B*51:01; TUBA3C; ENSG00000198033; TAA
YPAPQVSTAV

SEQ ID NO: 96888 - protein, 10 aa, Homo sapiens
  misc_feature: Table A; Target 96888; HLA-B*54:01; TUBA3C; ENSG00000198033; TAA
YPAPQVSTAV

SEQ ID NO: 96889 - protein, 10 aa, Homo sapiens
  misc_feature: Table A; Target 96889; HLA-B*55:01; TUBA3C; ENSG00000198033; TAA
YPAPQVSTAV

SEQ ID NO: 96890 - protein, 10 aa, Homo sapiens
  misc_feature: Table A; Target 96890; HLA-B*56:01; TUBA3C; ENSG00000198033; TAA
YPAPQVSTAV

SEQ ID NO: 96891 - protein, 10 aa, Homo sapiens
  misc_feature: Table A; Target 96891; HLA-C*01:02; TUBA3C; ENSG00000198033; TAA
YPAPQVSTAV

SEQ ID NO: 96892 - protein, 10 aa, Homo sapiens
  misc_feature: Table A; Target 96892; HLA-C*02:02; TUBA3C; ENSG00000198033; TAA
YPAPQVSTAV

SEQ ID NO: 96893 - protein, 10 aa, Homo sapiens
  misc_feature: Table A; Target 96893; HLA-C*03:03; TUBA3C; ENSG00000198033; TAA
YPAPQVSTAV

SEQ ID NO: 96894 - protein, 10 aa, Homo sapiens
  misc_feature: Table A; Target 96894; HLA-C*03:04; TUBA3C; ENSG00000198033; TAA
YPAPQVSTAV

SEQ ID NO: 96895 - protein, 10 aa, Homo sapiens
  misc_feature: Table A; Target 96895; HLA-C*04:01; TUBA3C; ENSG00000198033; TAA
YPAPQVSTAV

SEQ ID NO: 96896 - protein, 10 aa, Homo sapiens
  misc_feature: Table A; Target 96896; HLA-C*06:02; TUBA3C; ENSG00000198033; TAA
YPAPQVSTAV

SEQ ID NO: 96897 - protein, 10 aa, Homo sapiens
  misc_feature: Table A; Target 96897; HLA-C*07:01; TUBA3C; ENSG00000198033; TAA
YPAPQVSTAV

SEQ ID NO: 96898 - protein, 10 aa, Homo sapiens
  misc_feature: Table A; Target 96898; HLA-C*07:02; TUBA3C; ENSG00000198033; TAA
YPAPQVSTAV

SEQ ID NO: 96899 - protein, 10 aa, Homo sapiens
  misc_feature: Table A; Target 96899; HLA-C*07:04; TUBA3C; ENSG00000198033; TAA
YPAPQVSTAV

SEQ ID NO: 96900 - protein, 10 aa, Homo sapiens
  misc_feature: Table A; Target 96900; HLA-C*07:06; TUBA3C; ENSG00000198033; TAA
YPAPQVSTAV

SEQ ID NO: 96901 - protein, 10 aa, Homo sapiens
  misc_feature: Table A; Target 96901; HLA-C*14:02; TUBA3C; ENSG00000198033; TAA
YPAPQVSTAV

SEQ ID NO: 96902 - protein, 10 aa, Homo sapiens
  misc_feature: Table A; Target 96902; HLA-C*16:02; TUBA3C; ENSG00000198033; TAA
YPAPQVSTAV

SEQ ID NO: 96903 - protein, 11 aa, Homo sapiens
  misc_feature: Table A; Target 96903; HLA-A*68:01; TUBA3C; ENSG00000198033; TAA
YPAPQVSTAVV

SEQ ID NO: 96904 - protein, 11 aa, Homo sapiens
  misc_feature: Table A; Target 96904; HLA-A*68:02; TUBA3C; ENSG00000198033; TAA
YPAPQVSTAVV

SEQ ID NO: 96905 - protein, 11 aa, Homo sapiens
  misc_feature: Table A; Target 96905; HLA-B*07:02; TUBA3C; ENSG00000198033; TAA
YPAPQVSTAVV

SEQ ID NO: 96906 - protein, 11 aa, Homo sapiens
  misc_feature: Table A; Target 96906; HLA-B*35:01; TUBA3C; ENSG00000198033; TAA
YPAPQVSTAVV

SEQ ID NO: 96907 - protein, 11 aa, Homo sapiens
  misc_feature: Table A; Target 96907; HLA-B*35:03; TUBA3C; ENSG00000198033; TAA
YPAPQVSTAVV

SEQ ID NO: 96908 - protein, 11 aa, Homo sapiens
  misc_feature: Table A; Target 96908; HLA-B*39:01; TUBA3C; ENSG00000198033; TAA
YPAPQVSTAVV

SEQ ID NO: 96909 - protein, 11 aa, Homo sapiens
  misc_feature: Table A; Target 96909; HLA-B*51:01; TUBA3C; ENSG00000198033; TAA
YPAPQVSTAVV

SEQ ID NO: 96910 - protein, 11 aa, Homo sapiens
  misc_feature: Table A; Target 96910; HLA-B*54:01; TUBA3C; ENSG00000198033; TAA
YPAPQVSTAVV

SEQ ID NO: 96911 - protein, 11 aa, Homo sapiens
  misc_feature: Table A; Target 96911; HLA-B*55:01; TUBA3C; ENSG00000198033; TAA
YPAPQVSTAVV

SEQ ID NO: 96912 - protein, 11 aa, Homo sapiens
  misc_feature: Table A; Target 96912; HLA-B*56:01; TUBA3C; ENSG00000198033; TAA
YPAPQVSTAVV

SEQ ID NO: 96913 - protein, 11 aa, Homo sapiens
  misc_feature: Table A; Target 96913; HLA-C*01:02; TUBA3C; ENSG00000198033; TAA
YPAPQVSTAVV

SEQ ID NO: 96914 - protein, 11 aa, Homo sapiens
  misc_feature: Table A; Target 96914; HLA-C*02:02; TUBA3C; ENSG00000198033; TAA
YPAPQVSTAVV

SEQ ID NO: 96915 - protein, 11 aa, Homo sapiens
  misc_feature: Table A; Target 96915; HLA-C*04:01; TUBA3C; ENSG00000198033; TAA
YPAPQVSTAVV

SEQ ID NO: 96916 - protein, 11 aa, Homo sapiens
  misc_feature: Table A; Target 96916; HLA-C*06:02; TUBA3C; ENSG00000198033; TAA
YPAPQVSTAVV

SEQ ID NO: 96917 - protein, 11 aa, Homo sapiens
  misc_feature: Table A; Target 96917; HLA-C*07:01; TUBA3C; ENSG00000198033; TAA
YPAPQVSTAVV

SEQ ID NO: 96918 - protein, 11 aa, Homo sapiens
  misc_feature: Table A; Target 96918; HLA-C*07:02; TUBA3C; ENSG00000198033; TAA
YPAPQVSTAVV

SEQ ID NO: 96919 - protein, 11 aa, Homo sapiens
  misc_feature: Table A; Target 96919; HLA-C*07:06; TUBA3C; ENSG00000198033; TAA
YPAPQVSTAVV

SEQ ID NO: 96920 - protein, 11 aa, Homo sapiens
  misc_feature: Table A; Target 96920; HLA-C*12:03; TUBA3C; ENSG00000198033; TAA
YPAPQVSTAVV

SEQ ID NO: 96921 - protein, 11 aa, Homo sapiens
  misc_feature: Table A; Target 96921; HLA-C*14:02; TUBA3C; ENSG00000198033; TAA
YPAPQVSTAVV

SEQ ID NO: 96922 - protein, 8 aa, Homo sapiens
  misc_feature: Table A; Target 96922; HLA-B*08:01; TUBA3C; ENSG00000198033; TAA
YPRIHFPL

SEQ ID NO: 96923 - protein, 9 aa, Homo sapiens
  misc_feature: Table A; Target 96923; HLA-B*54:01; TUBA3C; ENSG00000198033; TAA
YPRIHFPLA

SEQ ID NO: 96924 - protein, 9 aa, Homo sapiens
  misc_feature: Table A; Target 96924; HLA-A*02:07; TUBA3C; ENSG00000198033; TAA
YQPPTVVPG

SEQ ID NO: 96925 - protein, 9 aa, Homo sapiens
  misc_feature: Table A; Target 96925; HLA-B*13:02; TUBA3C; ENSG00000198033; TAA
YQPPTVVPG

SEQ ID NO: 96926 - protein, 9 aa, Homo sapiens
  misc_feature: Table A; Target 96926; HLA-B*27:05; TUBA3C; ENSG00000198033; TAA
YQPPTVVPG

SEQ ID NO: 96927 - protein, 9 aa, Homo sapiens
  misc_feature: Table A; Target 96927; HLA-C*04:01; TUBA3C; ENSG00000198033; TAA
YQPPTVVPG

SEQ ID NO: 96928 - protein, 9 aa, Homo sapiens
  misc_feature: Table A; Target 96928; HLA-C*06:02; TUBA3C; ENSG00000198033; TAA
YQPPTVVPG

SEQ ID NO: 96929 - protein, 9 aa, Homo sapiens
  misc_feature: Table A; Target 96929; HLA-C*07:01; TUBA3C; ENSG00000198033; TAA
YQPPTVVPG

SEQ ID NO: 96930 - protein, 9 aa, Homo sapiens
  misc_feature: Table A; Target 96930; HLA-C*07:02; TUBA3C; ENSG00000198033; TAA
YQPPTVVPG

SEQ ID NO: 96931 - protein, 9 aa, Homo sapiens
  misc_feature: Table A; Target 96931; HLA-C*07:04; TUBA3C; ENSG00000198033; TAA
YQPPTVVPG

SEQ ID NO: 96932 - protein, 9 aa, Homo sapiens
  misc_feature: Table A; Target 96932; HLA-C*12:03; TUBA3C; ENSG00000198033; TAA
YQPPTVVPG

SEQ ID NO: 96933 - protein, 10 aa, Homo sapiens
  misc_feature: Table A; Target 96933; HLA-A*02:01; TUBA3C; ENSG00000198033; TAA
YQPPTVVPGG

SEQ ID NO: 96934 - protein, 10 aa, Homo sapiens
  misc_feature: Table A; Target 96934; HLA-A*02:03; TUBA3C; ENSG00000198033; TAA
YQPPTVVPGG

SEQ ID NO: 96935 - protein, 10 aa, Homo sapiens
  misc_feature: Table A; Target 96935; HLA-A*02:04; TUBA3C; ENSG00000198033; TAA
YQPPTVVPGG

SEQ ID NO: 96936 - protein, 10 aa, Homo sapiens
  misc_feature: Table A; Target 96936; HLA-A*02:07; TUBA3C; ENSG00000198033; TAA
YQPPTVVPGG

SEQ ID NO: 96937 - protein, 10 aa, Homo sapiens
  misc_feature: Table A; Target 96937; HLA-A*24:02; TUBA3C; ENSG00000198033; TAA
YQPPTVVPGG

SEQ ID NO: 96938 - protein, 10 aa, Homo sapiens
  misc_feature: Table A; Target 96938; HLA-A*26:01; TUBA3C; ENSG00000198033; TAA
YQPPTVVPGG

SEQ ID NO: 96939 - protein, 10 aa, Homo sapiens
  misc_feature: Table A; Target 96939; HLA-B*13:02; TUBA3C; ENSG00000198033; TAA
YQPPTVVPGG

SEQ ID NO: 96940 - protein, 10 aa, Homo sapiens
  misc_feature: Table A; Target 96940; HLA-B*27:05; TUBA3C; ENSG00000198033; TAA
YQPPTVVPGG

SEQ ID NO: 96941 - protein, 10 aa, Homo sapiens
  misc_feature: Table A; Target 96941; HLA-B*40:02; TUBA3C; ENSG00000198033; TAA
YQPPTVVPGG

SEQ ID NO: 96942 - protein, 10 aa, Homo sapiens
  misc_feature: Table A; Target 96942; HLA-C*04:01; TUBA3C; ENSG00000198033; TAA
YQPPTVVPGG

SEQ ID NO: 96943 - protein, 10 aa, Homo sapiens
  misc_feature: Table A; Target 96943; HLA-C*06:02; TUBA3C; ENSG00000198033; TAA
YQPPTVVPGG

SEQ ID NO: 96944 - protein, 10 aa, Homo sapiens
  misc_feature: Table A; Target 96944; HLA-C*07:01; TUBA3C; ENSG00000198033; TAA
YQPPTVVPGG

SEQ ID NO: 96945 - protein, 10 aa, Homo sapiens
  misc_feature: Table A; Target 96945; HLA-C*07:02; TUBA3C; ENSG00000198033; TAA
YQPPTVVPGG

SEQ ID NO: 96946 - protein, 8 aa, Homo sapiens
  misc_feature: Table A; Target 96946; HLA-A*03:02; TUBA3C; ENSG00000198033; TAA
YRGDVVPK

SEQ ID NO: 96947 - protein, 8 aa, Homo sapiens
  misc_feature: Table A; Target 96947; HLA-B*27:02; TUBA3C; ENSG00000198033; TAA
YRGDVVPK

SEQ ID NO: 96948 - protein, 8 aa, Homo sapiens
  misc_feature: Table A; Target 96948; HLA-B*27:05; TUBA3C; ENSG00000198033; TAA
YRGDVVPK

SEQ ID NO: 96949 - protein, 8 aa, Homo sapiens
  misc_feature: Table A; Target 96949; HLA-C*06:02; TUBA3C; ENSG00000198033; TAA
YRGDVVPK

SEQ ID NO: 96950 - protein, 8 aa, Homo sapiens
  misc_feature: Table A; Target 96950; HLA-C*07:01; TUBA3C; ENSG00000198033; TAA
YRGDVVPK

SEQ ID NO: 96951 - protein, 8 aa, Homo sapiens
  misc_feature: Table A; Target 96951; HLA-C*07:04; TUBA3C; ENSG00000198033; TAA
YRGDVVPK

SEQ ID NO: 96952 - protein, 8 aa, Homo sapiens
  misc_feature: Table A; Target 96952; HLA-C*12:03; TUBA3C; ENSG00000198033; TAA
YRGDVVPK

SEQ ID NO: 96953 - protein, 10 aa, Homo sapiens
  misc_feature: Table A; Target 96953; HLA-C*06:02; TUBA3C; ENSG00000198033; TAA
YRGDVVPKDV

SEQ ID NO: 96954 - protein, 8 aa, Homo sapiens
  misc_feature: Table A; Target 96954; HLA-B*08:01; TUBA3C; ENSG00000198033; TAA
YTIGKEIV

SEQ ID NO: 96955 - protein, 8 aa, Homo sapiens
  misc_feature: Table A; Target 96955; HLA-C*12:03; TUBA3C; ENSG00000198033; TAA
YTIGKEIV

SEQ ID NO: 96956 - protein, 10 aa, Homo sapiens
  misc_feature: Table A; Target 96956; HLA-A*02:01; TUBA3C; ENSG00000198033; TAA
YTIGKEIVDL

SEQ ID NO: 96957 - protein, 10 aa, Homo sapiens
  misc_feature: Table A; Target 96957; HLA-A*02:03; TUBA3C; ENSG00000198033; TAA
YTIGKEIVDL

SEQ ID NO: 96958 - protein, 10 aa, Homo sapiens
  misc_feature: Table A; Target 96958; HLA-A*02:04; TUBA3C; ENSG00000198033; TAA
YTIGKEIVDL

SEQ ID NO: 96959 - protein, 10 aa, Homo sapiens
  misc_feature: Table A; Target 96959; HLA-A*02:07; TUBA3C; ENSG00000198033; TAA
YTIGKEIVDL

SEQ ID NO: 96960 - protein, 10 aa, Homo sapiens
  misc_feature: Table A; Target 96960; HLA-A*25:01; TUBA3C; ENSG00000198033; TAA
YTIGKEIVDL

SEQ ID NO: 96961 - protein, 10 aa, Homo sapiens
  misc_feature: Table A; Target 96961; HLA-A*26:01; TUBA3C; ENSG00000198033; TAA
YTIGKEIVDL

SEQ ID NO: 96962 - protein, 10 aa, Homo sapiens
  misc_feature: Table A; Target 96962; HLA-A*68:02; TUBA3C; ENSG00000198033; TAA
YTIGKEIVDL

SEQ ID NO: 96963 - protein, 10 aa, Homo sapiens
  misc_feature: Table A; Target 96963; HLA-B*27:05; TUBA3C; ENSG00000198033; TAA
YTIGKEIVDL

SEQ ID NO: 96964 - protein, 10 aa, Homo sapiens
  misc_feature: Table A; Target 96964; HLA-B*35:03; TUBA3C; ENSG00000198033; TAA
YTIGKEIVDL

SEQ ID NO: 96965 - protein, 10 aa, Homo sapiens
  misc_feature: Table A; Target 96965; HLA-B*40:02; TUBA3C; ENSG00000198033; TAA
YTIGKEIVDL

SEQ ID NO: 96966 - protein, 10 aa, Homo sapiens
  misc_feature: Table A; Target 96966; HLA-B*58:01; TUBA3C; ENSG00000198033; TAA
YTIGKEIVDL

SEQ ID NO: 96967 - protein, 10 aa, Homo sapiens
  misc_feature: Table A; Target 96967; HLA-C*03:03; TUBA3C; ENSG00000198033; TAA
YTIGKEIVDL

SEQ ID NO: 96968 - protein, 10 aa, Homo sapiens
  misc_feature: Table A; Target 96968; HLA-C*03:04; TUBA3C; ENSG00000198033; TAA
YTIGKEIVDL

SEQ ID NO: 96969 - protein, 10 aa, Homo sapiens
  misc_feature: Table A; Target 96969; HLA-C*04:01; TUBA3C; ENSG00000198033; TAA
YTIGKEIVDL

SEQ ID NO: 96970 - protein, 10 aa, Homo sapiens
  misc_feature: Table A; Target 96970; HLA-C*06:02; TUBA3C; ENSG00000198033; TAA
YTIGKEIVDL

SEQ ID NO: 96971 - protein, 10 aa, Homo sapiens
  misc_feature: Table A; Target 96971; HLA-C*07:01; TUBA3C; ENSG00000198033; TAA
YTIGKEIVDL

SEQ ID NO: 96972 - protein, 10 aa, Homo sapiens
  misc_feature: Table A; Target 96972; HLA-C*07:02; TUBA3C; ENSG00000198033; TAA
YTIGKEIVDL

SEQ ID NO: 96973 - protein, 10 aa, Homo sapiens
  misc_feature: Table A; Target 96973; HLA-C*07:04; TUBA3C; ENSG00000198033; TAA
YTIGKEIVDL

SEQ ID NO: 96974 - protein, 10 aa, Homo sapiens
  misc_feature: Table A; Target 96974; HLA-C*12:03; TUBA3C; ENSG00000198033; TAA
YTIGKEIVDL

SEQ ID NO: 96975 - protein, 10 aa, Homo sapiens
  misc_feature: Table A; Target 96975; HLA-C*16:02; TUBA3C; ENSG00000198033; TAA
YTIGKEIVDL

SEQ ID NO: 96976 - protein, 11 aa, Homo sapiens
  misc_feature: Table A; Target 96976; HLA-A*02:03; TUBA3C; ENSG00000198033; TAA
YTIGKEIVDLV

SEQ ID NO: 96977 - protein, 11 aa, Homo sapiens
  misc_feature: Table A; Target 96977; HLA-A*68:02; TUBA3C; ENSG00000198033; TAA
YTIGKEIVDLV

SEQ ID NO: 96978 - protein, 8 aa, Homo sapiens
  misc_feature: Table A; Target 96978; HLA-C*06:02; TUBA3C; ENSG00000198033; TAA
YTNLNRLI

SEQ ID NO: 96979 - protein, 8 aa, Homo sapiens
  misc_feature: Table A; Target 96979; HLA-C*07:01; TUBA3C; ENSG00000198033; TAA
YTNLNRLI

SEQ ID NO: 96980 - protein, 10 aa, Homo sapiens
  misc_feature: Table A; Target 96980; HLA-C*07:01; TUBA3C; ENSG00000198033; TAA
YTNLNRLIGQ

SEQ ID NO: 96981 - protein, 11 aa, Homo sapiens
  misc_feature: Table A; Target 96981; HLA-A*01:01; TUBA3C; ENSG00000198033; TAA
YTNLNRLIGQI

SEQ ID NO: 96982 - protein, 8 aa, Homo sapiens
  misc_feature: Table A; Target 96982; HLA-C*01:02; TUBA3C; ENSG00000198033; TAA
YVGEGMEE

SEQ ID NO: 96983 - protein, 8 aa, Homo sapiens
  misc_feature: Table A; Target 96983; HLA-C*03:03; TUBA3C; ENSG00000198033; TAA
YVGEGMEE

SEQ ID NO: 96984 - protein, 8 aa, Homo sapiens
  misc_feature: Table A; Target 96984; HLA-C*04:01; TUBA3C; ENSG00000198033; TAA
YVGEGMEE

SEQ ID NO: 96985 - protein, 8 aa, Homo sapiens
  misc_feature: Table A; Target 96985; HLA-C*07:01; TUBA3C; ENSG00000198033; TAA
YVGEGMEE

SEQ ID NO: 96986 - protein, 8 aa, Homo sapiens
  misc_feature: Table A; Target 96986; HLA-C*07:04; TUBA3C; ENSG00000198033; TAA
YVGEGMEE

SEQ ID NO: 96987 - protein, 8 aa, Homo sapiens
  misc_feature: Table A; Target 96987; HLA-C*12:03; TUBA3C; ENSG00000198033; TAA
YVGEGMEE

SEQ ID NO: 96988 - protein, 8 aa, Homo sapiens
  misc_feature: Table A; Target 96988; HLA-C*14:02; TUBA3C; ENSG00000198033; TAA
YVGEGMEE

SEQ ID NO: 96989 - protein, 11 aa, Homo sapiens
  misc_feature: Table A; Target 96989; HLA-A*26:01; TUBA3C; ENSG00000198033; TAA
YVGEGMEEGEF

SEQ ID NO: 96990 - protein, 11 aa, Homo sapiens
  misc_feature: Table A; Target 96990; HLA-B*15:01; TUBA3C; ENSG00000198033; TAA
YVGEGMEEGEF

SEQ ID NO: 96991 - protein, 11 aa, Homo sapiens
  misc_feature: Table A; Target 96991; HLA-B*27:05; TUBA3C; ENSG00000198033; TAA
YVGEGMEEGEF

SEQ ID NO: 96992 - protein, 11 aa, Homo sapiens
  misc_feature: Table A; Target 96992; HLA-C*03:03; TUBA3C; ENSG00000198033; TAA
YVGEGMEEGEF

SEQ ID NO: 96993 - protein, 11 aa, Homo sapiens
  misc_feature: Table A; Target 96993; HLA-C*07:01; TUBA3C; ENSG00000198033; TAA
YVGEGMEEGEF

SEQ ID NO: 96994 - protein, 11 aa, Homo sapiens
  misc_feature: Table A; Target 96994; HLA-C*07:04; TUBA3C; ENSG00000198033; TAA
YVGEGMEEGEF

SEQ ID NO: 96995 - protein, 11 aa, Homo sapiens
  misc_feature: Table A; Target 96995; HLA-C*12:03; TUBA3C; ENSG00000198033; TAA
YVGEGMEEGEF

SEQ ID NO: 96996 - protein, 8 aa, Homo sapiens
  misc_feature: Table A; Target 96996; HLA-A*23:01; TYR; ENSG00000077498; TAA
AAMVGAVL

SEQ ID NO: 96997 - protein, 8 aa, Homo sapiens
  misc_feature: Table A; Target 96997; HLA-A*32:01; TYR; ENSG00000077498; TAA
AAMVGAVL

SEQ ID NO: 96998 - protein, 8 aa, Homo sapiens
  misc_feature: Table A; Target 96998; HLA-B*07:02; TYR; ENSG00000077498; TAA
AAMVGAVL

SEQ ID NO: 96999 - protein, 8 aa, Homo sapiens
  misc_feature: Table A; Target 96999; HLA-B*08:01; TYR; ENSG00000077498; TAA
AAMVGAVL

SEQ ID NO: 97000 - protein, 8 aa, Homo sapiens
  misc_feature: Table A; Target 97000; HLA-B*15:01; TYR; ENSG00000077498; TAA
AAMVGAVL

SEQ ID NO: 97001 - protein, 8 aa, Homo sapiens
  misc_feature: Table A; Target 97001; HLA-B*15:03; TYR; ENSG00000077498; TAA
AAMVGAVL

SEQ ID NO: 97002 - protein, 8 aa, Homo sapiens
  misc_feature: Table A; Target 97002; HLA-B*35:03; TYR; ENSG00000077498; TAA
AAMVGAVL

SEQ ID NO: 97003 - protein, 8 aa, Homo sapiens
  misc_feature: Table A; Target 97003; HLA-B*37:01; TYR; ENSG00000077498; TAA
AAMVGAVL

SEQ ID NO: 97004 - protein, 8 aa, Homo sapiens
  misc_feature: Table A; Target 97004; HLA-B*39:01; TYR; ENSG00000077498; TAA
AAMVGAVL

SEQ ID NO: 97005 - protein, 8 aa, Homo sapiens
  misc_feature: Table A; Target 97005; HLA-B*40:01; TYR; ENSG00000077498; TAA
AAMVGAVL

SEQ ID NO: 97006 - protein, 8 aa, Homo sapiens
  misc_feature: Table A; Target 97006; HLA-B*40:02; TYR; ENSG00000077498; TAA
AAMVGAVL

SEQ ID NO: 97007 - protein, 8 aa, Homo sapiens
  misc_feature: Table A; Target 97007; HLA-B*46:01; TYR; ENSG00000077498; TAA
AAMVGAVL

SEQ ID NO: 97008 - protein, 8 aa, Homo sapiens
  misc_feature: Table A; Target 97008; HLA-B*58:01; TYR; ENSG00000077498; TAA
AAMVGAVL

SEQ ID NO: 97009 - protein, 8 aa, Homo sapiens
  misc_feature: Table A; Target 97009; HLA-C*01:02; TYR; ENSG00000077498; TAA
AAMVGAVL

SEQ ID NO: 97010 - protein, 8 aa, Homo sapiens
  misc_feature: Table A; Target 97010; HLA-C*02:02; TYR; ENSG00000077498; TAA
AAMVGAVL

SEQ ID NO: 97011 - protein, 8 aa, Homo sapiens
  misc_feature: Table A; Target 97011; HLA-C*03:03; TYR; ENSG00000077498; TAA
AAMVGAVL

SEQ ID NO: 97012 - protein, 8 aa, Homo sapiens
  misc_feature: Table A; Target 97012; HLA-C*03:04; TYR; ENSG00000077498; TAA
AAMVGAVL

SEQ ID NO: 97013 - protein, 8 aa, Homo sapiens
  misc_feature: Table A; Target 97013; HLA-C*05:01; TYR; ENSG00000077498; TAA
AAMVGAVL

SEQ ID NO: 97014 - protein, 8 aa, Homo sapiens
  misc_feature: Table A; Target 97014; HLA-C*07:02; TYR; ENSG00000077498; TAA
AAMVGAVL

SEQ ID NO: 97015 - protein, 8 aa, Homo sapiens
  misc_feature: Table A; Target 97015; HLA-C*07:04; TYR; ENSG00000077498; TAA
AAMVGAVL

SEQ ID NO: 97016 - protein, 8 aa, Homo sapiens
  misc_feature: Table A; Target 97016; HLA-C*12:03; TYR; ENSG00000077498; TAA
AAMVGAVL

SEQ ID NO: 97017 - protein, 8 aa, Homo sapiens
  misc_feature: Table A; Target 97017; HLA-C*14:02; TYR; ENSG00000077498; TAA
AAMVGAVL

SEQ ID NO: 97018 - protein, 8 aa, Homo sapiens
  misc_feature: Table A; Target 97018; HLA-C*16:01; TYR; ENSG00000077498; TAA
AAMVGAVL

SEQ ID NO: 97019 - protein, 8 aa, Homo sapiens
  misc_feature: Table A; Target 97019; HLA-C*16:02; TYR; ENSG00000077498; TAA
AAMVGAVL

SEQ ID NO: 97020 - protein, 8 aa, Homo sapiens
  misc_feature: Table A; Target 97020; HLA-C*16:04; TYR; ENSG00000077498; TAA
AAMVGAVL

SEQ ID NO: 97021 - protein, 10 aa, Homo sapiens
  misc_feature: Table A; Target 97021; HLA-B*54:01; TYR; ENSG00000077498; TAA
AAMVGAVLTA

SEQ ID NO: 97022 - protein, 10 aa, Homo sapiens
  misc_feature: Table A; Target 97022; HLA-B*56:01; TYR; ENSG00000077498; TAA
AAMVGAVLTA

SEQ ID NO: 97023 - protein, 10 aa, Homo sapiens
  misc_feature: Table A; Target 97023; HLA-C*16:04; TYR; ENSG00000077498; TAA
AAMVGAVLTA

SEQ ID NO: 97024 - protein, 11 aa, Homo sapiens
  misc_feature: Table A; Target 97024; HLA-A*03:01; TYR; ENSG00000077498; TAA
AAMVGAVLTAL

SEQ ID NO: 97025 - protein, 11 aa, Homo sapiens
  misc_feature: Table A; Target 97025; HLA-A*30:01; TYR; ENSG00000077498; TAA
AAMVGAVLTAL

SEQ ID NO: 97026 - protein, 11 aa, Homo sapiens
  misc_feature: Table A; Target 97026; HLA-B*07:02; TYR; ENSG00000077498; TAA
AAMVGAVLTAL

SEQ ID NO: 97027 - protein, 11 aa, Homo sapiens
  misc_feature: Table A; Target 97027; HLA-B*15:01; TYR; ENSG00000077498; TAA
AAMVGAVLTAL

SEQ ID NO: 97028 - protein, 11 aa, Homo sapiens
  misc_feature: Table A; Target 97028; HLA-B*27:02; TYR; ENSG00000077498; TAA
AAMVGAVLTAL

SEQ ID NO: 97029 - protein, 11 aa, Homo sapiens
  misc_feature: Table A; Target 97029; HLA-B*40:01; TYR; ENSG00000077498; TAA
AAMVGAVLTAL

SEQ ID NO: 97030 - protein, 11 aa, Homo sapiens
  misc_feature: Table A; Target 97030; HLA-B*46:01; TYR; ENSG00000077498; TAA
AAMVGAVLTAL

SEQ ID NO: 97031 - protein, 11 aa, Homo sapiens
  misc_feature: Table A; Target 97031; HLA-B*58:01; TYR; ENSG00000077498; TAA
AAMVGAVLTAL

SEQ ID NO: 97032 - protein, 11 aa, Homo sapiens
  misc_feature: Table A; Target 97032; HLA-C*01:02; TYR; ENSG00000077498; TAA
AAMVGAVLTAL

SEQ ID NO: 97033 - protein, 11 aa, Homo sapiens
  misc_feature: Table A; Target 97033; HLA-C*02:02; TYR; ENSG00000077498; TAA
AAMVGAVLTAL

SEQ ID NO: 97034 - protein, 11 aa, Homo sapiens
  misc_feature: Table A; Target 97034; HLA-C*03:03; TYR; ENSG00000077498; TAA
AAMVGAVLTAL

SEQ ID NO: 97035 - protein, 11 aa, Homo sapiens
  misc_feature: Table A; Target 97035; HLA-C*03:04; TYR; ENSG00000077498; TAA
AAMVGAVLTAL

SEQ ID NO: 97036 - protein, 11 aa, Homo sapiens
  misc_feature: Table A; Target 97036; HLA-C*07:02; TYR; ENSG00000077498; TAA
AAMVGAVLTAL

SEQ ID NO: 97037 - protein, 11 aa, Homo sapiens
  misc_feature: Table A; Target 97037; HLA-C*16:04; TYR; ENSG00000077498; TAA
AAMVGAVLTAL

SEQ ID NO: 97038 - protein, 10 aa, Homo sapiens
  misc_feature: Table A; Target 97038; HLA-B*07:02; TYR; ENSG00000077498; TAA
AANFSFRNTL

SEQ ID NO: 97039 - protein, 10 aa, Homo sapiens
  misc_feature: Table A; Target 97039; HLA-C*07:02; TYR; ENSG00000077498; TAA
AANFSFRNTL

SEQ ID NO: 97040 - protein, 9 aa, Homo sapiens
  misc_feature: Table A; Target 97040; HLA-C*16:01; TYR; ENSG00000077498; TAA
ACVSSKNLM

SEQ ID NO: 97041 - protein, 11 aa, Homo sapiens
  misc_feature: Table A; Target 97041; HLA-A*11:01; TYR; ENSG00000077498; TAA
ACVSSKNLMEK

SEQ ID NO: 97042 - protein, 8 aa, Homo sapiens
  misc_feature: Table A; Target 97042; HLA-B*37:01; TYR; ENSG00000077498; TAA
ADASQSSM

SEQ ID NO: 97043 - protein, 10 aa, Homo sapiens
  misc_feature: Table A; Target 97043; HLA-C*04:01; TYR; ENSG00000077498; TAA
ADASQSSMHN

SEQ ID NO: 97044 - protein, 10 aa, Homo sapiens
  misc_feature: Table A; Target 97044; HLA-C*06:02; TYR; ENSG00000077498; TAA
ADASQSSMHN

SEQ ID NO: 97045 - protein, 10 aa, Homo sapiens
  misc_feature: Table A; Target 97045; HLA-C*07:01; TYR; ENSG00000077498; TAA
ADASQSSMHN

SEQ ID NO: 97046 - protein, 9 aa, Homo sapiens
  misc_feature: Table A; Target 97046; HLA-A*30:01; TYR; ENSG00000077498; TAA
ADVEFCLSL

SEQ ID NO: 97047 - protein, 9 aa, Homo sapiens
  misc_feature: Table A; Target 97047; HLA-B*37:01; TYR; ENSG00000077498; TAA
ADVEFCLSL

SEQ ID NO: 97048 - protein, 9 aa, Homo sapiens
  misc_feature: Table A; Target 97048; HLA-B*40:02; TYR; ENSG00000077498; TAA
ADVEFCLSL

SEQ ID NO: 97049 - protein, 9 aa, Homo sapiens
  misc_feature: Table A; Target 97049; HLA-A*24:02; TYR; ENSG00000077498; TAA
AFLPWHRLF

SEQ ID NO: 97050 - protein, 10 aa, Homo sapiens
  misc_feature: Table A; Target 97050; HLA-A*23:01; TYR; ENSG00000077498; TAA
AFVDSIFEQW

SEQ ID NO: 97051 - protein, 10 aa, Homo sapiens
  misc_feature: Table A; Target 97051; HLA-A*24:02; TYR; ENSG00000077498; TAA
AFVDSIFEQW

SEQ ID NO: 97052 - protein, 10 aa, Homo sapiens
  misc_feature: Table A; Target 97052; HLA-A*25:01; TYR; ENSG00000077498; TAA
AFVDSIFEQW

SEQ ID NO: 97053 - protein, 10 aa, Homo sapiens
  misc_feature: Table A; Target 97053; HLA-A*29:02; TYR; ENSG00000077498; TAA
AFVDSIFEQW

SEQ ID NO: 97054 - protein, 10 aa, Homo sapiens
  misc_feature: Table A; Target 97054; HLA-B*44:02; TYR; ENSG00000077498; TAA
AFVDSIFEQW

SEQ ID NO: 97055 - protein, 10 aa, Homo sapiens
  misc_feature: Table A; Target 97055; HLA-B*44:03; TYR; ENSG00000077498; TAA
AFVDSIFEQW

SEQ ID NO: 97056 - protein, 10 aa, Homo sapiens
  misc_feature: Table A; Target 97056; HLA-B*57:01; TYR; ENSG00000077498; TAA
AFVDSIFEQW

SEQ ID NO: 97057 - protein, 10 aa, Homo sapiens
  misc_feature: Table A; Target 97057; HLA-C*16:04; TYR; ENSG00000077498; TAA
AFVDSIFEQW

SEQ ID NO: 97058 - protein, 9 aa, Homo sapiens
  misc_feature: Table A; Target 97058; HLA-A*31:01; TYR; ENSG00000077498; TAA
AGLVSLLCR

SEQ ID NO: 97059 - protein, 8 aa, Homo sapiens
  misc_feature: Table A; Target 97059; HLA-B*38:01; TYR; ENSG00000077498; TAA
AHEAPAFL

SEQ ID NO: 97060 - protein, 9 aa, Homo sapiens
  misc_feature: Table A; Target 97060; HLA-A*30:02; TYR; ENSG00000077498; TAA
AKHTISSDY

SEQ ID NO: 97061 - protein, 9 aa, Homo sapiens
  misc_feature: Table A; Target 97061; HLA-B*15:03; TYR; ENSG00000077498; TAA
AKHTISSDY

SEQ ID NO: 97062 - protein, 9 aa, Homo sapiens
  misc_feature: Table A; Target 97062; HLA-A*02:01; TYR; ENSG00000077498; TAA
ALLAGLVSL

SEQ ID NO: 97063 - protein, 9 aa, Homo sapiens
  misc_feature: Table A; Target 97063; HLA-A*02:03; TYR; ENSG00000077498; TAA
ALLAGLVSL

SEQ ID NO: 97064 - protein, 9 aa, Homo sapiens
  misc_feature: Table A; Target 97064; HLA-A*02:04; TYR; ENSG00000077498; TAA
ALLAGLVSL

SEQ ID NO: 97065 - protein, 9 aa, Homo sapiens
  misc_feature: Table A; Target 97065; HLA-A*02:07; TYR; ENSG00000077498; TAA
ALLAGLVSL

SEQ ID NO: 97066 - protein, 9 aa, Homo sapiens
  misc_feature: Table A; Target 97066; HLA-A*23:01; TYR; ENSG00000077498; TAA
ALLAGLVSL

SEQ ID NO: 97067 - protein, 9 aa, Homo sapiens
  misc_feature: Table A; Target 97067; HLA-A*24:02; TYR; ENSG00000077498; TAA
ALLAGLVSL

SEQ ID NO: 97068 - protein, 9 aa, Homo sapiens
  misc_feature: Table A; Target 97068; HLA-A*32:01; TYR; ENSG00000077498; TAA
ALLAGLVSL

SEQ ID NO: 97069 - protein, 9 aa, Homo sapiens
  misc_feature: Table A; Target 97069; HLA-B*08:01; TYR; ENSG00000077498; TAA
ALLAGLVSL

SEQ ID NO: 97070 - protein, 9 aa, Homo sapiens
  misc_feature: Table A; Target 97070; HLA-B*13:02; TYR; ENSG00000077498; TAA
ALLAGLVSL

SEQ ID NO: 97071 - protein, 9 aa, Homo sapiens
  misc_feature: Table A; Target 97071; HLA-B*15:01; TYR; ENSG00000077498; TAA
ALLAGLVSL

SEQ ID NO: 97072 - protein, 9 aa, Homo sapiens
  misc_feature: Table A; Target 97072; HLA-B*37:01; TYR; ENSG00000077498; TAA
ALLAGLVSL

SEQ ID NO: 97073 - protein, 9 aa, Homo sapiens
  misc_feature: Table A; Target 97073; HLA-B*46:01; TYR; ENSG00000077498; TAA
ALLAGLVSL

SEQ ID NO: 97074 - protein, 9 aa, Homo sapiens
  misc_feature: Table A; Target 97074; HLA-B*55:01; TYR; ENSG00000077498; TAA
ALLAGLVSL

SEQ ID NO: 97075 - protein, 9 aa, Homo sapiens
  misc_feature: Table A; Target 97075; HLA-C*01:02; TYR; ENSG00000077498; TAA
ALLAGLVSL

SEQ ID NO: 97076 - protein, 9 aa, Homo sapiens
  misc_feature: Table A; Target 97076; HLA-C*14:02; TYR; ENSG00000077498; TAA
ALLAGLVSL

SEQ ID NO: 97077 - protein, 10 aa, Homo sapiens
  misc_feature: Table A; Target 97077; HLA-A*02:01; TYR; ENSG00000077498; TAA
ALLAGLVSLL

SEQ ID NO: 97078 - protein, 10 aa, Homo sapiens
  misc_feature: Table A; Target 97078; HLA-A*02:03; TYR; ENSG00000077498; TAA
ALLAGLVSLL

SEQ ID NO: 97079 - protein, 10 aa, Homo sapiens
  misc_feature: Table A; Target 97079; HLA-A*02:04; TYR; ENSG00000077498; TAA
ALLAGLVSLL

SEQ ID NO: 97080 - protein, 9 aa, Homo sapiens
  misc_feature: Table A; Target 97080; HLA-B*44:02; TYR; ENSG00000077498; TAA
ALLGGSEIW

SEQ ID NO: 97081 - protein, 9 aa, Homo sapiens
  misc_feature: Table A; Target 97081; HLA-B*57:01; TYR; ENSG00000077498; TAA
ALLGGSEIW

SEQ ID NO: 97082 - protein, 9 aa, Homo sapiens
  misc_feature: Table A; Target 97082; HLA-B*58:01; TYR; ENSG00000077498; TAA
ALLGGSEIW

SEQ ID NO: 97083 - protein, 8 aa, Homo sapiens
  misc_feature: Table A; Target 97083; HLA-C*04:01; TYR; ENSG00000077498; TAA
AMVGAVLT

SEQ ID NO: 97084 - protein, 9 aa, Homo sapiens
  misc_feature: Table A; Target 97084; HLA-A*02:01; TYR; ENSG00000077498; TAA
AMVGAVLTA

SEQ ID NO: 97085 - protein, 9 aa, Homo sapiens
  misc_feature: Table A; Target 97085; HLA-A*02:03; TYR; ENSG00000077498; TAA
AMVGAVLTA

SEQ ID NO: 97086 - protein, 9 aa, Homo sapiens
  misc_feature: Table A; Target 97086; HLA-A*02:04; TYR; ENSG00000077498; TAA
AMVGAVLTA

SEQ ID NO: 97087 - protein, 9 aa, Homo sapiens
  misc_feature: Table A; Target 97087; HLA-A*02:07; TYR; ENSG00000077498; TAA
AMVGAVLTA

SEQ ID NO: 97088 - protein, 9 aa, Homo sapiens
  misc_feature: Table A; Target 97088; HLA-A*30:01; TYR; ENSG00000077498; TAA
AMVGAVLTA

SEQ ID NO: 97089 - protein, 9 aa, Homo sapiens
  misc_feature: Table A; Target 97089; HLA-A*32:01; TYR; ENSG00000077498; TAA
AMVGAVLTA

SEQ ID NO: 97090 - protein, 9 aa, Homo sapiens
  misc_feature: Table A; Target 97090; HLA-B*13:02; TYR; ENSG00000077498; TAA
AMVGAVLTA

SEQ ID NO: 97091 - protein, 9 aa, Homo sapiens
  misc_feature: Table A; Target 97091; HLA-B*15:01; TYR; ENSG00000077498; TAA
AMVGAVLTA

SEQ ID NO: 97092 - protein, 9 aa, Homo sapiens
  misc_feature: Table A; Target 97092; HLA-B*40:02; TYR; ENSG00000077498; TAA
AMVGAVLTA

SEQ ID NO: 97093 - protein, 9 aa, Homo sapiens
  misc_feature: Table A; Target 97093; HLA-B*46:01; TYR; ENSG00000077498; TAA
AMVGAVLTA

SEQ ID NO: 97094 - protein, 9 aa, Homo sapiens
  misc_feature: Table A; Target 97094; HLA-B*54:01; TYR; ENSG00000077498; TAA
AMVGAVLTA

SEQ ID NO: 97095 - protein, 9 aa, Homo sapiens
  misc_feature: Table A; Target 97095; HLA-B*55:01; TYR; ENSG00000077498; TAA
AMVGAVLTA

SEQ ID NO: 97096 - protein, 9 aa, Homo sapiens
  misc_feature: Table A; Target 97096; HLA-B*56:01; TYR; ENSG00000077498; TAA
AMVGAVLTA

SEQ ID NO: 97097 - protein, 9 aa, Homo sapiens
  misc_feature: Table A; Target 97097; HLA-C*02:02; TYR; ENSG00000077498; TAA
AMVGAVLTA

SEQ ID NO: 97098 - protein, 10 aa, Homo sapiens
  misc_feature: Table A; Target 97098; HLA-A*02:01; TYR; ENSG00000077498; TAA
AMVGAVLTAL

SEQ ID NO: 97099 - protein, 10 aa, Homo sapiens
  misc_feature: Table A; Target 97099; HLA-A*02:03; TYR; ENSG00000077498; TAA
AMVGAVLTAL

SEQ ID NO: 97100 - protein, 10 aa, Homo sapiens
  misc_feature: Table A; Target 97100; HLA-A*02:04; TYR; ENSG00000077498; TAA
AMVGAVLTAL

SEQ ID NO: 97101 - protein, 10 aa, Homo sapiens
  misc_feature: Table A; Target 97101; HLA-A*02:07; TYR; ENSG00000077498; TAA
AMVGAVLTAL

SEQ ID NO: 97102 - protein, 10 aa, Homo sapiens
  misc_feature: Table A; Target 97102; HLA-A*03:01; TYR; ENSG00000077498; TAA
AMVGAVLTAL

SEQ ID NO: 97103 - protein, 10 aa, Homo sapiens
  misc_feature: Table A; Target 97103; HLA-A*23:01; TYR; ENSG00000077498; TAA
AMVGAVLTAL

SEQ ID NO: 97104 - protein, 10 aa, Homo sapiens
  misc_feature: Table A; Target 97104; HLA-A*25:01; TYR; ENSG00000077498; TAA
AMVGAVLTAL

SEQ ID NO: 97105 - protein, 10 aa, Homo sapiens
  misc_feature: Table A; Target 97105; HLA-A*30:01; TYR; ENSG00000077498; TAA
AMVGAVLTAL

SEQ ID NO: 97106 - protein, 10 aa, Homo sapiens
  misc_feature: Table A; Target 97106; HLA-B*15:01; TYR; ENSG00000077498; TAA
AMVGAVLTAL

SEQ ID NO: 97107 - protein, 10 aa, Homo sapiens
  misc_feature: Table A; Target 97107; HLA-B*15:03; TYR; ENSG00000077498; TAA
AMVGAVLTAL

SEQ ID NO: 97108 - protein, 10 aa, Homo sapiens
  misc_feature: Table A; Target 97108; HLA-B*40:01; TYR; ENSG00000077498; TAA
AMVGAVLTAL

SEQ ID NO: 97109 - protein, 10 aa, Homo sapiens
  misc_feature: Table A; Target 97109; HLA-B*40:02; TYR; ENSG00000077498; TAA
AMVGAVLTAL

SEQ ID NO: 97110 - protein, 10 aa, Homo sapiens
  misc_feature: Table A; Target 97110; HLA-B*46:01; TYR; ENSG00000077498; TAA
AMVGAVLTAL

SEQ ID NO: 97111 - protein, 10 aa, Homo sapiens
  misc_feature: Table A; Target 97111; HLA-B*55:01; TYR; ENSG00000077498; TAA
AMVGAVLTAL

SEQ ID NO: 97112 - protein, 10 aa, Homo sapiens
  misc_feature: Table A; Target 97112; HLA-C*01:02; TYR; ENSG00000077498; TAA
AMVGAVLTAL

SEQ ID NO: 97113 - protein, 11 aa, Homo sapiens
  misc_feature: Table A; Target 97113; HLA-A*02:01; TYR; ENSG00000077498; TAA
AMVGAVLTALL

SEQ ID NO: 97114 - protein, 11 aa, Homo sapiens
  misc_feature: Table A; Target 97114; HLA-A*02:03; TYR; ENSG00000077498; TAA
AMVGAVLTALL

SEQ ID NO: 97115 - protein, 9 aa, Homo sapiens
  misc_feature: Table A; Target 97115; HLA-A*03:02; TYR; ENSG00000077498; TAA
ANAPIGHNR

SEQ ID NO: 97116 - protein, 9 aa, Homo sapiens
  misc_feature: Table A; Target 97116; HLA-A*11:01; TYR; ENSG00000077498; TAA
ANAPIGHNR

SEQ ID NO: 97117 - protein, 9 aa, Homo sapiens
  misc_feature: Table A; Target 97117; HLA-A*29:02; TYR; ENSG00000077498; TAA
ANAPIGHNR

SEQ ID NO: 97118 - protein, 9 aa, Homo sapiens
  misc_feature: Table A; Target 97118; HLA-A*31:01; TYR; ENSG00000077498; TAA
ANAPIGHNR

SEQ ID NO: 97119 - protein, 9 aa, Homo sapiens
  misc_feature: Table A; Target 97119; HLA-A*33:01; TYR; ENSG00000077498; TAA
ANAPIGHNR

SEQ ID NO: 97120 - protein, 9 aa, Homo sapiens
  misc_feature: Table A; Target 97120; HLA-A*33:03; TYR; ENSG00000077498; TAA
ANAPIGHNR

SEQ ID NO: 97121 - protein, 9 aa, Homo sapiens
  misc_feature: Table A; Target 97121; HLA-A*68:01; TYR; ENSG00000077498; TAA
ANAPIGHNR

SEQ ID NO: 97122 - protein, 9 aa, Homo sapiens
  misc_feature: Table A; Target 97122; HLA-B*27:05; TYR; ENSG00000077498; TAA
ANAPIGHNR

SEQ ID NO: 97123 - protein, 9 aa, Homo sapiens
  misc_feature: Table A; Target 97123; HLA-B*57:01; TYR; ENSG00000077498; TAA
ANAPIGHNR

SEQ ID NO: 97124 - protein, 9 aa, Homo sapiens
  misc_feature: Table A; Target 97124; HLA-C*07:06; TYR; ENSG00000077498; TAA
ANAPIGHNR

SEQ ID NO: 97125 - protein, 9 aa, Homo sapiens
  misc_feature: Table A; Target 97125; HLA-C*16:02; TYR; ENSG00000077498; TAA
ANAPIGHNR

SEQ ID NO: 97126 - protein, 8 aa, Homo sapiens
  misc_feature: Table A; Target 97126; HLA-A*02:07; TYR; ENSG00000077498; TAA
ANDPIFLL

SEQ ID NO: 97127 - protein, 8 aa, Homo sapiens
  misc_feature: Table A; Target 97127; HLA-C*04:01; TYR; ENSG00000077498; TAA
ANDPIFLL

SEQ ID NO: 97128 - protein, 8 aa, Homo sapiens
  misc_feature: Table A; Target 97128; HLA-C*05:01; TYR; ENSG00000077498; TAA
ANDPIFLL

SEQ ID NO: 97129 - protein, 9 aa, Homo sapiens
  misc_feature: Table A; Target 97129; HLA-A*01:01; TYR; ENSG00000077498; TAA
ANDPIFLLH

SEQ ID NO: 97130 - protein, 9 aa, Homo sapiens
  misc_feature: Table A; Target 97130; HLA-A*03:01; TYR; ENSG00000077498; TAA
ANDPIFLLH

SEQ ID NO: 97131 - protein, 9 aa, Homo sapiens
  misc_feature: Table A; Target 97131; HLA-A*11:01; TYR; ENSG00000077498; TAA
ANDPIFLLH

SEQ ID NO: 97132 - protein, 9 aa, Homo sapiens
  misc_feature: Table A; Target 97132; HLA-A*29:02; TYR; ENSG00000077498; TAA
ANDPIFLLH

SEQ ID NO: 97133 - protein, 9 aa, Homo sapiens
  misc_feature: Table A; Target 97133; HLA-A*32:01; TYR; ENSG00000077498; TAA
ANFSFRNTL

SEQ ID NO: 97134 - protein, 9 aa, Homo sapiens
  misc_feature: Table A; Target 97134; HLA-B*07:02; TYR; ENSG00000077498; TAA
ANFSFRNTL

SEQ ID NO: 97135 - protein, 9 aa, Homo sapiens
  misc_feature: Table A; Target 97135; HLA-B*08:01; TYR; ENSG00000077498; TAA
ANFSFRNTL

SEQ ID NO: 97136 - protein, 9 aa, Homo sapiens
  misc_feature: Table A; Target 97136; HLA-C*02:02; TYR; ENSG00000077498; TAA
ANFSFRNTL

SEQ ID NO: 97137 - protein, 9 aa, Homo sapiens
  misc_feature: Table A; Target 97137; HLA-C*07:02; TYR; ENSG00000077498; TAA
ANFSFRNTL

SEQ ID NO: 97138 - protein, 9 aa, Homo sapiens
  misc_feature: Table A; Target 97138; HLA-C*12:03; TYR; ENSG00000077498; TAA
ANFSFRNTL

SEQ ID NO: 97139 - protein, 9 aa, Homo sapiens
  misc_feature: Table A; Target 97139; HLA-C*16:01; TYR; ENSG00000077498; TAA
ANFSFRNTL

SEQ ID NO: 97140 - protein, 10 aa, Homo sapiens
  misc_feature: Table A; Target 97140; HLA-A*01:01; TYR; ENSG00000077498; TAA
APEKDKFFAY

SEQ ID NO: 97141 - protein, 10 aa, Homo sapiens
  misc_feature: Table A; Target 97141; HLA-B*35:01; TYR; ENSG00000077498; TAA
APEKDKFFAY

SEQ ID NO: 97142 - protein, 10 aa, Homo sapiens
  misc_feature: Table A; Target 97142; HLA-A*25:01; TYR; ENSG00000077498; TAA
APIGHNRESY

SEQ ID NO: 97143 - protein, 10 aa, Homo sapiens
  misc_feature: Table A; Target 97143; HLA-A*30:02; TYR; ENSG00000077498; TAA
APIGHNRESY

SEQ ID NO: 97144 - protein, 10 aa, Homo sapiens
  misc_feature: Table A; Target 97144; HLA-A*32:01; TYR; ENSG00000077498; TAA
APIGHNRESY

SEQ ID NO: 97145 - protein, 10 aa, Homo sapiens
  misc_feature: Table A; Target 97145; HLA-B*07:02; TYR; ENSG00000077498; TAA
APIGHNRESY

SEQ ID NO: 97146 - protein, 10 aa, Homo sapiens
  misc_feature: Table A; Target 97146; HLA-B*15:01; TYR; ENSG00000077498; TAA
APIGHNRESY

SEQ ID NO: 97147 - protein, 10 aa, Homo sapiens
  misc_feature: Table A; Target 97147; HLA-B*35:01; TYR; ENSG00000077498; TAA
APIGHNRESY

SEQ ID NO: 97148 - protein, 10 aa, Homo sapiens
  misc_feature: Table A; Target 97148; HLA-B*44:03; TYR; ENSG00000077498; TAA
APIGHNRESY

SEQ ID NO: 97149 - protein, 10 aa, Homo sapiens
  misc_feature: Table A; Target 97149; HLA-B*46:01; TYR; ENSG00000077498; TAA
APIGHNRESY

SEQ ID NO: 97150 - protein, 10 aa, Homo sapiens
  misc_feature: Table A; Target 97150; HLA-B*55:01; TYR; ENSG00000077498; TAA
APIGHNRESY

SEQ ID NO: 97151 - protein, 10 aa, Homo sapiens
  misc_feature: Table A; Target 97151; HLA-C*07:02; TYR; ENSG00000077498; TAA
APIGHNRESY

SEQ ID NO: 97152 - protein, 11 aa, Homo sapiens
  misc_feature: Table A; Target 97152; HLA-B*07:02; TYR; ENSG00000077498; TAA
APIGHNRESYM

SEQ ID NO: 97153 - protein, 11 aa, Homo sapiens
  misc_feature: Table A; Target 97153; HLA-C*07:02; TYR; ENSG00000077498; TAA
APIGHNRESYM

SEQ ID NO: 97154 - protein, 9 aa, Homo sapiens
  misc_feature: Table A; Target 97154; HLA-A*23:01; TYR; ENSG00000077498; TAA
APLGPQFPF

SEQ ID NO: 97155 - protein, 9 aa, Homo sapiens
  misc_feature: Table A; Target 97155; HLA-A*29:02; TYR; ENSG00000077498; TAA
APLGPQFPF

SEQ ID NO: 97156 - protein, 9 aa, Homo sapiens
  misc_feature: Table A; Target 97156; HLA-A*31:01; TYR; ENSG00000077498; TAA
APLGPQFPF

SEQ ID NO: 97157 - protein, 9 aa, Homo sapiens
  misc_feature: Table A; Target 97157; HLA-B*07:02; TYR; ENSG00000077498; TAA
APLGPQFPF

SEQ ID NO: 97158 - protein, 9 aa, Homo sapiens
  misc_feature: Table A; Target 97158; HLA-B*35:01; TYR; ENSG00000077498; TAA
APLGPQFPF

SEQ ID NO: 97159 - protein, 9 aa, Homo sapiens
  misc_feature: Table A; Target 97159; HLA-B*35:03; TYR; ENSG00000077498; TAA
APLGPQFPF

SEQ ID NO: 97160 - protein, 9 aa, Homo sapiens
  misc_feature: Table A; Target 97160; HLA-B*54:01; TYR; ENSG00000077498; TAA
APLGPQFPF

SEQ ID NO: 97161 - protein, 9 aa, Homo sapiens
  misc_feature: Table A; Target 97161; HLA-B*55:01; TYR; ENSG00000077498; TAA
APLGPQFPF

SEQ ID NO: 97162 - protein, 9 aa, Homo sapiens
  misc_feature: Table A; Target 97162; HLA-B*56:01; TYR; ENSG00000077498; TAA
APLGPQFPF

SEQ ID NO: 97163 - protein, 9 aa, Homo sapiens
  misc_feature: Table A; Target 97163; HLA-B*57:01; TYR; ENSG00000077498; TAA
APLGPQFPF

SEQ ID NO: 97164 - protein, 9 aa, Homo sapiens
  misc_feature: Table A; Target 97164; HLA-C*04:01; TYR; ENSG00000077498; TAA
APLGPQFPF

SEQ ID NO: 97165 - protein, 9 aa, Homo sapiens
  misc_feature: Table A; Target 97165; HLA-C*07:02; TYR; ENSG00000077498; TAA
APLGPQFPF

SEQ ID NO: 97166 - protein, 11 aa, Homo sapiens
  misc_feature: Table A; Target 97166; HLA-B*54:01; TYR; ENSG00000077498; TAA
APLGPQFPFTG

SEQ ID NO: 97167 - protein, 10 aa, Homo sapiens
  misc_feature: Table A; Target 97167; HLA-B*07:02; TYR; ENSG00000077498; TAA
ASQSSMHNAL

SEQ ID NO: 97168 - protein, 10 aa, Homo sapiens
  misc_feature: Table A; Target 97168; HLA-C*03:04; TYR; ENSG00000077498; TAA
ASQSSMHNAL

SEQ ID NO: 97169 - protein, 10 aa, Homo sapiens
  misc_feature: Table A; Target 97169; HLA-C*06:02; TYR; ENSG00000077498; TAA
ASQSSMHNAL

SEQ ID NO: 97170 - protein, 10 aa, Homo sapiens
  misc_feature: Table A; Target 97170; HLA-C*07:02; TYR; ENSG00000077498; TAA
ASQSSMHNAL

SEQ ID NO: 97171 - protein, 10 aa, Homo sapiens
  misc_feature: Table A; Target 97171; HLA-C*16:01; TYR; ENSG00000077498; TAA
ASQSSMHNAL

SEQ ID NO: 97172 - protein, 10 aa, Homo sapiens
  misc_feature: Table A; Target 97172; HLA-A*03:01; TYR; ENSG00000077498; TAA
AVLTALLAGL

SEQ ID NO: 97173 - protein, 10 aa, Homo sapiens
  misc_feature: Table A; Target 97173; HLA-A*23:01; TYR; ENSG00000077498; TAA
AYLTLAKHTI

SEQ ID NO: 97174 - protein, 10 aa, Homo sapiens
  misc_feature: Table A; Target 97174; HLA-A*24:02; TYR; ENSG00000077498; TAA
AYLTLAKHTI

SEQ ID NO: 97175 - protein, 10 aa, Homo sapiens
  misc_feature: Table A; Target 97175; HLA-A*32:01; TYR; ENSG00000077498; TAA
AYLTLAKHTI

SEQ ID NO: 97176 - protein, 8 aa, Homo sapiens
  misc_feature: Table A; Target 97176; HLA-C*07:01; TYR; ENSG00000077498; TAA
CDICTDEY

SEQ ID NO: 97177 - protein, 8 aa, Homo sapiens
  misc_feature: Table A; Target 97177; HLA-B*37:01; TYR; ENSG00000077498; TAA
CVSSKNLM

SEQ ID NO: 97178 - protein, 10 aa, Homo sapiens
  misc_feature: Table A; Target 97178; HLA-A*03:01; TYR; ENSG00000077498; TAA
CVSSKNLMEK

SEQ ID NO: 97179 - protein, 10 aa, Homo sapiens
  misc_feature: Table A; Target 97179; HLA-A*03:02; TYR; ENSG00000077498; TAA
CVSSKNLMEK

SEQ ID NO: 97180 - protein, 10 aa, Homo sapiens
  misc_feature: Table A; Target 97180; HLA-A*11:01; TYR; ENSG00000077498; TAA
CVSSKNLMEK

SEQ ID NO: 97181 - protein, 9 aa, Homo sapiens
  misc_feature: Table A; Target 97181; HLA-A*33:01; TYR; ENSG00000077498; TAA
DALLGGSEI

SEQ ID NO: 97182 - protein, 9 aa, Homo sapiens
  misc_feature: Table A; Target 97182; HLA-B*35:03; TYR; ENSG00000077498; TAA
DALLGGSEI

SEQ ID NO: 97183 - protein, 9 aa, Homo sapiens
  misc_feature: Table A; Target 97183; HLA-B*38:01; TYR; ENSG00000077498; TAA
DALLGGSEI

SEQ ID NO: 97184 - protein, 9 aa, Homo sapiens
  misc_feature: Table A; Target 97184; HLA-B*39:01; TYR; ENSG00000077498; TAA
DALLGGSEI

SEQ ID NO: 97185 - protein, 9 aa, Homo sapiens
  misc_feature: Table A; Target 97185; HLA-B*51:01; TYR; ENSG00000077498; TAA
DALLGGSEI

SEQ ID NO: 97186 - protein, 9 aa, Homo sapiens
  misc_feature: Table A; Target 97186; HLA-C*01:02; TYR; ENSG00000077498; TAA
DALLGGSEI

SEQ ID NO: 97187 - protein, 9 aa, Homo sapiens
  misc_feature: Table A; Target 97187; HLA-C*03:03; TYR; ENSG00000077498; TAA
DALLGGSEI

SEQ ID NO: 97188 - protein, 9 aa, Homo sapiens
  misc_feature: Table A; Target 97188; HLA-C*03:04; TYR; ENSG00000077498; TAA
DALLGGSEI

SEQ ID NO: 97189 - protein, 9 aa, Homo sapiens
  misc_feature: Table A; Target 97189; HLA-C*05:01; TYR; ENSG00000077498; TAA
DALLGGSEI

SEQ ID NO: 97190 - protein, 10 aa, Homo sapiens
  misc_feature: Table A; Target 97190; HLA-A*25:01; TYR; ENSG00000077498; TAA
DALLGGSEIW

SEQ ID NO: 97191 - protein, 11 aa, Homo sapiens
  misc_feature: Table A; Target 97191; HLA-A*33:01; TYR; ENSG00000077498; TAA
DALLGGSEIWR

SEQ ID NO: 97192 - protein, 11 aa, Homo sapiens
  misc_feature: Table A; Target 97192; HLA-A*33:01; TYR; ENSG00000077498; TAA
DASQSSMHNAL

SEQ ID NO: 97193 - protein, 11 aa, Homo sapiens
  misc_feature: Table A; Target 97193; HLA-A*68:01; TYR; ENSG00000077498; TAA
DASQSSMHNAL

SEQ ID NO: 97194 - protein, 11 aa, Homo sapiens
  misc_feature: Table A; Target 97194; HLA-B*35:01; TYR; ENSG00000077498; TAA
DASQSSMHNAL

SEQ ID NO: 97195 - protein, 11 aa, Homo sapiens
  misc_feature: Table A; Target 97195; HLA-B*35:03; TYR; ENSG00000077498; TAA
DASQSSMHNAL

SEQ ID NO: 97196 - protein, 11 aa, Homo sapiens
  misc_feature: Table A; Target 97196; HLA-B*38:01; TYR; ENSG00000077498; TAA
DASQSSMHNAL

SEQ ID NO: 97197 - protein, 8 aa, Homo sapiens
  misc_feature: Table A; Target 97197; HLA-B*18:01; TYR; ENSG00000077498; TAA
DENFTIPY

SEQ ID NO: 97198 - protein, 9 aa, Homo sapiens
  misc_feature: Table A; Target 97198; HLA-B*18:01; TYR; ENSG00000077498; TAA
DENFTIPYW

SEQ ID NO: 97199 - protein, 9 aa, Homo sapiens
  misc_feature: Table A; Target 97199; HLA-B*44:02; TYR; ENSG00000077498; TAA
DENFTIPYW

SEQ ID NO: 97200 - protein, 9 aa, Homo sapiens
  misc_feature: Table A; Target 97200; HLA-B*44:03; TYR; ENSG00000077498; TAA
DENFTIPYW

SEQ ID NO: 97201 - protein, 8 aa, Homo sapiens
  misc_feature: Table A; Target 97201; HLA-B*18:01; TYR; ENSG00000077498; TAA
DEYMGGQH

SEQ ID NO: 97202 - protein, 9 aa, Homo sapiens
  misc_feature: Table A; Target 97202; HLA-B*18:01; TYR; ENSG00000077498; TAA
DEYMGGQHP

SEQ ID NO: 97203 - protein, 9 aa, Homo sapiens
  misc_feature: Table A; Target 97203; HLA-B*40:02; TYR; ENSG00000077498; TAA
DEYMGGQHP

SEQ ID NO: 97204 - protein, 9 aa, Homo sapiens
  misc_feature: Table A; Target 97204; HLA-B*49:01; TYR; ENSG00000077498; TAA
DEYMGGQHP

SEQ ID NO: 97205 - protein, 10 aa, Homo sapiens
  misc_feature: Table A; Target 97205; HLA-A*33:01; TYR; ENSG00000077498; TAA
DEYMGGQHPT

SEQ ID NO: 97206 - protein, 10 aa, Homo sapiens
  misc_feature: Table A; Target 97206; HLA-B*18:01; TYR; ENSG00000077498; TAA
DEYMGGQHPT

SEQ ID NO: 97207 - protein, 10 aa, Homo sapiens
  misc_feature: Table A; Target 97207; HLA-B*27:05; TYR; ENSG00000077498; TAA
DEYMGGQHPT

SEQ ID NO: 97208 - protein, 10 aa, Homo sapiens
  misc_feature: Table A; Target 97208; HLA-B*40:02; TYR; ENSG00000077498; TAA
DEYMGGQHPT

SEQ ID NO: 97209 - protein, 10 aa, Homo sapiens
  misc_feature: Table A; Target 97209; HLA-B*49:01; TYR; ENSG00000077498; TAA
DEYMGGQHPT

SEQ ID NO: 97210 - protein, 10 aa, Homo sapiens
  misc_feature: Table A; Target 97210; HLA-C*04:01; TYR; ENSG00000077498; TAA
DEYMGGQHPT

SEQ ID NO: 97211 - protein, 10 aa, Homo sapiens
  misc_feature: Table A; Target 97211; HLA-C*06:02; TYR; ENSG00000077498; TAA
DEYMGGQHPT

SEQ ID NO: 97212 - protein, 10 aa, Homo sapiens
  misc_feature: Table A; Target 97212; HLA-C*07:01; TYR; ENSG00000077498; TAA
DEYMGGQHPT

SEQ ID NO: 97213 - protein, 10 aa, Homo sapiens
  misc_feature: Table A; Target 97213; HLA-C*07:02; TYR; ENSG00000077498; TAA
DEYMGGQHPT

SEQ ID NO: 97214 - protein, 10 aa, Homo sapiens
  misc_feature: Table A; Target 97214; HLA-C*07:04; TYR; ENSG00000077498; TAA
DEYMGGQHPT

SEQ ID NO: 97215 - protein, 9 aa, Homo sapiens
  misc_feature: Table A; Target 97215; HLA-A*23:01; TYR; ENSG00000077498; TAA
DFAHEAPAF

SEQ ID NO: 97216 - protein, 9 aa, Homo sapiens
  misc_feature: Table A; Target 97216; HLA-A*24:02; TYR; ENSG00000077498; TAA
DFAHEAPAF

SEQ ID NO: 97217 - protein, 9 aa, Homo sapiens
  misc_feature: Table A; Target 97217; HLA-A*25:01; TYR; ENSG00000077498; TAA
DFAHEAPAF

SEQ ID NO: 97218 - protein, 11 aa, Homo sapiens
  misc_feature: Table A; Target 97218; HLA-A*29:02; TYR; ENSG00000077498; TAA
DFFISSKDLGY

SEQ ID NO: 97219 - protein, 9 aa, Homo sapiens
  misc_feature: Table A; Target 97219; HLA-A*33:01; TYR; ENSG00000077498; TAA
DKAANFSFR

SEQ ID NO: 97220 - protein, 8 aa, Homo sapiens
  misc_feature: Table A; Target 97220; HLA-C*07:01; TYR; ENSG00000077498; TAA
DLGYDYSY

SEQ ID NO: 97221 - protein, 8 aa, Homo sapiens
  misc_feature: Table A; Target 97221; HLA-B*35:01; TYR; ENSG00000077498; TAA
DPDSFQDY

SEQ ID NO: 97222 - protein, 8 aa, Homo sapiens
  misc_feature: Table A; Target 97222; HLA-B*55:01; TYR; ENSG00000077498; TAA
DPDSFQDY

SEQ ID NO: 97223 - protein, 8 aa, Homo sapiens
  misc_feature: Table A; Target 97223; HLA-C*03:03; TYR; ENSG00000077498; TAA
DPDSFQDY

SEQ ID NO: 97224 - protein, 9 aa, Homo sapiens
  misc_feature: Table A; Target 97224; HLA-B*38:01; TYR; ENSG00000077498; TAA
DPDSFQDYI

SEQ ID NO: 97225 - protein, 9 aa, Homo sapiens
  misc_feature: Table A; Target 97225; HLA-B*51:01; TYR; ENSG00000077498; TAA
DPDSFQDYI

SEQ ID NO: 97226 - protein, 10 aa, Homo sapiens
  misc_feature: Table A; Target 97226; HLA-B*27:02; TYR; ENSG00000077498; TAA
DPDSFQDYIK

SEQ ID NO: 97227 - protein, 8 aa, Homo sapiens
  misc_feature: Table A; Target 97227; HLA-B*51:01; TYR; ENSG00000077498; TAA
DPIFLLHH

SEQ ID NO: 97228 - protein, 9 aa, Homo sapiens
  misc_feature: Table A; Target 97228; HLA-B*51:01; TYR; ENSG00000077498; TAA
DPIFLLHHA

SEQ ID NO: 97229 - protein, 9 aa, Homo sapiens
  misc_feature: Table A; Target 97229; HLA-B*54:01; TYR; ENSG00000077498; TAA
DPIFLLHHA

SEQ ID NO: 97230 - protein, 9 aa, Homo sapiens
  misc_feature: Table A; Target 97230; HLA-B*56:01; TYR; ENSG00000077498; TAA
DPIFLLHHA

SEQ ID NO: 97231 - protein, 10 aa, Homo sapiens
  misc_feature: Table A; Target 97231; HLA-C*07:01; TYR; ENSG00000077498; TAA
DRESWPSVFY

SEQ ID NO: 97232 - protein, 10 aa, Homo sapiens
  misc_feature: Table A; Target 97232; HLA-A*01:01; TYR; ENSG00000077498; TAA
DSDPDSFQDY

SEQ ID NO: 97233 - protein, 11 aa, Homo sapiens
  misc_feature: Table A; Target 97233; HLA-A*01:01; TYR; ENSG00000077498; TAA
DSDPDSFQDYI

SEQ ID NO: 97234 - protein, 9 aa, Homo sapiens
  misc_feature: Table A; Target 97234; HLA-A*33:01; TYR; ENSG00000077498; TAA
DSFQDYIKS

SEQ ID NO: 97235 - protein, 10 aa, Homo sapiens
  misc_feature: Table A; Target 97235; HLA-A*25:01; TYR; ENSG00000077498; TAA
DSFQDYIKSY

SEQ ID NO: 97236 - protein, 10 aa, Homo sapiens
  misc_feature: Table A; Target 97236; HLA-A*26:01; TYR; ENSG00000077498; TAA
DSFQDYIKSY

SEQ ID NO: 97237 - protein, 10 aa, Homo sapiens
  misc_feature: Table A; Target 97237; HLA-A*33:01; TYR; ENSG00000077498; TAA
DSFQDYIKSY

SEQ ID NO: 97238 - protein, 10 aa, Homo sapiens
  misc_feature: Table A; Target 97238; HLA-B*18:01; TYR; ENSG00000077498; TAA
DSFQDYIKSY

SEQ ID NO: 97239 - protein, 10 aa, Homo sapiens
  misc_feature: Table A; Target 97239; HLA-B*44:02; TYR; ENSG00000077498; TAA
DSFQDYIKSY

SEQ ID NO: 97240 - protein, 9 aa, Homo sapiens
  misc_feature: Table A; Target 97240; HLA-A*33:01; TYR; ENSG00000077498; TAA
DSIFEQWLR

SEQ ID NO: 97241 - protein, 9 aa, Homo sapiens
  misc_feature: Table A; Target 97241; HLA-A*33:01; TYR; ENSG00000077498; TAA
DYHSLYQSH

SEQ ID NO: 97242 - protein, 10 aa, Homo sapiens
  misc_feature: Table A; Target 97242; HLA-A*33:01; TYR; ENSG00000077498; TAA
DYHSLYQSHL

SEQ ID NO: 97243 - protein, 9 aa, Homo sapiens
  misc_feature: Table A; Target 97243; HLA-A*33:01; TYR; ENSG00000077498; TAA
DYIKSYLEQ

SEQ ID NO: 97244 - protein, 8 aa, Homo sapiens
  misc_feature: Table A; Target 97244; HLA-C*07:01; TYR; ENSG00000077498; TAA
DYVIPIGT

SEQ ID NO: 97245 - protein, 9 aa, Homo sapiens
  misc_feature: Table A; Target 97245; HLA-A*23:01; TYR; ENSG00000077498; TAA
DYVIPIGTY

SEQ ID NO: 97246 - protein, 9 aa, Homo sapiens
  misc_feature: Table A; Target 97246; HLA-A*24:02; TYR; ENSG00000077498; TAA
DYVIPIGTY

SEQ ID NO: 97247 - protein, 9 aa, Homo sapiens
  misc_feature: Table A; Target 97247; HLA-A*25:01; TYR; ENSG00000077498; TAA
DYVIPIGTY

SEQ ID NO: 97248 - protein, 9 aa, Homo sapiens
  misc_feature: Table A; Target 97248; HLA-A*26:01; TYR; ENSG00000077498; TAA
DYVIPIGTY

SEQ ID NO: 97249 - protein, 9 aa, Homo sapiens
  misc_feature: Table A; Target 97249; HLA-A*29:02; TYR; ENSG00000077498; TAA
DYVIPIGTY

SEQ ID NO: 97250 - protein, 9 aa, Homo sapiens
  misc_feature: Table A; Target 97250; HLA-A*30:02; TYR; ENSG00000077498; TAA
DYVIPIGTY

SEQ ID NO: 97251 - protein, 9 aa, Homo sapiens
  misc_feature: Table A; Target 97251; HLA-A*33:01; TYR; ENSG00000077498; TAA
DYVIPIGTY

SEQ ID NO: 97252 - protein, 9 aa, Homo sapiens
  misc_feature: Table A; Target 97252; HLA-A*33:03; TYR; ENSG00000077498; TAA
DYVIPIGTY

SEQ ID NO: 97253 - protein, 9 aa, Homo sapiens
  misc_feature: Table A; Target 97253; HLA-B*15:01; TYR; ENSG00000077498; TAA
DYVIPIGTY

SEQ ID NO: 97254 - protein, 9 aa, Homo sapiens
  misc_feature: Table A; Target 97254; HLA-B*15:03; TYR; ENSG00000077498; TAA
DYVIPIGTY

SEQ ID NO: 97255 - protein, 9 aa, Homo sapiens
  misc_feature: Table A; Target 97255; HLA-B*18:01; TYR; ENSG00000077498; TAA
DYVIPIGTY

SEQ ID NO: 97256 - protein, 9 aa, Homo sapiens
  misc_feature: Table A; Target 97256; HLA-B*27:05; TYR; ENSG00000077498; TAA
DYVIPIGTY

SEQ ID NO: 97257 - protein, 9 aa, Homo sapiens
  misc_feature: Table A; Target 97257; HLA-B*35:01; TYR; ENSG00000077498; TAA
DYVIPIGTY

SEQ ID NO: 97258 - protein, 9 aa, Homo sapiens
  misc_feature: Table A; Target 97258; HLA-B*40:02; TYR; ENSG00000077498; TAA
DYVIPIGTY

SEQ ID NO: 97259 - protein, 9 aa, Homo sapiens
  misc_feature: Table A; Target 97259; HLA-B*46:01; TYR; ENSG00000077498; TAA
DYVIPIGTY

SEQ ID NO: 97260 - protein, 9 aa, Homo sapiens
  misc_feature: Table A; Target 97260; HLA-C*01:02; TYR; ENSG00000077498; TAA
DYVIPIGTY

SEQ ID NO: 97261 - protein, 9 aa, Homo sapiens
  misc_feature: Table A; Target 97261; HLA-C*04:01; TYR; ENSG00000077498; TAA
DYVIPIGTY

SEQ ID NO: 97262 - protein, 9 aa, Homo sapiens
  misc_feature: Table A; Target 97262; HLA-C*07:01; TYR; ENSG00000077498; TAA
DYVIPIGTY

SEQ ID NO: 97263 - protein, 9 aa, Homo sapiens
  misc_feature: Table A; Target 97263; HLA-C*07:02; TYR; ENSG00000077498; TAA
DYVIPIGTY

SEQ ID NO: 97264 - protein, 9 aa, Homo sapiens
  misc_feature: Table A; Target 97264; HLA-C*14:02; TYR; ENSG00000077498; TAA
DYVIPIGTY

SEQ ID NO: 97265 - protein, 10 aa, Homo sapiens
  misc_feature: Table A; Target 97265; HLA-A*29:02; TYR; ENSG00000077498; TAA
DYVIPIGTYG

SEQ ID NO: 97266 - protein, 10 aa, Homo sapiens
  misc_feature: Table A; Target 97266; HLA-C*04:01; TYR; ENSG00000077498; TAA
DYVIPIGTYG

SEQ ID NO: 97267 - protein, 10 aa, Homo sapiens
  misc_feature: Table A; Target 97267; HLA-C*07:01; TYR; ENSG00000077498; TAA
DYVIPIGTYG

SEQ ID NO: 97268 - protein, 8 aa, Homo sapiens
  misc_feature: Table A; Target 97268; HLA-A*33:01; TYR; ENSG00000077498; TAA
EANAPIGH

SEQ ID NO: 97269 - protein, 10 aa, Homo sapiens
  misc_feature: Table A; Target 97269; HLA-A*26:01; TYR; ENSG00000077498; TAA
EANAPIGHNR

SEQ ID NO: 97270 - protein, 10 aa, Homo sapiens
  misc_feature: Table A; Target 97270; HLA-A*31:01; TYR; ENSG00000077498; TAA
EANAPIGHNR

SEQ ID NO: 97271 - protein, 10 aa, Homo sapiens
  misc_feature: Table A; Target 97271; HLA-A*33:01; TYR; ENSG00000077498; TAA
EANAPIGHNR

SEQ ID NO: 97272 - protein, 10 aa, Homo sapiens
  misc_feature: Table A; Target 97272; HLA-A*33:03; TYR; ENSG00000077498; TAA
EANAPIGHNR

SEQ ID NO: 97273 - protein, 10 aa, Homo sapiens
  misc_feature: Table A; Target 97273; HLA-A*68:01; TYR; ENSG00000077498; TAA
EANAPIGHNR

SEQ ID NO: 97274 - protein, 10 aa, Homo sapiens
  misc_feature: Table A; Target 97274; HLA-A*68:02; TYR; ENSG00000077498; TAA
EANAPIGHNR

SEQ ID NO: 97275 - protein, 10 aa, Homo sapiens
  misc_feature: Table A; Target 97275; HLA-C*07:06; TYR; ENSG00000077498; TAA
EANAPIGHNR

SEQ ID NO: 97276 - protein, 10 aa, Homo sapiens
  misc_feature: Table A; Target 97276; HLA-A*68:02; TYR; ENSG00000077498; TAA
EAPAFLPWHR

SEQ ID NO: 97277 - protein, 8 aa, Homo sapiens
  misc_feature: Table A; Target 97277; HLA-C*07:01; TYR; ENSG00000077498; TAA
EDYHSLYQ

SEQ ID NO: 97278 - protein, 9 aa, Homo sapiens
  misc_feature: Table A; Target 97278; HLA-A*33:01; TYR; ENSG00000077498; TAA
EDYHSLYQS

SEQ ID NO: 97279 - protein, 11 aa, Homo sapiens
  misc_feature: Table A; Target 97279; HLA-A*68:02; TYR; ENSG00000077498; TAA
EDYHSLYQSHL

SEQ ID NO: 97280 - protein, 8 aa, Homo sapiens
  misc_feature: Table A; Target 97280; HLA-B*18:01; TYR; ENSG00000077498; TAA
EEKQPLLM

SEQ ID NO: 97281 - protein, 9 aa, Homo sapiens
  misc_feature: Table A; Target 97281; HLA-A*23:01; TYR; ENSG00000077498; TAA
EEYNSHQSL

SEQ ID NO: 97282 - protein, 9 aa, Homo sapiens
  misc_feature: Table A; Target 97282; HLA-A*24:02; TYR; ENSG00000077498; TAA
EEYNSHQSL

SEQ ID NO: 97283 - protein, 9 aa, Homo sapiens
  misc_feature: Table A; Target 97283; HLA-A*25:01; TYR; ENSG00000077498; TAA
EEYNSHQSL

SEQ ID NO: 97284 - protein, 9 aa, Homo sapiens
  misc_feature: Table A; Target 97284; HLA-A*26:01; TYR; ENSG00000077498; TAA
EEYNSHQSL

SEQ ID NO: 97285 - protein, 9 aa, Homo sapiens
  misc_feature: Table A; Target 97285; HLA-A*30:01; TYR; ENSG00000077498; TAA
EEYNSHQSL

SEQ ID NO: 97286 - protein, 9 aa, Homo sapiens
  misc_feature: Table A; Target 97286; HLA-A*32:01; TYR; ENSG00000077498; TAA
EEYNSHQSL

SEQ ID NO: 97287 - protein, 9 aa, Homo sapiens
  misc_feature: Table A; Target 97287; HLA-A*33:03; TYR; ENSG00000077498; TAA
EEYNSHQSL

SEQ ID NO: 97288 - protein, 9 aa, Homo sapiens
  misc_feature: Table A; Target 97288; HLA-A*68:02; TYR; ENSG00000077498; TAA
EEYNSHQSL

SEQ ID NO: 97289 - protein, 9 aa, Homo sapiens
  misc_feature: Table A; Target 97289; HLA-B*07:02; TYR; ENSG00000077498; TAA
EEYNSHQSL

SEQ ID NO: 97290 - protein, 9 aa, Homo sapiens
  misc_feature: Table A; Target 97290; HLA-B*08:01; TYR; ENSG00000077498; TAA
EEYNSHQSL

SEQ ID NO: 97291 - protein, 9 aa, Homo sapiens
  misc_feature: Table A; Target 97291; HLA-B*13:02; TYR; ENSG00000077498; TAA
EEYNSHQSL

SEQ ID NO: 97292 - protein, 9 aa, Homo sapiens
  misc_feature: Table A; Target 97292; HLA-B*15:03; TYR; ENSG00000077498; TAA
EEYNSHQSL

SEQ ID NO: 97293 - protein, 9 aa, Homo sapiens
  misc_feature: Table A; Target 97293; HLA-B*18:01; TYR; ENSG00000077498; TAA
EEYNSHQSL

SEQ ID NO: 97294 - protein, 9 aa, Homo sapiens
  misc_feature: Table A; Target 97294; HLA-B*27:02; TYR; ENSG00000077498; TAA
EEYNSHQSL

SEQ ID NO: 97295 - protein, 9 aa, Homo sapiens
  misc_feature: Table A; Target 97295; HLA-B*27:05; TYR; ENSG00000077498; TAA
EEYNSHQSL

SEQ ID NO: 97296 - protein, 9 aa, Homo sapiens
  misc_feature: Table A; Target 97296; HLA-B*37:01; TYR; ENSG00000077498; TAA
EEYNSHQSL

SEQ ID NO: 97297 - protein, 9 aa, Homo sapiens
  misc_feature: Table A; Target 97297; HLA-B*38:01; TYR; ENSG00000077498; TAA
EEYNSHQSL

SEQ ID NO: 97298 - protein, 9 aa, Homo sapiens
  misc_feature: Table A; Target 97298; HLA-B*39:01; TYR; ENSG00000077498; TAA
EEYNSHQSL

SEQ ID NO: 97299 - protein, 9 aa, Homo sapiens
  misc_feature: Table A; Target 97299; HLA-B*40:01; TYR; ENSG00000077498; TAA
EEYNSHQSL

SEQ ID NO: 97300 - protein, 9 aa, Homo sapiens
  misc_feature: Table A; Target 97300; HLA-B*40:02; TYR; ENSG00000077498; TAA
EEYNSHQSL

SEQ ID NO: 97301 - protein, 9 aa, Homo sapiens
  misc_feature: Table A; Target 97301; HLA-B*44:02; TYR; ENSG00000077498; TAA
EEYNSHQSL

SEQ ID NO: 97302 - protein, 9 aa, Homo sapiens
  misc_feature: Table A; Target 97302; HLA-B*44:03; TYR; ENSG00000077498; TAA
EEYNSHQSL

SEQ ID NO: 97303 - protein, 9 aa, Homo sapiens
  misc_feature: Table A; Target 97303; HLA-B*49:01; TYR; ENSG00000077498; TAA
EEYNSHQSL

SEQ ID NO: 97304 - protein, 9 aa, Homo sapiens
  misc_feature: Table A; Target 97304; HLA-B*51:01; TYR; ENSG00000077498; TAA
EEYNSHQSL

SEQ ID NO: 97305 - protein, 9 aa, Homo sapiens
  misc_feature: Table A; Target 97305; HLA-C*02:02; TYR; ENSG00000077498; TAA
EEYNSHQSL

SEQ ID NO: 97306 - protein, 9 aa, Homo sapiens
  misc_feature: Table A; Target 97306; HLA-C*03:03; TYR; ENSG00000077498; TAA
EEYNSHQSL

SEQ ID NO: 97307 - protein, 9 aa, Homo sapiens
  misc_feature: Table A; Target 97307; HLA-C*03:04; TYR; ENSG00000077498; TAA
EEYNSHQSL

SEQ ID NO: 97308 - protein, 9 aa, Homo sapiens
  misc_feature: Table A; Target 97308; HLA-C*06:02; TYR; ENSG00000077498; TAA
EEYNSHQSL

SEQ ID NO: 97309 - protein, 9 aa, Homo sapiens
  misc_feature: Table A; Target 97309; HLA-C*07:01; TYR; ENSG00000077498; TAA
EEYNSHQSL

SEQ ID NO: 97310 - protein, 9 aa, Homo sapiens
  misc_feature: Table A; Target 97310; HLA-C*07:04; TYR; ENSG00000077498; TAA
EEYNSHQSL

SEQ ID NO: 97311 - protein, 9 aa, Homo sapiens
  misc_feature: Table A; Target 97311; HLA-C*12:03; TYR; ENSG00000077498; TAA
EEYNSHQSL

SEQ ID NO: 97312 - protein, 9 aa, Homo sapiens
  misc_feature: Table A; Target 97312; HLA-C*14:02; TYR; ENSG00000077498; TAA
EEYNSHQSL

SEQ ID NO: 97313 - protein, 9 aa, Homo sapiens
  misc_feature: Table A; Target 97313; HLA-C*16:01; TYR; ENSG00000077498; TAA
EEYNSHQSL

SEQ ID NO: 97314 - protein, 9 aa, Homo sapiens
  misc_feature: Table A; Target 97314; HLA-C*16:02; TYR; ENSG00000077498; TAA
EEYNSHQSL

SEQ ID NO: 97315 - protein, 9 aa, Homo sapiens
  misc_feature: Table A; Target 97315; HLA-C*16:04; TYR; ENSG00000077498; TAA
EEYNSHQSL

SEQ ID NO: 97316 - protein, 10 aa, Homo sapiens
  misc_feature: Table A; Target 97316; HLA-B*49:01; TYR; ENSG00000077498; TAA
EEYNSHQSLC

SEQ ID NO: 97317 - protein, 9 aa, Homo sapiens
  misc_feature: Table A; Target 97317; HLA-C*07:01; TYR; ENSG00000077498; TAA
EFCLSLTQY

SEQ ID NO: 97318 - protein, 9 aa, Homo sapiens
  misc_feature: Table A; Target 97318; HLA-C*07:01; TYR; ENSG00000077498; TAA
EGFASPLTG

SEQ ID NO: 97319 - protein, 9 aa, Homo sapiens
  misc_feature: Table A; Target 97319; HLA-C*12:03; TYR; ENSG00000077498; TAA
EGFASPLTG

SEQ ID NO: 97320 - protein, 10 aa, Homo sapiens
  misc_feature: Table A; Target 97320; HLA-A*25:01; TYR; ENSG00000077498; TAA
EGFASPLTGI

SEQ ID NO: 97321 - protein, 10 aa, Homo sapiens
  misc_feature: Table A; Target 97321; HLA-A*68:02; TYR; ENSG00000077498; TAA
EGFASPLTGI

SEQ ID NO: 97322 - protein, 10 aa, Homo sapiens
  misc_feature: Table A; Target 97322; HLA-B*07:02; TYR; ENSG00000077498; TAA
EGFASPLTGI

SEQ ID NO: 97323 - protein, 10 aa, Homo sapiens
  misc_feature: Table A; Target 97323; HLA-B*51:01; TYR; ENSG00000077498; TAA
EGFASPLTGI

SEQ ID NO: 97324 - protein, 10 aa, Homo sapiens
  misc_feature: Table A; Target 97324; HLA-C*07:01; TYR; ENSG00000077498; TAA
EGFASPLTGI

SEQ ID NO: 97325 - protein, 9 aa, Homo sapiens
  misc_feature: Table A; Target 97325; HLA-A*24:02; TYR; ENSG00000077498; TAA
EQASRIWSW

SEQ ID NO: 97326 - protein, 9 aa, Homo sapiens
  misc_feature: Table A; Target 97326; HLA-A*25:01; TYR; ENSG00000077498; TAA
EQASRIWSW

SEQ ID NO: 97327 - protein, 9 aa, Homo sapiens
  misc_feature: Table A; Target 97327; HLA-A*26:01; TYR; ENSG00000077498; TAA
EQASRIWSW

SEQ ID NO: 97328 - protein, 9 aa, Homo sapiens
  misc_feature: Table A; Target 97328; HLA-B*44:02; TYR; ENSG00000077498; TAA
EQASRIWSW

SEQ ID NO: 97329 - protein, 9 aa, Homo sapiens
  misc_feature: Table A; Target 97329; HLA-B*44:03; TYR; ENSG00000077498; TAA
EQASRIWSW

SEQ ID NO: 97330 - protein, 8 aa, Homo sapiens
  misc_feature: Table A; Target 97330; HLA-C*07:01; TYR; ENSG00000077498; TAA
ESWPSVFY

SEQ ID NO: 97331 - protein, 10 aa, Homo sapiens
  misc_feature: Table A; Target 97331; HLA-A*31:01; TYR; ENSG00000077498; TAA
ESWPSVFYNR

SEQ ID NO: 97332 - protein, 10 aa, Homo sapiens
  misc_feature: Table A; Target 97332; HLA-A*33:01; TYR; ENSG00000077498; TAA
ESWPSVFYNR

SEQ ID NO: 97333 - protein, 10 aa, Homo sapiens
  misc_feature: Table A; Target 97333; HLA-A*33:03; TYR; ENSG00000077498; TAA
ESWPSVFYNR

SEQ ID NO: 97334 - protein, 10 aa, Homo sapiens
  misc_feature: Table A; Target 97334; HLA-A*68:02; TYR; ENSG00000077498; TAA
ESWPSVFYNR

SEQ ID NO: 97335 - protein, 10 aa, Homo sapiens
  misc_feature: Table A; Target 97335; HLA-B*57:01; TYR; ENSG00000077498; TAA
ESWPSVFYNR

SEQ ID NO: 97336 - protein, 8 aa, Homo sapiens
  misc_feature: Table A; Target 97336; HLA-B*51:01; TYR; ENSG00000077498; TAA
ESYMVPFI

SEQ ID NO: 97337 - protein, 10 aa, Homo sapiens
  misc_feature: Table A; Target 97337; HLA-A*68:02; TYR; ENSG00000077498; TAA
ESYMVPFIPL

SEQ ID NO: 97338 - protein, 9 aa, Homo sapiens
  misc_feature: Table A; Target 97338; HLA-A*25:01; TYR; ENSG00000077498; TAA
EVYPEANAP

SEQ ID NO: 97339 - protein, 9 aa, Homo sapiens
  misc_feature: Table A; Target 97339; HLA-A*26:01; TYR; ENSG00000077498; TAA
EVYPEANAP

SEQ ID NO: 97340 - protein, 10 aa, Homo sapiens
  misc_feature: Table A; Target 97340; HLA-A*25:01; TYR; ENSG00000077498; TAA
EVYPEANAPI

SEQ ID NO: 97341 - protein, 10 aa, Homo sapiens
  misc_feature: Table A; Target 97341; HLA-A*26:01; TYR; ENSG00000077498; TAA
EVYPEANAPI

SEQ ID NO: 97342 - protein, 10 aa, Homo sapiens
  misc_feature: Table A; Target 97342; HLA-A*33:01; TYR; ENSG00000077498; TAA
EVYPEANAPI

SEQ ID NO: 97343 - protein, 10 aa, Homo sapiens
  misc_feature: Table A; Target 97343; HLA-A*33:03; TYR; ENSG00000077498; TAA
EVYPEANAPI

SEQ ID NO: 97344 - protein, 10 aa, Homo sapiens
  misc_feature: Table A; Target 97344; HLA-A*68:01; TYR; ENSG00000077498; TAA
EVYPEANAPI

SEQ ID NO: 97345 - protein, 10 aa, Homo sapiens
  misc_feature: Table A; Target 97345; HLA-A*68:02; TYR; ENSG00000077498; TAA
EVYPEANAPI

SEQ ID NO: 97346 - protein, 10 aa, Homo sapiens
  misc_feature: Table A; Target 97346; HLA-B*39:01; TYR; ENSG00000077498; TAA
EVYPEANAPI

SEQ ID NO: 97347 - protein, 10 aa, Homo sapiens
  misc_feature: Table A; Target 97347; HLA-C*03:03; TYR; ENSG00000077498; TAA
EVYPEANAPI

SEQ ID NO: 97348 - protein, 10 aa, Homo sapiens
  misc_feature: Table A; Target 97348; HLA-C*07:04; TYR; ENSG00000077498; TAA
EVYPEANAPI

SEQ ID NO: 97349 - protein, 10 aa, Homo sapiens
  misc_feature: Table A; Target 97349; HLA-C*07:06; TYR; ENSG00000077498; TAA
EVYPEANAPI

SEQ ID NO: 97350 - protein, 11 aa, Homo sapiens
  misc_feature: Table A; Target 97350; HLA-A*26:01; TYR; ENSG00000077498; TAA
EVYPEANAPIG

SEQ ID NO: 97351 - protein, 9 aa, Homo sapiens
  misc_feature: Table A; Target 97351; HLA-A*33:03; TYR; ENSG00000077498; TAA
EYMGGQHPT

SEQ ID NO: 97352 - protein, 10 aa, Homo sapiens
  misc_feature: Table A; Target 97352; HLA-A*33:03; TYR; ENSG00000077498; TAA
EYMGGQHPTN

SEQ ID NO: 97353 - protein, 8 aa, Homo sapiens
  misc_feature: Table A; Target 97353; HLA-A*23:01; TYR; ENSG00000077498; TAA
EYNSHQSL

SEQ ID NO: 97354 - protein, 8 aa, Homo sapiens
  misc_feature: Table A; Target 97354; HLA-A*24:02; TYR; ENSG00000077498; TAA
EYNSHQSL

SEQ ID NO: 97355 - protein, 8 aa, Homo sapiens
  misc_feature: Table A; Target 97355; HLA-A*33:01; TYR; ENSG00000077498; TAA
EYNSHQSL

SEQ ID NO: 97356 - protein, 8 aa, Homo sapiens
  misc_feature: Table A; Target 97356; HLA-A*33:03; TYR; ENSG00000077498; TAA
EYNSHQSL

SEQ ID NO: 97357 - protein, 8 aa, Homo sapiens
  misc_feature: Table A; Target 97357; HLA-B*08:01; TYR; ENSG00000077498; TAA
EYNSHQSL

SEQ ID NO: 97358 - protein, 8 aa, Homo sapiens
  misc_feature: Table A; Target 97358; HLA-C*01:02; TYR; ENSG00000077498; TAA
EYNSHQSL

SEQ ID NO: 97359 - protein, 8 aa, Homo sapiens
  misc_feature: Table A; Target 97359; HLA-C*04:01; TYR; ENSG00000077498; TAA
EYNSHQSL

SEQ ID NO: 97360 - protein, 8 aa, Homo sapiens
  misc_feature: Table A; Target 97360; HLA-C*07:01; TYR; ENSG00000077498; TAA
EYNSHQSL

SEQ ID NO: 97361 - protein, 8 aa, Homo sapiens
  misc_feature: Table A; Target 97361; HLA-C*07:02; TYR; ENSG00000077498; TAA
EYNSHQSL

SEQ ID NO: 97362 - protein, 8 aa, Homo sapiens
  misc_feature: Table A; Target 97362; HLA-C*14:02; TYR; ENSG00000077498; TAA
EYNSHQSL

SEQ ID NO: 97363 - protein, 8 aa, Homo sapiens
  misc_feature: Table A; Target 97363; HLA-A*26:01; TYR; ENSG00000077498; TAA
FAHEAPAF

SEQ ID NO: 97364 - protein, 8 aa, Homo sapiens
  misc_feature: Table A; Target 97364; HLA-B*15:03; TYR; ENSG00000077498; TAA
FAHEAPAF

SEQ ID NO: 97365 - protein, 8 aa, Homo sapiens
  misc_feature: Table A; Target 97365; HLA-B*18:01; TYR; ENSG00000077498; TAA
FAHEAPAF

SEQ ID NO: 97366 - protein, 8 aa, Homo sapiens
  misc_feature: Table A; Target 97366; HLA-B*35:01; TYR; ENSG00000077498; TAA
FAHEAPAF

SEQ ID NO: 97367 - protein, 8 aa, Homo sapiens
  misc_feature: Table A; Target 97367; HLA-B*39:01; TYR; ENSG00000077498; TAA
FAHEAPAF

SEQ ID NO: 97368 - protein, 8 aa, Homo sapiens
  misc_feature: Table A; Target 97368; HLA-B*46:01; TYR; ENSG00000077498; TAA
FAHEAPAF

SEQ ID NO: 97369 - protein, 8 aa, Homo sapiens
  misc_feature: Table A; Target 97369; HLA-B*51:01; TYR; ENSG00000077498; TAA
FAHEAPAF

SEQ ID NO: 97370 - protein, 8 aa, Homo sapiens
  misc_feature: Table A; Target 97370; HLA-B*54:01; TYR; ENSG00000077498; TAA
FAHEAPAF

SEQ ID NO: 97371 - protein, 8 aa, Homo sapiens
  misc_feature: Table A; Target 97371; HLA-B*58:01; TYR; ENSG00000077498; TAA
FAHEAPAF

SEQ ID NO: 97372 - protein, 8 aa, Homo sapiens
  misc_feature: Table A; Target 97372; HLA-C*01:02; TYR; ENSG00000077498; TAA
FAHEAPAF

SEQ ID NO: 97373 - protein, 8 aa, Homo sapiens
  misc_feature: Table A; Target 97373; HLA-C*02:02; TYR; ENSG00000077498; TAA
FAHEAPAF

SEQ ID NO: 97374 - protein, 8 aa, Homo sapiens
  misc_feature: Table A; Target 97374; HLA-C*03:03; TYR; ENSG00000077498; TAA
FAHEAPAF

SEQ ID NO: 97375 - protein, 8 aa, Homo sapiens
  misc_feature: Table A; Target 97375; HLA-C*03:04; TYR; ENSG00000077498; TAA
FAHEAPAF

SEQ ID NO: 97376 - protein, 8 aa, Homo sapiens
  misc_feature: Table A; Target 97376; HLA-C*05:01; TYR; ENSG00000077498; TAA
FAHEAPAF

SEQ ID NO: 97377 - protein, 8 aa, Homo sapiens
  misc_feature: Table A; Target 97377; HLA-C*14:02; TYR; ENSG00000077498; TAA
FAHEAPAF

SEQ ID NO: 97378 - protein, 8 aa, Homo sapiens
  misc_feature: Table A; Target 97378; HLA-C*16:01; TYR; ENSG00000077498; TAA
FAHEAPAF

SEQ ID NO: 97379 - protein, 8 aa, Homo sapiens
  misc_feature: Table A; Target 97379; HLA-C*16:02; TYR; ENSG00000077498; TAA
FAHEAPAF

SEQ ID NO: 97380 - protein, 8 aa, Homo sapiens
  misc_feature: Table A; Target 97380; HLA-C*16:04; TYR; ENSG00000077498; TAA
FAHEAPAF

SEQ ID NO: 97381 - protein, 9 aa, Homo sapiens
  misc_feature: Table A; Target 97381; HLA-A*01:01; TYR; ENSG00000077498; TAA
FAHEAPAFL

SEQ ID NO: 97382 - protein, 9 aa, Homo sapiens
  misc_feature: Table A; Target 97382; HLA-A*02:03; TYR; ENSG00000077498; TAA
FAHEAPAFL

SEQ ID NO: 97383 - protein, 9 aa, Homo sapiens
  misc_feature: Table A; Target 97383; HLA-A*02:07; TYR; ENSG00000077498; TAA
FAHEAPAFL

SEQ ID NO: 97384 - protein, 9 aa, Homo sapiens
  misc_feature: Table A; Target 97384; HLA-A*68:02; TYR; ENSG00000077498; TAA
FAHEAPAFL

SEQ ID NO: 97385 - protein, 9 aa, Homo sapiens
  misc_feature: Table A; Target 97385; HLA-B*35:03; TYR; ENSG00000077498; TAA
FAHEAPAFL

SEQ ID NO: 97386 - protein, 9 aa, Homo sapiens
  misc_feature: Table A; Target 97386; HLA-B*46:01; TYR; ENSG00000077498; TAA
FAHEAPAFL

SEQ ID NO: 97387 - protein, 9 aa, Homo sapiens
  misc_feature: Table A; Target 97387; HLA-B*51:01; TYR; ENSG00000077498; TAA
FAHEAPAFL

SEQ ID NO: 97388 - protein, 9 aa, Homo sapiens
  misc_feature: Table A; Target 97388; HLA-B*54:01; TYR; ENSG00000077498; TAA
FAHEAPAFL

SEQ ID NO: 97389 - protein, 9 aa, Homo sapiens
  misc_feature: Table A; Target 97389; HLA-C*02:02; TYR; ENSG00000077498; TAA
FAHEAPAFL

SEQ ID NO: 97390 - protein, 9 aa, Homo sapiens
  misc_feature: Table A; Target 97390; HLA-C*03:03; TYR; ENSG00000077498; TAA
FAHEAPAFL

SEQ ID NO: 97391 - protein, 9 aa, Homo sapiens
  misc_feature: Table A; Target 97391; HLA-C*03:04; TYR; ENSG00000077498; TAA
FAHEAPAFL

SEQ ID NO: 97392 - protein, 9 aa, Homo sapiens
  misc_feature: Table A; Target 97392; HLA-C*05:01; TYR; ENSG00000077498; TAA
FAHEAPAFL

SEQ ID NO: 97393 - protein, 9 aa, Homo sapiens
  misc_feature: Table A; Target 97393; HLA-C*16:04; TYR; ENSG00000077498; TAA
FAHEAPAFL

SEQ ID NO: 97394 - protein, 8 aa, Homo sapiens
  misc_feature: Table A; Target 97394; HLA-B*13:02; TYR; ENSG00000077498; TAA
FASPLTGI

SEQ ID NO: 97395 - protein, 8 aa, Homo sapiens
  misc_feature: Table A; Target 97395; HLA-B*49:01; TYR; ENSG00000077498; TAA
FASPLTGI

SEQ ID NO: 97396 - protein, 8 aa, Homo sapiens
  misc_feature: Table A; Target 97396; HLA-B*51:01; TYR; ENSG00000077498; TAA
FASPLTGI

SEQ ID NO: 97397 - protein, 8 aa, Homo sapiens
  misc_feature: Table A; Target 97397; HLA-B*54:01; TYR; ENSG00000077498; TAA
FASPLTGI

SEQ ID NO: 97398 - protein, 8 aa, Homo sapiens
  misc_feature: Table A; Target 97398; HLA-C*02:02; TYR; ENSG00000077498; TAA
FASPLTGI

SEQ ID NO: 97399 - protein, 8 aa, Homo sapiens
  misc_feature: Table A; Target 97399; HLA-C*16:02; TYR; ENSG00000077498; TAA
FASPLTGI

SEQ ID NO: 97400 - protein, 9 aa, Homo sapiens
  misc_feature: Table A; Target 97400; HLA-B*46:01; TYR; ENSG00000077498; TAA
FASPLTGIA

SEQ ID NO: 97401 - protein, 9 aa, Homo sapiens
  misc_feature: Table A; Target 97401; HLA-B*54:01; TYR; ENSG00000077498; TAA
FASPLTGIA

SEQ ID NO: 97402 - protein, 9 aa, Homo sapiens
  misc_feature: Table A; Target 97402; HLA-B*56:01; TYR; ENSG00000077498; TAA
FASPLTGIA

SEQ ID NO: 97403 - protein, 9 aa, Homo sapiens
  misc_feature: Table A; Target 97403; HLA-C*02:02; TYR; ENSG00000077498; TAA
FASPLTGIA

SEQ ID NO: 97404 - protein, 9 aa, Homo sapiens
  misc_feature: Table A; Target 97404; HLA-C*03:03; TYR; ENSG00000077498; TAA
FASPLTGIA

SEQ ID NO: 97405 - protein, 9 aa, Homo sapiens
  misc_feature: Table A; Target 97405; HLA-C*03:04; TYR; ENSG00000077498; TAA
FASPLTGIA

SEQ ID NO: 97406 - protein, 9 aa, Homo sapiens
  misc_feature: Table A; Target 97406; HLA-C*06:02; TYR; ENSG00000077498; TAA
FASPLTGIA

SEQ ID NO: 97407 - protein, 9 aa, Homo sapiens
  misc_feature: Table A; Target 97407; HLA-C*12:03; TYR; ENSG00000077498; TAA
FASPLTGIA

SEQ ID NO: 97408 - protein, 9 aa, Homo sapiens
  misc_feature: Table A; Target 97408; HLA-C*16:02; TYR; ENSG00000077498; TAA
FASPLTGIA

SEQ ID NO: 97409 - protein, 9 aa, Homo sapiens
  misc_feature: Table A; Target 97409; HLA-C*16:04; TYR; ENSG00000077498; TAA
FASPLTGIA

SEQ ID NO: 97410 - protein, 11 aa, Homo sapiens
  misc_feature: Table A; Target 97410; HLA-B*54:01; TYR; ENSG00000077498; TAA
FASPLTGIADA

SEQ ID NO: 97411 - protein, 8 aa, Homo sapiens
  misc_feature: Table A; Target 97411; HLA-B*51:01; TYR; ENSG00000077498; TAA
FAYLTLAK

SEQ ID NO: 97412 - protein, 8 aa, Homo sapiens
  misc_feature: Table A; Target 97412; HLA-B*54:01; TYR; ENSG00000077498; TAA
FAYLTLAK

SEQ ID NO: 97413 - protein, 11 aa, Homo sapiens
  misc_feature: Table A; Target 97413; HLA-B*51:01; TYR; ENSG00000077498; TAA
FAYLTLAKHTI

SEQ ID NO: 97414 - protein, 11 aa, Homo sapiens
  misc_feature: Table A; Target 97414; HLA-B*54:01; TYR; ENSG00000077498; TAA
FAYLTLAKHTI

SEQ ID NO: 97415 - protein, 8 aa, Homo sapiens
  misc_feature: Table A; Target 97415; HLA-A*03:02; TYR; ENSG00000077498; TAA
FDLSAPEK

SEQ ID NO: 97416 - protein, 8 aa, Homo sapiens
  misc_feature: Table A; Target 97416; HLA-A*11:01; TYR; ENSG00000077498; TAA
FDLSAPEK

SEQ ID NO: 97417 - protein, 8 aa, Homo sapiens
  misc_feature: Table A; Target 97417; HLA-B*27:02; TYR; ENSG00000077498; TAA
FDLSAPEK

SEQ ID NO: 97418 - protein, 8 aa, Homo sapiens
  misc_feature: Table A; Target 97418; HLA-B*27:05; TYR; ENSG00000077498; TAA
FDLSAPEK

SEQ ID NO: 97419 - protein, 8 aa, Homo sapiens
  misc_feature: Table A; Target 97419; HLA-C*07:01; TYR; ENSG00000077498; TAA
FDLSAPEK

SEQ ID NO: 97420 - protein, 8 aa, Homo sapiens
  misc_feature: Table A; Target 97420; HLA-C*07:02; TYR; ENSG00000077498; TAA
FDLSAPEK

SEQ ID NO: 97421 - protein, 8 aa, Homo sapiens
  misc_feature: Table A; Target 97421; HLA-C*12:03; TYR; ENSG00000077498; TAA
FDLSAPEK

SEQ ID NO: 97422 - protein, 9 aa, Homo sapiens
  misc_feature: Table A; Target 97422; HLA-A*29:02; TYR; ENSG00000077498; TAA
FFAYLTLAK

SEQ ID NO: 97423 - protein, 8 aa, Homo sapiens
  misc_feature: Table A; Target 97423; HLA-C*14:02; TYR; ENSG00000077498; TAA
FFISSKDL

SEQ ID NO: 97424 - protein, 10 aa, Homo sapiens
  misc_feature: Table A; Target 97424; HLA-A*29:02; TYR; ENSG00000077498; TAA
FFISSKDLGY

SEQ ID NO: 97425 - protein, 10 aa, Homo sapiens
  misc_feature: Table A; Target 97425; HLA-C*14:02; TYR; ENSG00000077498; TAA
FFISSKDLGY

SEQ ID NO: 97426 - protein, 9 aa, Homo sapiens
  misc_feature: Table A; Target 97426; HLA-A*01:01; TYR; ENSG00000077498; TAA
FISSKDLGY

SEQ ID NO: 97427 - protein, 9 aa, Homo sapiens
  misc_feature: Table A; Target 97427; HLA-A*03:01; TYR; ENSG00000077498; TAA
FISSKDLGY

SEQ ID NO: 97428 - protein, 9 aa, Homo sapiens
  misc_feature: Table A; Target 97428; HLA-A*26:01; TYR; ENSG00000077498; TAA
FISSKDLGY

SEQ ID NO: 97429 - protein, 9 aa, Homo sapiens
  misc_feature: Table A; Target 97429; HLA-A*29:02; TYR; ENSG00000077498; TAA
FISSKDLGY

SEQ ID NO: 97430 - protein, 9 aa, Homo sapiens
  misc_feature: Table A; Target 97430; HLA-A*32:01; TYR; ENSG00000077498; TAA
FISSKDLGY

SEQ ID NO: 97431 - protein, 9 aa, Homo sapiens
  misc_feature: Table A; Target 97431; HLA-B*15:01; TYR; ENSG00000077498; TAA
FISSKDLGY

SEQ ID NO: 97432 - protein, 9 aa, Homo sapiens
  misc_feature: Table A; Target 97432; HLA-B*46:01; TYR; ENSG00000077498; TAA
FISSKDLGY

SEQ ID NO: 97433 - protein, 9 aa, Homo sapiens
  misc_feature: Table A; Target 97433; HLA-C*02:02; TYR; ENSG00000077498; TAA
FISSKDLGY

SEQ ID NO: 97434 - protein, 9 aa, Homo sapiens
  misc_feature: Table A; Target 97434; HLA-C*07:04; TYR; ENSG00000077498; TAA
FISSKDLGY

SEQ ID NO: 97435 - protein, 9 aa, Homo sapiens
  misc_feature: Table A; Target 97435; HLA-C*16:01; TYR; ENSG00000077498; TAA
FISSKDLGY

SEQ ID NO: 97436 - protein, 9 aa, Homo sapiens
  misc_feature: Table A; Target 97436; HLA-C*16:02; TYR; ENSG00000077498; TAA
FISSKDLGY

SEQ ID NO: 97437 - protein, 11 aa, Homo sapiens
  misc_feature: Table A; Target 97437; HLA-A*01:01; TYR; ENSG00000077498; TAA
FISSKDLGYDY

SEQ ID NO: 97438 - protein, 11 aa, Homo sapiens
  misc_feature: Table A; Target 97438; HLA-A*29:02; TYR; ENSG00000077498; TAA
FISSKDLGYDY

SEQ ID NO: 97439 - protein, 9 aa, Homo sapiens
  misc_feature: Table A; Target 97439; HLA-A*02:01; TYR; ENSG00000077498; TAA
FLLRWEQEI

SEQ ID NO: 97440 - protein, 9 aa, Homo sapiens
  misc_feature: Table A; Target 97440; HLA-A*02:04; TYR; ENSG00000077498; TAA
FLLRWEQEI

SEQ ID NO: 97441 - protein, 9 aa, Homo sapiens
  misc_feature: Table A; Target 97441; HLA-A*02:07; TYR; ENSG00000077498; TAA
FLLRWEQEI

SEQ ID NO: 97442 - protein, 9 aa, Homo sapiens
  misc_feature: Table A; Target 97442; HLA-A*24:02; TYR; ENSG00000077498; TAA
FLLRWEQEI

SEQ ID NO: 97443 - protein, 9 aa, Homo sapiens
  misc_feature: Table A; Target 97443; HLA-A*02:07; TYR; ENSG00000077498; TAA
FLPWHRLFL

SEQ ID NO: 97444 - protein, 9 aa, Homo sapiens
  misc_feature: Table A; Target 97444; HLA-B*27:02; TYR; ENSG00000077498; TAA
FPFTGVDDR

SEQ ID NO: 97445 - protein, 9 aa, Homo sapiens
  misc_feature: Table A; Target 97445; HLA-B*35:01; TYR; ENSG00000077498; TAA
FPFTGVDDR

SEQ ID NO: 97446 - protein, 9 aa, Homo sapiens
  misc_feature: Table A; Target 97446; HLA-B*35:03; TYR; ENSG00000077498; TAA
FPFTGVDDR

SEQ ID NO: 97447 - protein, 9 aa, Homo sapiens
  misc_feature: Table A; Target 97447; HLA-B*54:01; TYR; ENSG00000077498; TAA
FPFTGVDDR

SEQ ID NO: 97448 - protein, 9 aa, Homo sapiens
  misc_feature: Table A; Target 97448; HLA-C*07:06; TYR; ENSG00000077498; TAA
FPFTGVDDR

SEQ ID NO: 97449 - protein, 8 aa, Homo sapiens
  misc_feature: Table A; Target 97449; HLA-A*01:01; TYR; ENSG00000077498; TAA
FQDYIKSY

SEQ ID NO: 97450 - protein, 8 aa, Homo sapiens
  misc_feature: Table A; Target 97450; HLA-B*15:03; TYR; ENSG00000077498; TAA
FQDYIKSY

SEQ ID NO: 97451 - protein, 9 aa, Homo sapiens
  misc_feature: Table A; Target 97451; HLA-A*01:01; TYR; ENSG00000077498; TAA
FQDYIKSYL

SEQ ID NO: 97452 - protein, 9 aa, Homo sapiens
  misc_feature: Table A; Target 97452; HLA-A*02:01; TYR; ENSG00000077498; TAA
FQDYIKSYL

SEQ ID NO: 97453 - protein, 9 aa, Homo sapiens
  misc_feature: Table A; Target 97453; HLA-A*02:04; TYR; ENSG00000077498; TAA
FQDYIKSYL

SEQ ID NO: 97454 - protein, 9 aa, Homo sapiens
  misc_feature: Table A; Target 97454; HLA-A*02:07; TYR; ENSG00000077498; TAA
FQDYIKSYL

SEQ ID NO: 97455 - protein, 9 aa, Homo sapiens
  misc_feature: Table A; Target 97455; HLA-A*31:01; TYR; ENSG00000077498; TAA
FQDYIKSYL

SEQ ID NO: 97456 - protein, 9 aa, Homo sapiens
  misc_feature: Table A; Target 97456; HLA-A*68:02; TYR; ENSG00000077498; TAA
FQDYIKSYL

SEQ ID NO: 97457 - protein, 9 aa, Homo sapiens
  misc_feature: Table A; Target 97457; HLA-B*38:01; TYR; ENSG00000077498; TAA
FQDYIKSYL

SEQ ID NO: 97458 - protein, 9 aa, Homo sapiens
  misc_feature: Table A; Target 97458; HLA-C*04:01; TYR; ENSG00000077498; TAA
FQDYIKSYL

SEQ ID NO: 97459 - protein, 9 aa, Homo sapiens
  misc_feature: Table A; Target 97459; HLA-C*05:01; TYR; ENSG00000077498; TAA
FQDYIKSYL

SEQ ID NO: 97460 - protein, 8 aa, Homo sapiens
  misc_feature: Table A; Target 97460; HLA-A*32:01; TYR; ENSG00000077498; TAA
FQTSAGHF

SEQ ID NO: 97461 - protein, 8 aa, Homo sapiens
  misc_feature: Table A; Target 97461; HLA-B*07:02; TYR; ENSG00000077498; TAA
FQTSAGHF

SEQ ID NO: 97462 - protein, 8 aa, Homo sapiens
  misc_feature: Table A; Target 97462; HLA-B*15:01; TYR; ENSG00000077498; TAA
FQTSAGHF

SEQ ID NO: 97463 - protein, 8 aa, Homo sapiens
  misc_feature: Table A; Target 97463; HLA-B*15:03; TYR; ENSG00000077498; TAA
FQTSAGHF

SEQ ID NO: 97464 - protein, 8 aa, Homo sapiens
  misc_feature: Table A; Target 97464; HLA-B*39:01; TYR; ENSG00000077498; TAA
FQTSAGHF

SEQ ID NO: 97465 - protein, 8 aa, Homo sapiens
  misc_feature: Table A; Target 97465; HLA-C*02:02; TYR; ENSG00000077498; TAA
FQTSAGHF

SEQ ID NO: 97466 - protein, 8 aa, Homo sapiens
  misc_feature: Table A; Target 97466; HLA-C*03:03; TYR; ENSG00000077498; TAA
FQTSAGHF

SEQ ID NO: 97467 - protein, 8 aa, Homo sapiens
  misc_feature: Table A; Target 97467; HLA-C*03:04; TYR; ENSG00000077498; TAA
FQTSAGHF

SEQ ID NO: 97468 - protein, 8 aa, Homo sapiens
  misc_feature: Table A; Target 97468; HLA-C*04:01; TYR; ENSG00000077498; TAA
FQTSAGHF

SEQ ID NO: 97469 - protein, 8 aa, Homo sapiens
  misc_feature: Table A; Target 97469; HLA-C*05:01; TYR; ENSG00000077498; TAA
FQTSAGHF

SEQ ID NO: 97470 - protein, 8 aa, Homo sapiens
  misc_feature: Table A; Target 97470; HLA-C*07:01; TYR; ENSG00000077498; TAA
FQTSAGHF

SEQ ID NO: 97471 - protein, 8 aa, Homo sapiens
  misc_feature: Table A; Target 97471; HLA-C*07:04; TYR; ENSG00000077498; TAA
FQTSAGHF

SEQ ID NO: 97472 - protein, 8 aa, Homo sapiens
  misc_feature: Table A; Target 97472; HLA-C*12:03; TYR; ENSG00000077498; TAA
FQTSAGHF

SEQ ID NO: 97473 - protein, 8 aa, Homo sapiens
  misc_feature: Table A; Target 97473; HLA-C*14:02; TYR; ENSG00000077498; TAA
FQTSAGHF

SEQ ID NO: 97474 - protein, 8 aa, Homo sapiens
  misc_feature: Table A; Target 97474; HLA-C*16:01; TYR; ENSG00000077498; TAA
FQTSAGHF

SEQ ID NO: 97475 - protein, 8 aa, Homo sapiens
  misc_feature: Table A; Target 97475; HLA-C*16:02; TYR; ENSG00000077498; TAA
FQTSAGHF

SEQ ID NO: 97476 - protein, 8 aa, Homo sapiens
  misc_feature: Table A; Target 97476; HLA-C*16:04; TYR; ENSG00000077498; TAA
FQTSAGHF

SEQ ID NO: 97477 - protein, 10 aa, Homo sapiens
  misc_feature: Table A; Target 97477; HLA-A*31:01; TYR; ENSG00000077498; TAA
FQTSAGHFPR

SEQ ID NO: 97478 - protein, 10 aa, Homo sapiens
  misc_feature: Table A; Target 97478; HLA-A*68:01; TYR; ENSG00000077498; TAA
FQTSAGHFPR

SEQ ID NO: 97479 - protein, 10 aa, Homo sapiens
  misc_feature: Table A; Target 97479; HLA-A*01:01; TYR; ENSG00000077498; TAA
FSFRNTLEGF

SEQ ID NO: 97480 - protein, 10 aa, Homo sapiens
  misc_feature: Table A; Target 97480; HLA-B*57:01; TYR; ENSG00000077498; TAA
FSFRNTLEGF

SEQ ID NO: 97481 - protein, 10 aa, Homo sapiens
  misc_feature: Table A; Target 97481; HLA-A*25:01; TYR; ENSG00000077498; TAA
FTGVDDRESW

SEQ ID NO: 97482 - protein, 10 aa, Homo sapiens
  misc_feature: Table A; Target 97482; HLA-B*57:01; TYR; ENSG00000077498; TAA
FTGVDDRESW

SEQ ID NO: 97483 - protein, 9 aa, Homo sapiens
  misc_feature: Table A; Target 97483; HLA-A*01:01; TYR; ENSG00000077498; TAA
FVDSIFEQW

SEQ ID NO: 97484 - protein, 9 aa, Homo sapiens
  misc_feature: Table A; Target 97484; HLA-A*02:01; TYR; ENSG00000077498; TAA
FVDSIFEQW

SEQ ID NO: 97485 - protein, 9 aa, Homo sapiens
  misc_feature: Table A; Target 97485; HLA-A*02:07; TYR; ENSG00000077498; TAA
FVDSIFEQW

SEQ ID NO: 97486 - protein, 9 aa, Homo sapiens
  misc_feature: Table A; Target 97486; HLA-A*24:02; TYR; ENSG00000077498; TAA
FVDSIFEQW

SEQ ID NO: 97487 - protein, 9 aa, Homo sapiens
  misc_feature: Table A; Target 97487; HLA-A*25:01; TYR; ENSG00000077498; TAA
FVDSIFEQW

SEQ ID NO: 97488 - protein, 9 aa, Homo sapiens
  misc_feature: Table A; Target 97488; HLA-A*29:02; TYR; ENSG00000077498; TAA
FVDSIFEQW

SEQ ID NO: 97489 - protein, 9 aa, Homo sapiens
  misc_feature: Table A; Target 97489; HLA-A*32:01; TYR; ENSG00000077498; TAA
FVDSIFEQW

SEQ ID NO: 97490 - protein, 9 aa, Homo sapiens
  misc_feature: Table A; Target 97490; HLA-A*33:01; TYR; ENSG00000077498; TAA
FVDSIFEQW

SEQ ID NO: 97491 - protein, 9 aa, Homo sapiens
  misc_feature: Table A; Target 97491; HLA-A*68:02; TYR; ENSG00000077498; TAA
FVDSIFEQW

SEQ ID NO: 97492 - protein, 9 aa, Homo sapiens
  misc_feature: Table A; Target 97492; HLA-B*35:01; TYR; ENSG00000077498; TAA
FVDSIFEQW

SEQ ID NO: 97493 - protein, 9 aa, Homo sapiens
  misc_feature: Table A; Target 97493; HLA-B*38:01; TYR; ENSG00000077498; TAA
FVDSIFEQW

SEQ ID NO: 97494 - protein, 9 aa, Homo sapiens
  misc_feature: Table A; Target 97494; HLA-B*44:02; TYR; ENSG00000077498; TAA
FVDSIFEQW

SEQ ID NO: 97495 - protein, 9 aa, Homo sapiens
  misc_feature: Table A; Target 97495; HLA-B*44:03; TYR; ENSG00000077498; TAA
FVDSIFEQW

SEQ ID NO: 97496 - protein, 9 aa, Homo sapiens
  misc_feature: Table A; Target 97496; HLA-B*57:01; TYR; ENSG00000077498; TAA
FVDSIFEQW

SEQ ID NO: 97497 - protein, 9 aa, Homo sapiens
  misc_feature: Table A; Target 97497; HLA-B*58:01; TYR; ENSG00000077498; TAA
FVDSIFEQW

SEQ ID NO: 97498 - protein, 9 aa, Homo sapiens
  misc_feature: Table A; Target 97498; HLA-C*02:02; TYR; ENSG00000077498; TAA
FVDSIFEQW

SEQ ID NO: 97499 - protein, 9 aa, Homo sapiens
  misc_feature: Table A; Target 97499; HLA-C*03:04; TYR; ENSG00000077498; TAA
FVDSIFEQW

SEQ ID NO: 97500 - protein, 9 aa, Homo sapiens
  misc_feature: Table A; Target 97500; HLA-C*05:01; TYR; ENSG00000077498; TAA
FVDSIFEQW

SEQ ID NO: 97501 - protein, 10 aa, Homo sapiens
  misc_feature: Table A; Target 97501; HLA-A*02:07; TYR; ENSG00000077498; TAA
FVDSIFEQWL

SEQ ID NO: 97502 - protein, 10 aa, Homo sapiens
  misc_feature: Table A; Target 97502; HLA-A*68:02; TYR; ENSG00000077498; TAA
FVDSIFEQWL

SEQ ID NO: 97503 - protein, 9 aa, Homo sapiens
  misc_feature: Table A; Target 97503; HLA-A*23:01; TYR; ENSG00000077498; TAA
GAAMVGAVL

SEQ ID NO: 97504 - protein, 9 aa, Homo sapiens
  misc_feature: Table A; Target 97504; HLA-A*26:01; TYR; ENSG00000077498; TAA
GAAMVGAVL

SEQ ID NO: 97505 - protein, 9 aa, Homo sapiens
  misc_feature: Table A; Target 97505; HLA-A*30:01; TYR; ENSG00000077498; TAA
GAAMVGAVL

SEQ ID NO: 97506 - protein, 9 aa, Homo sapiens
  misc_feature: Table A; Target 97506; HLA-B*07:02; TYR; ENSG00000077498; TAA
GAAMVGAVL

SEQ ID NO: 97507 - protein, 9 aa, Homo sapiens
  misc_feature: Table A; Target 97507; HLA-B*13:02; TYR; ENSG00000077498; TAA
GAAMVGAVL

SEQ ID NO: 97508 - protein, 9 aa, Homo sapiens
  misc_feature: Table A; Target 97508; HLA-B*15:01; TYR; ENSG00000077498; TAA
GAAMVGAVL

SEQ ID NO: 97509 - protein, 9 aa, Homo sapiens
  misc_feature: Table A; Target 97509; HLA-B*15:03; TYR; ENSG00000077498; TAA
GAAMVGAVL

SEQ ID NO: 97510 - protein, 9 aa, Homo sapiens
  misc_feature: Table A; Target 97510; HLA-B*27:05; TYR; ENSG00000077498; TAA
GAAMVGAVL

SEQ ID NO: 97511 - protein, 9 aa, Homo sapiens
  misc_feature: Table A; Target 97511; HLA-B*35:01; TYR; ENSG00000077498; TAA
GAAMVGAVL

SEQ ID NO: 97512 - protein, 9 aa, Homo sapiens
  misc_feature: Table A; Target 97512; HLA-B*35:03; TYR; ENSG00000077498; TAA
GAAMVGAVL

SEQ ID NO: 97513 - protein, 9 aa, Homo sapiens
  misc_feature: Table A; Target 97513; HLA-B*38:01; TYR; ENSG00000077498; TAA
GAAMVGAVL

SEQ ID NO: 97514 - protein, 9 aa, Homo sapiens
  misc_feature: Table A; Target 97514; HLA-B*39:01; TYR; ENSG00000077498; TAA
GAAMVGAVL

SEQ ID NO: 97515 - protein, 9 aa, Homo sapiens
  misc_feature: Table A; Target 97515; HLA-B*40:01; TYR; ENSG00000077498; TAA
GAAMVGAVL

SEQ ID NO: 97516 - protein, 9 aa, Homo sapiens
  misc_feature: Table A; Target 97516; HLA-B*40:02; TYR; ENSG00000077498; TAA
GAAMVGAVL

SEQ ID NO: 97517 - protein, 9 aa, Homo sapiens
  misc_feature: Table A; Target 97517; HLA-B*46:01; TYR; ENSG00000077498; TAA
GAAMVGAVL

SEQ ID NO: 97518 - protein, 9 aa, Homo sapiens
  misc_feature: Table A; Target 97518; HLA-B*58:01; TYR; ENSG00000077498; TAA
GAAMVGAVL

SEQ ID NO: 97519 - protein, 9 aa, Homo sapiens
  misc_feature: Table A; Target 97519; HLA-C*01:02; TYR; ENSG00000077498; TAA
GAAMVGAVL

SEQ ID NO: 97520 - protein, 9 aa, Homo sapiens
  misc_feature: Table A; Target 97520; HLA-C*02:02; TYR; ENSG00000077498; TAA
GAAMVGAVL

SEQ ID NO: 97521 - protein, 9 aa, Homo sapiens
  misc_feature: Table A; Target 97521; HLA-C*03:03; TYR; ENSG00000077498; TAA
GAAMVGAVL

SEQ ID NO: 97522 - protein, 9 aa, Homo sapiens
  misc_feature: Table A; Target 97522; HLA-C*03:04; TYR; ENSG00000077498; TAA
GAAMVGAVL

SEQ ID NO: 97523 - protein, 9 aa, Homo sapiens
  misc_feature: Table A; Target 97523; HLA-C*05:01; TYR; ENSG00000077498; TAA
GAAMVGAVL

SEQ ID NO: 97524 - protein, 9 aa, Homo sapiens
  misc_feature: Table A; Target 97524; HLA-C*06:02; TYR; ENSG00000077498; TAA
GAAMVGAVL

SEQ ID NO: 97525 - protein, 9 aa, Homo sapiens
  misc_feature: Table A; Target 97525; HLA-C*07:02; TYR; ENSG00000077498; TAA
GAAMVGAVL

SEQ ID NO: 97526 - protein, 9 aa, Homo sapiens
  misc_feature: Table A; Target 97526; HLA-C*07:04; TYR; ENSG00000077498; TAA
GAAMVGAVL

SEQ ID NO: 97527 - protein, 9 aa, Homo sapiens
  misc_feature: Table A; Target 97527; HLA-C*07:06; TYR; ENSG00000077498; TAA
GAAMVGAVL

SEQ ID NO: 97528 - protein, 9 aa, Homo sapiens
  misc_feature: Table A; Target 97528; HLA-C*12:03; TYR; ENSG00000077498; TAA
GAAMVGAVL

SEQ ID NO: 97529 - protein, 9 aa, Homo sapiens
  misc_feature: Table A; Target 97529; HLA-C*14:02; TYR; ENSG00000077498; TAA
GAAMVGAVL

SEQ ID NO: 97530 - protein, 9 aa, Homo sapiens
  misc_feature: Table A; Target 97530; HLA-C*16:01; TYR; ENSG00000077498; TAA
GAAMVGAVL

SEQ ID NO: 97531 - protein, 9 aa, Homo sapiens
  misc_feature: Table A; Target 97531; HLA-C*16:02; TYR; ENSG00000077498; TAA
GAAMVGAVL

SEQ ID NO: 97532 - protein, 9 aa, Homo sapiens
  misc_feature: Table A; Target 97532; HLA-C*16:04; TYR; ENSG00000077498; TAA
GAAMVGAVL

SEQ ID NO: 97533 - protein, 8 aa, Homo sapiens
  misc_feature: Table A; Target 97533; HLA-A*03:02; TYR; ENSG00000077498; TAA
GDFFISSK

SEQ ID NO: 97534 - protein, 8 aa, Homo sapiens
  misc_feature: Table A; Target 97534; HLA-A*11:01; TYR; ENSG00000077498; TAA
GDFFISSK

SEQ ID NO: 97535 - protein, 8 aa, Homo sapiens
  misc_feature: Table A; Target 97535; HLA-B*27:02; TYR; ENSG00000077498; TAA
GDFFISSK

SEQ ID NO: 97536 - protein, 8 aa, Homo sapiens
  misc_feature: Table A; Target 97536; HLA-B*27:05; TYR; ENSG00000077498; TAA
GDFFISSK

SEQ ID NO: 97537 - protein, 8 aa, Homo sapiens
  misc_feature: Table A; Target 97537; HLA-B*37:01; TYR; ENSG00000077498; TAA
GDFFISSK

SEQ ID NO: 97538 - protein, 8 aa, Homo sapiens
  misc_feature: Table A; Target 97538; HLA-C*04:01; TYR; ENSG00000077498; TAA
GDFFISSK

SEQ ID NO: 97539 - protein, 8 aa, Homo sapiens
  misc_feature: Table A; Target 97539; HLA-C*07:01; TYR; ENSG00000077498; TAA
GDFFISSK

SEQ ID NO: 97540 - protein, 9 aa, Homo sapiens
  misc_feature: Table A; Target 97540; HLA-A*02:03; TYR; ENSG00000077498; TAA
GFASPLTGI

SEQ ID NO: 97541 - protein, 9 aa, Homo sapiens
  misc_feature: Table A; Target 97541; HLA-A*23:01; TYR; ENSG00000077498; TAA
GFASPLTGI

SEQ ID NO: 97542 - protein, 9 aa, Homo sapiens
  misc_feature: Table A; Target 97542; HLA-A*24:02; TYR; ENSG00000077498; TAA
GFASPLTGI

SEQ ID NO: 97543 - protein, 9 aa, Homo sapiens
  misc_feature: Table A; Target 97543; HLA-B*13:02; TYR; ENSG00000077498; TAA
GFASPLTGI

SEQ ID NO: 97544 - protein, 9 aa, Homo sapiens
  misc_feature: Table A; Target 97544; HLA-C*04:01; TYR; ENSG00000077498; TAA
GFASPLTGI

SEQ ID NO: 97545 - protein, 9 aa, Homo sapiens
  misc_feature: Table A; Target 97545; HLA-C*14:02; TYR; ENSG00000077498; TAA
GFASPLTGI

SEQ ID NO: 97546 - protein, 10 aa, Homo sapiens
  misc_feature: Table A; Target 97546; HLA-A*25:01; TYR; ENSG00000077498; TAA
GIADASQSSM

SEQ ID NO: 97547 - protein, 10 aa, Homo sapiens
  misc_feature: Table A; Target 97547; HLA-A*26:01; TYR; ENSG00000077498; TAA
GIADASQSSM

SEQ ID NO: 97548 - protein, 10 aa, Homo sapiens
  misc_feature: Table A; Target 97548; HLA-A*32:01; TYR; ENSG00000077498; TAA
GIADASQSSM

SEQ ID NO: 97549 - protein, 10 aa, Homo sapiens
  misc_feature: Table A; Target 97549; HLA-B*07:02; TYR; ENSG00000077498; TAA
GIADASQSSM

SEQ ID NO: 97550 - protein, 10 aa, Homo sapiens
  misc_feature: Table A; Target 97550; HLA-B*15:01; TYR; ENSG00000077498; TAA
GIADASQSSM

SEQ ID NO: 97551 - protein, 10 aa, Homo sapiens
  misc_feature: Table A; Target 97551; HLA-B*15:03; TYR; ENSG00000077498; TAA
GIADASQSSM

SEQ ID NO: 97552 - protein, 10 aa, Homo sapiens
  misc_feature: Table A; Target 97552; HLA-B*27:05; TYR; ENSG00000077498; TAA
GIADASQSSM

SEQ ID NO: 97553 - protein, 10 aa, Homo sapiens
  misc_feature: Table A; Target 97553; HLA-B*39:01; TYR; ENSG00000077498; TAA
GIADASQSSM

SEQ ID NO: 97554 - protein, 10 aa, Homo sapiens
  misc_feature: Table A; Target 97554; HLA-B*46:01; TYR; ENSG00000077498; TAA
GIADASQSSM

SEQ ID NO: 97555 - protein, 10 aa, Homo sapiens
  misc_feature: Table A; Target 97555; HLA-B*58:01; TYR; ENSG00000077498; TAA
GIADASQSSM

SEQ ID NO: 97556 - protein, 10 aa, Homo sapiens
  misc_feature: Table A; Target 97556; HLA-C*01:02; TYR; ENSG00000077498; TAA
GIADASQSSM

SEQ ID NO: 97557 - protein, 10 aa, Homo sapiens
  misc_feature: Table A; Target 97557; HLA-C*02:02; TYR; ENSG00000077498; TAA
GIADASQSSM

SEQ ID NO: 97558 - protein, 10 aa, Homo sapiens
  misc_feature: Table A; Target 97558; HLA-C*03:03; TYR; ENSG00000077498; TAA
GIADASQSSM

SEQ ID NO: 97559 - protein, 10 aa, Homo sapiens
  misc_feature: Table A; Target 97559; HLA-C*03:04; TYR; ENSG00000077498; TAA
GIADASQSSM

SEQ ID NO: 97560 - protein, 10 aa, Homo sapiens
  misc_feature: Table A; Target 97560; HLA-C*07:04; TYR; ENSG00000077498; TAA
GIADASQSSM

SEQ ID NO: 97561 - protein, 10 aa, Homo sapiens
  misc_feature: Table A; Target 97561; HLA-C*14:02; TYR; ENSG00000077498; TAA
GIADASQSSM

SEQ ID NO: 97562 - protein, 10 aa, Homo sapiens
  misc_feature: Table A; Target 97562; HLA-C*16:04; TYR; ENSG00000077498; TAA
GIADASQSSM

SEQ ID NO: 97563 - protein, 9 aa, Homo sapiens
  misc_feature: Table A; Target 97563; HLA-B*07:02; TYR; ENSG00000077498; TAA
GPNCTERRL

SEQ ID NO: 97564 - protein, 9 aa, Homo sapiens
  misc_feature: Table A; Target 97564; HLA-B*07:02; TYR; ENSG00000077498; TAA
GPQFPFTGV

SEQ ID NO: 97565 - protein, 9 aa, Homo sapiens
  misc_feature: Table A; Target 97565; HLA-B*54:01; TYR; ENSG00000077498; TAA
GPQFPFTGV

SEQ ID NO: 97566 - protein, 9 aa, Homo sapiens
  misc_feature: Table A; Target 97566; HLA-B*55:01; TYR; ENSG00000077498; TAA
GPQFPFTGV

SEQ ID NO: 97567 - protein, 9 aa, Homo sapiens
  misc_feature: Table A; Target 97567; HLA-B*56:01; TYR; ENSG00000077498; TAA
GPQFPFTGV

SEQ ID NO: 97568 - protein, 9 aa, Homo sapiens
  misc_feature: Table A; Target 97568; HLA-C*07:02; TYR; ENSG00000077498; TAA
GPQFPFTGV

SEQ ID NO: 97569 - protein, 9 aa, Homo sapiens
  misc_feature: Table A; Target 97569; HLA-A*02:01; TYR; ENSG00000077498; TAA
GQHPTNPNL

SEQ ID NO: 97570 - protein, 9 aa, Homo sapiens
  misc_feature: Table A; Target 97570; HLA-A*02:04; TYR; ENSG00000077498; TAA
GQHPTNPNL

SEQ ID NO: 97571 - protein, 9 aa, Homo sapiens
  misc_feature: Table A; Target 97571; HLA-A*30:01; TYR; ENSG00000077498; TAA
GQHPTNPNL

SEQ ID NO: 97572 - protein, 9 aa, Homo sapiens
  misc_feature: Table A; Target 97572; HLA-A*30:02; TYR; ENSG00000077498; TAA
GQHPTNPNL

SEQ ID NO: 97573 - protein, 9 aa, Homo sapiens
  misc_feature: Table A; Target 97573; HLA-A*32:01; TYR; ENSG00000077498; TAA
GQHPTNPNL

SEQ ID NO: 97574 - protein, 9 aa, Homo sapiens
  misc_feature: Table A; Target 97574; HLA-B*13:02; TYR; ENSG00000077498; TAA
GQHPTNPNL

SEQ ID NO: 97575 - protein, 9 aa, Homo sapiens
  misc_feature: Table A; Target 97575; HLA-B*15:01; TYR; ENSG00000077498; TAA
GQHPTNPNL

SEQ ID NO: 97576 - protein, 9 aa, Homo sapiens
  misc_feature: Table A; Target 97576; HLA-B*15:03; TYR; ENSG00000077498; TAA
GQHPTNPNL

SEQ ID NO: 97577 - protein, 9 aa, Homo sapiens
  misc_feature: Table A; Target 97577; HLA-B*27:02; TYR; ENSG00000077498; TAA
GQHPTNPNL

SEQ ID NO: 97578 - protein, 9 aa, Homo sapiens
  misc_feature: Table A; Target 97578; HLA-B*27:05; TYR; ENSG00000077498; TAA
GQHPTNPNL

SEQ ID NO: 97579 - protein, 9 aa, Homo sapiens
  misc_feature: Table A; Target 97579; HLA-B*37:01; TYR; ENSG00000077498; TAA
GQHPTNPNL

SEQ ID NO: 97580 - protein, 9 aa, Homo sapiens
  misc_feature: Table A; Target 97580; HLA-B*38:01; TYR; ENSG00000077498; TAA
GQHPTNPNL

SEQ ID NO: 97581 - protein, 9 aa, Homo sapiens
  misc_feature: Table A; Target 97581; HLA-B*39:01; TYR; ENSG00000077498; TAA
GQHPTNPNL

SEQ ID NO: 97582 - protein, 9 aa, Homo sapiens
  misc_feature: Table A; Target 97582; HLA-B*40:01; TYR; ENSG00000077498; TAA
GQHPTNPNL

SEQ ID NO: 97583 - protein, 9 aa, Homo sapiens
  misc_feature: Table A; Target 97583; HLA-B*40:02; TYR; ENSG00000077498; TAA
GQHPTNPNL

SEQ ID NO: 97584 - protein, 9 aa, Homo sapiens
  misc_feature: Table A; Target 97584; HLA-B*58:01; TYR; ENSG00000077498; TAA
GQHPTNPNL

SEQ ID NO: 97585 - protein, 9 aa, Homo sapiens
  misc_feature: Table A; Target 97585; HLA-C*02:02; TYR; ENSG00000077498; TAA
GQHPTNPNL

SEQ ID NO: 97586 - protein, 9 aa, Homo sapiens
  misc_feature: Table A; Target 97586; HLA-C*06:02; TYR; ENSG00000077498; TAA
GQHPTNPNL

SEQ ID NO: 97587 - protein, 9 aa, Homo sapiens
  misc_feature: Table A; Target 97587; HLA-C*07:04; TYR; ENSG00000077498; TAA
GQHPTNPNL

SEQ ID NO: 97588 - protein, 9 aa, Homo sapiens
  misc_feature: Table A; Target 97588; HLA-C*16:04; TYR; ENSG00000077498; TAA
GQHPTNPNL

SEQ ID NO: 97589 - protein, 10 aa, Homo sapiens
  misc_feature: Table A; Target 97589; HLA-A*02:03; TYR; ENSG00000077498; TAA
GQHPTNPNLL

SEQ ID NO: 97590 - protein, 10 aa, Homo sapiens
  misc_feature: Table A; Target 97590; HLA-A*30:01; TYR; ENSG00000077498; TAA
GQHPTNPNLL

SEQ ID NO: 97591 - protein, 10 aa, Homo sapiens
  misc_feature: Table A; Target 97591; HLA-B*13:02; TYR; ENSG00000077498; TAA
GQHPTNPNLL

SEQ ID NO: 97592 - protein, 10 aa, Homo sapiens
  misc_feature: Table A; Target 97592; HLA-B*15:01; TYR; ENSG00000077498; TAA
GQHPTNPNLL

SEQ ID NO: 97593 - protein, 10 aa, Homo sapiens
  misc_feature: Table A; Target 97593; HLA-B*15:03; TYR; ENSG00000077498; TAA
GQHPTNPNLL

SEQ ID NO: 97594 - protein, 10 aa, Homo sapiens
  misc_feature: Table A; Target 97594; HLA-B*27:05; TYR; ENSG00000077498; TAA
GQHPTNPNLL

SEQ ID NO: 97595 - protein, 10 aa, Homo sapiens
  misc_feature: Table A; Target 97595; HLA-B*38:01; TYR; ENSG00000077498; TAA
GQHPTNPNLL

SEQ ID NO: 97596 - protein, 10 aa, Homo sapiens
  misc_feature: Table A; Target 97596; HLA-B*39:01; TYR; ENSG00000077498; TAA
GQHPTNPNLL

SEQ ID NO: 97597 - protein, 10 aa, Homo sapiens
  misc_feature: Table A; Target 97597; HLA-B*40:01; TYR; ENSG00000077498; TAA
GQHPTNPNLL

SEQ ID NO: 97598 - protein, 10 aa, Homo sapiens
  misc_feature: Table A; Target 97598; HLA-B*40:02; TYR; ENSG00000077498; TAA
GQHPTNPNLL

SEQ ID NO: 97599 - protein, 10 aa, Homo sapiens
  misc_feature: Table A; Target 97599; HLA-C*06:02; TYR; ENSG00000077498; TAA
GQHPTNPNLL

SEQ ID NO: 97600 - protein, 10 aa, Homo sapiens
  misc_feature: Table A; Target 97600; HLA-C*07:02; TYR; ENSG00000077498; TAA
GQHPTNPNLL

SEQ ID NO: 97601 - protein, 10 aa, Homo sapiens
  misc_feature: Table A; Target 97601; HLA-C*07:04; TYR; ENSG00000077498; TAA
GQHPTNPNLL

SEQ ID NO: 97602 - protein, 10 aa, Homo sapiens
  misc_feature: Table A; Target 97602; HLA-C*16:04; TYR; ENSG00000077498; TAA
GQHPTNPNLL

SEQ ID NO: 97603 - protein, 9 aa, Homo sapiens
  misc_feature: Table A; Target 97603; HLA-B*15:01; TYR; ENSG00000077498; TAA
GQMKNGSTP

SEQ ID NO: 97604 - protein, 10 aa, Homo sapiens
  misc_feature: Table A; Target 97604; HLA-A*03:02; TYR; ENSG00000077498; TAA
GQMKNGSTPM

SEQ ID NO: 97605 - protein, 10 aa, Homo sapiens
  misc_feature: Table A; Target 97605; HLA-A*32:01; TYR; ENSG00000077498; TAA
GQMKNGSTPM

SEQ ID NO: 97606 - protein, 10 aa, Homo sapiens
  misc_feature: Table A; Target 97606; HLA-B*13:02; TYR; ENSG00000077498; TAA
GQMKNGSTPM

SEQ ID NO: 97607 - protein, 10 aa, Homo sapiens
  misc_feature: Table A; Target 97607; HLA-B*15:01; TYR; ENSG00000077498; TAA
GQMKNGSTPM

SEQ ID NO: 97608 - protein, 10 aa, Homo sapiens
  misc_feature: Table A; Target 97608; HLA-B*15:03; TYR; ENSG00000077498; TAA
GQMKNGSTPM

SEQ ID NO: 97609 - protein, 10 aa, Homo sapiens
  misc_feature: Table A; Target 97609; HLA-B*27:05; TYR; ENSG00000077498; TAA
GQMKNGSTPM

SEQ ID NO: 97610 - protein, 10 aa, Homo sapiens
  misc_feature: Table A; Target 97610; HLA-B*39:01; TYR; ENSG00000077498; TAA
GQMKNGSTPM

SEQ ID NO: 97611 - protein, 10 aa, Homo sapiens
  misc_feature: Table A; Target 97611; HLA-B*46:01; TYR; ENSG00000077498; TAA
GQMKNGSTPM

SEQ ID NO: 97612 - protein, 10 aa, Homo sapiens
  misc_feature: Table A; Target 97612; HLA-C*07:02; TYR; ENSG00000077498; TAA
GQMKNGSTPM

SEQ ID NO: 97613 - protein, 10 aa, Homo sapiens
  misc_feature: Table A; Target 97613; HLA-C*07:04; TYR; ENSG00000077498; TAA
GQMKNGSTPM

SEQ ID NO: 97614 - protein, 10 aa, Homo sapiens
  misc_feature: Table A; Target 97614; HLA-C*14:02; TYR; ENSG00000077498; TAA
GQMKNGSTPM

SEQ ID NO: 97615 - protein, 10 aa, Homo sapiens
  misc_feature: Table A; Target 97615; HLA-C*16:04; TYR; ENSG00000077498; TAA
GQMKNGSTPM

SEQ ID NO: 97616 - protein, 11 aa, Homo sapiens
  misc_feature: Table A; Target 97616; HLA-B*15:01; TYR; ENSG00000077498; TAA
GQMKNGSTPMF

SEQ ID NO: 97617 - protein, 11 aa, Homo sapiens
  misc_feature: Table A; Target 97617; HLA-B*15:03; TYR; ENSG00000077498; TAA
GQMKNGSTPMF

SEQ ID NO: 97618 - protein, 11 aa, Homo sapiens
  misc_feature: Table A; Target 97618; HLA-C*16:04; TYR; ENSG00000077498; TAA
GQMKNGSTPMF

SEQ ID NO: 97619 - protein, 9 aa, Homo sapiens
  misc_feature: Table A; Target 97619; HLA-C*07:01; TYR; ENSG00000077498; TAA
GRGSCQNIL

SEQ ID NO: 97620 - protein, 9 aa, Homo sapiens
  misc_feature: Table A; Target 97620; HLA-B*58:01; TYR; ENSG00000077498; TAA
GSANDPIFL

SEQ ID NO: 97621 - protein, 9 aa, Homo sapiens
  misc_feature: Table A; Target 97621; HLA-A*03:01; TYR; ENSG00000077498; TAA
GSMDKAANF

SEQ ID NO: 97622 - protein, 9 aa, Homo sapiens
  misc_feature: Table A; Target 97622; HLA-A*03:02; TYR; ENSG00000077498; TAA
GSMDKAANF

SEQ ID NO: 97623 - protein, 9 aa, Homo sapiens
  misc_feature: Table A; Target 97623; HLA-A*11:01; TYR; ENSG00000077498; TAA
GSMDKAANF

SEQ ID NO: 97624 - protein, 9 aa, Homo sapiens
  misc_feature: Table A; Target 97624; HLA-A*23:01; TYR; ENSG00000077498; TAA
GSMDKAANF

SEQ ID NO: 97625 - protein, 9 aa, Homo sapiens
  misc_feature: Table A; Target 97625; HLA-A*24:02; TYR; ENSG00000077498; TAA
GSMDKAANF

SEQ ID NO: 97626 - protein, 9 aa, Homo sapiens
  misc_feature: Table A; Target 97626; HLA-A*25:01; TYR; ENSG00000077498; TAA
GSMDKAANF

SEQ ID NO: 97627 - protein, 9 aa, Homo sapiens
  misc_feature: Table A; Target 97627; HLA-A*26:01; TYR; ENSG00000077498; TAA
GSMDKAANF

SEQ ID NO: 97628 - protein, 9 aa, Homo sapiens
  misc_feature: Table A; Target 97628; HLA-A*29:02; TYR; ENSG00000077498; TAA
GSMDKAANF

SEQ ID NO: 97629 - protein, 9 aa, Homo sapiens
  misc_feature: Table A; Target 97629; HLA-A*30:02; TYR; ENSG00000077498; TAA
GSMDKAANF

SEQ ID NO: 97630 - protein, 9 aa, Homo sapiens
  misc_feature: Table A; Target 97630; HLA-A*31:01; TYR; ENSG00000077498; TAA
GSMDKAANF

SEQ ID NO: 97631 - protein, 9 aa, Homo sapiens
  misc_feature: Table A; Target 97631; HLA-A*32:01; TYR; ENSG00000077498; TAA
GSMDKAANF

SEQ ID NO: 97632 - protein, 9 aa, Homo sapiens
  misc_feature: Table A; Target 97632; HLA-B*15:01; TYR; ENSG00000077498; TAA
GSMDKAANF

SEQ ID NO: 97633 - protein, 9 aa, Homo sapiens
  misc_feature: Table A; Target 97633; HLA-B*15:03; TYR; ENSG00000077498; TAA
GSMDKAANF

SEQ ID NO: 97634 - protein, 9 aa, Homo sapiens
  misc_feature: Table A; Target 97634; HLA-B*27:02; TYR; ENSG00000077498; TAA
GSMDKAANF

SEQ ID NO: 97635 - protein, 9 aa, Homo sapiens
  misc_feature: Table A; Target 97635; HLA-B*27:05; TYR; ENSG00000077498; TAA
GSMDKAANF

SEQ ID NO: 97636 - protein, 9 aa, Homo sapiens
  misc_feature: Table A; Target 97636; HLA-B*37:01; TYR; ENSG00000077498; TAA
GSMDKAANF

SEQ ID NO: 97637 - protein, 9 aa, Homo sapiens
  misc_feature: Table A; Target 97637; HLA-B*39:01; TYR; ENSG00000077498; TAA
GSMDKAANF

SEQ ID NO: 97638 - protein, 9 aa, Homo sapiens
  misc_feature: Table A; Target 97638; HLA-B*44:02; TYR; ENSG00000077498; TAA
GSMDKAANF

SEQ ID NO: 97639 - protein, 9 aa, Homo sapiens
  misc_feature: Table A; Target 97639; HLA-B*44:03; TYR; ENSG00000077498; TAA
GSMDKAANF

SEQ ID NO: 97640 - protein, 9 aa, Homo sapiens
  misc_feature: Table A; Target 97640; HLA-B*46:01; TYR; ENSG00000077498; TAA
GSMDKAANF

SEQ ID NO: 97641 - protein, 9 aa, Homo sapiens
  misc_feature: Table A; Target 97641; HLA-B*57:01; TYR; ENSG00000077498; TAA
GSMDKAANF

SEQ ID NO: 97642 - protein, 9 aa, Homo sapiens
  misc_feature: Table A; Target 97642; HLA-B*58:01; TYR; ENSG00000077498; TAA
GSMDKAANF

SEQ ID NO: 97643 - protein, 9 aa, Homo sapiens
  misc_feature: Table A; Target 97643; HLA-C*02:02; TYR; ENSG00000077498; TAA
GSMDKAANF

SEQ ID NO: 97644 - protein, 9 aa, Homo sapiens
  misc_feature: Table A; Target 97644; HLA-C*05:01; TYR; ENSG00000077498; TAA
GSMDKAANF

SEQ ID NO: 97645 - protein, 9 aa, Homo sapiens
  misc_feature: Table A; Target 97645; HLA-C*07:04; TYR; ENSG00000077498; TAA
GSMDKAANF

SEQ ID NO: 97646 - protein, 9 aa, Homo sapiens
  misc_feature: Table A; Target 97646; HLA-C*07:06; TYR; ENSG00000077498; TAA
GSMDKAANF

SEQ ID NO: 97647 - protein, 9 aa, Homo sapiens
  misc_feature: Table A; Target 97647; HLA-C*12:03; TYR; ENSG00000077498; TAA
GSMDKAANF

SEQ ID NO: 97648 - protein, 9 aa, Homo sapiens
  misc_feature: Table A; Target 97648; HLA-C*14:02; TYR; ENSG00000077498; TAA
GSMDKAANF

SEQ ID NO: 97649 - protein, 9 aa, Homo sapiens
  misc_feature: Table A; Target 97649; HLA-C*16:01; TYR; ENSG00000077498; TAA
GSMDKAANF

SEQ ID NO: 97650 - protein, 9 aa, Homo sapiens
  misc_feature: Table A; Target 97650; HLA-C*16:02; TYR; ENSG00000077498; TAA
GSMDKAANF

SEQ ID NO: 97651 - protein, 9 aa, Homo sapiens
  misc_feature: Table A; Target 97651; HLA-C*16:04; TYR; ENSG00000077498; TAA
GSMDKAANF

SEQ ID NO: 97652 - protein, 11 aa, Homo sapiens
  misc_feature: Table A; Target 97652; HLA-A*11:01; TYR; ENSG00000077498; TAA
GSMDKAANFSF

SEQ ID NO: 97653 - protein, 11 aa, Homo sapiens
  misc_feature: Table A; Target 97653; HLA-A*29:02; TYR; ENSG00000077498; TAA
GSMDKAANFSF

SEQ ID NO: 97654 - protein, 11 aa, Homo sapiens
  misc_feature: Table A; Target 97654; HLA-A*30:02; TYR; ENSG00000077498; TAA
GSMDKAANFSF

SEQ ID NO: 97655 - protein, 11 aa, Homo sapiens
  misc_feature: Table A; Target 97655; HLA-A*31:01; TYR; ENSG00000077498; TAA
GSMDKAANFSF

SEQ ID NO: 97656 - protein, 11 aa, Homo sapiens
  misc_feature: Table A; Target 97656; HLA-B*15:01; TYR; ENSG00000077498; TAA
GSMDKAANFSF

SEQ ID NO: 97657 - protein, 11 aa, Homo sapiens
  misc_feature: Table A; Target 97657; HLA-B*57:01; TYR; ENSG00000077498; TAA
GSMDKAANFSF

SEQ ID NO: 97658 - protein, 11 aa, Homo sapiens
  misc_feature: Table A; Target 97658; HLA-B*58:01; TYR; ENSG00000077498; TAA
GSMDKAANFSF

SEQ ID NO: 97659 - protein, 11 aa, Homo sapiens
  misc_feature: Table A; Target 97659; HLA-C*16:04; TYR; ENSG00000077498; TAA
GSMDKAANFSF

SEQ ID NO: 97660 - protein, 8 aa, Homo sapiens
  misc_feature: Table A; Target 97660; HLA-A*11:01; TYR; ENSG00000077498; TAA
GTPEGPLR

SEQ ID NO: 97661 - protein, 8 aa, Homo sapiens
  misc_feature: Table A; Target 97661; HLA-C*07:06; TYR; ENSG00000077498; TAA
GTPEGPLR

SEQ ID NO: 97662 - protein, 9 aa, Homo sapiens
  misc_feature: Table A; Target 97662; HLA-A*01:01; TYR; ENSG00000077498; TAA
GTPEGPLRR

SEQ ID NO: 97663 - protein, 9 aa, Homo sapiens
  misc_feature: Table A; Target 97663; HLA-A*03:01; TYR; ENSG00000077498; TAA
GTPEGPLRR

SEQ ID NO: 97664 - protein, 9 aa, Homo sapiens
  misc_feature: Table A; Target 97664; HLA-A*11:01; TYR; ENSG00000077498; TAA
GTPEGPLRR

SEQ ID NO: 97665 - protein, 9 aa, Homo sapiens
  misc_feature: Table A; Target 97665; HLA-A*29:02; TYR; ENSG00000077498; TAA
GTPEGPLRR

SEQ ID NO: 97666 - protein, 9 aa, Homo sapiens
  misc_feature: Table A; Target 97666; HLA-A*31:01; TYR; ENSG00000077498; TAA
GTPEGPLRR

SEQ ID NO: 97667 - protein, 9 aa, Homo sapiens
  misc_feature: Table A; Target 97667; HLA-A*68:01; TYR; ENSG00000077498; TAA
GTPEGPLRR

SEQ ID NO: 97668 - protein, 9 aa, Homo sapiens
  misc_feature: Table A; Target 97668; HLA-C*07:06; TYR; ENSG00000077498; TAA
GTPEGPLRR

SEQ ID NO: 97669 - protein, 11 aa, Homo sapiens
  misc_feature: Table A; Target 97669; HLA-A*02:07; TYR; ENSG00000077498; TAA
GVDDRESWPSV

SEQ ID NO: 97670 - protein, 8 aa, Homo sapiens
  misc_feature: Table A; Target 97670; HLA-B*35:01; TYR; ENSG00000077498; TAA
HAFVDSIF

SEQ ID NO: 97671 - protein, 8 aa, Homo sapiens
  misc_feature: Table A; Target 97671; HLA-B*35:03; TYR; ENSG00000077498; TAA
HAFVDSIF

SEQ ID NO: 97672 - protein, 11 aa, Homo sapiens
  misc_feature: Table A; Target 97672; HLA-B*57:01; TYR; ENSG00000077498; TAA
HAFVDSIFEQW

SEQ ID NO: 97673 - protein, 8 aa, Homo sapiens
  misc_feature: Table A; Target 97673; HLA-B*18:01; TYR; ENSG00000077498; TAA
HEAPAFLP

SEQ ID NO: 97674 - protein, 9 aa, Homo sapiens
  misc_feature: Table A; Target 97674; HLA-A*24:02; TYR; ENSG00000077498; TAA
HEAPAFLPW

SEQ ID NO: 97675 - protein, 9 aa, Homo sapiens
  misc_feature: Table A; Target 97675; HLA-B*18:01; TYR; ENSG00000077498; TAA
HEAPAFLPW

SEQ ID NO: 97676 - protein, 9 aa, Homo sapiens
  misc_feature: Table A; Target 97676; HLA-B*44:02; TYR; ENSG00000077498; TAA
HEAPAFLPW

SEQ ID NO: 97677 - protein, 9 aa, Homo sapiens
  misc_feature: Table A; Target 97677; HLA-B*44:03; TYR; ENSG00000077498; TAA
HEAPAFLPW

SEQ ID NO: 97678 - protein, 9 aa, Homo sapiens
  misc_feature: Table A; Target 97678; HLA-B*57:01; TYR; ENSG00000077498; TAA
HEAPAFLPW

SEQ ID NO: 97679 - protein, 8 aa, Homo sapiens
  misc_feature: Table A; Target 97679; HLA-B*38:01; TYR; ENSG00000077498; TAA
HHAFVDSI

SEQ ID NO: 97680 - protein, 9 aa, Homo sapiens
  misc_feature: Table A; Target 97680; HLA-B*38:01; TYR; ENSG00000077498; TAA
HHAFVDSIF

SEQ ID NO: 97681 - protein, 8 aa, Homo sapiens
  misc_feature: Table A; Target 97681; HLA-C*04:01; TYR; ENSG00000077498; TAA
HIYMNGTM

SEQ ID NO: 97682 - protein, 8 aa, Homo sapiens
  misc_feature: Table A; Target 97682; HLA-C*07:01; TYR; ENSG00000077498; TAA
HIYMNGTM

SEQ ID NO: 97683 - protein, 10 aa, Homo sapiens
  misc_feature: Table A; Target 97683; HLA-C*07:01; TYR; ENSG00000077498; TAA
HIYMNGTMSQ

SEQ ID NO: 97684 - protein, 11 aa, Homo sapiens
  misc_feature: Table A; Target 97684; HLA-A*68:02; TYR; ENSG00000077498; TAA
HIYMNGTMSQV

SEQ ID NO: 97685 - protein, 8 aa, Homo sapiens
  misc_feature: Table A; Target 97685; HLA-C*07:01; TYR; ENSG00000077498; TAA
HNALHIYM

SEQ ID NO: 97686 - protein, 8 aa, Homo sapiens
  misc_feature: Table A; Target 97686; HLA-B*07:02; TYR; ENSG00000077498; TAA
HPTNPNLL

SEQ ID NO: 97687 - protein, 8 aa, Homo sapiens
  misc_feature: Table A; Target 97687; HLA-B*08:01; TYR; ENSG00000077498; TAA
HPTNPNLL

SEQ ID NO: 97688 - protein, 8 aa, Homo sapiens
  misc_feature: Table A; Target 97688; HLA-B*35:01; TYR; ENSG00000077498; TAA
HPTNPNLL

SEQ ID NO: 97689 - protein, 8 aa, Homo sapiens
  misc_feature: Table A; Target 97689; HLA-B*35:03; TYR; ENSG00000077498; TAA
HPTNPNLL

SEQ ID NO: 97690 - protein, 8 aa, Homo sapiens
  misc_feature: Table A; Target 97690; HLA-C*07:02; TYR; ENSG00000077498; TAA
HPTNPNLL

SEQ ID NO: 97691 - protein, 10 aa, Homo sapiens
  misc_feature: Table A; Target 97691; HLA-B*54:01; TYR; ENSG00000077498; TAA
HPTNPNLLSP

SEQ ID NO: 97692 - protein, 10 aa, Homo sapiens
  misc_feature: Table A; Target 97692; HLA-B*56:01; TYR; ENSG00000077498; TAA
HPTNPNLLSP

SEQ ID NO: 97693 - protein, 11 aa, Homo sapiens
  misc_feature: Table A; Target 97693; HLA-B*54:01; TYR; ENSG00000077498; TAA
HPTNPNLLSPA

SEQ ID NO: 97694 - protein, 11 aa, Homo sapiens
  misc_feature: Table A; Target 97694; HLA-B*55:01; TYR; ENSG00000077498; TAA
HPTNPNLLSPA

SEQ ID NO: 97695 - protein, 11 aa, Homo sapiens
  misc_feature: Table A; Target 97695; HLA-B*56:01; TYR; ENSG00000077498; TAA
HPTNPNLLSPA

SEQ ID NO: 97696 - protein, 8 aa, Homo sapiens
  misc_feature: Table A; Target 97696; HLA-C*07:01; TYR; ENSG00000077498; TAA
HRPLQEVY

SEQ ID NO: 97697 - protein, 8 aa, Homo sapiens
  misc_feature: Table A; Target 97697; HLA-B*08:01; TYR; ENSG00000077498; TAA
HSLYQSHL

SEQ ID NO: 97698 - protein, 8 aa, Homo sapiens
  misc_feature: Table A; Target 97698; HLA-B*40:02; TYR; ENSG00000077498; TAA
HSLYQSHL

SEQ ID NO: 97699 - protein, 8 aa, Homo sapiens
  misc_feature: Table A; Target 97699; HLA-B*51:01; TYR; ENSG00000077498; TAA
HSLYQSHL

SEQ ID NO: 97700 - protein, 8 aa, Homo sapiens
  misc_feature: Table A; Target 97700; HLA-C*03:03; TYR; ENSG00000077498; TAA
HSLYQSHL

SEQ ID NO: 97701 - protein, 8 aa, Homo sapiens
  misc_feature: Table A; Target 97701; HLA-C*03:04; TYR; ENSG00000077498; TAA
HSLYQSHL

SEQ ID NO: 97702 - protein, 8 aa, Homo sapiens
  misc_feature: Table A; Target 97702; HLA-C*04:01; TYR; ENSG00000077498; TAA
HSLYQSHL

SEQ ID NO: 97703 - protein, 8 aa, Homo sapiens
  misc_feature: Table A; Target 97703; HLA-C*07:01; TYR; ENSG00000077498; TAA
HSLYQSHL

SEQ ID NO: 97704 - protein, 8 aa, Homo sapiens
  misc_feature: Table A; Target 97704; HLA-C*04:01; TYR; ENSG00000077498; TAA
HTISSDYV

SEQ ID NO: 97705 - protein, 9 aa, Homo sapiens
  misc_feature: Table A; Target 97705; HLA-A*68:02; TYR; ENSG00000077498; TAA
HTISSDYVI

SEQ ID NO: 97706 - protein, 9 aa, Homo sapiens
  misc_feature: Table A; Target 97706; HLA-B*13:02; TYR; ENSG00000077498; TAA
HTISSDYVI

SEQ ID NO: 97707 - protein, 9 aa, Homo sapiens
  misc_feature: Table A; Target 97707; HLA-B*35:03; TYR; ENSG00000077498; TAA
HTISSDYVI

SEQ ID NO: 97708 - protein, 9 aa, Homo sapiens
  misc_feature: Table A; Target 97708; HLA-B*38:01; TYR; ENSG00000077498; TAA
HTISSDYVI

SEQ ID NO: 97709 - protein, 9 aa, Homo sapiens
  misc_feature: Table A; Target 97709; HLA-B*57:01; TYR; ENSG00000077498; TAA
HTISSDYVI

SEQ ID NO: 97710 - protein, 9 aa, Homo sapiens
  misc_feature: Table A; Target 97710; HLA-B*58:01; TYR; ENSG00000077498; TAA
HTISSDYVI

SEQ ID NO: 97711 - protein, 9 aa, Homo sapiens
  misc_feature: Table A; Target 97711; HLA-C*07:04; TYR; ENSG00000077498; TAA
HTISSDYVI

SEQ ID NO: 97712 - protein, 11 aa, Homo sapiens
  misc_feature: Table A; Target 97712; HLA-A*68:02; TYR; ENSG00000077498; TAA
HTISSDYVIPI

SEQ ID NO: 97713 - protein, 8 aa, Homo sapiens
  misc_feature: Table A; Target 97713; HLA-B*54:01; TYR; ENSG00000077498; TAA
HYYVSMDA

SEQ ID NO: 97714 - protein, 9 aa, Homo sapiens
  misc_feature: Table A; Target 97714; HLA-A*23:01; TYR; ENSG00000077498; TAA
HYYVSMDAL

SEQ ID NO: 97715 - protein, 9 aa, Homo sapiens
  misc_feature: Table A; Target 97715; HLA-A*24:02; TYR; ENSG00000077498; TAA
HYYVSMDAL

SEQ ID NO: 97716 - protein, 9 aa, Homo sapiens
  misc_feature: Table A; Target 97716; HLA-B*35:03; TYR; ENSG00000077498; TAA
HYYVSMDAL

SEQ ID NO: 97717 - protein, 9 aa, Homo sapiens
  misc_feature: Table A; Target 97717; HLA-C*01:02; TYR; ENSG00000077498; TAA
HYYVSMDAL

SEQ ID NO: 97718 - protein, 9 aa, Homo sapiens
  misc_feature: Table A; Target 97718; HLA-C*04:01; TYR; ENSG00000077498; TAA
HYYVSMDAL

SEQ ID NO: 97719 - protein, 9 aa, Homo sapiens
  misc_feature: Table A; Target 97719; HLA-C*14:02; TYR; ENSG00000077498; TAA
HYYVSMDAL

SEQ ID NO: 97720 - protein, 9 aa, Homo sapiens
  misc_feature: Table A; Target 97720; HLA-A*01:01; TYR; ENSG00000077498; TAA
IADASQSSM

SEQ ID NO: 97721 - protein, 9 aa, Homo sapiens
  misc_feature: Table A; Target 97721; HLA-A*02:07; TYR; ENSG00000077498; TAA
IADASQSSM

SEQ ID NO: 97722 - protein, 9 aa, Homo sapiens
  misc_feature: Table A; Target 97722; HLA-A*32:01; TYR; ENSG00000077498; TAA
IADASQSSM

SEQ ID NO: 97723 - protein, 9 aa, Homo sapiens
  misc_feature: Table A; Target 97723; HLA-B*07:02; TYR; ENSG00000077498; TAA
IADASQSSM

SEQ ID NO: 97724 - protein, 9 aa, Homo sapiens
  misc_feature: Table A; Target 97724; HLA-B*15:01; TYR; ENSG00000077498; TAA
IADASQSSM

SEQ ID NO: 97725 - protein, 9 aa, Homo sapiens
  misc_feature: Table A; Target 97725; HLA-B*15:03; TYR; ENSG00000077498; TAA
IADASQSSM

SEQ ID NO: 97726 - protein, 9 aa, Homo sapiens
  misc_feature: Table A; Target 97726; HLA-B*27:05; TYR; ENSG00000077498; TAA
IADASQSSM

SEQ ID NO: 97727 - protein, 9 aa, Homo sapiens
  misc_feature: Table A; Target 97727; HLA-B*35:01; TYR; ENSG00000077498; TAA
IADASQSSM

SEQ ID NO: 97728 - protein, 9 aa, Homo sapiens
  misc_feature: Table A; Target 97728; HLA-B*35:03; TYR; ENSG00000077498; TAA
IADASQSSM

SEQ ID NO: 97729 - protein, 9 aa, Homo sapiens
  misc_feature: Table A; Target 97729; HLA-B*38:01; TYR; ENSG00000077498; TAA
IADASQSSM

SEQ ID NO: 97730 - protein, 9 aa, Homo sapiens
  misc_feature: Table A; Target 97730; HLA-B*39:01; TYR; ENSG00000077498; TAA
IADASQSSM

SEQ ID NO: 97731 - protein, 9 aa, Homo sapiens
  misc_feature: Table A; Target 97731; HLA-B*40:01; TYR; ENSG00000077498; TAA
IADASQSSM

SEQ ID NO: 97732 - protein, 9 aa, Homo sapiens
  misc_feature: Table A; Target 97732; HLA-B*46:01; TYR; ENSG00000077498; TAA
IADASQSSM

SEQ ID NO: 97733 - protein, 9 aa, Homo sapiens
  misc_feature: Table A; Target 97733; HLA-B*51:01; TYR; ENSG00000077498; TAA
IADASQSSM

SEQ ID NO: 97734 - protein, 9 aa, Homo sapiens
  misc_feature: Table A; Target 97734; HLA-B*55:01; TYR; ENSG00000077498; TAA
IADASQSSM

SEQ ID NO: 97735 - protein, 9 aa, Homo sapiens
  misc_feature: Table A; Target 97735; HLA-B*58:01; TYR; ENSG00000077498; TAA
IADASQSSM

SEQ ID NO: 97736 - protein, 9 aa, Homo sapiens
  misc_feature: Table A; Target 97736; HLA-C*01:02; TYR; ENSG00000077498; TAA
IADASQSSM

SEQ ID NO: 97737 - protein, 9 aa, Homo sapiens
  misc_feature: Table A; Target 97737; HLA-C*02:02; TYR; ENSG00000077498; TAA
IADASQSSM

SEQ ID NO: 97738 - protein, 9 aa, Homo sapiens
  misc_feature: Table A; Target 97738; HLA-C*03:03; TYR; ENSG00000077498; TAA
IADASQSSM

SEQ ID NO: 97739 - protein, 9 aa, Homo sapiens
  misc_feature: Table A; Target 97739; HLA-C*03:04; TYR; ENSG00000077498; TAA
IADASQSSM

SEQ ID NO: 97740 - protein, 9 aa, Homo sapiens
  misc_feature: Table A; Target 97740; HLA-C*04:01; TYR; ENSG00000077498; TAA
IADASQSSM

SEQ ID NO: 97741 - protein, 9 aa, Homo sapiens
  misc_feature: Table A; Target 97741; HLA-C*05:01; TYR; ENSG00000077498; TAA
IADASQSSM

SEQ ID NO: 97742 - protein, 9 aa, Homo sapiens
  misc_feature: Table A; Target 97742; HLA-C*07:02; TYR; ENSG00000077498; TAA
IADASQSSM

SEQ ID NO: 97743 - protein, 9 aa, Homo sapiens
  misc_feature: Table A; Target 97743; HLA-C*07:04; TYR; ENSG00000077498; TAA
IADASQSSM

SEQ ID NO: 97744 - protein, 9 aa, Homo sapiens
  misc_feature: Table A; Target 97744; HLA-C*07:06; TYR; ENSG00000077498; TAA
IADASQSSM

SEQ ID NO: 97745 - protein, 9 aa, Homo sapiens
  misc_feature: Table A; Target 97745; HLA-C*12:03; TYR; ENSG00000077498; TAA
IADASQSSM

SEQ ID NO: 97746 - protein, 9 aa, Homo sapiens
  misc_feature: Table A; Target 97746; HLA-C*14:02; TYR; ENSG00000077498; TAA
IADASQSSM

SEQ ID NO: 97747 - protein, 9 aa, Homo sapiens
  misc_feature: Table A; Target 97747; HLA-C*16:01; TYR; ENSG00000077498; TAA
IADASQSSM

SEQ ID NO: 97748 - protein, 9 aa, Homo sapiens
  misc_feature: Table A; Target 97748; HLA-C*16:02; TYR; ENSG00000077498; TAA
IADASQSSM

SEQ ID NO: 97749 - protein, 10 aa, Homo sapiens
  misc_feature: Table A; Target 97749; HLA-A*30:01; TYR; ENSG00000077498; TAA
IDFAHEAPAF

SEQ ID NO: 97750 - protein, 10 aa, Homo sapiens
  misc_feature: Table A; Target 97750; HLA-B*18:01; TYR; ENSG00000077498; TAA
IDFAHEAPAF

SEQ ID NO: 97751 - protein, 10 aa, Homo sapiens
  misc_feature: Table A; Target 97751; HLA-B*37:01; TYR; ENSG00000077498; TAA
IDFAHEAPAF

SEQ ID NO: 97752 - protein, 9 aa, Homo sapiens
  misc_feature: Table A; Target 97752; HLA-B*27:02; TYR; ENSG00000077498; TAA
IFDLSAPEK

SEQ ID NO: 97753 - protein, 9 aa, Homo sapiens
  misc_feature: Table A; Target 97753; HLA-C*04:01; TYR; ENSG00000077498; TAA
IFDLSAPEK

SEQ ID NO: 97754 - protein, 8 aa, Homo sapiens
  misc_feature: Table A; Target 97754; HLA-A*32:01; TYR; ENSG00000077498; TAA
IGHNRESY

SEQ ID NO: 97755 - protein, 8 aa, Homo sapiens
  misc_feature: Table A; Target 97755; HLA-B*46:01; TYR; ENSG00000077498; TAA
IGHNRESY

SEQ ID NO: 97756 - protein, 8 aa, Homo sapiens
  misc_feature: Table A; Target 97756; HLA-C*16:01; TYR; ENSG00000077498; TAA
IGHNRESY

SEQ ID NO: 97757 - protein, 9 aa, Homo sapiens
  misc_feature: Table A; Target 97757; HLA-A*23:01; TYR; ENSG00000077498; TAA
IPIGTYGQM

SEQ ID NO: 97758 - protein, 9 aa, Homo sapiens
  misc_feature: Table A; Target 97758; HLA-A*25:01; TYR; ENSG00000077498; TAA
IPIGTYGQM

SEQ ID NO: 97759 - protein, 9 aa, Homo sapiens
  misc_feature: Table A; Target 97759; HLA-A*26:01; TYR; ENSG00000077498; TAA
IPIGTYGQM

SEQ ID NO: 97760 - protein, 9 aa, Homo sapiens
  misc_feature: Table A; Target 97760; HLA-B*07:02; TYR; ENSG00000077498; TAA
IPIGTYGQM

SEQ ID NO: 97761 - protein, 9 aa, Homo sapiens
  misc_feature: Table A; Target 97761; HLA-B*35:01; TYR; ENSG00000077498; TAA
IPIGTYGQM

SEQ ID NO: 97762 - protein, 9 aa, Homo sapiens
  misc_feature: Table A; Target 97762; HLA-B*35:03; TYR; ENSG00000077498; TAA
IPIGTYGQM

SEQ ID NO: 97763 - protein, 9 aa, Homo sapiens
  misc_feature: Table A; Target 97763; HLA-B*46:01; TYR; ENSG00000077498; TAA
IPIGTYGQM

SEQ ID NO: 97764 - protein, 9 aa, Homo sapiens
  misc_feature: Table A; Target 97764; HLA-B*51:01; TYR; ENSG00000077498; TAA
IPIGTYGQM

SEQ ID NO: 97765 - protein, 9 aa, Homo sapiens
  misc_feature: Table A; Target 97765; HLA-B*54:01; TYR; ENSG00000077498; TAA
IPIGTYGQM

SEQ ID NO: 97766 - protein, 9 aa, Homo sapiens
  misc_feature: Table A; Target 97766; HLA-B*55:01; TYR; ENSG00000077498; TAA
IPIGTYGQM

SEQ ID NO: 97767 - protein, 9 aa, Homo sapiens
  misc_feature: Table A; Target 97767; HLA-B*56:01; TYR; ENSG00000077498; TAA
IPIGTYGQM

SEQ ID NO: 97768 - protein, 9 aa, Homo sapiens
  misc_feature: Table A; Target 97768; HLA-C*03:03; TYR; ENSG00000077498; TAA
IPIGTYGQM

SEQ ID NO: 97769 - protein, 9 aa, Homo sapiens
  misc_feature: Table A; Target 97769; HLA-C*04:01; TYR; ENSG00000077498; TAA
IPIGTYGQM

SEQ ID NO: 97770 - protein, 9 aa, Homo sapiens
  misc_feature: Table A; Target 97770; HLA-C*07:02; TYR; ENSG00000077498; TAA
IPIGTYGQM

SEQ ID NO: 97771 - protein, 9 aa, Homo sapiens
  misc_feature: Table A; Target 97771; HLA-C*14:02; TYR; ENSG00000077498; TAA
IPIGTYGQM

SEQ ID NO: 97772 - protein, 10 aa, Homo sapiens
  misc_feature: Table A; Target 97772; HLA-A*68:01; TYR; ENSG00000077498; TAA
IPIGTYGQMK

SEQ ID NO: 97773 - protein, 10 aa, Homo sapiens
  misc_feature: Table A; Target 97773; HLA-B*35:03; TYR; ENSG00000077498; TAA
IPIGTYGQMK

SEQ ID NO: 97774 - protein, 10 aa, Homo sapiens
  misc_feature: Table A; Target 97774; HLA-B*56:01; TYR; ENSG00000077498; TAA
IPIGTYGQMK

SEQ ID NO: 97775 - protein, 10 aa, Homo sapiens
  misc_feature: Table A; Target 97775; HLA-B*15:01; TYR; ENSG00000077498; TAA
IQKLTGDENF

SEQ ID NO: 97776 - protein, 9 aa, Homo sapiens
  misc_feature: Table A; Target 97776; HLA-A*02:01; TYR; ENSG00000077498; TAA
ISSDYVIPI

SEQ ID NO: 97777 - protein, 9 aa, Homo sapiens
  misc_feature: Table A; Target 97777; HLA-A*11:01; TYR; ENSG00000077498; TAA
ISSDYVIPI

SEQ ID NO: 97778 - protein, 9 aa, Homo sapiens
  misc_feature: Table A; Target 97778; HLA-A*31:01; TYR; ENSG00000077498; TAA
ISSDYVIPI

SEQ ID NO: 97779 - protein, 9 aa, Homo sapiens
  misc_feature: Table A; Target 97779; HLA-A*68:01; TYR; ENSG00000077498; TAA
ISSDYVIPI

SEQ ID NO: 97780 - protein, 9 aa, Homo sapiens
  misc_feature: Table A; Target 97780; HLA-A*68:02; TYR; ENSG00000077498; TAA
ISSDYVIPI

SEQ ID NO: 97781 - protein, 9 aa, Homo sapiens
  misc_feature: Table A; Target 97781; HLA-B*57:01; TYR; ENSG00000077498; TAA
ISSDYVIPI

SEQ ID NO: 97782 - protein, 9 aa, Homo sapiens
  misc_feature: Table A; Target 97782; HLA-C*02:02; TYR; ENSG00000077498; TAA
ISSDYVIPI

SEQ ID NO: 97783 - protein, 9 aa, Homo sapiens
  misc_feature: Table A; Target 97783; HLA-C*04:01; TYR; ENSG00000077498; TAA
ISSDYVIPI

SEQ ID NO: 97784 - protein, 9 aa, Homo sapiens
  misc_feature: Table A; Target 97784; HLA-C*07:04; TYR; ENSG00000077498; TAA
ISSDYVIPI

SEQ ID NO: 97785 - protein, 9 aa, Homo sapiens
  misc_feature: Table A; Target 97785; HLA-C*12:03; TYR; ENSG00000077498; TAA
ISSDYVIPI

SEQ ID NO: 97786 - protein, 8 aa, Homo sapiens
  misc_feature: Table A; Target 97786; HLA-A*01:01; TYR; ENSG00000077498; TAA
ISSKDLGY

SEQ ID NO: 97787 - protein, 8 aa, Homo sapiens
  misc_feature: Table A; Target 97787; HLA-B*58:01; TYR; ENSG00000077498; TAA
ISSKDLGY

SEQ ID NO: 97788 - protein, 10 aa, Homo sapiens
  misc_feature: Table A; Target 97788; HLA-A*01:01; TYR; ENSG00000077498; TAA
ISSKDLGYDY

SEQ ID NO: 97789 - protein, 10 aa, Homo sapiens
  misc_feature: Table A; Target 97789; HLA-A*29:02; TYR; ENSG00000077498; TAA
ISSKDLGYDY

SEQ ID NO: 97790 - protein, 10 aa, Homo sapiens
  misc_feature: Table A; Target 97790; HLA-A*30:02; TYR; ENSG00000077498; TAA
ISSKDLGYDY

SEQ ID NO: 97791 - protein, 10 aa, Homo sapiens
  misc_feature: Table A; Target 97791; HLA-B*57:01; TYR; ENSG00000077498; TAA
ISSKDLGYDY

SEQ ID NO: 97792 - protein, 10 aa, Homo sapiens
  misc_feature: Table A; Target 97792; HLA-B*58:01; TYR; ENSG00000077498; TAA
ISSKDLGYDY

SEQ ID NO: 97793 - protein, 9 aa, Homo sapiens
  misc_feature: Table A; Target 97793; HLA-A*01:01; TYR; ENSG00000077498; TAA
IVCSRLEEY

SEQ ID NO: 97794 - protein, 9 aa, Homo sapiens
  misc_feature: Table A; Target 97794; HLA-A*03:01; TYR; ENSG00000077498; TAA
IVCSRLEEY

SEQ ID NO: 97795 - protein, 9 aa, Homo sapiens
  misc_feature: Table A; Target 97795; HLA-A*25:01; TYR; ENSG00000077498; TAA
IVCSRLEEY

SEQ ID NO: 97796 - protein, 9 aa, Homo sapiens
  misc_feature: Table A; Target 97796; HLA-A*26:01; TYR; ENSG00000077498; TAA
IVCSRLEEY

SEQ ID NO: 97797 - protein, 9 aa, Homo sapiens
  misc_feature: Table A; Target 97797; HLA-A*29:02; TYR; ENSG00000077498; TAA
IVCSRLEEY

SEQ ID NO: 97798 - protein, 9 aa, Homo sapiens
  misc_feature: Table A; Target 97798; HLA-A*30:02; TYR; ENSG00000077498; TAA
IVCSRLEEY

SEQ ID NO: 97799 - protein, 9 aa, Homo sapiens
  misc_feature: Table A; Target 97799; HLA-A*32:01; TYR; ENSG00000077498; TAA
IVCSRLEEY

SEQ ID NO: 97800 - protein, 9 aa, Homo sapiens
  misc_feature: Table A; Target 97800; HLA-B*15:01; TYR; ENSG00000077498; TAA
IVCSRLEEY

SEQ ID NO: 97801 - protein, 9 aa, Homo sapiens
  misc_feature: Table A; Target 97801; HLA-B*46:01; TYR; ENSG00000077498; TAA
IVCSRLEEY

SEQ ID NO: 97802 - protein, 9 aa, Homo sapiens
  misc_feature: Table A; Target 97802; HLA-C*07:01; TYR; ENSG00000077498; TAA
IVCSRLEEY

SEQ ID NO: 97803 - protein, 9 aa, Homo sapiens
  misc_feature: Table A; Target 97803; HLA-C*12:03; TYR; ENSG00000077498; TAA
IVCSRLEEY

SEQ ID NO: 97804 - protein, 9 aa, Homo sapiens
  misc_feature: Table A; Target 97804; HLA-A*23:01; TYR; ENSG00000077498; TAA
IYMNGTMSQ

SEQ ID NO: 97805 - protein, 9 aa, Homo sapiens
  misc_feature: Table A; Target 97805; HLA-A*24:02; TYR; ENSG00000077498; TAA
IYMNGTMSQ

SEQ ID NO: 97806 - protein, 9 aa, Homo sapiens
  misc_feature: Table A; Target 97806; HLA-C*01:02; TYR; ENSG00000077498; TAA
IYMNGTMSQ

SEQ ID NO: 97807 - protein, 9 aa, Homo sapiens
  misc_feature: Table A; Target 97807; HLA-C*14:02; TYR; ENSG00000077498; TAA
IYMNGTMSQ

SEQ ID NO: 97808 - protein, 10 aa, Homo sapiens
  misc_feature: Table A; Target 97808; HLA-A*02:01; TYR; ENSG00000077498; TAA
IYMNGTMSQV

SEQ ID NO: 97809 - protein, 10 aa, Homo sapiens
  misc_feature: Table A; Target 97809; HLA-A*23:01; TYR; ENSG00000077498; TAA
IYMNGTMSQV

SEQ ID NO: 97810 - protein, 10 aa, Homo sapiens
  misc_feature: Table A; Target 97810; HLA-A*24:02; TYR; ENSG00000077498; TAA
IYMNGTMSQV

SEQ ID NO: 97811 - protein, 10 aa, Homo sapiens
  misc_feature: Table A; Target 97811; HLA-A*32:01; TYR; ENSG00000077498; TAA
IYMNGTMSQV

SEQ ID NO: 97812 - protein, 10 aa, Homo sapiens
  misc_feature: Table A; Target 97812; HLA-C*01:02; TYR; ENSG00000077498; TAA
IYMNGTMSQV

SEQ ID NO: 97813 - protein, 10 aa, Homo sapiens
  misc_feature: Table A; Target 97813; HLA-C*04:01; TYR; ENSG00000077498; TAA
IYMNGTMSQV

SEQ ID NO: 97814 - protein, 10 aa, Homo sapiens
  misc_feature: Table A; Target 97814; HLA-C*06:02; TYR; ENSG00000077498; TAA
IYMNGTMSQV

SEQ ID NO: 97815 - protein, 10 aa, Homo sapiens
  misc_feature: Table A; Target 97815; HLA-C*07:02; TYR; ENSG00000077498; TAA
IYMNGTMSQV

SEQ ID NO: 97816 - protein, 10 aa, Homo sapiens
  misc_feature: Table A; Target 97816; HLA-C*14:02; TYR; ENSG00000077498; TAA
IYMNGTMSQV

SEQ ID NO: 97817 - protein, 11 aa, Homo sapiens
  misc_feature: Table A; Target 97817; HLA-A*24:02; TYR; ENSG00000077498; TAA
IYMNGTMSQVQ

SEQ ID NO: 97818 - protein, 11 aa, Homo sapiens
  misc_feature: Table A; Target 97818; HLA-C*07:01; TYR; ENSG00000077498; TAA
IYMNGTMSQVQ

SEQ ID NO: 97819 - protein, 9 aa, Homo sapiens
  misc_feature: Table A; Target 97819; HLA-A*01:01; TYR; ENSG00000077498; TAA
KCDICTDEY

SEQ ID NO: 97820 - protein, 9 aa, Homo sapiens
  misc_feature: Table A; Target 97820; HLA-A*29:02; TYR; ENSG00000077498; TAA
KDLGYDYSY

SEQ ID NO: 97821 - protein, 9 aa, Homo sapiens
  misc_feature: Table A; Target 97821; HLA-A*30:02; TYR; ENSG00000077498; TAA
KDLGYDYSY

SEQ ID NO: 97822 - protein, 9 aa, Homo sapiens
  misc_feature: Table A; Target 97822; HLA-B*27:02; TYR; ENSG00000077498; TAA
KDLGYDYSY

SEQ ID NO: 97823 - protein, 9 aa, Homo sapiens
  misc_feature: Table A; Target 97823; HLA-C*16:04; TYR; ENSG00000077498; TAA
KDLGYDYSY

SEQ ID NO: 97824 - protein, 8 aa, Homo sapiens
  misc_feature: Table A; Target 97824; HLA-B*44:02; TYR; ENSG00000077498; TAA
KEDYHSLY

SEQ ID NO: 97825 - protein, 8 aa, Homo sapiens
  misc_feature: Table A; Target 97825; HLA-C*04:01; TYR; ENSG00000077498; TAA
KEDYHSLY

SEQ ID NO: 97826 - protein, 8 aa, Homo sapiens
  misc_feature: Table A; Target 97826; HLA-B*15:03; TYR; ENSG00000077498; TAA
KHTISSDY

SEQ ID NO: 97827 - protein, 9 aa, Homo sapiens
  misc_feature: Table A; Target 97827; HLA-B*38:01; TYR; ENSG00000077498; TAA
KHTISSDYV

SEQ ID NO: 97828 - protein, 10 aa, Homo sapiens
  misc_feature: Table A; Target 97828; HLA-B*38:01; TYR; ENSG00000077498; TAA
KHTISSDYVI

SEQ ID NO: 97829 - protein, 8 aa, Homo sapiens
  misc_feature: Table A; Target 97829; HLA-C*07:01; TYR; ENSG00000077498; TAA
KNGSTPMF

SEQ ID NO: 97830 - protein, 8 aa, Homo sapiens
  misc_feature: Table A; Target 97830; HLA-C*07:02; TYR; ENSG00000077498; TAA
KNGSTPMF

SEQ ID NO: 97831 - protein, 10 aa, Homo sapiens
  misc_feature: Table A; Target 97831; HLA-A*31:01; TYR; ENSG00000077498; TAA
KQLPEEKQPL

SEQ ID NO: 97832 - protein, 10 aa, Homo sapiens
  misc_feature: Table A; Target 97832; HLA-B*15:01; TYR; ENSG00000077498; TAA
KQLPEEKQPL

SEQ ID NO: 97833 - protein, 10 aa, Homo sapiens
  misc_feature: Table A; Target 97833; HLA-B*38:01; TYR; ENSG00000077498; TAA
KQLPEEKQPL

SEQ ID NO: 97834 - protein, 10 aa, Homo sapiens
  misc_feature: Table A; Target 97834; HLA-B*40:01; TYR; ENSG00000077498; TAA
KQLPEEKQPL

SEQ ID NO: 97835 - protein, 10 aa, Homo sapiens
  misc_feature: Table A; Target 97835; HLA-B*40:02; TYR; ENSG00000077498; TAA
KQLPEEKQPL

SEQ ID NO: 97836 - protein, 11 aa, Homo sapiens
  misc_feature: Table A; Target 97836; HLA-A*02:01; TYR; ENSG00000077498; TAA
KQLPEEKQPLL

SEQ ID NO: 97837 - protein, 11 aa, Homo sapiens
  misc_feature: Table A; Target 97837; HLA-A*02:04; TYR; ENSG00000077498; TAA
KQLPEEKQPLL

SEQ ID NO: 97838 - protein, 11 aa, Homo sapiens
  misc_feature: Table A; Target 97838; HLA-A*02:07; TYR; ENSG00000077498; TAA
KQLPEEKQPLL

SEQ ID NO: 97839 - protein, 11 aa, Homo sapiens
  misc_feature: Table A; Target 97839; HLA-A*24:02; TYR; ENSG00000077498; TAA
KQLPEEKQPLL

SEQ ID NO: 97840 - protein, 11 aa, Homo sapiens
  misc_feature: Table A; Target 97840; HLA-A*30:01; TYR; ENSG00000077498; TAA
KQLPEEKQPLL

SEQ ID NO: 97841 - protein, 11 aa, Homo sapiens
  misc_feature: Table A; Target 97841; HLA-A*31:01; TYR; ENSG00000077498; TAA
KQLPEEKQPLL

SEQ ID NO: 97842 - protein, 11 aa, Homo sapiens
  misc_feature: Table A; Target 97842; HLA-A*32:01; TYR; ENSG00000077498; TAA
KQLPEEKQPLL

SEQ ID NO: 97843 - protein, 11 aa, Homo sapiens
  misc_feature: Table A; Target 97843; HLA-B*13:02; TYR; ENSG00000077498; TAA
KQLPEEKQPLL

SEQ ID NO: 97844 - protein, 9 aa, Homo sapiens
  misc_feature: Table A; Target 97844; HLA-A*03:01; TYR; ENSG00000077498; TAA
KSYLEQASR

SEQ ID NO: 97845 - protein, 9 aa, Homo sapiens
  misc_feature: Table A; Target 97845; HLA-A*11:01; TYR; ENSG00000077498; TAA
KSYLEQASR

SEQ ID NO: 97846 - protein, 9 aa, Homo sapiens
  misc_feature: Table A; Target 97846; HLA-A*31:01; TYR; ENSG00000077498; TAA
KSYLEQASR

SEQ ID NO: 97847 - protein, 9 aa, Homo sapiens
  misc_feature: Table A; Target 97847; HLA-A*33:01; TYR; ENSG00000077498; TAA
KSYLEQASR

SEQ ID NO: 97848 - protein, 9 aa, Homo sapiens
  misc_feature: Table A; Target 97848; HLA-B*57:01; TYR; ENSG00000077498; TAA
KSYLEQASR

SEQ ID NO: 97849 - protein, 9 aa, Homo sapiens
  misc_feature: Table A; Target 97849; HLA-C*07:06; TYR; ENSG00000077498; TAA
KSYLEQASR

SEQ ID NO: 97850 - protein, 11 aa, Homo sapiens
  misc_feature: Table A; Target 97850; HLA-B*57:01; TYR; ENSG00000077498; TAA
KSYLEQASRIW

SEQ ID NO: 97851 - protein, 8 aa, Homo sapiens
  misc_feature: Table A; Target 97851; HLA-B*08:01; TYR; ENSG00000077498; TAA
LAGLVSLL

SEQ ID NO: 97852 - protein, 8 aa, Homo sapiens
  misc_feature: Table A; Target 97852; HLA-B*35:03; TYR; ENSG00000077498; TAA
LAGLVSLL

SEQ ID NO: 97853 - protein, 8 aa, Homo sapiens
  misc_feature: Table A; Target 97853; HLA-B*51:01; TYR; ENSG00000077498; TAA
LAGLVSLL

SEQ ID NO: 97854 - protein, 8 aa, Homo sapiens
  misc_feature: Table A; Target 97854; HLA-C*05:01; TYR; ENSG00000077498; TAA
LAGLVSLL

SEQ ID NO: 97855 - protein, 8 aa, Homo sapiens
  misc_feature: Table A; Target 97855; HLA-C*06:02; TYR; ENSG00000077498; TAA
LAGLVSLL

SEQ ID NO: 97856 - protein, 8 aa, Homo sapiens
  misc_feature: Table A; Target 97856; HLA-C*07:01; TYR; ENSG00000077498; TAA
LAGLVSLL

SEQ ID NO: 97857 - protein, 8 aa, Homo sapiens
  misc_feature: Table A; Target 97857; HLA-C*07:04; TYR; ENSG00000077498; TAA
LAGLVSLL

SEQ ID NO: 97858 - protein, 8 aa, Homo sapiens
  misc_feature: Table A; Target 97858; HLA-C*12:03; TYR; ENSG00000077498; TAA
LAGLVSLL

SEQ ID NO: 97859 - protein, 9 aa, Homo sapiens
  misc_feature: Table A; Target 97859; HLA-B*57:01; TYR; ENSG00000077498; TAA
LAVLYCLLW

SEQ ID NO: 97860 - protein, 10 aa, Homo sapiens
  misc_feature: Table A; Target 97860; HLA-A*30:01; TYR; ENSG00000077498; TAA
LEEYNSHQSL

SEQ ID NO: 97861 - protein, 10 aa, Homo sapiens
  misc_feature: Table A; Target 97861; HLA-B*27:05; TYR; ENSG00000077498; TAA
LEEYNSHQSL

SEQ ID NO: 97862 - protein, 10 aa, Homo sapiens
  misc_feature: Table A; Target 97862; HLA-B*37:01; TYR; ENSG00000077498; TAA
LEEYNSHQSL

SEQ ID NO: 97863 - protein, 10 aa, Homo sapiens
  misc_feature: Table A; Target 97863; HLA-B*38:01; TYR; ENSG00000077498; TAA
LEEYNSHQSL

SEQ ID NO: 97864 - protein, 10 aa, Homo sapiens
  misc_feature: Table A; Target 97864; HLA-B*40:01; TYR; ENSG00000077498; TAA
LEEYNSHQSL

SEQ ID NO: 97865 - protein, 10 aa, Homo sapiens
  misc_feature: Table A; Target 97865; HLA-B*40:02; TYR; ENSG00000077498; TAA
LEEYNSHQSL

SEQ ID NO: 97866 - protein, 10 aa, Homo sapiens
  misc_feature: Table A; Target 97866; HLA-B*44:02; TYR; ENSG00000077498; TAA
LEEYNSHQSL

SEQ ID NO: 97867 - protein, 10 aa, Homo sapiens
  misc_feature: Table A; Target 97867; HLA-B*44:03; TYR; ENSG00000077498; TAA
LEEYNSHQSL

SEQ ID NO: 97868 - protein, 10 aa, Homo sapiens
  misc_feature: Table A; Target 97868; HLA-B*49:01; TYR; ENSG00000077498; TAA
LEEYNSHQSL

SEQ ID NO: 97869 - protein, 10 aa, Homo sapiens
  misc_feature: Table A; Target 97869; HLA-C*07:04; TYR; ENSG00000077498; TAA
LEEYNSHQSL

SEQ ID NO: 97870 - protein, 10 aa, Homo sapiens
  misc_feature: Table A; Target 97870; HLA-C*16:04; TYR; ENSG00000077498; TAA
LEEYNSHQSL

SEQ ID NO: 97871 - protein, 8 aa, Homo sapiens
  misc_feature: Table A; Target 97871; HLA-B*18:01; TYR; ENSG00000077498; TAA
LEGFASPL

SEQ ID NO: 97872 - protein, 8 aa, Homo sapiens
  misc_feature: Table A; Target 97872; HLA-B*40:01; TYR; ENSG00000077498; TAA
LEGFASPL

SEQ ID NO: 97873 - protein, 8 aa, Homo sapiens
  misc_feature: Table A; Target 97873; HLA-B*49:01; TYR; ENSG00000077498; TAA
LEGFASPL

SEQ ID NO: 97874 - protein, 8 aa, Homo sapiens
  misc_feature: Table A; Target 97874; HLA-C*12:03; TYR; ENSG00000077498; TAA
LEGFASPL

SEQ ID NO: 97875 - protein, 9 aa, Homo sapiens
  misc_feature: Table A; Target 97875; HLA-B*40:02; TYR; ENSG00000077498; TAA
LEGFASPLT

SEQ ID NO: 97876 - protein, 9 aa, Homo sapiens
  misc_feature: Table A; Target 97876; HLA-B*49:01; TYR; ENSG00000077498; TAA
LEGFASPLT

SEQ ID NO: 97877 - protein, 11 aa, Homo sapiens
  misc_feature: Table A; Target 97877; HLA-B*40:02; TYR; ENSG00000077498; TAA
LEGFASPLTGI

SEQ ID NO: 97878 - protein, 11 aa, Homo sapiens
  misc_feature: Table A; Target 97878; HLA-B*49:01; TYR; ENSG00000077498; TAA
LEGFASPLTGI

SEQ ID NO: 97879 - protein, 8 aa, Homo sapiens
  misc_feature: Table A; Target 97879; HLA-B*44:02; TYR; ENSG00000077498; TAA
LEQASRIW

SEQ ID NO: 97880 - protein, 10 aa, Homo sapiens
  misc_feature: Table A; Target 97880; HLA-B*44:02; TYR; ENSG00000077498; TAA
LEQASRIWSW

SEQ ID NO: 97881 - protein, 10 aa, Homo sapiens
  misc_feature: Table A; Target 97881; HLA-B*44:03; TYR; ENSG00000077498; TAA
LEQASRIWSW

SEQ ID NO: 97882 - protein, 9 aa, Homo sapiens
  misc_feature: Table A; Target 97882; HLA-C*06:02; TYR; ENSG00000077498; TAA
LGAAMVGAV

SEQ ID NO: 97883 - protein, 10 aa, Homo sapiens
  misc_feature: Table A; Target 97883; HLA-C*03:03; TYR; ENSG00000077498; TAA
LGAAMVGAVL

SEQ ID NO: 97884 - protein, 10 aa, Homo sapiens
  misc_feature: Table A; Target 97884; HLA-C*03:04; TYR; ENSG00000077498; TAA
LGAAMVGAVL

SEQ ID NO: 97885 - protein, 10 aa, Homo sapiens
  misc_feature: Table A; Target 97885; HLA-A*02:07; TYR; ENSG00000077498; TAA
LGPQFPFTGV

SEQ ID NO: 97886 - protein, 8 aa, Homo sapiens
  misc_feature: Table A; Target 97886; HLA-A*02:01; TYR; ENSG00000077498; TAA
LLAGLVSL

SEQ ID NO: 97887 - protein, 8 aa, Homo sapiens
  misc_feature: Table A; Target 97887; HLA-A*02:04; TYR; ENSG00000077498; TAA
LLAGLVSL

SEQ ID NO: 97888 - protein, 9 aa, Homo sapiens
  misc_feature: Table A; Target 97888; HLA-A*01:01; TYR; ENSG00000077498; TAA
LLAGLVSLL

SEQ ID NO: 97889 - protein, 9 aa, Homo sapiens
  misc_feature: Table A; Target 97889; HLA-A*02:01; TYR; ENSG00000077498; TAA
LLAGLVSLL

SEQ ID NO: 97890 - protein, 9 aa, Homo sapiens
  misc_feature: Table A; Target 97890; HLA-A*02:03; TYR; ENSG00000077498; TAA
LLAGLVSLL

SEQ ID NO: 97891 - protein, 9 aa, Homo sapiens
  misc_feature: Table A; Target 97891; HLA-A*02:04; TYR; ENSG00000077498; TAA
LLAGLVSLL

SEQ ID NO: 97892 - protein, 9 aa, Homo sapiens
  misc_feature: Table A; Target 97892; HLA-A*02:07; TYR; ENSG00000077498; TAA
LLAGLVSLL

SEQ ID NO: 97893 - protein, 9 aa, Homo sapiens
  misc_feature: Table A; Target 97893; HLA-A*23:01; TYR; ENSG00000077498; TAA
LLAGLVSLL

SEQ ID NO: 97894 - protein, 9 aa, Homo sapiens
  misc_feature: Table A; Target 97894; HLA-A*24:02; TYR; ENSG00000077498; TAA
LLAGLVSLL

SEQ ID NO: 97895 - protein, 9 aa, Homo sapiens
  misc_feature: Table A; Target 97895; HLA-A*68:02; TYR; ENSG00000077498; TAA
LLAGLVSLL

SEQ ID NO: 97896 - protein, 9 aa, Homo sapiens
  misc_feature: Table A; Target 97896; HLA-B*07:02; TYR; ENSG00000077498; TAA
LLAGLVSLL

SEQ ID NO: 97897 - protein, 9 aa, Homo sapiens
  misc_feature: Table A; Target 97897; HLA-B*13:02; TYR; ENSG00000077498; TAA
LLAGLVSLL

SEQ ID NO: 97898 - protein, 9 aa, Homo sapiens
  misc_feature: Table A; Target 97898; HLA-B*55:01; TYR; ENSG00000077498; TAA
LLAGLVSLL

SEQ ID NO: 97899 - protein, 9 aa, Homo sapiens
  misc_feature: Table A; Target 97899; HLA-C*02:02; TYR; ENSG00000077498; TAA
LLAGLVSLL

SEQ ID NO: 97900 - protein, 9 aa, Homo sapiens
  misc_feature: Table A; Target 97900; HLA-C*06:02; TYR; ENSG00000077498; TAA
LLAGLVSLL

SEQ ID NO: 97901 - protein, 9 aa, Homo sapiens
  misc_feature: Table A; Target 97901; HLA-C*07:01; TYR; ENSG00000077498; TAA
LLAGLVSLL

SEQ ID NO: 97902 - protein, 9 aa, Homo sapiens
  misc_feature: Table A; Target 97902; HLA-C*07:04; TYR; ENSG00000077498; TAA
LLAGLVSLL

SEQ ID NO: 97903 - protein, 9 aa, Homo sapiens
  misc_feature: Table A; Target 97903; HLA-C*12:03; TYR; ENSG00000077498; TAA
LLAGLVSLL

SEQ ID NO: 97904 - protein, 8 aa, Homo sapiens
  misc_feature: Table A; Target 97904; HLA-C*07:01; TYR; ENSG00000077498; TAA
LLGAAMVG

SEQ ID NO: 97905 - protein, 8 aa, Homo sapiens
  misc_feature: Table A; Target 97905; HLA-C*07:04; TYR; ENSG00000077498; TAA
LLGAAMVG

SEQ ID NO: 97906 - protein, 8 aa, Homo sapiens
  misc_feature: Table A; Target 97906; HLA-C*12:03; TYR; ENSG00000077498; TAA
LLGAAMVG

SEQ ID NO: 97907 - protein, 9 aa, Homo sapiens
  misc_feature: Table A; Target 97907; HLA-A*02:01; TYR; ENSG00000077498; TAA
LLGAAMVGA

SEQ ID NO: 97908 - protein, 9 aa, Homo sapiens
  misc_feature: Table A; Target 97908; HLA-A*02:03; TYR; ENSG00000077498; TAA
LLGAAMVGA

SEQ ID NO: 97909 - protein, 10 aa, Homo sapiens
  misc_feature: Table A; Target 97909; HLA-A*02:03; TYR; ENSG00000077498; TAA
LLGAAMVGAV

SEQ ID NO: 97910 - protein, 8 aa, Homo sapiens
  misc_feature: Table A; Target 97910; HLA-B*08:01; TYR; ENSG00000077498; TAA
LLMEKEDY

SEQ ID NO: 97911 - protein, 8 aa, Homo sapiens
  misc_feature: Table A; Target 97911; HLA-B*15:01; TYR; ENSG00000077498; TAA
LLMEKEDY

SEQ ID NO: 97912 - protein, 11 aa, Homo sapiens
  misc_feature: Table A; Target 97912; HLA-A*02:01; TYR; ENSG00000077498; TAA
LLMEKEDYHSL

SEQ ID NO: 97913 - protein, 11 aa, Homo sapiens
  misc_feature: Table A; Target 97913; HLA-A*02:04; TYR; ENSG00000077498; TAA
LLMEKEDYHSL

SEQ ID NO: 97914 - protein, 11 aa, Homo sapiens
  misc_feature: Table A; Target 97914; HLA-A*02:07; TYR; ENSG00000077498; TAA
LLMEKEDYHSL

SEQ ID NO: 97915 - protein, 9 aa, Homo sapiens
  misc_feature: Table A; Target 97915; HLA-C*06:02; TYR; ENSG00000077498; TAA
LLSNAPLGP

SEQ ID NO: 97916 - protein, 11 aa, Homo sapiens
  misc_feature: Table A; Target 97916; HLA-A*24:02; TYR; ENSG00000077498; TAA
LLSPASFFSSW

SEQ ID NO: 97917 - protein, 9 aa, Homo sapiens
  misc_feature: Table A; Target 97917; HLA-A*02:01; TYR; ENSG00000077498; TAA
LLWSFQTSA

SEQ ID NO: 97918 - protein, 9 aa, Homo sapiens
  misc_feature: Table A; Target 97918; HLA-A*02:03; TYR; ENSG00000077498; TAA
LLWSFQTSA

SEQ ID NO: 97919 - protein, 9 aa, Homo sapiens
  misc_feature: Table A; Target 97919; HLA-A*02:04; TYR; ENSG00000077498; TAA
LLWSFQTSA

SEQ ID NO: 97920 - protein, 9 aa, Homo sapiens
  misc_feature: Table A; Target 97920; HLA-A*02:07; TYR; ENSG00000077498; TAA
LLWSFQTSA

SEQ ID NO: 97921 - protein, 9 aa, Homo sapiens
  misc_feature: Table A; Target 97921; HLA-B*13:02; TYR; ENSG00000077498; TAA
LLWSFQTSA

SEQ ID NO: 97922 - protein, 9 aa, Homo sapiens
  misc_feature: Table A; Target 97922; HLA-B*54:01; TYR; ENSG00000077498; TAA
LLWSFQTSA

SEQ ID NO: 97923 - protein, 9 aa, Homo sapiens
  misc_feature: Table A; Target 97923; HLA-B*55:01; TYR; ENSG00000077498; TAA
LLWSFQTSA

SEQ ID NO: 97924 - protein, 11 aa, Homo sapiens
  misc_feature: Table A; Target 97924; HLA-A*01:01; TYR; ENSG00000077498; TAA
LMEKEDYHSLY

SEQ ID NO: 97925 - protein, 8 aa, Homo sapiens
  misc_feature: Table A; Target 97925; HLA-B*07:02; TYR; ENSG00000077498; TAA
LPEEKQPL

SEQ ID NO: 97926 - protein, 8 aa, Homo sapiens
  misc_feature: Table A; Target 97926; HLA-B*08:01; TYR; ENSG00000077498; TAA
LPEEKQPL

SEQ ID NO: 97927 - protein, 9 aa, Homo sapiens
  misc_feature: Table A; Target 97927; HLA-B*07:02; TYR; ENSG00000077498; TAA
LPEEKQPLL

SEQ ID NO: 97928 - protein, 9 aa, Homo sapiens
  misc_feature: Table A; Target 97928; HLA-B*08:01; TYR; ENSG00000077498; TAA
LPEEKQPLL

SEQ ID NO: 97929 - protein, 9 aa, Homo sapiens
  misc_feature: Table A; Target 97929; HLA-B*35:01; TYR; ENSG00000077498; TAA
LPEEKQPLL

SEQ ID NO: 97930 - protein, 9 aa, Homo sapiens
  misc_feature: Table A; Target 97930; HLA-B*35:03; TYR; ENSG00000077498; TAA
LPEEKQPLL

SEQ ID NO: 97931 - protein, 9 aa, Homo sapiens
  misc_feature: Table A; Target 97931; HLA-B*38:01; TYR; ENSG00000077498; TAA
LPEEKQPLL

SEQ ID NO: 97932 - protein, 9 aa, Homo sapiens
  misc_feature: Table A; Target 97932; HLA-B*39:01; TYR; ENSG00000077498; TAA
LPEEKQPLL

SEQ ID NO: 97933 - protein, 9 aa, Homo sapiens
  misc_feature: Table A; Target 97933; HLA-B*51:01; TYR; ENSG00000077498; TAA
LPEEKQPLL

SEQ ID NO: 97934 - protein, 9 aa, Homo sapiens
  misc_feature: Table A; Target 97934; HLA-B*54:01; TYR; ENSG00000077498; TAA
LPEEKQPLL

SEQ ID NO: 97935 - protein, 9 aa, Homo sapiens
  misc_feature: Table A; Target 97935; HLA-B*55:01; TYR; ENSG00000077498; TAA
LPEEKQPLL

SEQ ID NO: 97936 - protein, 9 aa, Homo sapiens
  misc_feature: Table A; Target 97936; HLA-B*56:01; TYR; ENSG00000077498; TAA
LPEEKQPLL

SEQ ID NO: 97937 - protein, 9 aa, Homo sapiens
  misc_feature: Table A; Target 97937; HLA-C*03:03; TYR; ENSG00000077498; TAA
LPEEKQPLL

SEQ ID NO: 97938 - protein, 9 aa, Homo sapiens
  misc_feature: Table A; Target 97938; HLA-C*05:01; TYR; ENSG00000077498; TAA
LPEEKQPLL

SEQ ID NO: 97939 - protein, 9 aa, Homo sapiens
  misc_feature: Table A; Target 97939; HLA-C*07:02; TYR; ENSG00000077498; TAA
LPEEKQPLL

SEQ ID NO: 97940 - protein, 9 aa, Homo sapiens
  misc_feature: Table A; Target 97940; HLA-C*16:02; TYR; ENSG00000077498; TAA
LPEEKQPLL

SEQ ID NO: 97941 - protein, 10 aa, Homo sapiens
  misc_feature: Table A; Target 97941; HLA-B*35:01; TYR; ENSG00000077498; TAA
LPEEKQPLLM

SEQ ID NO: 97942 - protein, 10 aa, Homo sapiens
  misc_feature: Table A; Target 97942; HLA-B*35:03; TYR; ENSG00000077498; TAA
LPEEKQPLLM

SEQ ID NO: 97943 - protein, 10 aa, Homo sapiens
  misc_feature: Table A; Target 97943; HLA-B*51:01; TYR; ENSG00000077498; TAA
LPEEKQPLLM

SEQ ID NO: 97944 - protein, 10 aa, Homo sapiens
  misc_feature: Table A; Target 97944; HLA-B*55:01; TYR; ENSG00000077498; TAA
LPEEKQPLLM

SEQ ID NO: 97945 - protein, 10 aa, Homo sapiens
  misc_feature: Table A; Target 97945; HLA-C*03:03; TYR; ENSG00000077498; TAA
LPEEKQPLLM

SEQ ID NO: 97946 - protein, 9 aa, Homo sapiens
  misc_feature: Table A; Target 97946; HLA-B*07:02; TYR; ENSG00000077498; TAA
LPSSADVEF

SEQ ID NO: 97947 - protein, 9 aa, Homo sapiens
  misc_feature: Table A; Target 97947; HLA-B*35:01; TYR; ENSG00000077498; TAA
LPSSADVEF

SEQ ID NO: 97948 - protein, 9 aa, Homo sapiens
  misc_feature: Table A; Target 97948; HLA-B*35:03; TYR; ENSG00000077498; TAA
LPSSADVEF

SEQ ID NO: 97949 - protein, 9 aa, Homo sapiens
  misc_feature: Table A; Target 97949; HLA-B*38:01; TYR; ENSG00000077498; TAA
LPSSADVEF

SEQ ID NO: 97950 - protein, 9 aa, Homo sapiens
  misc_feature: Table A; Target 97950; HLA-B*51:01; TYR; ENSG00000077498; TAA
LPSSADVEF

SEQ ID NO: 97951 - protein, 9 aa, Homo sapiens
  misc_feature: Table A; Target 97951; HLA-B*54:01; TYR; ENSG00000077498; TAA
LPSSADVEF

SEQ ID NO: 97952 - protein, 9 aa, Homo sapiens
  misc_feature: Table A; Target 97952; HLA-B*55:01; TYR; ENSG00000077498; TAA
LPSSADVEF

SEQ ID NO: 97953 - protein, 9 aa, Homo sapiens
  misc_feature: Table A; Target 97953; HLA-B*56:01; TYR; ENSG00000077498; TAA
LPSSADVEF

SEQ ID NO: 97954 - protein, 9 aa, Homo sapiens
  misc_feature: Table A; Target 97954; HLA-C*03:03; TYR; ENSG00000077498; TAA
LPSSADVEF

SEQ ID NO: 97955 - protein, 9 aa, Homo sapiens
  misc_feature: Table A; Target 97955; HLA-C*04:01; TYR; ENSG00000077498; TAA
LPSSADVEF

SEQ ID NO: 97956 - protein, 9 aa, Homo sapiens
  misc_feature: Table A; Target 97956; HLA-C*05:01; TYR; ENSG00000077498; TAA
LPSSADVEF

SEQ ID NO: 97957 - protein, 9 aa, Homo sapiens
  misc_feature: Table A; Target 97957; HLA-C*07:02; TYR; ENSG00000077498; TAA
LPSSADVEF

SEQ ID NO: 97958 - protein, 9 aa, Homo sapiens
  misc_feature: Table A; Target 97958; HLA-C*07:04; TYR; ENSG00000077498; TAA
LPSSADVEF

SEQ ID NO: 97959 - protein, 9 aa, Homo sapiens
  misc_feature: Table A; Target 97959; HLA-C*07:06; TYR; ENSG00000077498; TAA
LPSSADVEF

SEQ ID NO: 97960 - protein, 11 aa, Homo sapiens
  misc_feature: Table A; Target 97960; HLA-B*35:01; TYR; ENSG00000077498; TAA
LPSSADVEFCL

SEQ ID NO: 97961 - protein, 11 aa, Homo sapiens
  misc_feature: Table A; Target 97961; HLA-B*35:03; TYR; ENSG00000077498; TAA
LPSSADVEFCL

SEQ ID NO: 97962 - protein, 9 aa, Homo sapiens
  misc_feature: Table A; Target 97962; HLA-A*02:04; TYR; ENSG00000077498; TAA
LPWHRLFLL

SEQ ID NO: 97963 - protein, 9 aa, Homo sapiens
  misc_feature: Table A; Target 97963; HLA-B*27:05; TYR; ENSG00000077498; TAA
LQDSDPDSF

SEQ ID NO: 97964 - protein, 9 aa, Homo sapiens
  misc_feature: Table A; Target 97964; HLA-B*38:01; TYR; ENSG00000077498; TAA
LQDSDPDSF

SEQ ID NO: 97965 - protein, 9 aa, Homo sapiens
  misc_feature: Table A; Target 97965; HLA-B*39:01; TYR; ENSG00000077498; TAA
LQDSDPDSF

SEQ ID NO: 97966 - protein, 9 aa, Homo sapiens
  misc_feature: Table A; Target 97966; HLA-B*55:01; TYR; ENSG00000077498; TAA
LQDSDPDSF

SEQ ID NO: 97967 - protein, 9 aa, Homo sapiens
  misc_feature: Table A; Target 97967; HLA-C*04:01; TYR; ENSG00000077498; TAA
LQDSDPDSF

SEQ ID NO: 97968 - protein, 9 aa, Homo sapiens
  misc_feature: Table A; Target 97968; HLA-C*05:01; TYR; ENSG00000077498; TAA
LQDSDPDSF

SEQ ID NO: 97969 - protein, 9 aa, Homo sapiens
  misc_feature: Table A; Target 97969; HLA-C*07:04; TYR; ENSG00000077498; TAA
LQDSDPDSF

SEQ ID NO: 97970 - protein, 9 aa, Homo sapiens
  misc_feature: Table A; Target 97970; HLA-B*27:05; TYR; ENSG00000077498; TAA
LRWEQEIQK

SEQ ID NO: 97971 - protein, 9 aa, Homo sapiens
  misc_feature: Table A; Target 97971; HLA-B*57:01; TYR; ENSG00000077498; TAA
LSAPEKDKF

SEQ ID NO: 97972 - protein, 9 aa, Homo sapiens
  misc_feature: Table A; Target 97972; HLA-B*58:01; TYR; ENSG00000077498; TAA
LSAPEKDKF

SEQ ID NO: 97973 - protein, 9 aa, Homo sapiens
  misc_feature: Table A; Target 97973; HLA-C*16:01; TYR; ENSG00000077498; TAA
LSAPEKDKF

SEQ ID NO: 97974 - protein, 10 aa, Homo sapiens
  misc_feature: Table A; Target 97974; HLA-B*57:01; TYR; ENSG00000077498; TAA
LSAPEKDKFF

SEQ ID NO: 97975 - protein, 10 aa, Homo sapiens
  misc_feature: Table A; Target 97975; HLA-A*30:02; TYR; ENSG00000077498; TAA
LSNAPLGPQF

SEQ ID NO: 97976 - protein, 10 aa, Homo sapiens
  misc_feature: Table A; Target 97976; HLA-A*32:01; TYR; ENSG00000077498; TAA
LSNAPLGPQF

SEQ ID NO: 97977 - protein, 10 aa, Homo sapiens
  misc_feature: Table A; Target 97977; HLA-B*57:01; TYR; ENSG00000077498; TAA
LSNAPLGPQF

SEQ ID NO: 97978 - protein, 10 aa, Homo sapiens
  misc_feature: Table A; Target 97978; HLA-B*58:01; TYR; ENSG00000077498; TAA
LSNAPLGPQF

SEQ ID NO: 97979 - protein, 10 aa, Homo sapiens
  misc_feature: Table A; Target 97979; HLA-C*16:01; TYR; ENSG00000077498; TAA
LSNAPLGPQF

SEQ ID NO: 97980 - protein, 10 aa, Homo sapiens
  misc_feature: Table A; Target 97980; HLA-A*24:02; TYR; ENSG00000077498; TAA
LSPASFFSSW

SEQ ID NO: 97981 - protein, 10 aa, Homo sapiens
  misc_feature: Table A; Target 97981; HLA-A*25:01; TYR; ENSG00000077498; TAA
LSPASFFSSW

SEQ ID NO: 97982 - protein, 10 aa, Homo sapiens
  misc_feature: Table A; Target 97982; HLA-B*57:01; TYR; ENSG00000077498; TAA
LSPASFFSSW

SEQ ID NO: 97983 - protein, 9 aa, Homo sapiens
  misc_feature: Table A; Target 97983; HLA-A*01:01; TYR; ENSG00000077498; TAA
LTALLAGLV

SEQ ID NO: 97984 - protein, 11 aa, Homo sapiens
  misc_feature: Table A; Target 97984; HLA-A*68:02; TYR; ENSG00000077498; TAA
LTALLAGLVSL

SEQ ID NO: 97985 - protein, 8 aa, Homo sapiens
  misc_feature: Table A; Target 97985; HLA-B*08:01; TYR; ENSG00000077498; TAA
LTLAKHTI

SEQ ID NO: 97986 - protein, 9 aa, Homo sapiens
  misc_feature: Table A; Target 97986; HLA-B*39:01; TYR; ENSG00000077498; TAA
LTQYESGSM

SEQ ID NO: 97987 - protein, 9 aa, Homo sapiens
  misc_feature: Table A; Target 97987; HLA-C*03:03; TYR; ENSG00000077498; TAA
LTQYESGSM

SEQ ID NO: 97988 - protein, 9 aa, Homo sapiens
  misc_feature: Table A; Target 97988; HLA-C*03:04; TYR; ENSG00000077498; TAA
LTQYESGSM

SEQ ID NO: 97989 - protein, 9 aa, Homo sapiens
  misc_feature: Table A; Target 97989; HLA-C*04:01; TYR; ENSG00000077498; TAA
LTQYESGSM

SEQ ID NO: 97990 - protein, 9 aa, Homo sapiens
  misc_feature: Table A; Target 97990; HLA-C*06:02; TYR; ENSG00000077498; TAA
LTQYESGSM

SEQ ID NO: 97991 - protein, 9 aa, Homo sapiens
  misc_feature: Table A; Target 97991; HLA-C*07:01; TYR; ENSG00000077498; TAA
LTQYESGSM

SEQ ID NO: 97992 - protein, 9 aa, Homo sapiens
  misc_feature: Table A; Target 97992; HLA-C*07:04; TYR; ENSG00000077498; TAA
LTQYESGSM

SEQ ID NO: 97993 - protein, 9 aa, Homo sapiens
  misc_feature: Table A; Target 97993; HLA-C*14:02; TYR; ENSG00000077498; TAA
LTQYESGSM

SEQ ID NO: 97994 - protein, 11 aa, Homo sapiens
  misc_feature: Table A; Target 97994; HLA-A*01:01; TYR; ENSG00000077498; TAA
LTQYESGSMDK

SEQ ID NO: 97995 - protein, 11 aa, Homo sapiens
  misc_feature: Table A; Target 97995; HLA-A*03:02; TYR; ENSG00000077498; TAA
LTQYESGSMDK

SEQ ID NO: 97996 - protein, 11 aa, Homo sapiens
  misc_feature: Table A; Target 97996; HLA-A*11:01; TYR; ENSG00000077498; TAA
LTQYESGSMDK

SEQ ID NO: 97997 - protein, 11 aa, Homo sapiens
  misc_feature: Table A; Target 97997; HLA-B*27:02; TYR; ENSG00000077498; TAA
LTQYESGSMDK

SEQ ID NO: 97998 - protein, 11 aa, Homo sapiens
  misc_feature: Table A; Target 97998; HLA-C*06:02; TYR; ENSG00000077498; TAA
LTQYESGSMDK

SEQ ID NO: 97999 - protein, 11 aa, Homo sapiens
  misc_feature: Table A; Target 97999; HLA-C*07:01; TYR; ENSG00000077498; TAA
LTQYESGSMDK

SEQ ID NO: 98000 - protein, 9 aa, Homo sapiens
  misc_feature: Table A; Target 98000; HLA-A*02:04; TYR; ENSG00000077498; TAA
LVRRNIFDL

SEQ ID NO: 98001 - protein, 11 aa, Homo sapiens
  misc_feature: Table A; Target 98001; HLA-B*44:02; TYR; ENSG00000077498; TAA
MDALLGGSEIW

SEQ ID NO: 98002 - protein, 11 aa, Homo sapiens
  misc_feature: Table A; Target 98002; HLA-B*44:03; TYR; ENSG00000077498; TAA
MDALLGGSEIW

SEQ ID NO: 98003 - protein, 11 aa, Homo sapiens
  misc_feature: Table A; Target 98003; HLA-B*57:01; TYR; ENSG00000077498; TAA
MDALLGGSEIW

SEQ ID NO: 98004 - protein, 9 aa, Homo sapiens
  misc_feature: Table A; Target 98004; HLA-A*30:01; TYR; ENSG00000077498; TAA
MDKAANFSF

SEQ ID NO: 98005 - protein, 9 aa, Homo sapiens
  misc_feature: Table A; Target 98005; HLA-B*15:03; TYR; ENSG00000077498; TAA
MDKAANFSF

SEQ ID NO: 98006 - protein, 9 aa, Homo sapiens
  misc_feature: Table A; Target 98006; HLA-B*18:01; TYR; ENSG00000077498; TAA
MDKAANFSF

SEQ ID NO: 98007 - protein, 9 aa, Homo sapiens
  misc_feature: Table A; Target 98007; HLA-B*37:01; TYR; ENSG00000077498; TAA
MDKAANFSF

SEQ ID NO: 98008 - protein, 9 aa, Homo sapiens
  misc_feature: Table A; Target 98008; HLA-B*40:02; TYR; ENSG00000077498; TAA
MDKAANFSF

SEQ ID NO: 98009 - protein, 9 aa, Homo sapiens
  misc_feature: Table A; Target 98009; HLA-B*44:02; TYR; ENSG00000077498; TAA
MDKAANFSF

SEQ ID NO: 98010 - protein, 9 aa, Homo sapiens
  misc_feature: Table A; Target 98010; HLA-B*57:01; TYR; ENSG00000077498; TAA
MDKAANFSF

SEQ ID NO: 98011 - protein, 9 aa, Homo sapiens
  misc_feature: Table A; Target 98011; HLA-C*04:01; TYR; ENSG00000077498; TAA
MDKAANFSF

SEQ ID NO: 98012 - protein, 9 aa, Homo sapiens
  misc_feature: Table A; Target 98012; HLA-C*07:01; TYR; ENSG00000077498; TAA
MDKAANFSF

SEQ ID NO: 98013 - protein, 9 aa, Homo sapiens
  misc_feature: Table A; Target 98013; HLA-C*07:04; TYR; ENSG00000077498; TAA
MDKAANFSF

SEQ ID NO: 98014 - protein, 9 aa, Homo sapiens
  misc_feature: Table A; Target 98014; HLA-C*16:04; TYR; ENSG00000077498; TAA
MDKAANFSF

SEQ ID NO: 98015 - protein, 10 aa, Homo sapiens
  misc_feature: Table A; Target 98015; HLA-A*33:01; TYR; ENSG00000077498; TAA
MDKAANFSFR

SEQ ID NO: 98016 - protein, 9 aa, Homo sapiens
  misc_feature: Table A; Target 98016; HLA-A*02:07; TYR; ENSG00000077498; TAA
MEKEDYHSL

SEQ ID NO: 98017 - protein, 9 aa, Homo sapiens
  misc_feature: Table A; Target 98017; HLA-A*25:01; TYR; ENSG00000077498; TAA
MEKEDYHSL

SEQ ID NO: 98018 - protein, 9 aa, Homo sapiens
  misc_feature: Table A; Target 98018; HLA-A*30:01; TYR; ENSG00000077498; TAA
MEKEDYHSL

SEQ ID NO: 98019 - protein, 9 aa, Homo sapiens
  misc_feature: Table A; Target 98019; HLA-B*08:01; TYR; ENSG00000077498; TAA
MEKEDYHSL

SEQ ID NO: 98020 - protein, 9 aa, Homo sapiens
  misc_feature: Table A; Target 98020; HLA-B*18:01; TYR; ENSG00000077498; TAA
MEKEDYHSL

SEQ ID NO: 98021 - protein, 9 aa, Homo sapiens
  misc_feature: Table A; Target 98021; HLA-B*37:01; TYR; ENSG00000077498; TAA
MEKEDYHSL

SEQ ID NO: 98022 - protein, 9 aa, Homo sapiens
  misc_feature: Table A; Target 98022; HLA-B*38:01; TYR; ENSG00000077498; TAA
MEKEDYHSL

SEQ ID NO: 98023 - protein, 9 aa, Homo sapiens
  misc_feature: Table A; Target 98023; HLA-B*40:01; TYR; ENSG00000077498; TAA
MEKEDYHSL

SEQ ID NO: 98024 - protein, 9 aa, Homo sapiens
  misc_feature: Table A; Target 98024; HLA-B*40:02; TYR; ENSG00000077498; TAA
MEKEDYHSL

SEQ ID NO: 98025 - protein, 9 aa, Homo sapiens
  misc_feature: Table A; Target 98025; HLA-B*44:02; TYR; ENSG00000077498; TAA
MEKEDYHSL

SEQ ID NO: 98026 - protein, 9 aa, Homo sapiens
  misc_feature: Table A; Target 98026; HLA-B*44:03; TYR; ENSG00000077498; TAA
MEKEDYHSL

SEQ ID NO: 98027 - protein, 9 aa, Homo sapiens
  misc_feature: Table A; Target 98027; HLA-B*46:01; TYR; ENSG00000077498; TAA
MEKEDYHSL

SEQ ID NO: 98028 - protein, 9 aa, Homo sapiens
  misc_feature: Table A; Target 98028; HLA-B*49:01; TYR; ENSG00000077498; TAA
MEKEDYHSL

SEQ ID NO: 98029 - protein, 9 aa, Homo sapiens
  misc_feature: Table A; Target 98029; HLA-C*02:02; TYR; ENSG00000077498; TAA
MEKEDYHSL

SEQ ID NO: 98030 - protein, 9 aa, Homo sapiens
  misc_feature: Table A; Target 98030; HLA-C*16:02; TYR; ENSG00000077498; TAA
MEKEDYHSL

SEQ ID NO: 98031 - protein, 9 aa, Homo sapiens
  misc_feature: Table A; Target 98031; HLA-C*16:04; TYR; ENSG00000077498; TAA
MEKEDYHSL

SEQ ID NO: 98032 - protein, 10 aa, Homo sapiens
  misc_feature: Table A; Target 98032; HLA-B*18:01; TYR; ENSG00000077498; TAA
MEKEDYHSLY

SEQ ID NO: 98033 - protein, 10 aa, Homo sapiens
  misc_feature: Table A; Target 98033; HLA-B*44:02; TYR; ENSG00000077498; TAA
MEKEDYHSLY

SEQ ID NO: 98034 - protein, 10 aa, Homo sapiens
  misc_feature: Table A; Target 98034; HLA-B*44:03; TYR; ENSG00000077498; TAA
MEKEDYHSLY

SEQ ID NO: 98035 - protein, 10 aa, Homo sapiens
  misc_feature: Table A; Target 98035; HLA-C*16:04; TYR; ENSG00000077498; TAA
MEKEDYHSLY

SEQ ID NO: 98036 - protein, 11 aa, Homo sapiens
  misc_feature: Table A; Target 98036; HLA-A*24:02; TYR; ENSG00000077498; TAA
MFNDINIYDLF

SEQ ID NO: 98037 - protein, 8 aa, Homo sapiens
  misc_feature: Table A; Target 98037; HLA-C*07:01; TYR; ENSG00000077498; TAA
MGGQHPTN

SEQ ID NO: 98038 - protein, 8 aa, Homo sapiens
  misc_feature: Table A; Target 98038; HLA-C*07:01; TYR; ENSG00000077498; TAA
MHNALHIY

SEQ ID NO: 98039 - protein, 9 aa, Homo sapiens
  misc_feature: Table A; Target 98039; HLA-A*31:01; TYR; ENSG00000077498; TAA
MHNALHIYM

SEQ ID NO: 98040 - protein, 9 aa, Homo sapiens
  misc_feature: Table A; Target 98040; HLA-B*38:01; TYR; ENSG00000077498; TAA
MHNALHIYM

SEQ ID NO: 98041 - protein, 9 aa, Homo sapiens
  misc_feature: Table A; Target 98041; HLA-C*07:01; TYR; ENSG00000077498; TAA
MHNALHIYM

SEQ ID NO: 98042 - protein, 9 aa, Homo sapiens
  misc_feature: Table A; Target 98042; HLA-C*07:04; TYR; ENSG00000077498; TAA
MHNALHIYM

SEQ ID NO: 98043 - protein, 9 aa, Homo sapiens
  misc_feature: Table A; Target 98043; HLA-B*54:01; TYR; ENSG00000077498; TAA
MHYYVSMDA

SEQ ID NO: 98044 - protein, 9 aa, Homo sapiens
  misc_feature: Table A; Target 98044; HLA-B*15:03; TYR; ENSG00000077498; TAA
MKNGSTPMF

SEQ ID NO: 98045 - protein, 9 aa, Homo sapiens
  misc_feature: Table A; Target 98045; HLA-B*38:01; TYR; ENSG00000077498; TAA
MKNGSTPMF

SEQ ID NO: 98046 - protein, 9 aa, Homo sapiens
  misc_feature: Table A; Target 98046; HLA-C*04:01; TYR; ENSG00000077498; TAA
MKNGSTPMF

SEQ ID NO: 98047 - protein, 10 aa, Homo sapiens
  misc_feature: Table A; Target 98047; HLA-C*07:01; TYR; ENSG00000077498; TAA
MKNGSTPMFN

SEQ ID NO: 98048 - protein, 9 aa, Homo sapiens
  misc_feature: Table A; Target 98048; HLA-A*02:04; TYR; ENSG00000077498; TAA
MLLAVLYCL

SEQ ID NO: 98049 - protein, 8 aa, Homo sapiens
  misc_feature: Table A; Target 98049; HLA-B*51:01; TYR; ENSG00000077498; TAA
MNGTMSQV

SEQ ID NO: 98050 - protein, 8 aa, Homo sapiens
  misc_feature: Table A; Target 98050; HLA-C*04:01; TYR; ENSG00000077498; TAA
MNGTMSQV

SEQ ID NO: 98051 - protein, 8 aa, Homo sapiens
  misc_feature: Table A; Target 98051; HLA-C*06:02; TYR; ENSG00000077498; TAA
MNGTMSQV

SEQ ID NO: 98052 - protein, 8 aa, Homo sapiens
  misc_feature: Table A; Target 98052; HLA-C*07:01; TYR; ENSG00000077498; TAA
MNGTMSQV

SEQ ID NO: 98053 - protein, 8 aa, Homo sapiens
  misc_feature: Table A; Target 98053; HLA-C*07:02; TYR; ENSG00000077498; TAA
MNGTMSQV

SEQ ID NO: 98054 - protein, 8 aa, Homo sapiens
  misc_feature: Table A; Target 98054; HLA-C*07:04; TYR; ENSG00000077498; TAA
MNGTMSQV

SEQ ID NO: 98055 - protein, 8 aa, Homo sapiens
  misc_feature: Table A; Target 98055; HLA-C*12:03; TYR; ENSG00000077498; TAA
MNGTMSQV

SEQ ID NO: 98056 - protein, 8 aa, Homo sapiens
  misc_feature: Table A; Target 98056; HLA-B*54:01; TYR; ENSG00000077498; TAA
MVGAVLTA

SEQ ID NO: 98057 - protein, 8 aa, Homo sapiens
  misc_feature: Table A; Target 98057; HLA-B*56:01; TYR; ENSG00000077498; TAA
MVGAVLTA

SEQ ID NO: 98058 - protein, 9 aa, Homo sapiens
  misc_feature: Table A; Target 98058; HLA-A*02:03; TYR; ENSG00000077498; TAA
MVGAVLTAL

SEQ ID NO: 98059 - protein, 9 aa, Homo sapiens
  misc_feature: Table A; Target 98059; HLA-A*02:04; TYR; ENSG00000077498; TAA
MVGAVLTAL

SEQ ID NO: 98060 - protein, 9 aa, Homo sapiens
  misc_feature: Table A; Target 98060; HLA-A*02:07; TYR; ENSG00000077498; TAA
MVGAVLTAL

SEQ ID NO: 98061 - protein, 9 aa, Homo sapiens
  misc_feature: Table A; Target 98061; HLA-A*03:01; TYR; ENSG00000077498; TAA
MVGAVLTAL

SEQ ID NO: 98062 - protein, 9 aa, Homo sapiens
  misc_feature: Table A; Target 98062; HLA-A*03:02; TYR; ENSG00000077498; TAA
MVGAVLTAL

SEQ ID NO: 98063 - protein, 9 aa, Homo sapiens
  misc_feature: Table A; Target 98063; HLA-A*11:01; TYR; ENSG00000077498; TAA
MVGAVLTAL

SEQ ID NO: 98064 - protein, 9 aa, Homo sapiens
  misc_feature: Table A; Target 98064; HLA-A*23:01; TYR; ENSG00000077498; TAA
MVGAVLTAL

SEQ ID NO: 98065 - protein, 9 aa, Homo sapiens
  misc_feature: Table A; Target 98065; HLA-A*24:02; TYR; ENSG00000077498; TAA
MVGAVLTAL

SEQ ID NO: 98066 - protein, 9 aa, Homo sapiens
  misc_feature: Table A; Target 98066; HLA-A*25:01; TYR; ENSG00000077498; TAA
MVGAVLTAL

SEQ ID NO: 98067 - protein, 9 aa, Homo sapiens
  misc_feature: Table A; Target 98067; HLA-A*26:01; TYR; ENSG00000077498; TAA
MVGAVLTAL

SEQ ID NO: 98068 - protein, 9 aa, Homo sapiens
  misc_feature: Table A; Target 98068; HLA-A*30:01; TYR; ENSG00000077498; TAA
MVGAVLTAL

SEQ ID NO: 98069 - protein, 9 aa, Homo sapiens
  misc_feature: Table A; Target 98069; HLA-A*31:01; TYR; ENSG00000077498; TAA
MVGAVLTAL

SEQ ID NO: 98070 - protein, 9 aa, Homo sapiens
  misc_feature: Table A; Target 98070; HLA-A*32:01; TYR; ENSG00000077498; TAA
MVGAVLTAL

SEQ ID NO: 98071 - protein, 9 aa, Homo sapiens
  misc_feature: Table A; Target 98071; HLA-A*33:03; TYR; ENSG00000077498; TAA
MVGAVLTAL

SEQ ID NO: 98072 - protein, 9 aa, Homo sapiens
  misc_feature: Table A; Target 98072; HLA-A*68:01; TYR; ENSG00000077498; TAA
MVGAVLTAL

SEQ ID NO: 98073 - protein, 9 aa, Homo sapiens
  misc_feature: Table A; Target 98073; HLA-A*68:02; TYR; ENSG00000077498; TAA
MVGAVLTAL

SEQ ID NO: 98074 - protein, 9 aa, Homo sapiens
  misc_feature: Table A; Target 98074; HLA-B*07:02; TYR; ENSG00000077498; TAA
MVGAVLTAL

SEQ ID NO: 98075 - protein, 9 aa, Homo sapiens
  misc_feature: Table A; Target 98075; HLA-B*08:01; TYR; ENSG00000077498; TAA
MVGAVLTAL

SEQ ID NO: 98076 - protein, 9 aa, Homo sapiens
  misc_feature: Table A; Target 98076; HLA-B*15:01; TYR; ENSG00000077498; TAA
MVGAVLTAL

SEQ ID NO: 98077 - protein, 9 aa, Homo sapiens
  misc_feature: Table A; Target 98077; HLA-B*18:01; TYR; ENSG00000077498; TAA
MVGAVLTAL

SEQ ID NO: 98078 - protein, 9 aa, Homo sapiens
  misc_feature: Table A; Target 98078; HLA-B*27:05; TYR; ENSG00000077498; TAA
MVGAVLTAL

SEQ ID NO: 98079 - protein, 9 aa, Homo sapiens
  misc_feature: Table A; Target 98079; HLA-B*35:01; TYR; ENSG00000077498; TAA
MVGAVLTAL

SEQ ID NO: 98080 - protein, 9 aa, Homo sapiens
  misc_feature: Table A; Target 98080; HLA-B*35:03; TYR; ENSG00000077498; TAA
MVGAVLTAL

SEQ ID NO: 98081 - protein, 9 aa, Homo sapiens
  misc_feature: Table A; Target 98081; HLA-B*38:01; TYR; ENSG00000077498; TAA
MVGAVLTAL

SEQ ID NO: 98082 - protein, 9 aa, Homo sapiens
  misc_feature: Table A; Target 98082; HLA-B*39:01; TYR; ENSG00000077498; TAA
MVGAVLTAL

SEQ ID NO: 98083 - protein, 9 aa, Homo sapiens
  misc_feature: Table A; Target 98083; HLA-B*40:01; TYR; ENSG00000077498; TAA
MVGAVLTAL

SEQ ID NO: 98084 - protein, 9 aa, Homo sapiens
  misc_feature: Table A; Target 98084; HLA-B*40:02; TYR; ENSG00000077498; TAA
MVGAVLTAL

SEQ ID NO: 98085 - protein, 9 aa, Homo sapiens
  misc_feature: Table A; Target 98085; HLA-B*46:01; TYR; ENSG00000077498; TAA
MVGAVLTAL

SEQ ID NO: 98086 - protein, 9 aa, Homo sapiens
  misc_feature: Table A; Target 98086; HLA-B*51:01; TYR; ENSG00000077498; TAA
MVGAVLTAL

SEQ ID NO: 98087 - protein, 9 aa, Homo sapiens
  misc_feature: Table A; Target 98087; HLA-B*54:01; TYR; ENSG00000077498; TAA
MVGAVLTAL

SEQ ID NO: 98088 - protein, 9 aa, Homo sapiens
  misc_feature: Table A; Target 98088; HLA-B*55:01; TYR; ENSG00000077498; TAA
MVGAVLTAL

SEQ ID NO: 98089 - protein, 9 aa, Homo sapiens
  misc_feature: Table A; Target 98089; HLA-B*56:01; TYR; ENSG00000077498; TAA
MVGAVLTAL

SEQ ID NO: 98090 - protein, 9 aa, Homo sapiens
  misc_feature: Table A; Target 98090; HLA-B*58:01; TYR; ENSG00000077498; TAA
MVGAVLTAL

SEQ ID NO: 98091 - protein, 9 aa, Homo sapiens
  misc_feature: Table A; Target 98091; HLA-C*01:02; TYR; ENSG00000077498; TAA
MVGAVLTAL

SEQ ID NO: 98092 - protein, 9 aa, Homo sapiens
  misc_feature: Table A; Target 98092; HLA-C*02:02; TYR; ENSG00000077498; TAA
MVGAVLTAL

SEQ ID NO: 98093 - protein, 9 aa, Homo sapiens
  misc_feature: Table A; Target 98093; HLA-C*03:03; TYR; ENSG00000077498; TAA
MVGAVLTAL

SEQ ID NO: 98094 - protein, 9 aa, Homo sapiens
  misc_feature: Table A; Target 98094; HLA-C*03:04; TYR; ENSG00000077498; TAA
MVGAVLTAL

SEQ ID NO: 98095 - protein, 9 aa, Homo sapiens
  misc_feature: Table A; Target 98095; HLA-C*04:01; TYR; ENSG00000077498; TAA
MVGAVLTAL

SEQ ID NO: 98096 - protein, 9 aa, Homo sapiens
  misc_feature: Table A; Target 98096; HLA-C*05:01; TYR; ENSG00000077498; TAA
MVGAVLTAL

SEQ ID NO: 98097 - protein, 9 aa, Homo sapiens
  misc_feature: Table A; Target 98097; HLA-C*06:02; TYR; ENSG00000077498; TAA
MVGAVLTAL

SEQ ID NO: 98098 - protein, 9 aa, Homo sapiens
  misc_feature: Table A; Target 98098; HLA-C*07:01; TYR; ENSG00000077498; TAA
MVGAVLTAL

SEQ ID NO: 98099 - protein, 9 aa, Homo sapiens
  misc_feature: Table A; Target 98099; HLA-C*07:02; TYR; ENSG00000077498; TAA
MVGAVLTAL

SEQ ID NO: 98100 - protein, 9 aa, Homo sapiens
  misc_feature: Table A; Target 98100; HLA-C*07:04; TYR; ENSG00000077498; TAA
MVGAVLTAL

SEQ ID NO: 98101 - protein, 9 aa, Homo sapiens
  misc_feature: Table A; Target 98101; HLA-C*07:06; TYR; ENSG00000077498; TAA
MVGAVLTAL

SEQ ID NO: 98102 - protein, 9 aa, Homo sapiens
  misc_feature: Table A; Target 98102; HLA-C*14:02; TYR; ENSG00000077498; TAA
MVGAVLTAL

SEQ ID NO: 98103 - protein, 10 aa, Homo sapiens
  misc_feature: Table A; Target 98103; HLA-A*68:02; TYR; ENSG00000077498; TAA
MVGAVLTALL

SEQ ID NO: 98104 - protein, 10 aa, Homo sapiens
  misc_feature: Table A; Target 98104; HLA-B*07:02; TYR; ENSG00000077498; TAA
MVGAVLTALL

SEQ ID NO: 98105 - protein, 10 aa, Homo sapiens
  misc_feature: Table A; Target 98105; HLA-C*07:01; TYR; ENSG00000077498; TAA
MVGAVLTALL

SEQ ID NO: 98106 - protein, 10 aa, Homo sapiens
  misc_feature: Table A; Target 98106; HLA-C*07:02; TYR; ENSG00000077498; TAA
MVGAVLTALL

SEQ ID NO: 98107 - protein, 8 aa, Homo sapiens
  misc_feature: Table A; Target 98107; HLA-A*29:02; TYR; ENSG00000077498; TAA
MVPFIPLY

SEQ ID NO: 98108 - protein, 8 aa, Homo sapiens
  misc_feature: Table A; Target 98108; HLA-B*51:01; TYR; ENSG00000077498; TAA
MVPFIPLY

SEQ ID NO: 98109 - protein, 8 aa, Homo sapiens
  misc_feature: Table A; Target 98109; HLA-C*07:01; TYR; ENSG00000077498; TAA
MVPFIPLY

SEQ ID NO: 98110 - protein, 9 aa, Homo sapiens
  misc_feature: Table A; Target 98110; HLA-A*02:07; TYR; ENSG00000077498; TAA
MVPFIPLYR

SEQ ID NO: 98111 - protein, 9 aa, Homo sapiens
  misc_feature: Table A; Target 98111; HLA-A*29:02; TYR; ENSG00000077498; TAA
MVPFIPLYR

SEQ ID NO: 98112 - protein, 9 aa, Homo sapiens
  misc_feature: Table A; Target 98112; HLA-A*31:01; TYR; ENSG00000077498; TAA
MVPFIPLYR

SEQ ID NO: 98113 - protein, 9 aa, Homo sapiens
  misc_feature: Table A; Target 98113; HLA-A*33:03; TYR; ENSG00000077498; TAA
MVPFIPLYR

SEQ ID NO: 98114 - protein, 9 aa, Homo sapiens
  misc_feature: Table A; Target 98114; HLA-A*68:02; TYR; ENSG00000077498; TAA
MVPFIPLYR

SEQ ID NO: 98115 - protein, 9 aa, Homo sapiens
  misc_feature: Table A; Target 98115; HLA-B*54:01; TYR; ENSG00000077498; TAA
MVPFIPLYR

SEQ ID NO: 98116 - protein, 8 aa, Homo sapiens
  misc_feature: Table A; Target 98116; HLA-A*33:01; TYR; ENSG00000077498; TAA
NAPIGHNR

SEQ ID NO: 98117 - protein, 8 aa, Homo sapiens
  misc_feature: Table A; Target 98117; HLA-B*51:01; TYR; ENSG00000077498; TAA
NAPIGHNR

SEQ ID NO: 98118 - protein, 8 aa, Homo sapiens
  misc_feature: Table A; Target 98118; HLA-C*01:02; TYR; ENSG00000077498; TAA
NAPIGHNR

SEQ ID NO: 98119 - protein, 8 aa, Homo sapiens
  misc_feature: Table A; Target 98119; HLA-B*51:01; TYR; ENSG00000077498; TAA
NAPLGPQF

SEQ ID NO: 98120 - protein, 8 aa, Homo sapiens
  misc_feature: Table A; Target 98120; HLA-C*01:02; TYR; ENSG00000077498; TAA
NAPLGPQF

SEQ ID NO: 98121 - protein, 8 aa, Homo sapiens
  misc_feature: Table A; Target 98121; HLA-C*04:01; TYR; ENSG00000077498; TAA
NAPLGPQF

SEQ ID NO: 98122 - protein, 8 aa, Homo sapiens
  misc_feature: Table A; Target 98122; HLA-C*05:01; TYR; ENSG00000077498; TAA
NAPLGPQF

SEQ ID NO: 98123 - protein, 8 aa, Homo sapiens
  misc_feature: Table A; Target 98123; HLA-C*16:01; TYR; ENSG00000077498; TAA
NAPLGPQF

SEQ ID NO: 98124 - protein, 10 aa, Homo sapiens
  misc_feature: Table A; Target 98124; HLA-A*02:07; TYR; ENSG00000077498; TAA
NAPLGPQFPF

SEQ ID NO: 98125 - protein, 10 aa, Homo sapiens
  misc_feature: Table A; Target 98125; HLA-A*24:02; TYR; ENSG00000077498; TAA
NAPLGPQFPF

SEQ ID NO: 98126 - protein, 10 aa, Homo sapiens
  misc_feature: Table A; Target 98126; HLA-B*35:01; TYR; ENSG00000077498; TAA
NAPLGPQFPF

SEQ ID NO: 98127 - protein, 10 aa, Homo sapiens
  misc_feature: Table A; Target 98127; HLA-C*07:01; TYR; ENSG00000077498; TAA
NAPLGPQFPF

SEQ ID NO: 98128 - protein, 10 aa, Homo sapiens
  misc_feature: Table A; Target 98128; HLA-C*07:02; TYR; ENSG00000077498; TAA
NAPLGPQFPF

SEQ ID NO: 98129 - protein, 8 aa, Homo sapiens
  misc_feature: Table A; Target 98129; HLA-A*30:01; TYR; ENSG00000077498; TAA
NDINIYDL

SEQ ID NO: 98130 - protein, 8 aa, Homo sapiens
  misc_feature: Table A; Target 98130; HLA-B*18:01; TYR; ENSG00000077498; TAA
NDINIYDL

SEQ ID NO: 98131 - protein, 8 aa, Homo sapiens
  misc_feature: Table A; Target 98131; HLA-B*37:01; TYR; ENSG00000077498; TAA
NDINIYDL

SEQ ID NO: 98132 - protein, 9 aa, Homo sapiens
  misc_feature: Table A; Target 98132; HLA-B*44:02; TYR; ENSG00000077498; TAA
NDINIYDLF

SEQ ID NO: 98133 - protein, 9 aa, Homo sapiens
  misc_feature: Table A; Target 98133; HLA-B*44:03; TYR; ENSG00000077498; TAA
NDINIYDLF

SEQ ID NO: 98134 - protein, 9 aa, Homo sapiens
  misc_feature: Table A; Target 98134; HLA-A*03:02; TYR; ENSG00000077498; TAA
NGDFFISSK

SEQ ID NO: 98135 - protein, 9 aa, Homo sapiens
  misc_feature: Table A; Target 98135; HLA-A*11:01; TYR; ENSG00000077498; TAA
NGDFFISSK

SEQ ID NO: 98136 - protein, 9 aa, Homo sapiens
  misc_feature: Table A; Target 98136; HLA-A*68:01; TYR; ENSG00000077498; TAA
NGTPEGPLR

SEQ ID NO: 98137 - protein, 9 aa, Homo sapiens
  misc_feature: Table A; Target 98137; HLA-C*07:06; TYR; ENSG00000077498; TAA
NGTPEGPLR

SEQ ID NO: 98138 - protein, 10 aa, Homo sapiens
  misc_feature: Table A; Target 98138; HLA-A*03:01; TYR; ENSG00000077498; TAA
NIFDLSAPEK

SEQ ID NO: 98139 - protein, 10 aa, Homo sapiens
  misc_feature: Table A; Target 98139; HLA-A*03:02; TYR; ENSG00000077498; TAA
NIFDLSAPEK

SEQ ID NO: 98140 - protein, 10 aa, Homo sapiens
  misc_feature: Table A; Target 98140; HLA-A*11:01; TYR; ENSG00000077498; TAA
NIFDLSAPEK

SEQ ID NO: 98141 - protein, 10 aa, Homo sapiens
  misc_feature: Table A; Target 98141; HLA-A*26:01; TYR; ENSG00000077498; TAA
NIFDLSAPEK

SEQ ID NO: 98142 - protein, 10 aa, Homo sapiens
  misc_feature: Table A; Target 98142; HLA-A*68:01; TYR; ENSG00000077498; TAA
NIFDLSAPEK

SEQ ID NO: 98143 - protein, 10 aa, Homo sapiens
  misc_feature: Table A; Target 98143; HLA-A*68:02; TYR; ENSG00000077498; TAA
NIFDLSAPEK

SEQ ID NO: 98144 - protein, 10 aa, Homo sapiens
  misc_feature: Table A; Target 98144; HLA-B*27:02; TYR; ENSG00000077498; TAA
NIFDLSAPEK

SEQ ID NO: 98145 - protein, 10 aa, Homo sapiens
  misc_feature: Table A; Target 98145; HLA-B*27:05; TYR; ENSG00000077498; TAA
NIFDLSAPEK

SEQ ID NO: 98146 - protein, 10 aa, Homo sapiens
  misc_feature: Table A; Target 98146; HLA-C*01:02; TYR; ENSG00000077498; TAA
NIFDLSAPEK

SEQ ID NO: 98147 - protein, 10 aa, Homo sapiens
  misc_feature: Table A; Target 98147; HLA-C*07:06; TYR; ENSG00000077498; TAA
NIFDLSAPEK

SEQ ID NO: 98148 - protein, 9 aa, Homo sapiens
  misc_feature: Table A; Target 98148; HLA-A*29:02; TYR; ENSG00000077498; TAA
NLLSPASFF

SEQ ID NO: 98149 - protein, 10 aa, Homo sapiens
  misc_feature: Table A; Target 98149; HLA-A*02:01; TYR; ENSG00000077498; TAA
NTLEGFASPL

SEQ ID NO: 98150 - protein, 10 aa, Homo sapiens
  misc_feature: Table A; Target 98150; HLA-A*33:01; TYR; ENSG00000077498; TAA
NTLEGFASPL

SEQ ID NO: 98151 - protein, 10 aa, Homo sapiens
  misc_feature: Table A; Target 98151; HLA-A*68:02; TYR; ENSG00000077498; TAA
NTLEGFASPL

SEQ ID NO: 98152 - protein, 10 aa, Homo sapiens
  misc_feature: Table A; Target 98152; HLA-B*07:02; TYR; ENSG00000077498; TAA
NTLEGFASPL

SEQ ID NO: 98153 - protein, 10 aa, Homo sapiens
  misc_feature: Table A; Target 98153; HLA-C*01:02; TYR; ENSG00000077498; TAA
NTLEGFASPL

SEQ ID NO: 98154 - protein, 10 aa, Homo sapiens
  misc_feature: Table A; Target 98154; HLA-C*06:02; TYR; ENSG00000077498; TAA
NTLEGFASPL

SEQ ID NO: 98155 - protein, 10 aa, Homo sapiens
  misc_feature: Table A; Target 98155; HLA-C*07:01; TYR; ENSG00000077498; TAA
NTLEGFASPL

SEQ ID NO: 98156 - protein, 10 aa, Homo sapiens
  misc_feature: Table A; Target 98156; HLA-C*07:02; TYR; ENSG00000077498; TAA
NTLEGFASPL

SEQ ID NO: 98157 - protein, 10 aa, Homo sapiens
  misc_feature: Table A; Target 98157; HLA-C*14:02; TYR; ENSG00000077498; TAA
NTLEGFASPL

SEQ ID NO: 98158 - protein, 9 aa, Homo sapiens
  misc_feature: Table A; Target 98158; HLA-B*27:02; TYR; ENSG00000077498; TAA
PDSFQDYIK

SEQ ID NO: 98159 - protein, 9 aa, Homo sapiens
  misc_feature: Table A; Target 98159; HLA-B*07:02; TYR; ENSG00000077498; TAA
PEANAPIGH

SEQ ID NO: 98160 - protein, 11 aa, Homo sapiens
  misc_feature: Table A; Target 98160; HLA-A*68:01; TYR; ENSG00000077498; TAA
PEANAPIGHNR

SEQ ID NO: 98161 - protein, 8 aa, Homo sapiens
  misc_feature: Table A; Target 98161; HLA-C*04:01; TYR; ENSG00000077498; TAA
PIGTYGQM

SEQ ID NO: 98162 - protein, 8 aa, Homo sapiens
  misc_feature: Table A; Target 98162; HLA-C*07:01; TYR; ENSG00000077498; TAA
PLGPQFPF

SEQ ID NO: 98163 - protein, 8 aa, Homo sapiens
  misc_feature: Table A; Target 98163; HLA-C*07:02; TYR; ENSG00000077498; TAA
PLGPQFPF

SEQ ID NO: 98164 - protein, 11 aa, Homo sapiens
  misc_feature: Table A; Target 98164; HLA-B*27:02; TYR; ENSG00000077498; TAA
PRLPSSADVEF

SEQ ID NO: 98165 - protein, 11 aa, Homo sapiens
  misc_feature: Table A; Target 98165; HLA-C*06:02; TYR; ENSG00000077498; TAA
PRLPSSADVEF

SEQ ID NO: 98166 - protein, 11 aa, Homo sapiens
  misc_feature: Table A; Target 98166; HLA-C*07:01; TYR; ENSG00000077498; TAA
PRLPSSADVEF

SEQ ID NO: 98167 - protein, 8 aa, Homo sapiens
  misc_feature: Table A; Target 98167; HLA-B*57:01; TYR; ENSG00000077498; TAA
QASRIWSW

SEQ ID NO: 98168 - protein, 9 aa, Homo sapiens
  misc_feature: Table A; Target 98168; HLA-A*26:01; TYR; ENSG00000077498; TAA
QCSGNFMGF

SEQ ID NO: 98169 - protein, 8 aa, Homo sapiens
  misc_feature: Table A; Target 98169; HLA-B*37:01; TYR; ENSG00000077498; TAA
QDSDPDSF

SEQ ID NO: 98170 - protein, 11 aa, Homo sapiens
  misc_feature: Table A; Target 98170; HLA-A*30:02; TYR; ENSG00000077498; TAA
QDSDPDSFQDY

SEQ ID NO: 98171 - protein, 8 aa, Homo sapiens
  misc_feature: Table A; Target 98171; HLA-B*08:01; TYR; ENSG00000077498; TAA
QDYIKSYL

SEQ ID NO: 98172 - protein, 8 aa, Homo sapiens
  misc_feature: Table A; Target 98172; HLA-B*37:01; TYR; ENSG00000077498; TAA
QDYIKSYL

SEQ ID NO: 98173 - protein, 8 aa, Homo sapiens
  misc_feature: Table A; Target 98173; HLA-B*40:02; TYR; ENSG00000077498; TAA
QDYIKSYL

SEQ ID NO: 98174 - protein, 8 aa, Homo sapiens
  misc_feature: Table A; Target 98174; HLA-C*04:01; TYR; ENSG00000077498; TAA
QDYIKSYL

SEQ ID NO: 98175 - protein, 8 aa, Homo sapiens
  misc_feature: Table A; Target 98175; HLA-C*07:01; TYR; ENSG00000077498; TAA
QDYIKSYL

SEQ ID NO: 98176 - protein, 9 aa, Homo sapiens
  misc_feature: Table A; Target 98176; HLA-B*49:01; TYR; ENSG00000077498; TAA
QEVYPEANA

SEQ ID NO: 98177 - protein, 9 aa, Homo sapiens
  misc_feature: Table A; Target 98177; HLA-B*35:03; TYR; ENSG00000077498; TAA
QGSANDPIF

SEQ ID NO: 98178 - protein, 9 aa, Homo sapiens
  misc_feature: Table A; Target 98178; HLA-B*38:01; TYR; ENSG00000077498; TAA
QGSANDPIF

SEQ ID NO: 98179 - protein, 9 aa, Homo sapiens
  misc_feature: Table A; Target 98179; HLA-C*03:03; TYR; ENSG00000077498; TAA
QGSANDPIF

SEQ ID NO: 98180 - protein, 9 aa, Homo sapiens
  misc_feature: Table A; Target 98180; HLA-A*24:02; TYR; ENSG00000077498; TAA
QHPTNPNLL

SEQ ID NO: 98181 - protein, 9 aa, Homo sapiens
  misc_feature: Table A; Target 98181; HLA-B*38:01; TYR; ENSG00000077498; TAA
QHPTNPNLL

SEQ ID NO: 98182 - protein, 9 aa, Homo sapiens
  misc_feature: Table A; Target 98182; HLA-B*39:01; TYR; ENSG00000077498; TAA
QHPTNPNLL

SEQ ID NO: 98183 - protein, 9 aa, Homo sapiens
  misc_feature: Table A; Target 98183; HLA-C*07:01; TYR; ENSG00000077498; TAA
QHPTNPNLL

SEQ ID NO: 98184 - protein, 9 aa, Homo sapiens
  misc_feature: Table A; Target 98184; HLA-B*15:03; TYR; ENSG00000077498; TAA
QKLTGDENF

SEQ ID NO: 98185 - protein, 9 aa, Homo sapiens
  misc_feature: Table A; Target 98185; HLA-B*38:01; TYR; ENSG00000077498; TAA
QKLTGDENF

SEQ ID NO: 98186 - protein, 9 aa, Homo sapiens
  misc_feature: Table A; Target 98186; HLA-A*02:07; TYR; ENSG00000077498; TAA
QLPEEKQPL

SEQ ID NO: 98187 - protein, 9 aa, Homo sapiens
  misc_feature: Table A; Target 98187; HLA-B*08:01; TYR; ENSG00000077498; TAA
QLPEEKQPL

SEQ ID NO: 98188 - protein, 9 aa, Homo sapiens
  misc_feature: Table A; Target 98188; HLA-C*01:02; TYR; ENSG00000077498; TAA
QLPEEKQPL

SEQ ID NO: 98189 - protein, 10 aa, Homo sapiens
  misc_feature: Table A; Target 98189; HLA-A*02:01; TYR; ENSG00000077498; TAA
QLPEEKQPLL

SEQ ID NO: 98190 - protein, 10 aa, Homo sapiens
  misc_feature: Table A; Target 98190; HLA-A*02:03; TYR; ENSG00000077498; TAA
QLPEEKQPLL

SEQ ID NO: 98191 - protein, 10 aa, Homo sapiens
  misc_feature: Table A; Target 98191; HLA-A*02:04; TYR; ENSG00000077498; TAA
QLPEEKQPLL

SEQ ID NO: 98192 - protein, 10 aa, Homo sapiens
  misc_feature: Table A; Target 98192; HLA-A*02:07; TYR; ENSG00000077498; TAA
QLPEEKQPLL

SEQ ID NO: 98193 - protein, 10 aa, Homo sapiens
  misc_feature: Table A; Target 98193; HLA-A*24:02; TYR; ENSG00000077498; TAA
QLPEEKQPLL

SEQ ID NO: 98194 - protein, 11 aa, Homo sapiens
  misc_feature: Table A; Target 98194; HLA-A*02:01; TYR; ENSG00000077498; TAA
QLPEEKQPLLM

SEQ ID NO: 98195 - protein, 11 aa, Homo sapiens
  misc_feature: Table A; Target 98195; HLA-A*02:07; TYR; ENSG00000077498; TAA
QLPEEKQPLLM

SEQ ID NO: 98196 - protein, 9 aa, Homo sapiens
  misc_feature: Table A; Target 98196; HLA-A*32:01; TYR; ENSG00000077498; TAA
QMKNGSTPM

SEQ ID NO: 98197 - protein, 9 aa, Homo sapiens
  misc_feature: Table A; Target 98197; HLA-B*07:02; TYR; ENSG00000077498; TAA
QMKNGSTPM

SEQ ID NO: 98198 - protein, 9 aa, Homo sapiens
  misc_feature: Table A; Target 98198; HLA-B*08:01; TYR; ENSG00000077498; TAA
QMKNGSTPM

SEQ ID NO: 98199 - protein, 9 aa, Homo sapiens
  misc_feature: Table A; Target 98199; HLA-B*15:01; TYR; ENSG00000077498; TAA
QMKNGSTPM

SEQ ID NO: 98200 - protein, 9 aa, Homo sapiens
  misc_feature: Table A; Target 98200; HLA-B*15:03; TYR; ENSG00000077498; TAA
QMKNGSTPM

SEQ ID NO: 98201 - protein, 9 aa, Homo sapiens
  misc_feature: Table A; Target 98201; HLA-B*46:01; TYR; ENSG00000077498; TAA
QMKNGSTPM

SEQ ID NO: 98202 - protein, 9 aa, Homo sapiens
  misc_feature: Table A; Target 98202; HLA-C*01:02; TYR; ENSG00000077498; TAA
QMKNGSTPM

SEQ ID NO: 98203 - protein, 9 aa, Homo sapiens
  misc_feature: Table A; Target 98203; HLA-C*07:02; TYR; ENSG00000077498; TAA
QMKNGSTPM

SEQ ID NO: 98204 - protein, 9 aa, Homo sapiens
  misc_feature: Table A; Target 98204; HLA-C*07:04; TYR; ENSG00000077498; TAA
QMKNGSTPM

SEQ ID NO: 98205 - protein, 9 aa, Homo sapiens
  misc_feature: Table A; Target 98205; HLA-C*14:02; TYR; ENSG00000077498; TAA
QMKNGSTPM

SEQ ID NO: 98206 - protein, 9 aa, Homo sapiens
  misc_feature: Table A; Target 98206; HLA-C*16:01; TYR; ENSG00000077498; TAA
QMKNGSTPM

SEQ ID NO: 98207 - protein, 10 aa, Homo sapiens
  misc_feature: Table A; Target 98207; HLA-A*23:01; TYR; ENSG00000077498; TAA
QMKNGSTPMF

SEQ ID NO: 98208 - protein, 10 aa, Homo sapiens
  misc_feature: Table A; Target 98208; HLA-A*24:02; TYR; ENSG00000077498; TAA
QMKNGSTPMF

SEQ ID NO: 98209 - protein, 10 aa, Homo sapiens
  misc_feature: Table A; Target 98209; HLA-A*25:01; TYR; ENSG00000077498; TAA
QMKNGSTPMF

SEQ ID NO: 98210 - protein, 10 aa, Homo sapiens
  misc_feature: Table A; Target 98210; HLA-A*32:01; TYR; ENSG00000077498; TAA
QMKNGSTPMF

SEQ ID NO: 98211 - protein, 10 aa, Homo sapiens
  misc_feature: Table A; Target 98211; HLA-B*15:01; TYR; ENSG00000077498; TAA
QMKNGSTPMF

SEQ ID NO: 98212 - protein, 10 aa, Homo sapiens
  misc_feature: Table A; Target 98212; HLA-B*35:01; TYR; ENSG00000077498; TAA
QPLLMEKEDY

SEQ ID NO: 98213 - protein, 10 aa, Homo sapiens
  misc_feature: Table A; Target 98213; HLA-C*03:03; TYR; ENSG00000077498; TAA
QPLLMEKEDY

SEQ ID NO: 98214 - protein, 8 aa, Homo sapiens
  misc_feature: Table A; Target 98214; HLA-B*07:02; TYR; ENSG00000077498; TAA
QSSMHNAL

SEQ ID NO: 98215 - protein, 8 aa, Homo sapiens
  misc_feature: Table A; Target 98215; HLA-B*08:01; TYR; ENSG00000077498; TAA
QSSMHNAL

SEQ ID NO: 98216 - protein, 8 aa, Homo sapiens
  misc_feature: Table A; Target 98216; HLA-B*37:01; TYR; ENSG00000077498; TAA
QSSMHNAL

SEQ ID NO: 98217 - protein, 8 aa, Homo sapiens
  misc_feature: Table A; Target 98217; HLA-C*01:02; TYR; ENSG00000077498; TAA
QSSMHNAL

SEQ ID NO: 98218 - protein, 8 aa, Homo sapiens
  misc_feature: Table A; Target 98218; HLA-C*03:04; TYR; ENSG00000077498; TAA
QSSMHNAL

SEQ ID NO: 98219 - protein, 8 aa, Homo sapiens
  misc_feature: Table A; Target 98219; HLA-C*06:02; TYR; ENSG00000077498; TAA
QSSMHNAL

SEQ ID NO: 98220 - protein, 8 aa, Homo sapiens
  misc_feature: Table A; Target 98220; HLA-C*07:04; TYR; ENSG00000077498; TAA
QSSMHNAL

SEQ ID NO: 98221 - protein, 8 aa, Homo sapiens
  misc_feature: Table A; Target 98221; HLA-C*12:03; TYR; ENSG00000077498; TAA
QSSMHNAL

SEQ ID NO: 98222 - protein, 8 aa, Homo sapiens
  misc_feature: Table A; Target 98222; HLA-C*16:01; TYR; ENSG00000077498; TAA
QSSMHNAL

SEQ ID NO: 98223 - protein, 8 aa, Homo sapiens
  misc_feature: Table A; Target 98223; HLA-C*16:02; TYR; ENSG00000077498; TAA
QSSMHNAL

SEQ ID NO: 98224 - protein, 11 aa, Homo sapiens
  misc_feature: Table A; Target 98224; HLA-A*01:01; TYR; ENSG00000077498; TAA
QSSMHNALHIY

SEQ ID NO: 98225 - protein, 9 aa, Homo sapiens
  misc_feature: Table A; Target 98225; HLA-A*03:01; TYR; ENSG00000077498; TAA
QTSAGHFPR

SEQ ID NO: 98226 - protein, 9 aa, Homo sapiens
  misc_feature: Table A; Target 98226; HLA-A*03:02; TYR; ENSG00000077498; TAA
QTSAGHFPR

SEQ ID NO: 98227 - protein, 9 aa, Homo sapiens
  misc_feature: Table A; Target 98227; HLA-A*11:01; TYR; ENSG00000077498; TAA
QTSAGHFPR

SEQ ID NO: 98228 - protein, 9 aa, Homo sapiens
  misc_feature: Table A; Target 98228; HLA-A*29:02; TYR; ENSG00000077498; TAA
QTSAGHFPR

SEQ ID NO: 98229 - protein, 9 aa, Homo sapiens
  misc_feature: Table A; Target 98229; HLA-A*31:01; TYR; ENSG00000077498; TAA
QTSAGHFPR

SEQ ID NO: 98230 - protein, 9 aa, Homo sapiens
  misc_feature: Table A; Target 98230; HLA-A*33:01; TYR; ENSG00000077498; TAA
QTSAGHFPR

SEQ ID NO: 98231 - protein, 9 aa, Homo sapiens
  misc_feature: Table A; Target 98231; HLA-A*33:03; TYR; ENSG00000077498; TAA
QTSAGHFPR

SEQ ID NO: 98232 - protein, 9 aa, Homo sapiens
  misc_feature: Table A; Target 98232; HLA-A*68:01; TYR; ENSG00000077498; TAA
QTSAGHFPR

SEQ ID NO: 98233 - protein, 9 aa, Homo sapiens
  misc_feature: Table A; Target 98233; HLA-C*07:06; TYR; ENSG00000077498; TAA
QTSAGHFPR

SEQ ID NO: 98234 - protein, 9 aa, Homo sapiens
  misc_feature: Table A; Target 98234; HLA-C*01:02; TYR; ENSG00000077498; TAA
QYESGSMDK

SEQ ID NO: 98235 - protein, 9 aa, Homo sapiens
  misc_feature: Table A; Target 98235; HLA-C*07:01; TYR; ENSG00000077498; TAA
QYESGSMDK

SEQ ID NO: 98236 - protein, 9 aa, Homo sapiens
  misc_feature: Table A; Target 98236; HLA-A*30:01; TYR; ENSG00000077498; TAA
RDIDFAHEA

SEQ ID NO: 98237 - protein, 9 aa, Homo sapiens
  misc_feature: Table A; Target 98237; HLA-B*40:02; TYR; ENSG00000077498; TAA
RDIDFAHEA

SEQ ID NO: 98238 - protein, 8 aa, Homo sapiens
  misc_feature: Table A; Target 98238; HLA-B*37:01; TYR; ENSG00000077498; TAA
RESWPSVF

SEQ ID NO: 98239 - protein, 9 aa, Homo sapiens
  misc_feature: Table A; Target 98239; HLA-B*37:01; TYR; ENSG00000077498; TAA
RESWPSVFY

SEQ ID NO: 98240 - protein, 9 aa, Homo sapiens
  misc_feature: Table A; Target 98240; HLA-B*44:02; TYR; ENSG00000077498; TAA
RESWPSVFY

SEQ ID NO: 98241 - protein, 9 aa, Homo sapiens
  misc_feature: Table A; Target 98241; HLA-B*44:03; TYR; ENSG00000077498; TAA
RESWPSVFY

SEQ ID NO: 98242 - protein, 8 aa, Homo sapiens
  misc_feature: Table A; Target 98242; HLA-B*37:01; TYR; ENSG00000077498; TAA
RESYMVPF

SEQ ID NO: 98243 - protein, 9 aa, Homo sapiens
  misc_feature: Table A; Target 98243; HLA-B*49:01; TYR; ENSG00000077498; TAA
RESYMVPFI

SEQ ID NO: 98244 - protein, 9 aa, Homo sapiens
  misc_feature: Table A; Target 98244; HLA-A*30:02; TYR; ENSG00000077498; TAA
RHRPLQEVY

SEQ ID NO: 98245 - protein, 9 aa, Homo sapiens
  misc_feature: Table A; Target 98245; HLA-B*57:01; TYR; ENSG00000077498; TAA
RHRPLQEVY

SEQ ID NO: 98246 - protein, 9 aa, Homo sapiens
  misc_feature: Table A; Target 98246; HLA-A*02:04; TYR; ENSG00000077498; TAA
RIWSWLLGA

SEQ ID NO: 98247 - protein, 9 aa, Homo sapiens
  misc_feature: Table A; Target 98247; HLA-A*02:07; TYR; ENSG00000077498; TAA
RIWSWLLGA

SEQ ID NO: 98248 - protein, 11 aa, Homo sapiens
  misc_feature: Table A; Target 98248; HLA-A*02:07; TYR; ENSG00000077498; TAA
RLEEYNSHQSL

SEQ ID NO: 98249 - protein, 10 aa, Homo sapiens
  misc_feature: Table A; Target 98249; HLA-A*02:07; TYR; ENSG00000077498; TAA
RLPSSADVEF

SEQ ID NO: 98250 - protein, 10 aa, Homo sapiens
  misc_feature: Table A; Target 98250; HLA-B*15:01; TYR; ENSG00000077498; TAA
RLPSSADVEF

SEQ ID NO: 98251 - protein, 10 aa, Homo sapiens
  misc_feature: Table A; Target 98251; HLA-B*54:01; TYR; ENSG00000077498; TAA
RPLQEVYPEA

SEQ ID NO: 98252 - protein, 10 aa, Homo sapiens
  misc_feature: Table A; Target 98252; HLA-B*55:01; TYR; ENSG00000077498; TAA
RPLQEVYPEA

SEQ ID NO: 98253 - protein, 10 aa, Homo sapiens
  misc_feature: Table A; Target 98253; HLA-B*56:01; TYR; ENSG00000077498; TAA
RPLQEVYPEA

SEQ ID NO: 98254 - protein, 9 aa, Homo sapiens
  misc_feature: Table A; Target 98254; HLA-B*27:05; TYR; ENSG00000077498; TAA
RRNPGNHDK

SEQ ID NO: 98255 - protein, 8 aa, Homo sapiens
  misc_feature: Table A; Target 98255; HLA-B*35:03; TYR; ENSG00000077498; TAA
SADVEFCL

SEQ ID NO: 98256 - protein, 8 aa, Homo sapiens
  misc_feature: Table A; Target 98256; HLA-C*05:01; TYR; ENSG00000077498; TAA
SADVEFCL

SEQ ID NO: 98257 - protein, 8 aa, Homo sapiens
  misc_feature: Table A; Target 98257; HLA-B*54:01; TYR; ENSG00000077498; TAA
SAGHFPRA

SEQ ID NO: 98258 - protein, 8 aa, Homo sapiens
  misc_feature: Table A; Target 98258; HLA-C*03:04; TYR; ENSG00000077498; TAA
SANDPIFL

SEQ ID NO: 98259 - protein, 8 aa, Homo sapiens
  misc_feature: Table A; Target 98259; HLA-C*05:01; TYR; ENSG00000077498; TAA
SANDPIFL

SEQ ID NO: 98260 - protein, 9 aa, Homo sapiens
  misc_feature: Table A; Target 98260; HLA-A*02:01; TYR; ENSG00000077498; TAA
SANDPIFLL

SEQ ID NO: 98261 - protein, 9 aa, Homo sapiens
  misc_feature: Table A; Target 98261; HLA-A*02:04; TYR; ENSG00000077498; TAA
SANDPIFLL

SEQ ID NO: 98262 - protein, 9 aa, Homo sapiens
  misc_feature: Table A; Target 98262; HLA-A*02:07; TYR; ENSG00000077498; TAA
SANDPIFLL

SEQ ID NO: 98263 - protein, 9 aa, Homo sapiens
  misc_feature: Table A; Target 98263; HLA-A*03:01; TYR; ENSG00000077498; TAA
SANDPIFLL

SEQ ID NO: 98264 - protein, 9 aa, Homo sapiens
  misc_feature: Table A; Target 98264; HLA-A*03:02; TYR; ENSG00000077498; TAA
SANDPIFLL

SEQ ID NO: 98265 - protein, 9 aa, Homo sapiens
  misc_feature: Table A; Target 98265; HLA-A*11:01; TYR; ENSG00000077498; TAA
SANDPIFLL

SEQ ID NO: 98266 - protein, 9 aa, Homo sapiens
  misc_feature: Table A; Target 98266; HLA-A*23:01; TYR; ENSG00000077498; TAA
SANDPIFLL

SEQ ID NO: 98267 - protein, 9 aa, Homo sapiens
  misc_feature: Table A; Target 98267; HLA-A*24:02; TYR; ENSG00000077498; TAA
SANDPIFLL

SEQ ID NO: 98268 - protein, 9 aa, Homo sapiens
  misc_feature: Table A; Target 98268; HLA-A*25:01; TYR; ENSG00000077498; TAA
SANDPIFLL

SEQ ID NO: 98269 - protein, 9 aa, Homo sapiens
  misc_feature: Table A; Target 98269; HLA-A*26:01; TYR; ENSG00000077498; TAA
SANDPIFLL

SEQ ID NO: 98270 - protein, 9 aa, Homo sapiens
  misc_feature: Table A; Target 98270; HLA-A*29:02; TYR; ENSG00000077498; TAA
SANDPIFLL

SEQ ID NO: 98271 - protein, 9 aa, Homo sapiens
  misc_feature: Table A; Target 98271; HLA-A*30:01; TYR; ENSG00000077498; TAA
SANDPIFLL

SEQ ID NO: 98272 - protein, 9 aa, Homo sapiens
  misc_feature: Table A; Target 98272; HLA-A*30:02; TYR; ENSG00000077498; TAA
SANDPIFLL

SEQ ID NO: 98273 - protein, 9 aa, Homo sapiens
  misc_feature: Table A; Target 98273; HLA-A*31:01; TYR; ENSG00000077498; TAA
SANDPIFLL

SEQ ID NO: 98274 - protein, 9 aa, Homo sapiens
  misc_feature: Table A; Target 98274; HLA-A*33:01; TYR; ENSG00000077498; TAA
SANDPIFLL

SEQ ID NO: 98275 - protein, 9 aa, Homo sapiens
  misc_feature: Table A; Target 98275; HLA-A*33:03; TYR; ENSG00000077498; TAA
SANDPIFLL

SEQ ID NO: 98276 - protein, 9 aa, Homo sapiens
  misc_feature: Table A; Target 98276; HLA-A*68:01; TYR; ENSG00000077498; TAA
SANDPIFLL

SEQ ID NO: 98277 - protein, 9 aa, Homo sapiens
  misc_feature: Table A; Target 98277; HLA-A*68:02; TYR; ENSG00000077498; TAA
SANDPIFLL

SEQ ID NO: 98278 - protein, 9 aa, Homo sapiens
  misc_feature: Table A; Target 98278; HLA-B*13:02; TYR; ENSG00000077498; TAA
SANDPIFLL

SEQ ID NO: 98279 - protein, 9 aa, Homo sapiens
  misc_feature: Table A; Target 98279; HLA-B*35:01; TYR; ENSG00000077498; TAA
SANDPIFLL

SEQ ID NO: 98280 - protein, 9 aa, Homo sapiens
  misc_feature: Table A; Target 98280; HLA-B*35:03; TYR; ENSG00000077498; TAA
SANDPIFLL

SEQ ID NO: 98281 - protein, 9 aa, Homo sapiens
  misc_feature: Table A; Target 98281; HLA-B*38:01; TYR; ENSG00000077498; TAA
SANDPIFLL

SEQ ID NO: 98282 - protein, 9 aa, Homo sapiens
  misc_feature: Table A; Target 98282; HLA-B*39:01; TYR; ENSG00000077498; TAA
SANDPIFLL

SEQ ID NO: 98283 - protein, 9 aa, Homo sapiens
  misc_feature: Table A; Target 98283; HLA-B*44:02; TYR; ENSG00000077498; TAA
SANDPIFLL

SEQ ID NO: 98284 - protein, 9 aa, Homo sapiens
  misc_feature: Table A; Target 98284; HLA-B*44:03; TYR; ENSG00000077498; TAA
SANDPIFLL

SEQ ID NO: 98285 - protein, 9 aa, Homo sapiens
  misc_feature: Table A; Target 98285; HLA-B*51:01; TYR; ENSG00000077498; TAA
SANDPIFLL

SEQ ID NO: 98286 - protein, 9 aa, Homo sapiens
  misc_feature: Table A; Target 98286; HLA-B*57:01; TYR; ENSG00000077498; TAA
SANDPIFLL

SEQ ID NO: 98287 - protein, 9 aa, Homo sapiens
  misc_feature: Table A; Target 98287; HLA-B*58:01; TYR; ENSG00000077498; TAA
SANDPIFLL

SEQ ID NO: 98288 - protein, 9 aa, Homo sapiens
  misc_feature: Table A; Target 98288; HLA-C*02:02; TYR; ENSG00000077498; TAA
SANDPIFLL

SEQ ID NO: 98289 - protein, 9 aa, Homo sapiens
  misc_feature: Table A; Target 98289; HLA-C*03:03; TYR; ENSG00000077498; TAA
SANDPIFLL

SEQ ID NO: 98290 - protein, 9 aa, Homo sapiens
  misc_feature: Table A; Target 98290; HLA-C*03:04; TYR; ENSG00000077498; TAA
SANDPIFLL

SEQ ID NO: 98291 - protein, 9 aa, Homo sapiens
  misc_feature: Table A; Target 98291; HLA-C*05:01; TYR; ENSG00000077498; TAA
SANDPIFLL

SEQ ID NO: 98292 - protein, 9 aa, Homo sapiens
  misc_feature: Table A; Target 98292; HLA-C*06:02; TYR; ENSG00000077498; TAA
SANDPIFLL

SEQ ID NO: 98293 - protein, 9 aa, Homo sapiens
  misc_feature: Table A; Target 98293; HLA-C*07:04; TYR; ENSG00000077498; TAA
SANDPIFLL

SEQ ID NO: 98294 - protein, 9 aa, Homo sapiens
  misc_feature: Table A; Target 98294; HLA-C*07:06; TYR; ENSG00000077498; TAA
SANDPIFLL

SEQ ID NO: 98295 - protein, 9 aa, Homo sapiens
  misc_feature: Table A; Target 98295; HLA-C*12:03; TYR; ENSG00000077498; TAA
SANDPIFLL

SEQ ID NO: 98296 - protein, 9 aa, Homo sapiens
  misc_feature: Table A; Target 98296; HLA-C*16:01; TYR; ENSG00000077498; TAA
SANDPIFLL

SEQ ID NO: 98297 - protein, 9 aa, Homo sapiens
  misc_feature: Table A; Target 98297; HLA-C*16:02; TYR; ENSG00000077498; TAA
SANDPIFLL

SEQ ID NO: 98298 - protein, 9 aa, Homo sapiens
  misc_feature: Table A; Target 98298; HLA-C*16:04; TYR; ENSG00000077498; TAA
SANDPIFLL

SEQ ID NO: 98299 - protein, 10 aa, Homo sapiens
  misc_feature: Table A; Target 98299; HLA-A*03:01; TYR; ENSG00000077498; TAA
SANDPIFLLH

SEQ ID NO: 98300 - protein, 10 aa, Homo sapiens
  misc_feature: Table A; Target 98300; HLA-A*11:01; TYR; ENSG00000077498; TAA
SANDPIFLLH

SEQ ID NO: 98301 - protein, 10 aa, Homo sapiens
  misc_feature: Table A; Target 98301; HLA-A*29:02; TYR; ENSG00000077498; TAA
SANDPIFLLH

SEQ ID NO: 98302 - protein, 10 aa, Homo sapiens
  misc_feature: Table A; Target 98302; HLA-C*02:02; TYR; ENSG00000077498; TAA
SANDPIFLLH

SEQ ID NO: 98303 - protein, 10 aa, Homo sapiens
  misc_feature: Table A; Target 98303; HLA-C*07:06; TYR; ENSG00000077498; TAA
SANDPIFLLH

SEQ ID NO: 98304 - protein, 11 aa, Homo sapiens
  misc_feature: Table A; Target 98304; HLA-A*02:07; TYR; ENSG00000077498; TAA
SAPEKDKFFAY

SEQ ID NO: 98305 - protein, 11 aa, Homo sapiens
  misc_feature: Table A; Target 98305; HLA-A*29:02; TYR; ENSG00000077498; TAA
SAPEKDKFFAY

SEQ ID NO: 98306 - protein, 9 aa, Homo sapiens
  misc_feature: Table A; Target 98306; HLA-C*01:02; TYR; ENSG00000077498; TAA
SDPDSFQDY

SEQ ID NO: 98307 - protein, 9 aa, Homo sapiens
  misc_feature: Table A; Target 98307; HLA-B*37:01; TYR; ENSG00000077498; TAA
SDYVIPIGT

SEQ ID NO: 98308 - protein, 9 aa, Homo sapiens
  misc_feature: Table A; Target 98308; HLA-B*40:02; TYR; ENSG00000077498; TAA
SDYVIPIGT

SEQ ID NO: 98309 - protein, 9 aa, Homo sapiens
  misc_feature: Table A; Target 98309; HLA-C*06:02; TYR; ENSG00000077498; TAA
SDYVIPIGT

SEQ ID NO: 98310 - protein, 9 aa, Homo sapiens
  misc_feature: Table A; Target 98310; HLA-C*07:04; TYR; ENSG00000077498; TAA
SDYVIPIGT

SEQ ID NO: 98311 - protein, 10 aa, Homo sapiens
  misc_feature: Table A; Target 98311; HLA-A*25:01; TYR; ENSG00000077498; TAA
SDYVIPIGTY

SEQ ID NO: 98312 - protein, 10 aa, Homo sapiens
  misc_feature: Table A; Target 98312; HLA-A*26:01; TYR; ENSG00000077498; TAA
SDYVIPIGTY

SEQ ID NO: 98313 - protein, 10 aa, Homo sapiens
  misc_feature: Table A; Target 98313; HLA-A*30:02; TYR; ENSG00000077498; TAA
SDYVIPIGTY

SEQ ID NO: 98314 - protein, 10 aa, Homo sapiens
  misc_feature: Table A; Target 98314; HLA-B*15:03; TYR; ENSG00000077498; TAA
SDYVIPIGTY

SEQ ID NO: 98315 - protein, 10 aa, Homo sapiens
  misc_feature: Table A; Target 98315; HLA-B*18:01; TYR; ENSG00000077498; TAA
SDYVIPIGTY

SEQ ID NO: 98316 - protein, 10 aa, Homo sapiens
  misc_feature: Table A; Target 98316; HLA-B*44:02; TYR; ENSG00000077498; TAA
SDYVIPIGTY

SEQ ID NO: 98317 - protein, 10 aa, Homo sapiens
  misc_feature: Table A; Target 98317; HLA-B*44:03; TYR; ENSG00000077498; TAA
SDYVIPIGTY

SEQ ID NO: 98318 - protein, 10 aa, Homo sapiens
  misc_feature: Table A; Target 98318; HLA-C*04:01; TYR; ENSG00000077498; TAA
SDYVIPIGTY

SEQ ID NO: 98319 - protein, 10 aa, Homo sapiens
  misc_feature: Table A; Target 98319; HLA-C*16:04; TYR; ENSG00000077498; TAA
SDYVIPIGTY

SEQ ID NO: 98320 - protein, 9 aa, Homo sapiens
  misc_feature: Table A; Target 98320; HLA-B*37:01; TYR; ENSG00000077498; TAA
SEIWRDIDF

SEQ ID NO: 98321 - protein, 9 aa, Homo sapiens
  misc_feature: Table A; Target 98321; HLA-B*44:02; TYR; ENSG00000077498; TAA
SEIWRDIDF

SEQ ID NO: 98322 - protein, 9 aa, Homo sapiens
  misc_feature: Table A; Target 98322; HLA-B*44:03; TYR; ENSG00000077498; TAA
SEIWRDIDF

SEQ ID NO: 98323 - protein, 9 aa, Homo sapiens
  misc_feature: Table A; Target 98323; HLA-A*29:02; TYR; ENSG00000077498; TAA
SFQDYIKSY

SEQ ID NO: 98324 - protein, 9 aa, Homo sapiens
  misc_feature: Table A; Target 98324; HLA-A*30:02; TYR; ENSG00000077498; TAA
SFQDYIKSY

SEQ ID NO: 98325 - protein, 9 aa, Homo sapiens
  misc_feature: Table A; Target 98325; HLA-A*32:01; TYR; ENSG00000077498; TAA
SFQDYIKSY

SEQ ID NO: 98326 - protein, 9 aa, Homo sapiens
  misc_feature: Table A; Target 98326; HLA-B*44:02; TYR; ENSG00000077498; TAA
SFQDYIKSY

SEQ ID NO: 98327 - protein, 9 aa, Homo sapiens
  misc_feature: Table A; Target 98327; HLA-B*44:03; TYR; ENSG00000077498; TAA
SFQDYIKSY

SEQ ID NO: 98328 - protein, 9 aa, Homo sapiens
  misc_feature: Table A; Target 98328; HLA-C*01:02; TYR; ENSG00000077498; TAA
SFQDYIKSY

SEQ ID NO: 98329 - protein, 9 aa, Homo sapiens
  misc_feature: Table A; Target 98329; HLA-C*12:03; TYR; ENSG00000077498; TAA
SFQDYIKSY

SEQ ID NO: 98330 - protein, 9 aa, Homo sapiens
  misc_feature: Table A; Target 98330; HLA-C*14:02; TYR; ENSG00000077498; TAA
SFQDYIKSY

SEQ ID NO: 98331 - protein, 9 aa, Homo sapiens
  misc_feature: Table A; Target 98331; HLA-C*16:01; TYR; ENSG00000077498; TAA
SFQDYIKSY

SEQ ID NO: 98332 - protein, 9 aa, Homo sapiens
  misc_feature: Table A; Target 98332; HLA-C*16:02; TYR; ENSG00000077498; TAA
SFQDYIKSY

SEQ ID NO: 98333 - protein, 9 aa, Homo sapiens
  misc_feature: Table A; Target 98333; HLA-A*23:01; TYR; ENSG00000077498; TAA
SFQTSAGHF

SEQ ID NO: 98334 - protein, 9 aa, Homo sapiens
  misc_feature: Table A; Target 98334; HLA-A*24:02; TYR; ENSG00000077498; TAA
SFQTSAGHF

SEQ ID NO: 98335 - protein, 9 aa, Homo sapiens
  misc_feature: Table A; Target 98335; HLA-C*01:02; TYR; ENSG00000077498; TAA
SFQTSAGHF

SEQ ID NO: 98336 - protein, 9 aa, Homo sapiens
  misc_feature: Table A; Target 98336; HLA-C*04:01; TYR; ENSG00000077498; TAA
SFQTSAGHF

SEQ ID NO: 98337 - protein, 9 aa, Homo sapiens
  misc_feature: Table A; Target 98337; HLA-C*14:02; TYR; ENSG00000077498; TAA
SFQTSAGHF

SEQ ID NO: 98338 - protein, 11 aa, Homo sapiens
  misc_feature: Table A; Target 98338; HLA-A*31:01; TYR; ENSG00000077498; TAA
SFQTSAGHFPR

SEQ ID NO: 98339 - protein, 11 aa, Homo sapiens
  misc_feature: Table A; Target 98339; HLA-A*33:01; TYR; ENSG00000077498; TAA
SFQTSAGHFPR

SEQ ID NO: 98340 - protein, 11 aa, Homo sapiens
  misc_feature: Table A; Target 98340; HLA-A*33:03; TYR; ENSG00000077498; TAA
SFQTSAGHFPR

SEQ ID NO: 98341 - protein, 9 aa, Homo sapiens
  misc_feature: Table A; Target 98341; HLA-A*23:01; TYR; ENSG00000077498; TAA
SFRNTLEGF

SEQ ID NO: 98342 - protein, 9 aa, Homo sapiens
  misc_feature: Table A; Target 98342; HLA-A*24:02; TYR; ENSG00000077498; TAA
SFRNTLEGF

SEQ ID NO: 98343 - protein, 9 aa, Homo sapiens
  misc_feature: Table A; Target 98343; HLA-A*02:04; TYR; ENSG00000077498; TAA
SIFEQWLRR

SEQ ID NO: 98344 - protein, 9 aa, Homo sapiens
  misc_feature: Table A; Target 98344; HLA-A*29:02; TYR; ENSG00000077498; TAA
SIFEQWLRR

SEQ ID NO: 98345 - protein, 8 aa, Homo sapiens
  misc_feature: Table A; Target 98345; HLA-B*15:03; TYR; ENSG00000077498; TAA
SKDLGYDY

SEQ ID NO: 98346 - protein, 10 aa, Homo sapiens
  misc_feature: Table A; Target 98346; HLA-B*39:01; TYR; ENSG00000077498; TAA
SLTQYESGSM

SEQ ID NO: 98347 - protein, 11 aa, Homo sapiens
  misc_feature: Table A; Target 98347; HLA-C*04:01; TYR; ENSG00000077498; TAA
SMDALLGGSEI

SEQ ID NO: 98348 - protein, 8 aa, Homo sapiens
  misc_feature: Table A; Target 98348; HLA-A*32:01; TYR; ENSG00000077498; TAA
SMDKAANF

SEQ ID NO: 98349 - protein, 8 aa, Homo sapiens
  misc_feature: Table A; Target 98349; HLA-B*18:01; TYR; ENSG00000077498; TAA
SMDKAANF

SEQ ID NO: 98350 - protein, 8 aa, Homo sapiens
  misc_feature: Table A; Target 98350; HLA-B*37:01; TYR; ENSG00000077498; TAA
SMDKAANF

SEQ ID NO: 98351 - protein, 8 aa, Homo sapiens
  misc_feature: Table A; Target 98351; HLA-C*04:01; TYR; ENSG00000077498; TAA
SMDKAANF

SEQ ID NO: 98352 - protein, 8 aa, Homo sapiens
  misc_feature: Table A; Target 98352; HLA-C*05:01; TYR; ENSG00000077498; TAA
SMDKAANF

SEQ ID NO: 98353 - protein, 8 aa, Homo sapiens
  misc_feature: Table A; Target 98353; HLA-C*07:04; TYR; ENSG00000077498; TAA
SMDKAANF

SEQ ID NO: 98354 - protein, 10 aa, Homo sapiens
  misc_feature: Table A; Target 98354; HLA-A*01:01; TYR; ENSG00000077498; TAA
SMDKAANFSF

SEQ ID NO: 98355 - protein, 10 aa, Homo sapiens
  misc_feature: Table A; Target 98355; HLA-A*02:01; TYR; ENSG00000077498; TAA
SMDKAANFSF

SEQ ID NO: 98356 - protein, 10 aa, Homo sapiens
  misc_feature: Table A; Target 98356; HLA-A*02:07; TYR; ENSG00000077498; TAA
SMDKAANFSF

SEQ ID NO: 98357 - protein, 10 aa, Homo sapiens
  misc_feature: Table A; Target 98357; HLA-A*24:02; TYR; ENSG00000077498; TAA
SMDKAANFSF

SEQ ID NO: 98358 - protein, 10 aa, Homo sapiens
  misc_feature: Table A; Target 98358; HLA-A*32:01; TYR; ENSG00000077498; TAA
SMDKAANFSF

SEQ ID NO: 98359 - protein, 10 aa, Homo sapiens
  misc_feature: Table A; Target 98359; HLA-B*38:01; TYR; ENSG00000077498; TAA
SMDKAANFSF

SEQ ID NO: 98360 - protein, 10 aa, Homo sapiens
  misc_feature: Table A; Target 98360; HLA-B*55:01; TYR; ENSG00000077498; TAA
SMDKAANFSF

SEQ ID NO: 98361 - protein, 10 aa, Homo sapiens
  misc_feature: Table A; Target 98361; HLA-B*57:01; TYR; ENSG00000077498; TAA
SMDKAANFSF

SEQ ID NO: 98362 - protein, 10 aa, Homo sapiens
  misc_feature: Table A; Target 98362; HLA-B*58:01; TYR; ENSG00000077498; TAA
SMDKAANFSF

SEQ ID NO: 98363 - protein, 10 aa, Homo sapiens
  misc_feature: Table A; Target 98363; HLA-C*04:01; TYR; ENSG00000077498; TAA
SMDKAANFSF

SEQ ID NO: 98364 - protein, 10 aa, Homo sapiens
  misc_feature: Table A; Target 98364; HLA-C*05:01; TYR; ENSG00000077498; TAA
SMDKAANFSF

SEQ ID NO: 98365 - protein, 8 aa, Homo sapiens
  misc_feature: Table A; Target 98365; HLA-B*13:02; TYR; ENSG00000077498; TAA
SMHNALHI

SEQ ID NO: 98366 - protein, 9 aa, Homo sapiens
  misc_feature: Table A; Target 98366; HLA-A*01:01; TYR; ENSG00000077498; TAA
SMHNALHIY

SEQ ID NO: 98367 - protein, 9 aa, Homo sapiens
  misc_feature: Table A; Target 98367; HLA-A*29:02; TYR; ENSG00000077498; TAA
SMHNALHIY

SEQ ID NO: 98368 - protein, 9 aa, Homo sapiens
  misc_feature: Table A; Target 98368; HLA-A*30:02; TYR; ENSG00000077498; TAA
SMHNALHIY

SEQ ID NO: 98369 - protein, 9 aa, Homo sapiens
  misc_feature: Table A; Target 98369; HLA-B*15:01; TYR; ENSG00000077498; TAA
SMHNALHIY

SEQ ID NO: 98370 - protein, 9 aa, Homo sapiens
  misc_feature: Table A; Target 98370; HLA-B*46:01; TYR; ENSG00000077498; TAA
SMHNALHIY

SEQ ID NO: 98371 - protein, 9 aa, Homo sapiens
  misc_feature: Table A; Target 98371; HLA-C*07:04; TYR; ENSG00000077498; TAA
SMHNALHIY

SEQ ID NO: 98372 - protein, 9 aa, Homo sapiens
  misc_feature: Table A; Target 98372; HLA-A*23:01; TYR; ENSG00000077498; TAA
SNAPLGPQF

SEQ ID NO: 98373 - protein, 9 aa, Homo sapiens
  misc_feature: Table A; Target 98373; HLA-A*24:02; TYR; ENSG00000077498; TAA
SNAPLGPQF

SEQ ID NO: 98374 - protein, 9 aa, Homo sapiens
  misc_feature: Table A; Target 98374; HLA-A*25:01; TYR; ENSG00000077498; TAA
SNAPLGPQF

SEQ ID NO: 98375 - protein, 9 aa, Homo sapiens
  misc_feature: Table A; Target 98375; HLA-A*26:01; TYR; ENSG00000077498; TAA
SNAPLGPQF

SEQ ID NO: 98376 - protein, 9 aa, Homo sapiens
  misc_feature: Table A; Target 98376; HLA-A*29:02; TYR; ENSG00000077498; TAA
SNAPLGPQF

SEQ ID NO: 98377 - protein, 9 aa, Homo sapiens
  misc_feature: Table A; Target 98377; HLA-A*32:01; TYR; ENSG00000077498; TAA
SNAPLGPQF

SEQ ID NO: 98378 - protein, 9 aa, Homo sapiens
  misc_feature: Table A; Target 98378; HLA-B*15:03; TYR; ENSG00000077498; TAA
SNAPLGPQF

SEQ ID NO: 98379 - protein, 9 aa, Homo sapiens
  misc_feature: Table A; Target 98379; HLA-B*18:01; TYR; ENSG00000077498; TAA
SNAPLGPQF

SEQ ID NO: 98380 - protein, 9 aa, Homo sapiens
  misc_feature: Table A; Target 98380; HLA-B*35:01; TYR; ENSG00000077498; TAA
SNAPLGPQF

SEQ ID NO: 98381 - protein, 9 aa, Homo sapiens
  misc_feature: Table A; Target 98381; HLA-B*38:01; TYR; ENSG00000077498; TAA
SNAPLGPQF

SEQ ID NO: 98382 - protein, 9 aa, Homo sapiens
  misc_feature: Table A; Target 98382; HLA-B*39:01; TYR; ENSG00000077498; TAA
SNAPLGPQF

SEQ ID NO: 98383 - protein, 9 aa, Homo sapiens
  misc_feature: Table A; Target 98383; HLA-B*44:02; TYR; ENSG00000077498; TAA
SNAPLGPQF

SEQ ID NO: 98384 - protein, 9 aa, Homo sapiens
  misc_feature: Table A; Target 98384; HLA-B*44:03; TYR; ENSG00000077498; TAA
SNAPLGPQF

SEQ ID NO: 98385 - protein, 9 aa, Homo sapiens
  misc_feature: Table A; Target 98385; HLA-B*58:01; TYR; ENSG00000077498; TAA
SNAPLGPQF

SEQ ID NO: 98386 - protein, 9 aa, Homo sapiens
  misc_feature: Table A; Target 98386; HLA-C*02:02; TYR; ENSG00000077498; TAA
SNAPLGPQF

SEQ ID NO: 98387 - protein, 9 aa, Homo sapiens
  misc_feature: Table A; Target 98387; HLA-C*03:03; TYR; ENSG00000077498; TAA
SNAPLGPQF

SEQ ID NO: 98388 - protein, 9 aa, Homo sapiens
  misc_feature: Table A; Target 98388; HLA-C*16:01; TYR; ENSG00000077498; TAA
SNAPLGPQF

SEQ ID NO: 98389 - protein, 9 aa, Homo sapiens
  misc_feature: Table A; Target 98389; HLA-C*16:04; TYR; ENSG00000077498; TAA
SNAPLGPQF

SEQ ID NO: 98390 - protein, 9 aa, Homo sapiens
  misc_feature: Table A; Target 98390; HLA-A*24:02; TYR; ENSG00000077498; TAA
SPASFFSSW

SEQ ID NO: 98391 - protein, 9 aa, Homo sapiens
  misc_feature: Table A; Target 98391; HLA-A*25:01; TYR; ENSG00000077498; TAA
SPASFFSSW

SEQ ID NO: 98392 - protein, 9 aa, Homo sapiens
  misc_feature: Table A; Target 98392; HLA-A*26:01; TYR; ENSG00000077498; TAA
SPASFFSSW

SEQ ID NO: 98393 - protein, 9 aa, Homo sapiens
  misc_feature: Table A; Target 98393; HLA-A*33:03; TYR; ENSG00000077498; TAA
SPASFFSSW

SEQ ID NO: 98394 - protein, 9 aa, Homo sapiens
  misc_feature: Table A; Target 98394; HLA-B*07:02; TYR; ENSG00000077498; TAA
SPASFFSSW

SEQ ID NO: 98395 - protein, 9 aa, Homo sapiens
  misc_feature: Table A; Target 98395; HLA-B*35:01; TYR; ENSG00000077498; TAA
SPASFFSSW

SEQ ID NO: 98396 - protein, 9 aa, Homo sapiens
  misc_feature: Table A; Target 98396; HLA-B*44:02; TYR; ENSG00000077498; TAA
SPASFFSSW

SEQ ID NO: 98397 - protein, 9 aa, Homo sapiens
  misc_feature: Table A; Target 98397; HLA-B*44:03; TYR; ENSG00000077498; TAA
SPASFFSSW

SEQ ID NO: 98398 - protein, 9 aa, Homo sapiens
  misc_feature: Table A; Target 98398; HLA-B*51:01; TYR; ENSG00000077498; TAA
SPASFFSSW

SEQ ID NO: 98399 - protein, 9 aa, Homo sapiens
  misc_feature: Table A; Target 98399; HLA-B*54:01; TYR; ENSG00000077498; TAA
SPASFFSSW

SEQ ID NO: 98400 - protein, 9 aa, Homo sapiens
  misc_feature: Table A; Target 98400; HLA-B*55:01; TYR; ENSG00000077498; TAA
SPASFFSSW

SEQ ID NO: 98401 - protein, 9 aa, Homo sapiens
  misc_feature: Table A; Target 98401; HLA-B*56:01; TYR; ENSG00000077498; TAA
SPASFFSSW

SEQ ID NO: 98402 - protein, 9 aa, Homo sapiens
  misc_feature: Table A; Target 98402; HLA-B*57:01; TYR; ENSG00000077498; TAA
SPASFFSSW

SEQ ID NO: 98403 - protein, 9 aa, Homo sapiens
  misc_feature: Table A; Target 98403; HLA-C*02:02; TYR; ENSG00000077498; TAA
SPASFFSSW

SEQ ID NO: 98404 - protein, 9 aa, Homo sapiens
  misc_feature: Table A; Target 98404; HLA-C*07:02; TYR; ENSG00000077498; TAA
SPASFFSSW

SEQ ID NO: 98405 - protein, 9 aa, Homo sapiens
  misc_feature: Table A; Target 98405; HLA-B*35:03; TYR; ENSG00000077498; TAA
SPLTGIADA

SEQ ID NO: 98406 - protein, 9 aa, Homo sapiens
  misc_feature: Table A; Target 98406; HLA-B*54:01; TYR; ENSG00000077498; TAA
SPLTGIADA

SEQ ID NO: 98407 - protein, 9 aa, Homo sapiens
  misc_feature: Table A; Target 98407; HLA-B*55:01; TYR; ENSG00000077498; TAA
SPLTGIADA

SEQ ID NO: 98408 - protein, 9 aa, Homo sapiens
  misc_feature: Table A; Target 98408; HLA-B*56:01; TYR; ENSG00000077498; TAA
SPLTGIADA

SEQ ID NO: 98409 - protein, 10 aa, Homo sapiens
  misc_feature: Table A; Target 98409; HLA-B*27:02; TYR; ENSG00000077498; TAA
SPLTGIADAS

SEQ ID NO: 98410 - protein, 11 aa, Homo sapiens
  misc_feature: Table A; Target 98410; HLA-B*55:01; TYR; ENSG00000077498; TAA
SPLTGIADASQ

SEQ ID NO: 98411 - protein, 11 aa, Homo sapiens
  misc_feature: Table A; Target 98411; HLA-C*04:01; TYR; ENSG00000077498; TAA
SPLTGIADASQ

SEQ ID NO: 98412 - protein, 9 aa, Homo sapiens
  misc_feature: Table A; Target 98412; HLA-A*02:04; TYR; ENSG00000077498; TAA
SQSSMHNAL

SEQ ID NO: 98413 - protein, 9 aa, Homo sapiens
  misc_feature: Table A; Target 98413; HLA-A*24:02; TYR; ENSG00000077498; TAA
SQSSMHNAL

SEQ ID NO: 98414 - protein, 9 aa, Homo sapiens
  misc_feature: Table A; Target 98414; HLA-A*30:01; TYR; ENSG00000077498; TAA
SQSSMHNAL

SEQ ID NO: 98415 - protein, 9 aa, Homo sapiens
  misc_feature: Table A; Target 98415; HLA-A*32:01; TYR; ENSG00000077498; TAA
SQSSMHNAL

SEQ ID NO: 98416 - protein, 9 aa, Homo sapiens
  misc_feature: Table A; Target 98416; HLA-A*68:02; TYR; ENSG00000077498; TAA
SQSSMHNAL

SEQ ID NO: 98417 - protein, 9 aa, Homo sapiens
  misc_feature: Table A; Target 98417; HLA-B*07:02; TYR; ENSG00000077498; TAA
SQSSMHNAL

SEQ ID NO: 98418 - protein, 9 aa, Homo sapiens
  misc_feature: Table A; Target 98418; HLA-B*13:02; TYR; ENSG00000077498; TAA
SQSSMHNAL

SEQ ID NO: 98419 - protein, 9 aa, Homo sapiens
  misc_feature: Table A; Target 98419; HLA-B*15:01; TYR; ENSG00000077498; TAA
SQSSMHNAL

SEQ ID NO: 98420 - protein, 9 aa, Homo sapiens
  misc_feature: Table A; Target 98420; HLA-B*15:03; TYR; ENSG00000077498; TAA
SQSSMHNAL

SEQ ID NO: 98421 - protein, 9 aa, Homo sapiens
  misc_feature: Table A; Target 98421; HLA-B*27:05; TYR; ENSG00000077498; TAA
SQSSMHNAL

SEQ ID NO: 98422 - protein, 9 aa, Homo sapiens
  misc_feature: Table A; Target 98422; HLA-B*35:03; TYR; ENSG00000077498; TAA
SQSSMHNAL

SEQ ID NO: 98423 - protein, 9 aa, Homo sapiens
  misc_feature: Table A; Target 98423; HLA-B*37:01; TYR; ENSG00000077498; TAA
SQSSMHNAL

SEQ ID NO: 98424 - protein, 9 aa, Homo sapiens
  misc_feature: Table A; Target 98424; HLA-B*38:01; TYR; ENSG00000077498; TAA
SQSSMHNAL

SEQ ID NO: 98425 - protein, 9 aa, Homo sapiens
  misc_feature: Table A; Target 98425; HLA-B*39:01; TYR; ENSG00000077498; TAA
SQSSMHNAL

SEQ ID NO: 98426 - protein, 9 aa, Homo sapiens
  misc_feature: Table A; Target 98426; HLA-B*40:01; TYR; ENSG00000077498; TAA
SQSSMHNAL

SEQ ID NO: 98427 - protein, 9 aa, Homo sapiens
  misc_feature: Table A; Target 98427; HLA-B*40:02; TYR; ENSG00000077498; TAA
SQSSMHNAL

SEQ ID NO: 98428 - protein, 9 aa, Homo sapiens
  misc_feature: Table A; Target 98428; HLA-C*01:02; TYR; ENSG00000077498; TAA
SQSSMHNAL

SEQ ID NO: 98429 - protein, 9 aa, Homo sapiens
  misc_feature: Table A; Target 98429; HLA-C*02:02; TYR; ENSG00000077498; TAA
SQSSMHNAL

SEQ ID NO: 98430 - protein, 9 aa, Homo sapiens
  misc_feature: Table A; Target 98430; HLA-C*04:01; TYR; ENSG00000077498; TAA
SQSSMHNAL

SEQ ID NO: 98431 - protein, 9 aa, Homo sapiens
  misc_feature: Table A; Target 98431; HLA-C*06:02; TYR; ENSG00000077498; TAA
SQSSMHNAL

SEQ ID NO: 98432 - protein, 9 aa, Homo sapiens
  misc_feature: Table A; Target 98432; HLA-C*07:02; TYR; ENSG00000077498; TAA
SQSSMHNAL

SEQ ID NO: 98433 - protein, 9 aa, Homo sapiens
  misc_feature: Table A; Target 98433; HLA-C*07:04; TYR; ENSG00000077498; TAA
SQSSMHNAL

SEQ ID NO: 98434 - protein, 9 aa, Homo sapiens
  misc_feature: Table A; Target 98434; HLA-C*12:03; TYR; ENSG00000077498; TAA
SQSSMHNAL

SEQ ID NO: 98435 - protein, 9 aa, Homo sapiens
  misc_feature: Table A; Target 98435; HLA-C*14:02; TYR; ENSG00000077498; TAA
SQSSMHNAL

SEQ ID NO: 98436 - protein, 9 aa, Homo sapiens
  misc_feature: Table A; Target 98436; HLA-C*16:01; TYR; ENSG00000077498; TAA
SQSSMHNAL

SEQ ID NO: 98437 - protein, 9 aa, Homo sapiens
  misc_feature: Table A; Target 98437; HLA-C*16:02; TYR; ENSG00000077498; TAA
SQSSMHNAL

SEQ ID NO: 98438 - protein, 9 aa, Homo sapiens
  misc_feature: Table A; Target 98438; HLA-C*16:04; TYR; ENSG00000077498; TAA
SQSSMHNAL

SEQ ID NO: 98439 - protein, 11 aa, Homo sapiens
  misc_feature: Table A; Target 98439; HLA-B*13:02; TYR; ENSG00000077498; TAA
SQSSMHNALHI

SEQ ID NO: 98440 - protein, 11 aa, Homo sapiens
  misc_feature: Table A; Target 98440; HLA-B*13:02; TYR; ENSG00000077498; TAA
SQVQGSANDPI

SEQ ID NO: 98441 - protein, 11 aa, Homo sapiens
  misc_feature: Table A; Target 98441; HLA-B*27:05; TYR; ENSG00000077498; TAA
SQVQGSANDPI

SEQ ID NO: 98442 - protein, 11 aa, Homo sapiens
  misc_feature: Table A; Target 98442; HLA-B*38:01; TYR; ENSG00000077498; TAA
SQVQGSANDPI

SEQ ID NO: 98443 - protein, 11 aa, Homo sapiens
  misc_feature: Table A; Target 98443; HLA-B*39:01; TYR; ENSG00000077498; TAA
SQVQGSANDPI

SEQ ID NO: 98444 - protein, 11 aa, Homo sapiens
  misc_feature: Table A; Target 98444; HLA-C*06:02; TYR; ENSG00000077498; TAA
SQVQGSANDPI

SEQ ID NO: 98445 - protein, 9 aa, Homo sapiens
  misc_feature: Table A; Target 98445; HLA-B*27:05; TYR; ENSG00000077498; TAA
SRLEEYNSH

SEQ ID NO: 98446 - protein, 9 aa, Homo sapiens
  misc_feature: Table A; Target 98446; HLA-A*02:01; TYR; ENSG00000077498; TAA
SSADVEFCL

SEQ ID NO: 98447 - protein, 9 aa, Homo sapiens
  misc_feature: Table A; Target 98447; HLA-A*11:01; TYR; ENSG00000077498; TAA
SSADVEFCL

SEQ ID NO: 98448 - protein, 9 aa, Homo sapiens
  misc_feature: Table A; Target 98448; HLA-A*30:01; TYR; ENSG00000077498; TAA
SSADVEFCL

SEQ ID NO: 98449 - protein, 9 aa, Homo sapiens
  misc_feature: Table A; Target 98449; HLA-A*68:02; TYR; ENSG00000077498; TAA
SSADVEFCL

SEQ ID NO: 98450 - protein, 9 aa, Homo sapiens
  misc_feature: Table A; Target 98450; HLA-B*13:02; TYR; ENSG00000077498; TAA
SSADVEFCL

SEQ ID NO: 98451 - protein, 9 aa, Homo sapiens
  misc_feature: Table A; Target 98451; HLA-B*27:05; TYR; ENSG00000077498; TAA
SSADVEFCL

SEQ ID NO: 98452 - protein, 9 aa, Homo sapiens
  misc_feature: Table A; Target 98452; HLA-B*35:03; TYR; ENSG00000077498; TAA
SSADVEFCL

SEQ ID NO: 98453 - protein, 9 aa, Homo sapiens
  misc_feature: Table A; Target 98453; HLA-B*38:01; TYR; ENSG00000077498; TAA
SSADVEFCL

SEQ ID NO: 98454 - protein, 9 aa, Homo sapiens
  misc_feature: Table A; Target 98454; HLA-B*58:01; TYR; ENSG00000077498; TAA
SSADVEFCL

SEQ ID NO: 98455 - protein, 9 aa, Homo sapiens
  misc_feature: Table A; Target 98455; HLA-C*06:02; TYR; ENSG00000077498; TAA
SSADVEFCL

SEQ ID NO: 98456 - protein, 9 aa, Homo sapiens
  misc_feature: Table A; Target 98456; HLA-C*07:06; TYR; ENSG00000077498; TAA
SSADVEFCL

SEQ ID NO: 98457 - protein, 9 aa, Homo sapiens
  misc_feature: Table A; Target 98457; HLA-C*16:01; TYR; ENSG00000077498; TAA
SSADVEFCL

SEQ ID NO: 98458 - protein, 9 aa, Homo sapiens
  misc_feature: Table A; Target 98458; HLA-C*16:02; TYR; ENSG00000077498; TAA
SSADVEFCL

SEQ ID NO: 98459 - protein, 11 aa, Homo sapiens
  misc_feature: Table A; Target 98459; HLA-A*01:01; TYR; ENSG00000077498; TAA
SSDYVIPIGTY

SEQ ID NO: 98460 - protein, 11 aa, Homo sapiens
  misc_feature: Table A; Target 98460; HLA-A*30:02; TYR; ENSG00000077498; TAA
SSDYVIPIGTY

SEQ ID NO: 98461 - protein, 9 aa, Homo sapiens
  misc_feature: Table A; Target 98461; HLA-A*01:01; TYR; ENSG00000077498; TAA
SSKDLGYDY

SEQ ID NO: 98462 - protein, 9 aa, Homo sapiens
  misc_feature: Table A; Target 98462; HLA-A*25:01; TYR; ENSG00000077498; TAA
SSKDLGYDY

SEQ ID NO: 98463 - protein, 9 aa, Homo sapiens
  misc_feature: Table A; Target 98463; HLA-A*26:01; TYR; ENSG00000077498; TAA
SSKDLGYDY

SEQ ID NO: 98464 - protein, 9 aa, Homo sapiens
  misc_feature: Table A; Target 98464; HLA-A*29:02; TYR; ENSG00000077498; TAA
SSKDLGYDY

SEQ ID NO: 98465 - protein, 9 aa, Homo sapiens
  misc_feature: Table A; Target 98465; HLA-A*30:02; TYR; ENSG00000077498; TAA
SSKDLGYDY

SEQ ID NO: 98466 - protein, 9 aa, Homo sapiens
  misc_feature: Table A; Target 98466; HLA-A*32:01; TYR; ENSG00000077498; TAA
SSKDLGYDY

SEQ ID NO: 98467 - protein, 9 aa, Homo sapiens
  misc_feature: Table A; Target 98467; HLA-B*15:01; TYR; ENSG00000077498; TAA
SSKDLGYDY

SEQ ID NO: 98468 - protein, 9 aa, Homo sapiens
  misc_feature: Table A; Target 98468; HLA-B*15:03; TYR; ENSG00000077498; TAA
SSKDLGYDY

SEQ ID NO: 98469 - protein, 9 aa, Homo sapiens
  misc_feature: Table A; Target 98469; HLA-B*35:01; TYR; ENSG00000077498; TAA
SSKDLGYDY

SEQ ID NO: 98470 - protein, 9 aa, Homo sapiens
  misc_feature: Table A; Target 98470; HLA-B*46:01; TYR; ENSG00000077498; TAA
SSKDLGYDY

SEQ ID NO: 98471 - protein, 9 aa, Homo sapiens
  misc_feature: Table A; Target 98471; HLA-B*57:01; TYR; ENSG00000077498; TAA
SSKDLGYDY

SEQ ID NO: 98472 - protein, 9 aa, Homo sapiens
  misc_feature: Table A; Target 98472; HLA-B*58:01; TYR; ENSG00000077498; TAA
SSKDLGYDY

SEQ ID NO: 98473 - protein, 9 aa, Homo sapiens
  misc_feature: Table A; Target 98473; HLA-C*02:02; TYR; ENSG00000077498; TAA
SSKDLGYDY

SEQ ID NO: 98474 - protein, 9 aa, Homo sapiens
  misc_feature: Table A; Target 98474; HLA-C*12:03; TYR; ENSG00000077498; TAA
SSKDLGYDY

SEQ ID NO: 98475 - protein, 9 aa, Homo sapiens
  misc_feature: Table A; Target 98475; HLA-C*16:01; TYR; ENSG00000077498; TAA
SSKDLGYDY

SEQ ID NO: 98476 - protein, 9 aa, Homo sapiens
  misc_feature: Table A; Target 98476; HLA-C*16:02; TYR; ENSG00000077498; TAA
SSKDLGYDY

SEQ ID NO: 98477 - protein, 9 aa, Homo sapiens
  misc_feature: Table A; Target 98477; HLA-C*16:04; TYR; ENSG00000077498; TAA
SSKDLGYDY

SEQ ID NO: 98478 - protein, 11 aa, Homo sapiens
  misc_feature: Table A; Target 98478; HLA-A*30:02; TYR; ENSG00000077498; TAA
SSKDLGYDYSY

SEQ ID NO: 98479 - protein, 11 aa, Homo sapiens
  misc_feature: Table A; Target 98479; HLA-B*57:01; TYR; ENSG00000077498; TAA
SSKDLGYDYSY

SEQ ID NO: 98480 - protein, 9 aa, Homo sapiens
  misc_feature: Table A; Target 98480; HLA-B*13:02; TYR; ENSG00000077498; TAA
SSMHNALHI

SEQ ID NO: 98481 - protein, 9 aa, Homo sapiens
  misc_feature: Table A; Target 98481; HLA-B*58:01; TYR; ENSG00000077498; TAA
SSMHNALHI

SEQ ID NO: 98482 - protein, 10 aa, Homo sapiens
  misc_feature: Table A; Target 98482; HLA-A*01:01; TYR; ENSG00000077498; TAA
SSMHNALHIY

SEQ ID NO: 98483 - protein, 10 aa, Homo sapiens
  misc_feature: Table A; Target 98483; HLA-A*30:02; TYR; ENSG00000077498; TAA
SSMHNALHIY

SEQ ID NO: 98484 - protein, 10 aa, Homo sapiens
  misc_feature: Table A; Target 98484; HLA-B*57:01; TYR; ENSG00000077498; TAA
SSMHNALHIY

SEQ ID NO: 98485 - protein, 10 aa, Homo sapiens
  misc_feature: Table A; Target 98485; HLA-C*07:01; TYR; ENSG00000077498; TAA
SSMHNALHIY

SEQ ID NO: 98486 - protein, 9 aa, Homo sapiens
  misc_feature: Table A; Target 98486; HLA-A*31:01; TYR; ENSG00000077498; TAA
SSWQIVCSR

SEQ ID NO: 98487 - protein, 9 aa, Homo sapiens
  misc_feature: Table A; Target 98487; HLA-A*33:01; TYR; ENSG00000077498; TAA
SSWQIVCSR

SEQ ID NO: 98488 - protein, 9 aa, Homo sapiens
  misc_feature: Table A; Target 98488; HLA-A*33:03; TYR; ENSG00000077498; TAA
SSWQIVCSR

SEQ ID NO: 98489 - protein, 8 aa, Homo sapiens
  misc_feature: Table A; Target 98489; HLA-C*01:02; TYR; ENSG00000077498; TAA
STPMFNDI

SEQ ID NO: 98490 - protein, 10 aa, Homo sapiens
  misc_feature: Table A; Target 98490; HLA-A*68:02; TYR; ENSG00000077498; TAA
STPMFNDINI

SEQ ID NO: 98491 - protein, 11 aa, Homo sapiens
  misc_feature: Table A; Target 98491; HLA-A*01:01; TYR; ENSG00000077498; TAA
STPMFNDINIY

SEQ ID NO: 98492 - protein, 11 aa, Homo sapiens
  misc_feature: Table A; Target 98492; HLA-A*26:01; TYR; ENSG00000077498; TAA
STPMFNDINIY

SEQ ID NO: 98493 - protein, 8 aa, Homo sapiens
  misc_feature: Table A; Target 98493; HLA-C*14:02; TYR; ENSG00000077498; TAA
SWLLGAAM

SEQ ID NO: 98494 - protein, 9 aa, Homo sapiens
  misc_feature: Table A; Target 98494; HLA-A*31:01; TYR; ENSG00000077498; TAA
SWPSVFYNR

SEQ ID NO: 98495 - protein, 8 aa, Homo sapiens
  misc_feature: Table A; Target 98495; HLA-A*33:03; TYR; ENSG00000077498; TAA
SYLEQASR

SEQ ID NO: 98496 - protein, 9 aa, Homo sapiens
  misc_feature: Table A; Target 98496; HLA-A*23:01; TYR; ENSG00000077498; TAA
SYLEQASRI

SEQ ID NO: 98497 - protein, 9 aa, Homo sapiens
  misc_feature: Table A; Target 98497; HLA-A*24:02; TYR; ENSG00000077498; TAA
SYLEQASRI

SEQ ID NO: 98498 - protein, 9 aa, Homo sapiens
  misc_feature: Table A; Target 98498; HLA-C*04:01; TYR; ENSG00000077498; TAA
SYLEQASRI

SEQ ID NO: 98499 - protein, 9 aa, Homo sapiens
  misc_feature: Table A; Target 98499; HLA-C*14:02; TYR; ENSG00000077498; TAA
SYLEQASRI

SEQ ID NO: 98500 - protein, 10 aa, Homo sapiens
  misc_feature: Table A; Target 98500; HLA-A*24:02; TYR; ENSG00000077498; TAA
SYLEQASRIW

SEQ ID NO: 98501 - protein, 11 aa, Homo sapiens
  misc_feature: Table A; Target 98501; HLA-A*23:01; TYR; ENSG00000077498; TAA
SYLQDSDPDSF

SEQ ID NO: 98502 - protein, 11 aa, Homo sapiens
  misc_feature: Table A; Target 98502; HLA-A*24:02; TYR; ENSG00000077498; TAA
SYLQDSDPDSF

SEQ ID NO: 98503 - protein, 11 aa, Homo sapiens
  misc_feature: Table A; Target 98503; HLA-B*38:01; TYR; ENSG00000077498; TAA
SYLQDSDPDSF

SEQ ID NO: 98504 - protein, 11 aa, Homo sapiens
  misc_feature: Table A; Target 98504; HLA-B*39:01; TYR; ENSG00000077498; TAA
SYLQDSDPDSF

SEQ ID NO: 98505 - protein, 11 aa, Homo sapiens
  misc_feature: Table A; Target 98505; HLA-C*04:01; TYR; ENSG00000077498; TAA
SYLQDSDPDSF

SEQ ID NO: 98506 - protein, 11 aa, Homo sapiens
  misc_feature: Table A; Target 98506; HLA-C*14:02; TYR; ENSG00000077498; TAA
SYLQDSDPDSF

SEQ ID NO: 98507 - protein, 9 aa, Homo sapiens
  misc_feature: Table A; Target 98507; HLA-A*24:02; TYR; ENSG00000077498; TAA
SYMVPFIPL

SEQ ID NO: 98508 - protein, 9 aa, Homo sapiens
  misc_feature: Table A; Target 98508; HLA-A*31:01; TYR; ENSG00000077498; TAA
SYMVPFIPL

SEQ ID NO: 98509 - protein, 10 aa, Homo sapiens
  misc_feature: Table A; Target 98509; HLA-A*24:02; TYR; ENSG00000077498; TAA
SYMVPFIPLY

SEQ ID NO: 98510 - protein, 10 aa, Homo sapiens
  misc_feature: Table A; Target 98510; HLA-A*29:02; TYR; ENSG00000077498; TAA
SYMVPFIPLY

SEQ ID NO: 98511 - protein, 10 aa, Homo sapiens
  misc_feature: Table A; Target 98511; HLA-A*30:02; TYR; ENSG00000077498; TAA
SYMVPFIPLY

SEQ ID NO: 98512 - protein, 11 aa, Homo sapiens
  misc_feature: Table A; Target 98512; HLA-A*31:01; TYR; ENSG00000077498; TAA
SYMVPFIPLYR

SEQ ID NO: 98513 - protein, 8 aa, Homo sapiens
  misc_feature: Table A; Target 98513; HLA-B*51:01; TYR; ENSG00000077498; TAA
TALLAGLV

SEQ ID NO: 98514 - protein, 8 aa, Homo sapiens
  misc_feature: Table A; Target 98514; HLA-C*06:02; TYR; ENSG00000077498; TAA
TALLAGLV

SEQ ID NO: 98515 - protein, 10 aa, Homo sapiens
  misc_feature: Table A; Target 98515; HLA-A*23:01; TYR; ENSG00000077498; TAA
TALLAGLVSL

SEQ ID NO: 98516 - protein, 10 aa, Homo sapiens
  misc_feature: Table A; Target 98516; HLA-B*07:02; TYR; ENSG00000077498; TAA
TALLAGLVSL

SEQ ID NO: 98517 - protein, 10 aa, Homo sapiens
  misc_feature: Table A; Target 98517; HLA-B*08:01; TYR; ENSG00000077498; TAA
TALLAGLVSL

SEQ ID NO: 98518 - protein, 10 aa, Homo sapiens
  misc_feature: Table A; Target 98518; HLA-B*35:03; TYR; ENSG00000077498; TAA
TALLAGLVSL

SEQ ID NO: 98519 - protein, 10 aa, Homo sapiens
  misc_feature: Table A; Target 98519; HLA-B*40:02; TYR; ENSG00000077498; TAA
TALLAGLVSL

SEQ ID NO: 98520 - protein, 10 aa, Homo sapiens
  misc_feature: Table A; Target 98520; HLA-C*01:02; TYR; ENSG00000077498; TAA
TALLAGLVSL

SEQ ID NO: 98521 - protein, 10 aa, Homo sapiens
  misc_feature: Table A; Target 98521; HLA-C*03:03; TYR; ENSG00000077498; TAA
TALLAGLVSL

SEQ ID NO: 98522 - protein, 10 aa, Homo sapiens
  misc_feature: Table A; Target 98522; HLA-C*03:04; TYR; ENSG00000077498; TAA
TALLAGLVSL

SEQ ID NO: 98523 - protein, 10 aa, Homo sapiens
  misc_feature: Table A; Target 98523; HLA-C*05:01; TYR; ENSG00000077498; TAA
TALLAGLVSL

SEQ ID NO: 98524 - protein, 8 aa, Homo sapiens
  misc_feature: Table A; Target 98524; HLA-C*05:01; TYR; ENSG00000077498; TAA
TGDENFTI

SEQ ID NO: 98525 - protein, 10 aa, Homo sapiens
  misc_feature: Table A; Target 98525; HLA-A*01:01; TYR; ENSG00000077498; TAA
TGDENFTIPY

SEQ ID NO: 98526 - protein, 11 aa, Homo sapiens
  misc_feature: Table A; Target 98526; HLA-C*03:03; TYR; ENSG00000077498; TAA
TGIADASQSSM

SEQ ID NO: 98527 - protein, 11 aa, Homo sapiens
  misc_feature: Table A; Target 98527; HLA-C*03:04; TYR; ENSG00000077498; TAA
TGIADASQSSM

SEQ ID NO: 98528 - protein, 11 aa, Homo sapiens
  misc_feature: Table A; Target 98528; HLA-C*04:01; TYR; ENSG00000077498; TAA
TGIADASQSSM

SEQ ID NO: 98529 - protein, 9 aa, Homo sapiens
  misc_feature: Table A; Target 98529; HLA-A*25:01; TYR; ENSG00000077498; TAA
TGVDDRESW

SEQ ID NO: 98530 - protein, 9 aa, Homo sapiens
  misc_feature: Table A; Target 98530; HLA-A*32:01; TYR; ENSG00000077498; TAA
TGVDDRESW

SEQ ID NO: 98531 - protein, 9 aa, Homo sapiens
  misc_feature: Table A; Target 98531; HLA-B*57:01; TYR; ENSG00000077498; TAA
TGVDDRESW

SEQ ID NO: 98532 - protein, 9 aa, Homo sapiens
  misc_feature: Table A; Target 98532; HLA-B*58:01; TYR; ENSG00000077498; TAA
TGVDDRESW

SEQ ID NO: 98533 - protein, 9 aa, Homo sapiens
  misc_feature: Table A; Target 98533; HLA-C*16:01; TYR; ENSG00000077498; TAA
TGVDDRESW

SEQ ID NO: 98534 - protein, 8 aa, Homo sapiens
  misc_feature: Table A; Target 98534; HLA-B*38:01; TYR; ENSG00000077498; TAA
TISSDYVI

SEQ ID NO: 98535 - protein, 11 aa, Homo sapiens
  misc_feature: Table A; Target 98535; HLA-A*30:02; TYR; ENSG00000077498; TAA
TLAKHTISSDY

SEQ ID NO: 98536 - protein, 11 aa, Homo sapiens
  misc_feature: Table A; Target 98536; HLA-B*15:01; TYR; ENSG00000077498; TAA
TLAKHTISSDY

SEQ ID NO: 98537 - protein, 9 aa, Homo sapiens
  misc_feature: Table A; Target 98537; HLA-C*01:02; TYR; ENSG00000077498; TAA
TLEGFASPL

SEQ ID NO: 98538 - protein, 9 aa, Homo sapiens
  misc_feature: Table A; Target 98538; HLA-C*06:02; TYR; ENSG00000077498; TAA
TLEGFASPL

SEQ ID NO: 98539 - protein, 9 aa, Homo sapiens
  misc_feature: Table A; Target 98539; HLA-C*12:03; TYR; ENSG00000077498; TAA
TLEGFASPL

SEQ ID NO: 98540 - protein, 8 aa, Homo sapiens
  misc_feature: Table A; Target 98540; HLA-A*68:01; TYR; ENSG00000077498; TAA
TPEGPLRR

SEQ ID NO: 98541 - protein, 9 aa, Homo sapiens
  misc_feature: Table A; Target 98541; HLA-B*35:03; TYR; ENSG00000077498; TAA
TPMFNDINI

SEQ ID NO: 98542 - protein, 9 aa, Homo sapiens
  misc_feature: Table A; Target 98542; HLA-B*51:01; TYR; ENSG00000077498; TAA
TPMFNDINI

SEQ ID NO: 98543 - protein, 9 aa, Homo sapiens
  misc_feature: Table A; Target 98543; HLA-B*54:01; TYR; ENSG00000077498; TAA
TPMFNDINI

SEQ ID NO: 98544 - protein, 9 aa, Homo sapiens
  misc_feature: Table A; Target 98544; HLA-B*56:01; TYR; ENSG00000077498; TAA
TPMFNDINI

SEQ ID NO: 98545 - protein, 9 aa, Homo sapiens
  misc_feature: Table A; Target 98545; HLA-C*07:02; TYR; ENSG00000077498; TAA
TPMFNDINI

SEQ ID NO: 98546 - protein, 10 aa, Homo sapiens
  misc_feature: Table A; Target 98546; HLA-B*35:01; TYR; ENSG00000077498; TAA
TPMFNDINIY

SEQ ID NO: 98547 - protein, 10 aa, Homo sapiens
  misc_feature: Table A; Target 98547; HLA-B*55:01; TYR; ENSG00000077498; TAA
TPMFNDINIY

SEQ ID NO: 98548 - protein, 10 aa, Homo sapiens
  misc_feature: Table A; Target 98548; HLA-C*03:03; TYR; ENSG00000077498; TAA
TPMFNDINIY

SEQ ID NO: 98549 - protein, 8 aa, Homo sapiens
  misc_feature: Table A; Target 98549; HLA-B*07:02; TYR; ENSG00000077498; TAA
TPRLPSSA

SEQ ID NO: 98550 - protein, 8 aa, Homo sapiens
  misc_feature: Table A; Target 98550; HLA-B*54:01; TYR; ENSG00000077498; TAA
TPRLPSSA

SEQ ID NO: 98551 - protein, 8 aa, Homo sapiens
  misc_feature: Table A; Target 98551; HLA-B*55:01; TYR; ENSG00000077498; TAA
TPRLPSSA

SEQ ID NO: 98552 - protein, 8 aa, Homo sapiens
  misc_feature: Table A; Target 98552; HLA-B*56:01; TYR; ENSG00000077498; TAA
TPRLPSSA

SEQ ID NO: 98553 - protein, 10 aa, Homo sapiens
  misc_feature: Table A; Target 98553; HLA-B*07:02; TYR; ENSG00000077498; TAA
TPRLPSSADV

SEQ ID NO: 98554 - protein, 10 aa, Homo sapiens
  misc_feature: Table A; Target 98554; HLA-B*56:01; TYR; ENSG00000077498; TAA
TPRLPSSADV

SEQ ID NO: 98555 - protein, 10 aa, Homo sapiens
  misc_feature: Table A; Target 98555; HLA-C*07:02; TYR; ENSG00000077498; TAA
TPRLPSSADV

SEQ ID NO: 98556 - protein, 8 aa, Homo sapiens
  misc_feature: Table A; Target 98556; HLA-B*13:02; TYR; ENSG00000077498; TAA
TQYESGSM

SEQ ID NO: 98557 - protein, 8 aa, Homo sapiens
  misc_feature: Table A; Target 98557; HLA-B*15:01; TYR; ENSG00000077498; TAA
TQYESGSM

SEQ ID NO: 98558 - protein, 8 aa, Homo sapiens
  misc_feature: Table A; Target 98558; HLA-B*15:03; TYR; ENSG00000077498; TAA
TQYESGSM

SEQ ID NO: 98559 - protein, 8 aa, Homo sapiens
  misc_feature: Table A; Target 98559; HLA-B*27:05; TYR; ENSG00000077498; TAA
TQYESGSM

SEQ ID NO: 98560 - protein, 8 aa, Homo sapiens
  misc_feature: Table A; Target 98560; HLA-B*39:01; TYR; ENSG00000077498; TAA
TQYESGSM

SEQ ID NO: 98561 - protein, 8 aa, Homo sapiens
  misc_feature: Table A; Target 98561; HLA-B*40:02; TYR; ENSG00000077498; TAA
TQYESGSM

SEQ ID NO: 98562 - protein, 8 aa, Homo sapiens
  misc_feature: Table A; Target 98562; HLA-B*46:01; TYR; ENSG00000077498; TAA
TQYESGSM

SEQ ID NO: 98563 - protein, 8 aa, Homo sapiens
  misc_feature: Table A; Target 98563; HLA-C*03:03; TYR; ENSG00000077498; TAA
TQYESGSM

SEQ ID NO: 98564 - protein, 8 aa, Homo sapiens
  misc_feature: Table A; Target 98564; HLA-C*03:04; TYR; ENSG00000077498; TAA
TQYESGSM

SEQ ID NO: 98565 - protein, 8 aa, Homo sapiens
  misc_feature: Table A; Target 98565; HLA-C*04:01; TYR; ENSG00000077498; TAA
TQYESGSM

SEQ ID NO: 98566 - protein, 8 aa, Homo sapiens
  misc_feature: Table A; Target 98566; HLA-C*05:01; TYR; ENSG00000077498; TAA
TQYESGSM

SEQ ID NO: 98567 - protein, 8 aa, Homo sapiens
  misc_feature: Table A; Target 98567; HLA-C*06:02; TYR; ENSG00000077498; TAA
TQYESGSM

SEQ ID NO: 98568 - protein, 8 aa, Homo sapiens
  misc_feature: Table A; Target 98568; HLA-C*12:03; TYR; ENSG00000077498; TAA
TQYESGSM

SEQ ID NO: 98569 - protein, 8 aa, Homo sapiens
  misc_feature: Table A; Target 98569; HLA-C*14:02; TYR; ENSG00000077498; TAA
TQYESGSM

SEQ ID NO: 98570 - protein, 10 aa, Homo sapiens
  misc_feature: Table A; Target 98570; HLA-A*03:01; TYR; ENSG00000077498; TAA
TQYESGSMDK

SEQ ID NO: 98571 - protein, 10 aa, Homo sapiens
  misc_feature: Table A; Target 98571; HLA-A*03:02; TYR; ENSG00000077498; TAA
TQYESGSMDK

SEQ ID NO: 98572 - protein, 10 aa, Homo sapiens
  misc_feature: Table A; Target 98572; HLA-A*11:01; TYR; ENSG00000077498; TAA
TQYESGSMDK

SEQ ID NO: 98573 - protein, 10 aa, Homo sapiens
  misc_feature: Table A; Target 98573; HLA-A*68:01; TYR; ENSG00000077498; TAA
TQYESGSMDK

SEQ ID NO: 98574 - protein, 10 aa, Homo sapiens
  misc_feature: Table A; Target 98574; HLA-B*13:02; TYR; ENSG00000077498; TAA
TQYESGSMDK

SEQ ID NO: 98575 - protein, 10 aa, Homo sapiens
  misc_feature: Table A; Target 98575; HLA-B*27:02; TYR; ENSG00000077498; TAA
TQYESGSMDK

SEQ ID NO: 98576 - protein, 10 aa, Homo sapiens
  misc_feature: Table A; Target 98576; HLA-B*27:05; TYR; ENSG00000077498; TAA
TQYESGSMDK

SEQ ID NO: 98577 - protein, 10 aa, Homo sapiens
  misc_feature: Table A; Target 98577; HLA-B*39:01; TYR; ENSG00000077498; TAA
TQYESGSMDK

SEQ ID NO: 98578 - protein, 10 aa, Homo sapiens
  misc_feature: Table A; Target 98578; HLA-C*03:03; TYR; ENSG00000077498; TAA
TQYESGSMDK

SEQ ID NO: 98579 - protein, 10 aa, Homo sapiens
  misc_feature: Table A; Target 98579; HLA-C*04:01; TYR; ENSG00000077498; TAA
TQYESGSMDK

SEQ ID NO: 98580 - protein, 10 aa, Homo sapiens
  misc_feature: Table A; Target 98580; HLA-C*06:02; TYR; ENSG00000077498; TAA
TQYESGSMDK

SEQ ID NO: 98581 - protein, 10 aa, Homo sapiens
  misc_feature: Table A; Target 98581; HLA-C*07:01; TYR; ENSG00000077498; TAA
TQYESGSMDK

SEQ ID NO: 98582 - protein, 10 aa, Homo sapiens
  misc_feature: Table A; Target 98582; HLA-C*07:04; TYR; ENSG00000077498; TAA
TQYESGSMDK

SEQ ID NO: 98583 - protein, 10 aa, Homo sapiens
  misc_feature: Table A; Target 98583; HLA-C*07:06; TYR; ENSG00000077498; TAA
TQYESGSMDK

SEQ ID NO: 98584 - protein, 11 aa, Homo sapiens
  misc_feature: Table A; Target 98584; HLA-B*27:05; TYR; ENSG00000077498; TAA
TQYESGSMDKA

SEQ ID NO: 98585 - protein, 11 aa, Homo sapiens
  misc_feature: Table A; Target 98585; HLA-B*38:01; TYR; ENSG00000077498; TAA
TQYESGSMDKA

SEQ ID NO: 98586 - protein, 11 aa, Homo sapiens
  misc_feature: Table A; Target 98586; HLA-B*39:01; TYR; ENSG00000077498; TAA
TQYESGSMDKA

SEQ ID NO: 98587 - protein, 11 aa, Homo sapiens
  misc_feature: Table A; Target 98587; HLA-C*06:02; TYR; ENSG00000077498; TAA
TQYESGSMDKA

SEQ ID NO: 98588 - protein, 8 aa, Homo sapiens
  misc_feature: Table A; Target 98588; HLA-A*31:01; TYR; ENSG00000077498; TAA
TSAGHFPR

SEQ ID NO: 98589 - protein, 8 aa, Homo sapiens
  misc_feature: Table A; Target 98589; HLA-A*33:01; TYR; ENSG00000077498; TAA
TSAGHFPR

SEQ ID NO: 98590 - protein, 8 aa, Homo sapiens
  misc_feature: Table A; Target 98590; HLA-A*33:03; TYR; ENSG00000077498; TAA
TSAGHFPR

SEQ ID NO: 98591 - protein, 8 aa, Homo sapiens
  misc_feature: Table A; Target 98591; HLA-A*68:01; TYR; ENSG00000077498; TAA
TSAGHFPR

SEQ ID NO: 98592 - protein, 9 aa, Homo sapiens
  misc_feature: Table A; Target 98592; HLA-B*54:01; TYR; ENSG00000077498; TAA
TSAGHFPRA

SEQ ID NO: 98593 - protein, 9 aa, Homo sapiens
  misc_feature: Table A; Target 98593; HLA-C*06:02; TYR; ENSG00000077498; TAA
TSAGHFPRA

SEQ ID NO: 98594 - protein, 9 aa, Homo sapiens
  misc_feature: Table A; Target 98594; HLA-C*12:03; TYR; ENSG00000077498; TAA
TSAGHFPRA

SEQ ID NO: 98595 - protein, 9 aa, Homo sapiens
  misc_feature: Table A; Target 98595; HLA-C*16:01; TYR; ENSG00000077498; TAA
TSAGHFPRA

SEQ ID NO: 98596 - protein, 8 aa, Homo sapiens
  misc_feature: Table A; Target 98596; HLA-B*18:01; TYR; ENSG00000077498; TAA
VDSIFEQW

SEQ ID NO: 98597 - protein, 8 aa, Homo sapiens
  misc_feature: Table A; Target 98597; HLA-B*37:01; TYR; ENSG00000077498; TAA
VDSIFEQW

SEQ ID NO: 98598 - protein, 8 aa, Homo sapiens
  misc_feature: Table A; Target 98598; HLA-B*44:02; TYR; ENSG00000077498; TAA
VDSIFEQW

SEQ ID NO: 98599 - protein, 8 aa, Homo sapiens
  misc_feature: Table A; Target 98599; HLA-B*44:03; TYR; ENSG00000077498; TAA
VDSIFEQW

SEQ ID NO: 98600 - protein, 10 aa, Homo sapiens
  misc_feature: Table A; Target 98600; HLA-B*18:01; TYR; ENSG00000077498; TAA
VEFCLSLTQY

SEQ ID NO: 98601 - protein, 10 aa, Homo sapiens
  misc_feature: Table A; Target 98601; HLA-B*44:02; TYR; ENSG00000077498; TAA
VEFCLSLTQY

SEQ ID NO: 98602 - protein, 10 aa, Homo sapiens
  misc_feature: Table A; Target 98602; HLA-B*44:03; TYR; ENSG00000077498; TAA
VEFCLSLTQY

SEQ ID NO: 98603 - protein, 10 aa, Homo sapiens
  misc_feature: Table A; Target 98603; HLA-C*16:04; TYR; ENSG00000077498; TAA
VEFCLSLTQY

SEQ ID NO: 98604 - protein, 8 aa, Homo sapiens
  misc_feature: Table A; Target 98604; HLA-B*08:01; TYR; ENSG00000077498; TAA
VGAVLTAL

SEQ ID NO: 98605 - protein, 8 aa, Homo sapiens
  misc_feature: Table A; Target 98605; HLA-B*15:01; TYR; ENSG00000077498; TAA
VGAVLTAL

SEQ ID NO: 98606 - protein, 8 aa, Homo sapiens
  misc_feature: Table A; Target 98606; HLA-B*15:03; TYR; ENSG00000077498; TAA
VGAVLTAL

SEQ ID NO: 98607 - protein, 8 aa, Homo sapiens
  misc_feature: Table A; Target 98607; HLA-B*40:01; TYR; ENSG00000077498; TAA
VGAVLTAL

SEQ ID NO: 98608 - protein, 8 aa, Homo sapiens
  misc_feature: Table A; Target 98608; HLA-B*40:02; TYR; ENSG00000077498; TAA
VGAVLTAL

SEQ ID NO: 98609 - protein, 8 aa, Homo sapiens
  misc_feature: Table A; Target 98609; HLA-B*46:01; TYR; ENSG00000077498; TAA
VGAVLTAL

SEQ ID NO: 98610 - protein, 8 aa, Homo sapiens
  misc_feature: Table A; Target 98610; HLA-B*51:01; TYR; ENSG00000077498; TAA
VGAVLTAL

SEQ ID NO: 98611 - protein, 8 aa, Homo sapiens
  misc_feature: Table A; Target 98611; HLA-C*01:02; TYR; ENSG00000077498; TAA
VGAVLTAL

SEQ ID NO: 98612 - protein, 8 aa, Homo sapiens
  misc_feature: Table A; Target 98612; HLA-C*03:03; TYR; ENSG00000077498; TAA
VGAVLTAL

SEQ ID NO: 98613 - protein, 8 aa, Homo sapiens
  misc_feature: Table A; Target 98613; HLA-C*03:04; TYR; ENSG00000077498; TAA
VGAVLTAL

SEQ ID NO: 98614 - protein, 8 aa, Homo sapiens
  misc_feature: Table A; Target 98614; HLA-C*14:02; TYR; ENSG00000077498; TAA
VGAVLTAL

SEQ ID NO: 98615 - protein, 8 aa, Homo sapiens
  misc_feature: Table A; Target 98615; HLA-C*16:01; TYR; ENSG00000077498; TAA
VGAVLTAL

SEQ ID NO: 98616 - protein, 9 aa, Homo sapiens
  misc_feature: Table A; Target 98616; HLA-A*23:01; TYR; ENSG00000077498; TAA
VGAVLTALL

SEQ ID NO: 98617 - protein, 9 aa, Homo sapiens
  misc_feature: Table A; Target 98617; HLA-A*24:02; TYR; ENSG00000077498; TAA
VGAVLTALL

SEQ ID NO: 98618 - protein, 9 aa, Homo sapiens
  misc_feature: Table A; Target 98618; HLA-B*46:01; TYR; ENSG00000077498; TAA
VGAVLTALL

SEQ ID NO: 98619 - protein, 9 aa, Homo sapiens
  misc_feature: Table A; Target 98619; HLA-C*01:02; TYR; ENSG00000077498; TAA
VGAVLTALL

SEQ ID NO: 98620 - protein, 9 aa, Homo sapiens
  misc_feature: Table A; Target 98620; HLA-C*04:01; TYR; ENSG00000077498; TAA
VGAVLTALL

SEQ ID NO: 98621 - protein, 9 aa, Homo sapiens
  misc_feature: Table A; Target 98621; HLA-C*06:02; TYR; ENSG00000077498; TAA
VGAVLTALL

SEQ ID NO: 98622 - protein, 9 aa, Homo sapiens
  misc_feature: Table A; Target 98622; HLA-C*07:01; TYR; ENSG00000077498; TAA
VGAVLTALL

SEQ ID NO: 98623 - protein, 9 aa, Homo sapiens
  misc_feature: Table A; Target 98623; HLA-C*07:02; TYR; ENSG00000077498; TAA
VGAVLTALL

SEQ ID NO: 98624 - protein, 9 aa, Homo sapiens
  misc_feature: Table A; Target 98624; HLA-C*07:04; TYR; ENSG00000077498; TAA
VGAVLTALL

SEQ ID NO: 98625 - protein, 9 aa, Homo sapiens
  misc_feature: Table A; Target 98625; HLA-C*14:02; TYR; ENSG00000077498; TAA
VGAVLTALL

SEQ ID NO: 98626 - protein, 10 aa, Homo sapiens
  misc_feature: Table A; Target 98626; HLA-A*26:01; TYR; ENSG00000077498; TAA
VIPIGTYGQM

SEQ ID NO: 98627 - protein, 10 aa, Homo sapiens
  misc_feature: Table A; Target 98627; HLA-C*01:02; TYR; ENSG00000077498; TAA
VIPIGTYGQM

SEQ ID NO: 98628 - protein, 10 aa, Homo sapiens
  misc_feature: Table A; Target 98628; HLA-C*04:01; TYR; ENSG00000077498; TAA
VIPIGTYGQM

SEQ ID NO: 98629 - protein, 11 aa, Homo sapiens
  misc_feature: Table A; Target 98629; HLA-A*03:02; TYR; ENSG00000077498; TAA
VIPIGTYGQMK

SEQ ID NO: 98630 - protein, 11 aa, Homo sapiens
  misc_feature: Table A; Target 98630; HLA-A*11:01; TYR; ENSG00000077498; TAA
VIPIGTYGQMK

SEQ ID NO: 98631 - protein, 11 aa, Homo sapiens
  misc_feature: Table A; Target 98631; HLA-C*07:02; TYR; ENSG00000077498; TAA
VIPIGTYGQMK

SEQ ID NO: 98632 - protein, 9 aa, Homo sapiens
  misc_feature: Table A; Target 98632; HLA-A*02:01; TYR; ENSG00000077498; TAA
VLTALLAGL

SEQ ID NO: 98633 - protein, 9 aa, Homo sapiens
  misc_feature: Table A; Target 98633; HLA-A*02:03; TYR; ENSG00000077498; TAA
VLTALLAGL

SEQ ID NO: 98634 - protein, 9 aa, Homo sapiens
  misc_feature: Table A; Target 98634; HLA-A*02:04; TYR; ENSG00000077498; TAA
VLTALLAGL

SEQ ID NO: 98635 - protein, 9 aa, Homo sapiens
  misc_feature: Table A; Target 98635; HLA-A*02:07; TYR; ENSG00000077498; TAA
VLTALLAGL

SEQ ID NO: 98636 - protein, 9 aa, Homo sapiens
  misc_feature: Table A; Target 98636; HLA-B*55:01; TYR; ENSG00000077498; TAA
VLTALLAGL

SEQ ID NO: 98637 - protein, 10 aa, Homo sapiens
  misc_feature: Table A; Target 98637; HLA-A*02:03; TYR; ENSG00000077498; TAA
VLTALLAGLV

SEQ ID NO: 98638 - protein, 8 aa, Homo sapiens
  misc_feature: Table A; Target 98638; HLA-B*51:01; TYR; ENSG00000077498; TAA
VPFIPLYR

SEQ ID NO: 98639 - protein, 8 aa, Homo sapiens
  misc_feature: Table A; Target 98639; HLA-B*54:01; TYR; ENSG00000077498; TAA
VPFIPLYR

SEQ ID NO: 98640 - protein, 10 aa, Homo sapiens
  misc_feature: Table A; Target 98640; HLA-B*38:01; TYR; ENSG00000077498; TAA
VQGSANDPIF

SEQ ID NO: 98641 - protein, 9 aa, Homo sapiens
  misc_feature: Table A; Target 98641; HLA-A*03:01; TYR; ENSG00000077498; TAA
VSSKNLMEK

SEQ ID NO: 98642 - protein, 9 aa, Homo sapiens
  misc_feature: Table A; Target 98642; HLA-A*03:02; TYR; ENSG00000077498; TAA
VSSKNLMEK

SEQ ID NO: 98643 - protein, 9 aa, Homo sapiens
  misc_feature: Table A; Target 98643; HLA-A*11:01; TYR; ENSG00000077498; TAA
VSSKNLMEK

SEQ ID NO: 98644 - protein, 9 aa, Homo sapiens
  misc_feature: Table A; Target 98644; HLA-A*24:02; TYR; ENSG00000077498; TAA
VWMHYYVSM

SEQ ID NO: 98645 - protein, 8 aa, Homo sapiens
  misc_feature: Table A; Target 98645; HLA-C*01:02; TYR; ENSG00000077498; TAA
VYPEANAP

SEQ ID NO: 98646 - protein, 8 aa, Homo sapiens
  misc_feature: Table A; Target 98646; HLA-C*14:02; TYR; ENSG00000077498; TAA
VYPEANAP

SEQ ID NO: 98647 - protein, 9 aa, Homo sapiens
  misc_feature: Table A; Target 98647; HLA-A*23:01; TYR; ENSG00000077498; TAA
VYPEANAPI

SEQ ID NO: 98648 - protein, 9 aa, Homo sapiens
  misc_feature: Table A; Target 98648; HLA-A*24:02; TYR; ENSG00000077498; TAA
VYPEANAPI

SEQ ID NO: 98649 - protein, 9 aa, Homo sapiens
  misc_feature: Table A; Target 98649; HLA-C*01:02; TYR; ENSG00000077498; TAA
VYPEANAPI

SEQ ID NO: 98650 - protein, 9 aa, Homo sapiens
  misc_feature: Table A; Target 98650; HLA-C*04:01; TYR; ENSG00000077498; TAA
VYPEANAPI

SEQ ID NO: 98651 - protein, 9 aa, Homo sapiens
  misc_feature: Table A; Target 98651; HLA-C*07:02; TYR; ENSG00000077498; TAA
VYPEANAPI

SEQ ID NO: 98652 - protein, 9 aa, Homo sapiens
  misc_feature: Table A; Target 98652; HLA-C*14:02; TYR; ENSG00000077498; TAA
VYPEANAPI

SEQ ID NO: 98653 - protein, 10 aa, Homo sapiens
  misc_feature: Table A; Target 98653; HLA-A*24:02; TYR; ENSG00000077498; TAA
VYPEANAPIG

SEQ ID NO: 98654 - protein, 11 aa, Homo sapiens
  misc_feature: Table A; Target 98654; HLA-C*01:02; TYR; ENSG00000077498; TAA
VYPEANAPIGH

SEQ ID NO: 98655 - protein, 8 aa, Homo sapiens
  misc_feature: Table A; Target 98655; HLA-A*30:01; TYR; ENSG00000077498; TAA
WEQEIQKL

SEQ ID NO: 98656 - protein, 8 aa, Homo sapiens
  misc_feature: Table A; Target 98656; HLA-B*18:01; TYR; ENSG00000077498; TAA
WEQEIQKL

SEQ ID NO: 98657 - protein, 8 aa, Homo sapiens
  misc_feature: Table A; Target 98657; HLA-B*37:01; TYR; ENSG00000077498; TAA
WEQEIQKL

SEQ ID NO: 98658 - protein, 8 aa, Homo sapiens
  misc_feature: Table A; Target 98658; HLA-B*40:01; TYR; ENSG00000077498; TAA
WEQEIQKL

SEQ ID NO: 98659 - protein, 8 aa, Homo sapiens
  misc_feature: Table A; Target 98659; HLA-B*40:02; TYR; ENSG00000077498; TAA
WEQEIQKL

SEQ ID NO: 98660 - protein, 8 aa, Homo sapiens
  misc_feature: Table A; Target 98660; HLA-B*44:02; TYR; ENSG00000077498; TAA
WEQEIQKL

SEQ ID NO: 98661 - protein, 8 aa, Homo sapiens
  misc_feature: Table A; Target 98661; HLA-B*44:03; TYR; ENSG00000077498; TAA
WEQEIQKL

SEQ ID NO: 98662 - protein, 8 aa, Homo sapiens
  misc_feature: Table A; Target 98662; HLA-B*49:01; TYR; ENSG00000077498; TAA
WEQEIQKL

SEQ ID NO: 98663 - protein, 8 aa, Homo sapiens
  misc_feature: Table A; Target 98663; HLA-C*12:03; TYR; ENSG00000077498; TAA
WEQEIQKL

SEQ ID NO: 98664 - protein, 9 aa, Homo sapiens
  misc_feature: Table A; Target 98664; HLA-A*29:02; TYR; ENSG00000077498; TAA
YDLFVWMHY

SEQ ID NO: 98665 - protein, 8 aa, Homo sapiens
  misc_feature: Table A; Target 98665; HLA-B*27:02; TYR; ENSG00000077498; TAA
YESGSMDK

SEQ ID NO: 98666 - protein, 8 aa, Homo sapiens
  misc_feature: Table A; Target 98666; HLA-C*06:02; TYR; ENSG00000077498; TAA
YESGSMDK

SEQ ID NO: 98667 - protein, 8 aa, Homo sapiens
  misc_feature: Table A; Target 98667; HLA-C*07:01; TYR; ENSG00000077498; TAA
YESGSMDK

SEQ ID NO: 98668 - protein, 8 aa, Homo sapiens
  misc_feature: Table A; Target 98668; HLA-C*07:04; TYR; ENSG00000077498; TAA
YESGSMDK

SEQ ID NO: 98669 - protein, 9 aa, Homo sapiens
  misc_feature: Table A; Target 98669; HLA-A*30:01; TYR; ENSG00000077498; TAA
YESGSMDKA

SEQ ID NO: 98670 - protein, 9 aa, Homo sapiens
  misc_feature: Table A; Target 98670; HLA-B*18:01; TYR; ENSG00000077498; TAA
YESGSMDKA

SEQ ID NO: 98671 - protein, 9 aa, Homo sapiens
  misc_feature: Table A; Target 98671; HLA-B*27:05; TYR; ENSG00000077498; TAA
YESGSMDKA

SEQ ID NO: 98672 - protein, 9 aa, Homo sapiens
  misc_feature: Table A; Target 98672; HLA-B*40:01; TYR; ENSG00000077498; TAA
YESGSMDKA

SEQ ID NO: 98673 - protein, 9 aa, Homo sapiens
  misc_feature: Table A; Target 98673; HLA-B*40:02; TYR; ENSG00000077498; TAA
YESGSMDKA

SEQ ID NO: 98674 - protein, 9 aa, Homo sapiens
  misc_feature: Table A; Target 98674; HLA-B*49:01; TYR; ENSG00000077498; TAA
YESGSMDKA

SEQ ID NO: 98675 - protein, 9 aa, Homo sapiens
  misc_feature: Table A; Target 98675; HLA-C*06:02; TYR; ENSG00000077498; TAA
YESGSMDKA

SEQ ID NO: 98676 - protein, 9 aa, Homo sapiens
  misc_feature: Table A; Target 98676; HLA-C*12:03; TYR; ENSG00000077498; TAA
YESGSMDKA

SEQ ID NO: 98677 - protein, 10 aa, Homo sapiens
  misc_feature: Table A; Target 98677; HLA-A*30:01; TYR; ENSG00000077498; TAA
YESGSMDKAA

SEQ ID NO: 98678 - protein, 10 aa, Homo sapiens
  misc_feature: Table A; Target 98678; HLA-B*40:02; TYR; ENSG00000077498; TAA
YESGSMDKAA

SEQ ID NO: 98679 - protein, 10 aa, Homo sapiens
  misc_feature: Table A; Target 98679; HLA-B*49:01; TYR; ENSG00000077498; TAA
YESGSMDKAA

SEQ ID NO: 98680 - protein, 9 aa, Homo sapiens
  misc_feature: Table A; Target 98680; HLA-C*07:04; TYR; ENSG00000077498; TAA
YGQMKNGST

SEQ ID NO: 98681 - protein, 11 aa, Homo sapiens
  misc_feature: Table A; Target 98681; HLA-C*04:01; TYR; ENSG00000077498; TAA
YGQMKNGSTPM

SEQ ID NO: 98682 - protein, 9 aa, Homo sapiens
  misc_feature: Table A; Target 98682; HLA-A*68:02; TYR; ENSG00000077498; TAA
YHSLYQSHL

SEQ ID NO: 98683 - protein, 9 aa, Homo sapiens
  misc_feature: Table A; Target 98683; HLA-B*27:05; TYR; ENSG00000077498; TAA
YHSLYQSHL

SEQ ID NO: 98684 - protein, 9 aa, Homo sapiens
  misc_feature: Table A; Target 98684; HLA-B*38:01; TYR; ENSG00000077498; TAA
YHSLYQSHL

SEQ ID NO: 98685 - protein, 9 aa, Homo sapiens
  misc_feature: Table A; Target 98685; HLA-B*39:01; TYR; ENSG00000077498; TAA
YHSLYQSHL

SEQ ID NO: 98686 - protein, 9 aa, Homo sapiens
  misc_feature: Table A; Target 98686; HLA-C*07:01; TYR; ENSG00000077498; TAA
YHSLYQSHL

SEQ ID NO: 98687 - protein, 9 aa, Homo sapiens
  misc_feature: Table A; Target 98687; HLA-A*02:01; TYR; ENSG00000077498; TAA
YIKSYLEQA

SEQ ID NO: 98688 - protein, 9 aa, Homo sapiens
  misc_feature: Table A; Target 98688; HLA-A*02:03; TYR; ENSG00000077498; TAA
YIKSYLEQA

SEQ ID NO: 98689 - protein, 9 aa, Homo sapiens
  misc_feature: Table A; Target 98689; HLA-A*02:04; TYR; ENSG00000077498; TAA
YIKSYLEQA

SEQ ID NO: 98690 - protein, 9 aa, Homo sapiens
  misc_feature: Table A; Target 98690; HLA-A*02:07; TYR; ENSG00000077498; TAA
YIKSYLEQA

SEQ ID NO: 98691 - protein, 9 aa, Homo sapiens
  misc_feature: Table A; Target 98691; HLA-B*40:02; TYR; ENSG00000077498; TAA
YIKSYLEQA

SEQ ID NO: 98692 - protein, 9 aa, Homo sapiens
  misc_feature: Table A; Target 98692; HLA-B*46:01; TYR; ENSG00000077498; TAA
YIKSYLEQA

SEQ ID NO: 98693 - protein, 9 aa, Homo sapiens
  misc_feature: Table A; Target 98693; HLA-B*54:01; TYR; ENSG00000077498; TAA
YIKSYLEQA

SEQ ID NO: 98694 - protein, 9 aa, Homo sapiens
  misc_feature: Table A; Target 98694; HLA-B*55:01; TYR; ENSG00000077498; TAA
YIKSYLEQA

SEQ ID NO: 98695 - protein, 10 aa, Homo sapiens
  misc_feature: Table A; Target 98695; HLA-C*07:02; TYR; ENSG00000077498; TAA
YIKSYLEQAS

SEQ ID NO: 98696 - protein, 10 aa, Homo sapiens
  misc_feature: Table A; Target 98696; HLA-A*02:07; TYR; ENSG00000077498; TAA
YLQDSDPDSF

SEQ ID NO: 98697 - protein, 10 aa, Homo sapiens
  misc_feature: Table A; Target 98697; HLA-A*23:01; TYR; ENSG00000077498; TAA
YLQDSDPDSF

SEQ ID NO: 98698 - protein, 10 aa, Homo sapiens
  misc_feature: Table A; Target 98698; HLA-A*24:02; TYR; ENSG00000077498; TAA
YLQDSDPDSF

SEQ ID NO: 98699 - protein, 10 aa, Homo sapiens
  misc_feature: Table A; Target 98699; HLA-A*25:01; TYR; ENSG00000077498; TAA
YLQDSDPDSF

SEQ ID NO: 98700 - protein, 10 aa, Homo sapiens
  misc_feature: Table A; Target 98700; HLA-B*15:01; TYR; ENSG00000077498; TAA
YLQDSDPDSF

SEQ ID NO: 98701 - protein, 10 aa, Homo sapiens
  misc_feature: Table A; Target 98701; HLA-B*27:02; TYR; ENSG00000077498; TAA
YLQDSDPDSF

SEQ ID NO: 98702 - protein, 10 aa, Homo sapiens
  misc_feature: Table A; Target 98702; HLA-B*27:05; TYR; ENSG00000077498; TAA
YLQDSDPDSF

SEQ ID NO: 98703 - protein, 10 aa, Homo sapiens
  misc_feature: Table A; Target 98703; HLA-B*35:01; TYR; ENSG00000077498; TAA
YLQDSDPDSF

SEQ ID NO: 98704 - protein, 10 aa, Homo sapiens
  misc_feature: Table A; Target 98704; HLA-B*38:01; TYR; ENSG00000077498; TAA
YLQDSDPDSF

SEQ ID NO: 98705 - protein, 10 aa, Homo sapiens
  misc_feature: Table A; Target 98705; HLA-B*39:01; TYR; ENSG00000077498; TAA
YLQDSDPDSF

SEQ ID NO: 98706 - protein, 10 aa, Homo sapiens
  misc_feature: Table A; Target 98706; HLA-B*46:01; TYR; ENSG00000077498; TAA
YLQDSDPDSF

SEQ ID NO: 98707 - protein, 10 aa, Homo sapiens
  misc_feature: Table A; Target 98707; HLA-B*55:01; TYR; ENSG00000077498; TAA
YLQDSDPDSF

SEQ ID NO: 98708 - protein, 10 aa, Homo sapiens
  misc_feature: Table A; Target 98708; HLA-C*05:01; TYR; ENSG00000077498; TAA
YLQDSDPDSF

SEQ ID NO: 98709 - protein, 10 aa, Homo sapiens
  misc_feature: Table A; Target 98709; HLA-C*07:01; TYR; ENSG00000077498; TAA
YLQDSDPDSF

SEQ ID NO: 98710 - protein, 10 aa, Homo sapiens
  misc_feature: Table A; Target 98710; HLA-C*07:04; TYR; ENSG00000077498; TAA
YLQDSDPDSF

SEQ ID NO: 98711 - protein, 10 aa, Homo sapiens
  misc_feature: Table A; Target 98711; HLA-C*12:03; TYR; ENSG00000077498; TAA
YLQDSDPDSF

SEQ ID NO: 98712 - protein, 10 aa, Homo sapiens
  misc_feature: Table A; Target 98712; HLA-C*14:02; TYR; ENSG00000077498; TAA
YLQDSDPDSF

SEQ ID NO: 98713 - protein, 9 aa, Homo sapiens
  misc_feature: Table A; Target 98713; HLA-A*02:01; TYR; ENSG00000077498; TAA
YLTLAKHTI

SEQ ID NO: 98714 - protein, 9 aa, Homo sapiens
  misc_feature: Table A; Target 98714; HLA-A*02:03; TYR; ENSG00000077498; TAA
YLTLAKHTI

SEQ ID NO: 98715 - protein, 9 aa, Homo sapiens
  misc_feature: Table A; Target 98715; HLA-A*02:04; TYR; ENSG00000077498; TAA
YLTLAKHTI

SEQ ID NO: 98716 - protein, 9 aa, Homo sapiens
  misc_feature: Table A; Target 98716; HLA-A*24:02; TYR; ENSG00000077498; TAA
YLTLAKHTI

SEQ ID NO: 98717 - protein, 9 aa, Homo sapiens
  misc_feature: Table A; Target 98717; HLA-A*68:02; TYR; ENSG00000077498; TAA
YLTLAKHTI

SEQ ID NO: 98718 - protein, 9 aa, Homo sapiens
  misc_feature: Table A; Target 98718; HLA-B*08:01; TYR; ENSG00000077498; TAA
YLTLAKHTI

SEQ ID NO: 98719 - protein, 9 aa, Homo sapiens
  misc_feature: Table A; Target 98719; HLA-B*13:02; TYR; ENSG00000077498; TAA
YLTLAKHTI

SEQ ID NO: 98720 - protein, 9 aa, Homo sapiens
  misc_feature: Table A; Target 98720; HLA-B*55:01; TYR; ENSG00000077498; TAA
YLTLAKHTI

SEQ ID NO: 98721 - protein, 9 aa, Homo sapiens
  misc_feature: Table A; Target 98721; HLA-C*16:02; TYR; ENSG00000077498; TAA
YLTLAKHTI

SEQ ID NO: 98722 - protein, 8 aa, Homo sapiens
  misc_feature: Table A; Target 98722; HLA-C*07:04; TYR; ENSG00000077498; TAA
YMGGQHPT

SEQ ID NO: 98723 - protein, 10 aa, Homo sapiens
  misc_feature: Table A; Target 98723; HLA-A*02:03; TYR; ENSG00000077498; TAA
YMGGQHPTNP

SEQ ID NO: 98724 - protein, 9 aa, Homo sapiens
  misc_feature: Table A; Target 98724; HLA-A*01:01; TYR; ENSG00000077498; TAA
YMNGTMSQV

SEQ ID NO: 98725 - protein, 9 aa, Homo sapiens
  misc_feature: Table A; Target 98725; HLA-A*02:01; TYR; ENSG00000077498; TAA
YMNGTMSQV

SEQ ID NO: 98726 - protein, 9 aa, Homo sapiens
  misc_feature: Table A; Target 98726; HLA-A*02:03; TYR; ENSG00000077498; TAA
YMNGTMSQV

SEQ ID NO: 98727 - protein, 9 aa, Homo sapiens
  misc_feature: Table A; Target 98727; HLA-A*02:04; TYR; ENSG00000077498; TAA
YMNGTMSQV

SEQ ID NO: 98728 - protein, 9 aa, Homo sapiens
  misc_feature: Table A; Target 98728; HLA-A*02:07; TYR; ENSG00000077498; TAA
YMNGTMSQV

SEQ ID NO: 98729 - protein, 9 aa, Homo sapiens
  misc_feature: Table A; Target 98729; HLA-A*26:01; TYR; ENSG00000077498; TAA
YMNGTMSQV

SEQ ID NO: 98730 - protein, 9 aa, Homo sapiens
  misc_feature: Table A; Target 98730; HLA-A*30:01; TYR; ENSG00000077498; TAA
YMNGTMSQV

SEQ ID NO: 98731 - protein, 9 aa, Homo sapiens
  misc_feature: Table A; Target 98731; HLA-A*31:01; TYR; ENSG00000077498; TAA
YMNGTMSQV

SEQ ID NO: 98732 - protein, 9 aa, Homo sapiens
  misc_feature: Table A; Target 98732; HLA-A*32:01; TYR; ENSG00000077498; TAA
YMNGTMSQV

SEQ ID NO: 98733 - protein, 9 aa, Homo sapiens
  misc_feature: Table A; Target 98733; HLA-A*68:02; TYR; ENSG00000077498; TAA
YMNGTMSQV

SEQ ID NO: 98734 - protein, 9 aa, Homo sapiens
  misc_feature: Table A; Target 98734; HLA-B*08:01; TYR; ENSG00000077498; TAA
YMNGTMSQV

SEQ ID NO: 98735 - protein, 9 aa, Homo sapiens
  misc_feature: Table A; Target 98735; HLA-B*13:02; TYR; ENSG00000077498; TAA
YMNGTMSQV

SEQ ID NO: 98736 - protein, 9 aa, Homo sapiens
  misc_feature: Table A; Target 98736; HLA-B*15:01; TYR; ENSG00000077498; TAA
YMNGTMSQV

SEQ ID NO: 98737 - protein, 9 aa, Homo sapiens
  misc_feature: Table A; Target 98737; HLA-B*15:03; TYR; ENSG00000077498; TAA
YMNGTMSQV

SEQ ID NO: 98738 - protein, 9 aa, Homo sapiens
  misc_feature: Table A; Target 98738; HLA-B*27:05; TYR; ENSG00000077498; TAA
YMNGTMSQV

SEQ ID NO: 98739 - protein, 9 aa, Homo sapiens
  misc_feature: Table A; Target 98739; HLA-B*38:01; TYR; ENSG00000077498; TAA
YMNGTMSQV

SEQ ID NO: 98740 - protein, 9 aa, Homo sapiens
  misc_feature: Table A; Target 98740; HLA-B*39:01; TYR; ENSG00000077498; TAA
YMNGTMSQV

SEQ ID NO: 98741 - protein, 9 aa, Homo sapiens
  misc_feature: Table A; Target 98741; HLA-B*40:02; TYR; ENSG00000077498; TAA
YMNGTMSQV

SEQ ID NO: 98742 - protein, 9 aa, Homo sapiens
  misc_feature: Table A; Target 98742; HLA-B*46:01; TYR; ENSG00000077498; TAA
YMNGTMSQV

SEQ ID NO: 98743 - protein, 9 aa, Homo sapiens
  misc_feature: Table A; Target 98743; HLA-B*49:01; TYR; ENSG00000077498; TAA
YMNGTMSQV

SEQ ID NO: 98744 - protein, 9 aa, Homo sapiens
  misc_feature: Table A; Target 98744; HLA-B*51:01; TYR; ENSG00000077498; TAA
YMNGTMSQV

SEQ ID NO: 98745 - protein, 9 aa, Homo sapiens
  misc_feature: Table A; Target 98745; HLA-B*54:01; TYR; ENSG00000077498; TAA
YMNGTMSQV

SEQ ID NO: 98746 - protein, 9 aa, Homo sapiens
  misc_feature: Table A; Target 98746; HLA-B*55:01; TYR; ENSG00000077498; TAA
YMNGTMSQV

SEQ ID NO: 98747 - protein, 9 aa, Homo sapiens
  misc_feature: Table A; Target 98747; HLA-B*56:01; TYR; ENSG00000077498; TAA
YMNGTMSQV

SEQ ID NO: 98748 - protein, 9 aa, Homo sapiens
  misc_feature: Table A; Target 98748; HLA-B*58:01; TYR; ENSG00000077498; TAA
YMNGTMSQV

SEQ ID NO: 98749 - protein, 9 aa, Homo sapiens
  misc_feature: Table A; Target 98749; HLA-C*01:02; TYR; ENSG00000077498; TAA
YMNGTMSQV

SEQ ID NO: 98750 - protein, 9 aa, Homo sapiens
  misc_feature: Table A; Target 98750; HLA-C*02:02; TYR; ENSG00000077498; TAA
YMNGTMSQV

SEQ ID NO: 98751 - protein, 9 aa, Homo sapiens
  misc_feature: Table A; Target 98751; HLA-C*03:03; TYR; ENSG00000077498; TAA
YMNGTMSQV

SEQ ID NO: 98752 - protein, 9 aa, Homo sapiens
  misc_feature: Table A; Target 98752; HLA-C*03:04; TYR; ENSG00000077498; TAA
YMNGTMSQV

SEQ ID NO: 98753 - protein, 9 aa, Homo sapiens
  misc_feature: Table A; Target 98753; HLA-C*04:01; TYR; ENSG00000077498; TAA
YMNGTMSQV

SEQ ID NO: 98754 - protein, 9 aa, Homo sapiens
  misc_feature: Table A; Target 98754; HLA-C*05:01; TYR; ENSG00000077498; TAA
YMNGTMSQV

SEQ ID NO: 98755 - protein, 9 aa, Homo sapiens
  misc_feature: Table A; Target 98755; HLA-C*06:02; TYR; ENSG00000077498; TAA
YMNGTMSQV

SEQ ID NO: 98756 - protein, 9 aa, Homo sapiens
  misc_feature: Table A; Target 98756; HLA-C*07:04; TYR; ENSG00000077498; TAA
YMNGTMSQV

SEQ ID NO: 98757 - protein, 9 aa, Homo sapiens
  misc_feature: Table A; Target 98757; HLA-C*12:03; TYR; ENSG00000077498; TAA
YMNGTMSQV

SEQ ID NO: 98758 - protein, 9 aa, Homo sapiens
  misc_feature: Table A; Target 98758; HLA-C*14:02; TYR; ENSG00000077498; TAA
YMNGTMSQV

SEQ ID NO: 98759 - protein, 9 aa, Homo sapiens
  misc_feature: Table A; Target 98759; HLA-C*16:02; TYR; ENSG00000077498; TAA
YMNGTMSQV

SEQ ID NO: 98760 - protein, 9 aa, Homo sapiens
  misc_feature: Table A; Target 98760; HLA-C*16:04; TYR; ENSG00000077498; TAA
YMNGTMSQV

SEQ ID NO: 98761 - protein, 10 aa, Homo sapiens
  misc_feature: Table A; Target 98761; HLA-C*04:01; TYR; ENSG00000077498; TAA
YMNGTMSQVQ

SEQ ID NO: 98762 - protein, 10 aa, Homo sapiens
  misc_feature: Table A; Target 98762; HLA-C*07:01; TYR; ENSG00000077498; TAA
YMNGTMSQVQ

SEQ ID NO: 98763 - protein, 11 aa, Homo sapiens
  misc_feature: Table A; Target 98763; HLA-C*04:01; TYR; ENSG00000077498; TAA
YMNGTMSQVQG

SEQ ID NO: 98764 - protein, 9 aa, Homo sapiens
  misc_feature: Table A; Target 98764; HLA-A*01:01; TYR; ENSG00000077498; TAA
YMVPFIPLY

SEQ ID NO: 98765 - protein, 9 aa, Homo sapiens
  misc_feature: Table A; Target 98765; HLA-A*02:01; TYR; ENSG00000077498; TAA
YMVPFIPLY

SEQ ID NO: 98766 - protein, 9 aa, Homo sapiens
  misc_feature: Table A; Target 98766; HLA-A*02:03; TYR; ENSG00000077498; TAA
YMVPFIPLY

SEQ ID NO: 98767 - protein, 9 aa, Homo sapiens
  misc_feature: Table A; Target 98767; HLA-A*02:04; TYR; ENSG00000077498; TAA
YMVPFIPLY

SEQ ID NO: 98768 - protein, 9 aa, Homo sapiens
  misc_feature: Table A; Target 98768; HLA-A*02:07; TYR; ENSG00000077498; TAA
YMVPFIPLY

SEQ ID NO: 98769 - protein, 9 aa, Homo sapiens
  misc_feature: Table A; Target 98769; HLA-A*23:01; TYR; ENSG00000077498; TAA
YMVPFIPLY

SEQ ID NO: 98770 - protein, 9 aa, Homo sapiens
  misc_feature: Table A; Target 98770; HLA-A*24:02; TYR; ENSG00000077498; TAA
YMVPFIPLY

SEQ ID NO: 98771 - protein, 9 aa, Homo sapiens
  misc_feature: Table A; Target 98771; HLA-A*25:01; TYR; ENSG00000077498; TAA
YMVPFIPLY

SEQ ID NO: 98772 - protein, 9 aa, Homo sapiens
  misc_feature: Table A; Target 98772; HLA-A*26:01; TYR; ENSG00000077498; TAA
YMVPFIPLY

SEQ ID NO: 98773 - protein, 9 aa, Homo sapiens
  misc_feature: Table A; Target 98773; HLA-A*29:02; TYR; ENSG00000077498; TAA
YMVPFIPLY

SEQ ID NO: 98774 - protein, 9 aa, Homo sapiens
  misc_feature: Table A; Target 98774; HLA-B*15:03; TYR; ENSG00000077498; TAA
YMVPFIPLY

SEQ ID NO: 98775 - protein, 9 aa, Homo sapiens
  misc_feature: Table A; Target 98775; HLA-B*35:01; TYR; ENSG00000077498; TAA
YMVPFIPLY

SEQ ID NO: 98776 - protein, 9 aa, Homo sapiens
  misc_feature: Table A; Target 98776; HLA-B*44:02; TYR; ENSG00000077498; TAA
YMVPFIPLY

SEQ ID NO: 98777 - protein, 9 aa, Homo sapiens
  misc_feature: Table A; Target 98777; HLA-B*46:01; TYR; ENSG00000077498; TAA
YMVPFIPLY

SEQ ID NO: 98778 - protein, 9 aa, Homo sapiens
  misc_feature: Table A; Target 98778; HLA-B*54:01; TYR; ENSG00000077498; TAA
YMVPFIPLY

SEQ ID NO: 98779 - protein, 9 aa, Homo sapiens
  misc_feature: Table A; Target 98779; HLA-B*57:01; TYR; ENSG00000077498; TAA
YMVPFIPLY

SEQ ID NO: 98780 - protein, 9 aa, Homo sapiens
  misc_feature: Table A; Target 98780; HLA-C*02:02; TYR; ENSG00000077498; TAA
YMVPFIPLY

SEQ ID NO: 98781 - protein, 9 aa, Homo sapiens
  misc_feature: Table A; Target 98781; HLA-C*07:01; TYR; ENSG00000077498; TAA
YMVPFIPLY

SEQ ID NO: 98782 - protein, 9 aa, Homo sapiens
  misc_feature: Table A; Target 98782; HLA-C*12:03; TYR; ENSG00000077498; TAA
YMVPFIPLY

SEQ ID NO: 98783 - protein, 9 aa, Homo sapiens
  misc_feature: Table A; Target 98783; HLA-C*16:04; TYR; ENSG00000077498; TAA
YMVPFIPLY

SEQ ID NO: 98784 - protein, 10 aa, Homo sapiens
  misc_feature: Table A; Target 98784; HLA-A*02:03; TYR; ENSG00000077498; TAA
YMVPFIPLYR

SEQ ID NO: 98785 - protein, 10 aa, Homo sapiens
  misc_feature: Table A; Target 98785; HLA-A*29:02; TYR; ENSG00000077498; TAA
YMVPFIPLYR

SEQ ID NO: 98786 - protein, 10 aa, Homo sapiens
  misc_feature: Table A; Target 98786; HLA-A*31:01; TYR; ENSG00000077498; TAA
YMVPFIPLYR

SEQ ID NO: 98787 - protein, 9 aa, Homo sapiens
  misc_feature: Table A; Target 98787; HLA-B*35:01; TYR; ENSG00000077498; TAA
YPEANAPIG

SEQ ID NO: 98788 - protein, 9 aa, Homo sapiens
  misc_feature: Table A; Target 98788; HLA-B*35:03; TYR; ENSG00000077498; TAA
YPEANAPIG

SEQ ID NO: 98789 - protein, 10 aa, Homo sapiens
  misc_feature: Table A; Target 98789; HLA-B*27:02; TYR; ENSG00000077498; TAA
YPEANAPIGH

SEQ ID NO: 98790 - protein, 10 aa, Homo sapiens
  misc_feature: Table A; Target 98790; HLA-B*35:01; TYR; ENSG00000077498; TAA
YPEANAPIGH

SEQ ID NO: 98791 - protein, 10 aa, Homo sapiens
  misc_feature: Table A; Target 98791; HLA-B*55:01; TYR; ENSG00000077498; TAA
YPEANAPIGH

SEQ ID NO: 98792 - protein, 10 aa, Homo sapiens
  misc_feature: Table A; Target 98792; HLA-C*07:01; TYR; ENSG00000077498; TAA
YPEANAPIGH

SEQ ID NO: 98793 - protein, 8 aa, Homo sapiens
  misc_feature: Table A; Target 98793; HLA-A*23:01; TYR; ENSG00000077498; TAA
YVIPIGTY

SEQ ID NO: 98794 - protein, 8 aa, Homo sapiens
  misc_feature: Table A; Target 98794; HLA-A*25:01; TYR; ENSG00000077498; TAA
YVIPIGTY

SEQ ID NO: 98795 - protein, 8 aa, Homo sapiens
  misc_feature: Table A; Target 98795; HLA-A*26:01; TYR; ENSG00000077498; TAA
YVIPIGTY

SEQ ID NO: 98796 - protein, 8 aa, Homo sapiens
  misc_feature: Table A; Target 98796; HLA-A*29:02; TYR; ENSG00000077498; TAA
YVIPIGTY

SEQ ID NO: 98797 - protein, 8 aa, Homo sapiens
  misc_feature: Table A; Target 98797; HLA-A*30:02; TYR; ENSG00000077498; TAA
YVIPIGTY

SEQ ID NO: 98798 - protein, 8 aa, Homo sapiens
  misc_feature: Table A; Target 98798; HLA-A*32:01; TYR; ENSG00000077498; TAA
YVIPIGTY

SEQ ID NO: 98799 - protein, 8 aa, Homo sapiens
  misc_feature: Table A; Target 98799; HLA-B*15:01; TYR; ENSG00000077498; TAA
YVIPIGTY

SEQ ID NO: 98800 - protein, 8 aa, Homo sapiens
  misc_feature: Table A; Target 98800; HLA-B*15:03; TYR; ENSG00000077498; TAA
YVIPIGTY

SEQ ID NO: 98801 - protein, 8 aa, Homo sapiens
  misc_feature: Table A; Target 98801; HLA-B*18:01; TYR; ENSG00000077498; TAA
YVIPIGTY

SEQ ID NO: 98802 - protein, 8 aa, Homo sapiens
  misc_feature: Table A; Target 98802; HLA-B*27:05; TYR; ENSG00000077498; TAA
YVIPIGTY

SEQ ID NO: 98803 - protein, 8 aa, Homo sapiens
  misc_feature: Table A; Target 98803; HLA-B*35:01; TYR; ENSG00000077498; TAA
YVIPIGTY

SEQ ID NO: 98804 - protein, 8 aa, Homo sapiens
  misc_feature: Table A; Target 98804; HLA-B*39:01; TYR; ENSG00000077498; TAA
YVIPIGTY

SEQ ID NO: 98805 - protein, 8 aa, Homo sapiens
  misc_feature: Table A; Target 98805; HLA-B*40:02; TYR; ENSG00000077498; TAA
YVIPIGTY

SEQ ID NO: 98806 - protein, 8 aa, Homo sapiens
  misc_feature: Table A; Target 98806; HLA-B*46:01; TYR; ENSG00000077498; TAA
YVIPIGTY

SEQ ID NO: 98807 - protein, 8 aa, Homo sapiens
  misc_feature: Table A; Target 98807; HLA-B*57:01; TYR; ENSG00000077498; TAA
YVIPIGTY

SEQ ID NO: 98808 - protein, 8 aa, Homo sapiens
  misc_feature: Table A; Target 98808; HLA-B*58:01; TYR; ENSG00000077498; TAA
YVIPIGTY

SEQ ID NO: 98809 - protein, 8 aa, Homo sapiens
  misc_feature: Table A; Target 98809; HLA-C*02:02; TYR; ENSG00000077498; TAA
YVIPIGTY

SEQ ID NO: 98810 - protein, 8 aa, Homo sapiens
  misc_feature: Table A; Target 98810; HLA-C*03:03; TYR; ENSG00000077498; TAA
YVIPIGTY

SEQ ID NO: 98811 - protein, 8 aa, Homo sapiens
  misc_feature: Table A; Target 98811; HLA-C*04:01; TYR; ENSG00000077498; TAA
YVIPIGTY

SEQ ID NO: 98812 - protein, 8 aa, Homo sapiens
  misc_feature: Table A; Target 98812; HLA-C*07:01; TYR; ENSG00000077498; TAA
YVIPIGTY

SEQ ID NO: 98813 - protein, 8 aa, Homo sapiens
  misc_feature: Table A; Target 98813; HLA-C*07:04; TYR; ENSG00000077498; TAA
YVIPIGTY

SEQ ID NO: 98814 - protein, 8 aa, Homo sapiens
  misc_feature: Table A; Target 98814; HLA-C*12:03; TYR; ENSG00000077498; TAA
YVIPIGTY

SEQ ID NO: 98815 - protein, 8 aa, Homo sapiens
  misc_feature: Table A; Target 98815; HLA-C*14:02; TYR; ENSG00000077498; TAA
YVIPIGTY

SEQ ID NO: 98816 - protein, 8 aa, Homo sapiens
  misc_feature: Table A; Target 98816; HLA-C*16:02; TYR; ENSG00000077498; TAA
YVIPIGTY

SEQ ID NO: 98817 - protein, 8 aa, Homo sapiens
  misc_feature: Table A; Target 98817; HLA-C*16:04; TYR; ENSG00000077498; TAA
YVIPIGTY

SEQ ID NO: 98818 - protein, 9 aa, Homo sapiens
  misc_feature: Table A; Target 98818; HLA-A*26:01; TYR; ENSG00000077498; TAA
YVIPIGTYG

SEQ ID NO: 98819 - protein, 9 aa, Homo sapiens
  misc_feature: Table A; Target 98819; HLA-A*68:02; TYR; ENSG00000077498; TAA
YVIPIGTYG

SEQ ID NO: 98820 - protein, 9 aa, Homo sapiens
  misc_feature: Table A; Target 98820; HLA-B*27:05; TYR; ENSG00000077498; TAA
YVIPIGTYG

SEQ ID NO: 98821 - protein, 9 aa, Homo sapiens
  misc_feature: Table A; Target 98821; HLA-C*04:01; TYR; ENSG00000077498; TAA
YVIPIGTYG

SEQ ID NO: 98822 - protein, 10 aa, Homo sapiens
  misc_feature: Table A; Target 98822; HLA-A*02:07; TYR; ENSG00000077498; TAA
YVIPIGTYGQ

SEQ ID NO: 98823 - protein, 10 aa, Homo sapiens
  misc_feature: Table A; Target 98823; HLA-A*26:01; TYR; ENSG00000077498; TAA
YVIPIGTYGQ

SEQ ID NO: 98824 - protein, 10 aa, Homo sapiens
  misc_feature: Table A; Target 98824; HLA-A*68:02; TYR; ENSG00000077498; TAA
YVIPIGTYGQ

SEQ ID NO: 98825 - protein, 11 aa, Homo sapiens
  misc_feature: Table A; Target 98825; HLA-A*02:07; TYR; ENSG00000077498; TAA
YVIPIGTYGQM

SEQ ID NO: 98826 - protein, 11 aa, Homo sapiens
  misc_feature: Table A; Target 98826; HLA-A*25:01; TYR; ENSG00000077498; TAA
YVIPIGTYGQM

SEQ ID NO: 98827 - protein, 11 aa, Homo sapiens
  misc_feature: Table A; Target 98827; HLA-A*26:01; TYR; ENSG00000077498; TAA
YVIPIGTYGQM

SEQ ID NO: 98828 - protein, 11 aa, Homo sapiens
  misc_feature: Table A; Target 98828; HLA-A*29:02; TYR; ENSG00000077498; TAA
YVIPIGTYGQM

SEQ ID NO: 98829 - protein, 11 aa, Homo sapiens
  misc_feature: Table A; Target 98829; HLA-A*68:02; TYR; ENSG00000077498; TAA
YVIPIGTYGQM

SEQ ID NO: 98830 - protein, 11 aa, Homo sapiens
  misc_feature: Table A; Target 98830; HLA-B*35:01; TYR; ENSG00000077498; TAA
YVIPIGTYGQM

SEQ ID NO: 98831 - protein, 11 aa, Homo sapiens
  misc_feature: Table A; Target 98831; HLA-C*04:01; TYR; ENSG00000077498; TAA
YVIPIGTYGQM

SEQ ID NO: 98832 - protein, 8 aa, Homo sapiens
  misc_feature: Table A; Target 98832; HLA-B*35:03; TYR; ENSG00000077498; TAA
YVSMDALL

SEQ ID NO: 98833 - protein, 8 aa, Homo sapiens
  misc_feature: Table A; Target 98833; HLA-C*07:04; TYR; ENSG00000077498; TAA
YVSMDALL

SEQ ID NO: 98834 - protein, 8 aa, Homo sapiens
  misc_feature: Table A; Target 98834; HLA-A*23:01; TYR; ENSG00000077498; TAA
YYVSMDAL

SEQ ID NO: 98835 - protein, 8 aa, Homo sapiens
  misc_feature: Table A; Target 98835; HLA-A*24:02; TYR; ENSG00000077498; TAA
YYVSMDAL

SEQ ID NO: 98836 - protein, 8 aa, Homo sapiens
  misc_feature: Table A; Target 98836; HLA-B*39:01; TYR; ENSG00000077498; TAA
YYVSMDAL

SEQ ID NO: 98837 - protein, 8 aa, Homo sapiens
  misc_feature: Table A; Target 98837; HLA-B*40:02; TYR; ENSG00000077498; TAA
YYVSMDAL

SEQ ID NO: 98838 - protein, 8 aa, Homo sapiens
  misc_feature: Table A; Target 98838; HLA-C*01:02; TYR; ENSG00000077498; TAA
YYVSMDAL

SEQ ID NO: 98839 - protein, 8 aa, Homo sapiens
  misc_feature: Table A; Target 98839; HLA-C*03:03; TYR; ENSG00000077498; TAA
YYVSMDAL

SEQ ID NO: 98840 - protein, 8 aa, Homo sapiens
  misc_feature: Table A; Target 98840; HLA-C*03:04; TYR; ENSG00000077498; TAA
YYVSMDAL

SEQ ID NO: 98841 - protein, 8 aa, Homo sapiens
  misc_feature: Table A; Target 98841; HLA-C*04:01; TYR; ENSG00000077498; TAA
YYVSMDAL

SEQ ID NO: 98842 - protein, 8 aa, Homo sapiens
  misc_feature: Table A; Target 98842; HLA-C*07:02; TYR; ENSG00000077498; TAA
YYVSMDAL

SEQ ID NO: 98843 - protein, 8 aa, Homo sapiens
  misc_feature: Table A; Target 98843; HLA-C*14:02; TYR; ENSG00000077498; TAA
YYVSMDAL

SEQ ID NO: 98844 - protein, 9 aa, Homo sapiens
  misc_feature: Table A; Target 98844; HLA-A*23:01; TYR; ENSG00000077498; TAA
YYVSMDALL

SEQ ID NO: 98845 - protein, 9 aa, Homo sapiens
  misc_feature: Table A; Target 98845; HLA-A*24:02; TYR; ENSG00000077498; TAA
YYVSMDALL

SEQ ID NO: 98846 - protein, 9 aa, Homo sapiens
  misc_feature: Table A; Target 98846; HLA-C*14:02; TYR; ENSG00000077498; TAA
YYVSMDALL

SEQ ID NO: 98847 - protein, 10 aa, Homo sapiens
  misc_feature: Table A; Target 98847; HLA-C*07:01; TYR; ENSG00000077498; TAA
YYVSMDALLG

SEQ ID NO: 98848 - protein, 10 aa, Homo sapiens
  misc_feature: Table A; Target 98848; HLA-A*29:02; UGT2B11; ENSG00000213759; TAA
AAHDLTWFQY

SEQ ID NO: 98849 - protein, 10 aa, Homo sapiens
  misc_feature: Table A; Target 98849; HLA-A*30:02; UGT2B11; ENSG00000213759; TAA
AAHDLTWFQY

SEQ ID NO: 98850 - protein, 9 aa, Homo sapiens
  misc_feature: Table A; Target 98850; HLA-A*02:03; UGT2B11; ENSG00000213759; TAA
AALLNIRFV

SEQ ID NO: 98851 - protein, 9 aa, Homo sapiens
  misc_feature: Table A; Target 98851; HLA-A*02:04; UGT2B11; ENSG00000213759; TAA
AALLNIRFV

SEQ ID NO: 98852 - protein, 9 aa, Homo sapiens
  misc_feature: Table A; Target 98852; HLA-C*16:02; UGT2B11; ENSG00000213759; TAA
AALLNIRFV

SEQ ID NO: 98853 - protein, 10 aa, Homo sapiens
  misc_feature: Table A; Target 98853; HLA-A*29:02; UGT2B11; ENSG00000213759; TAA
AALLNIRFVY

SEQ ID NO: 98854 - protein, 10 aa, Homo sapiens
  misc_feature: Table A; Target 98854; HLA-A*30:02; UGT2B11; ENSG00000213759; TAA
AALLNIRFVY

SEQ ID NO: 98855 - protein, 10 aa, Homo sapiens
  misc_feature: Table A; Target 98855; HLA-B*57:01; UGT2B11; ENSG00000213759; TAA
AALLNIRFVY

SEQ ID NO: 98856 - protein, 10 aa, Homo sapiens
  misc_feature: Table A; Target 98856; HLA-B*35:01; UGT2B11; ENSG00000213759; TAA
AAVRLDFNTM

SEQ ID NO: 98857 - protein, 10 aa, Homo sapiens
  misc_feature: Table A; Target 98857; HLA-B*35:03; UGT2B11; ENSG00000213759; TAA
AAVRLDFNTM

SEQ ID NO: 98858 - protein, 10 aa, Homo sapiens
  misc_feature: Table A; Target 98858; HLA-B*58:01; UGT2B11; ENSG00000213759; TAA
AAVRLDFNTM

SEQ ID NO: 98859 - protein, 10 aa, Homo sapiens
  misc_feature: Table A; Target 98859; HLA-C*02:02; UGT2B11; ENSG00000213759; TAA
AAVRLDFNTM

SEQ ID NO: 98860 - protein, 10 aa, Homo sapiens
  misc_feature: Table A; Target 98860; HLA-C*03:03; UGT2B11; ENSG00000213759; TAA
AAVRLDFNTM

SEQ ID NO: 98861 - protein, 10 aa, Homo sapiens
  misc_feature: Table A; Target 98861; HLA-C*03:04; UGT2B11; ENSG00000213759; TAA
AAVRLDFNTM

SEQ ID NO: 98862 - protein, 10 aa, Homo sapiens
  misc_feature: Table A; Target 98862; HLA-C*12:03; UGT2B11; ENSG00000213759; TAA
AAVRLDFNTM

SEQ ID NO: 98863 - protein, 10 aa, Homo sapiens
  misc_feature: Table A; Target 98863; HLA-C*16:04; UGT2B11; ENSG00000213759; TAA
AAVRLDFNTM

SEQ ID NO: 98864 - protein, 9 aa, Homo sapiens
  misc_feature: Table A; Target 98864; HLA-B*13:02; UGT2B11; ENSG00000213759; TAA
ACVATVIFI

SEQ ID NO: 98865 - protein, 10 aa, Homo sapiens
  misc_feature: Table A; Target 98865; HLA-B*44:02; UGT2B11; ENSG00000213759; TAA
ADIWLMRNSW

SEQ ID NO: 98866 - protein, 9 aa, Homo sapiens
  misc_feature: Table A; Target 98866; HLA-A*30:01; UGT2B11; ENSG00000213759; TAA
AERANVIAT

SEQ ID NO: 98867 - protein, 9 aa, Homo sapiens
  misc_feature: Table A; Target 98867; HLA-B*37:01; UGT2B11; ENSG00000213759; TAA
AERANVIAT

SEQ ID NO: 98868 - protein, 9 aa, Homo sapiens
  misc_feature: Table A; Target 98868; HLA-B*40:01; UGT2B11; ENSG00000213759; TAA
AERANVIAT

SEQ ID NO: 98869 - protein, 9 aa, Homo sapiens
  misc_feature: Table A; Target 98869; HLA-B*40:02; UGT2B11; ENSG00000213759; TAA
AERANVIAT

SEQ ID NO: 98870 - protein, 9 aa, Homo sapiens
  misc_feature: Table A; Target 98870; HLA-B*49:01; UGT2B11; ENSG00000213759; TAA
AERANVIAT

SEQ ID NO: 98871 - protein, 10 aa, Homo sapiens
  misc_feature: Table A; Target 98871; HLA-A*30:01; UGT2B11; ENSG00000213759; TAA
AERANVIATA

SEQ ID NO: 98872 - protein, 10 aa, Homo sapiens
  misc_feature: Table A; Target 98872; HLA-B*40:02; UGT2B11; ENSG00000213759; TAA
AERANVIATA

SEQ ID NO: 98873 - protein, 10 aa, Homo sapiens
  misc_feature: Table A; Target 98873; HLA-B*44:02; UGT2B11; ENSG00000213759; TAA
AERANVIATA

SEQ ID NO: 98874 - protein, 10 aa, Homo sapiens
  misc_feature: Table A; Target 98874; HLA-B*49:01; UGT2B11; ENSG00000213759; TAA
AERANVIATA

SEQ ID NO: 98875 - protein, 10 aa, Homo sapiens
  misc_feature: Table A; Target 98875; HLA-B*56:01; UGT2B11; ENSG00000213759; TAA
AERANVIATA

SEQ ID NO: 98876 - protein, 11 aa, Homo sapiens
  misc_feature: Table A; Target 98876; HLA-A*30:01; UGT2B11; ENSG00000213759; TAA
AERANVIATAL

SEQ ID NO: 98877 - protein, 11 aa, Homo sapiens
  misc_feature: Table A; Target 98877; HLA-B*40:01; UGT2B11; ENSG00000213759; TAA
AERANVIATAL

SEQ ID NO: 98878 - protein, 11 aa, Homo sapiens
  misc_feature: Table A; Target 98878; HLA-B*40:02; UGT2B11; ENSG00000213759; TAA
AERANVIATAL

SEQ ID NO: 98879 - protein, 11 aa, Homo sapiens
  misc_feature: Table A; Target 98879; HLA-B*44:02; UGT2B11; ENSG00000213759; TAA
AERANVIATAL

SEQ ID NO: 98880 - protein, 11 aa, Homo sapiens
  misc_feature: Table A; Target 98880; HLA-B*44:03; UGT2B11; ENSG00000213759; TAA
AERANVIATAL

SEQ ID NO: 98881 - protein, 9 aa, Homo sapiens
  misc_feature: Table A; Target 98881; HLA-A*30:01; UGT2B11; ENSG00000213759; TAA
AEYSHWMNM

SEQ ID NO: 98882 - protein, 9 aa, Homo sapiens
  misc_feature: Table A; Target 98882; HLA-B*37:01; UGT2B11; ENSG00000213759; TAA
AEYSHWMNM

SEQ ID NO: 98883 - protein, 9 aa, Homo sapiens
  misc_feature: Table A; Target 98883; HLA-B*40:01; UGT2B11; ENSG00000213759; TAA
AEYSHWMNM

SEQ ID NO: 98884 - protein, 9 aa, Homo sapiens
  misc_feature: Table A; Target 98884; HLA-B*40:02; UGT2B11; ENSG00000213759; TAA
AEYSHWMNM

SEQ ID NO: 98885 - protein, 9 aa, Homo sapiens
  misc_feature: Table A; Target 98885; HLA-B*44:02; UGT2B11; ENSG00000213759; TAA
AEYSHWMNM

SEQ ID NO: 98886 - protein, 9 aa, Homo sapiens
  misc_feature: Table A; Target 98886; HLA-B*44:03; UGT2B11; ENSG00000213759; TAA
AEYSHWMNM

SEQ ID NO: 98887 - protein, 9 aa, Homo sapiens
  misc_feature: Table A; Target 98887; HLA-B*49:01; UGT2B11; ENSG00000213759; TAA
AEYSHWMNM

SEQ ID NO: 98888 - protein, 8 aa, Homo sapiens
  misc_feature: Table A; Target 98888; HLA-C*03:04; UGT2B11; ENSG00000213759; TAA
AIYHGIPM

SEQ ID NO: 98889 - protein, 9 aa, Homo sapiens
  misc_feature: Table A; Target 98889; HLA-A*02:01; UGT2B11; ENSG00000213759; TAA
AIYHGIPMV

SEQ ID NO: 98890 - protein, 9 aa, Homo sapiens
  misc_feature: Table A; Target 98890; HLA-A*02:03; UGT2B11; ENSG00000213759; TAA
AIYHGIPMV

SEQ ID NO: 98891 - protein, 9 aa, Homo sapiens
  misc_feature: Table A; Target 98891; HLA-A*02:04; UGT2B11; ENSG00000213759; TAA
AIYHGIPMV

SEQ ID NO: 98892 - protein, 9 aa, Homo sapiens
  misc_feature: Table A; Target 98892; HLA-A*02:07; UGT2B11; ENSG00000213759; TAA
AIYHGIPMV

SEQ ID NO: 98893 - protein, 9 aa, Homo sapiens
  misc_feature: Table A; Target 98893; HLA-B*13:02; UGT2B11; ENSG00000213759; TAA
AIYHGIPMV

SEQ ID NO: 98894 - protein, 9 aa, Homo sapiens
  misc_feature: Table A; Target 98894; HLA-B*55:01; UGT2B11; ENSG00000213759; TAA
AIYHGIPMV

SEQ ID NO: 98895 - protein, 9 aa, Homo sapiens
  misc_feature: Table A; Target 98895; HLA-C*02:02; UGT2B11; ENSG00000213759; TAA
AIYHGIPMV

SEQ ID NO: 98896 - protein, 8 aa, Homo sapiens
  misc_feature: Table A; Target 98896; HLA-B*15:03; UGT2B11; ENSG00000213759; TAA
AKIPQKVL

SEQ ID NO: 98897 - protein, 9 aa, Homo sapiens
  misc_feature: Table A; Target 98897; HLA-B*15:03; UGT2B11; ENSG00000213759; TAA
AKIPQKVLW

SEQ ID NO: 98898 - protein, 9 aa, Homo sapiens
  misc_feature: Table A; Target 98898; HLA-B*44:02; UGT2B11; ENSG00000213759; TAA
AKIPQKVLW

SEQ ID NO: 98899 - protein, 9 aa, Homo sapiens
  misc_feature: Table A; Target 98899; HLA-B*57:01; UGT2B11; ENSG00000213759; TAA
AKIPQKVLW

SEQ ID NO: 98900 - protein, 8 aa, Homo sapiens
  misc_feature: Table A; Target 98900; HLA-A*03:01; UGT2B11; ENSG00000213759; TAA
ALAKIPQK

SEQ ID NO: 98901 - protein, 8 aa, Homo sapiens
  misc_feature: Table A; Target 98901; HLA-A*03:02; UGT2B11; ENSG00000213759; TAA
ALAKIPQK

SEQ ID NO: 98902 - protein, 9 aa, Homo sapiens
  misc_feature: Table A; Target 98902; HLA-A*02:01; UGT2B11; ENSG00000213759; TAA
ALAKIPQKV

SEQ ID NO: 98903 - protein, 9 aa, Homo sapiens
  misc_feature: Table A; Target 98903; HLA-A*02:03; UGT2B11; ENSG00000213759; TAA
ALAKIPQKV

SEQ ID NO: 98904 - protein, 9 aa, Homo sapiens
  misc_feature: Table A; Target 98904; HLA-A*02:04; UGT2B11; ENSG00000213759; TAA
ALAKIPQKV

SEQ ID NO: 98905 - protein, 9 aa, Homo sapiens
  misc_feature: Table A; Target 98905; HLA-A*02:07; UGT2B11; ENSG00000213759; TAA
ALAKIPQKV

SEQ ID NO: 98906 - protein, 9 aa, Homo sapiens
  misc_feature: Table A; Target 98906; HLA-A*68:02; UGT2B11; ENSG00000213759; TAA
ALAKIPQKV

SEQ ID NO: 98907 - protein, 9 aa, Homo sapiens
  misc_feature: Table A; Target 98907; HLA-B*13:02; UGT2B11; ENSG00000213759; TAA
ALAKIPQKV

SEQ ID NO: 98908 - protein, 9 aa, Homo sapiens
  misc_feature: Table A; Target 98908; HLA-B*55:01; UGT2B11; ENSG00000213759; TAA
ALAKIPQKV

SEQ ID NO: 98909 - protein, 9 aa, Homo sapiens
  misc_feature: Table A; Target 98909; HLA-C*06:02; UGT2B11; ENSG00000213759; TAA
ALAKIPQKV

SEQ ID NO: 98910 - protein, 8 aa, Homo sapiens
  misc_feature: Table A; Target 98910; HLA-A*02:04; UGT2B11; ENSG00000213759; TAA
ALGLNTRL

SEQ ID NO: 98911 - protein, 9 aa, Homo sapiens
  misc_feature: Table A; Target 98911; HLA-A*01:01; UGT2B11; ENSG00000213759; TAA
ALGLNTRLY

SEQ ID NO: 98912 - protein, 9 aa, Homo sapiens
  misc_feature: Table A; Target 98912; HLA-A*03:01; UGT2B11; ENSG00000213759; TAA
ALGLNTRLY

SEQ ID NO: 98913 - protein, 9 aa, Homo sapiens
  misc_feature: Table A; Target 98913; HLA-A*03:02; UGT2B11; ENSG00000213759; TAA
ALGLNTRLY

SEQ ID NO: 98914 - protein, 9 aa, Homo sapiens
  misc_feature: Table A; Target 98914; HLA-A*29:02; UGT2B11; ENSG00000213759; TAA
ALGLNTRLY

SEQ ID NO: 98915 - protein, 9 aa, Homo sapiens
  misc_feature: Table A; Target 98915; HLA-A*30:02; UGT2B11; ENSG00000213759; TAA
ALGLNTRLY

SEQ ID NO: 98916 - protein, 9 aa, Homo sapiens
  misc_feature: Table A; Target 98916; HLA-A*32:01; UGT2B11; ENSG00000213759; TAA
ALGLNTRLY

SEQ ID NO: 98917 - protein, 9 aa, Homo sapiens
  misc_feature: Table A; Target 98917; HLA-B*15:01; UGT2B11; ENSG00000213759; TAA
ALGLNTRLY

SEQ ID NO: 98918 - protein, 9 aa, Homo sapiens
  misc_feature: Table A; Target 98918; HLA-B*15:03; UGT2B11; ENSG00000213759; TAA
ALGLNTRLY

SEQ ID NO: 98919 - protein, 9 aa, Homo sapiens
  misc_feature: Table A; Target 98919; HLA-C*07:04; UGT2B11; ENSG00000213759; TAA
ALGLNTRLY

SEQ ID NO: 98920 - protein, 9 aa, Homo sapiens
  misc_feature: Table A; Target 98920; HLA-C*16:01; UGT2B11; ENSG00000213759; TAA
ALGLNTRLY

SEQ ID NO: 98921 - protein, 10 aa, Homo sapiens
  misc_feature: Table A; Target 98921; HLA-A*02:03; UGT2B11; ENSG00000213759; TAA
ALKTVINDPL

SEQ ID NO: 98922 - protein, 10 aa, Homo sapiens
  misc_feature: Table A; Target 98922; HLA-A*02:04; UGT2B11; ENSG00000213759; TAA
ALKTVINDPL

SEQ ID NO: 98923 - protein, 10 aa, Homo sapiens
  misc_feature: Table A; Target 98923; HLA-A*02:07; UGT2B11; ENSG00000213759; TAA
ALKTVINDPL

SEQ ID NO: 98924 - protein, 11 aa, Homo sapiens
  misc_feature: Table A; Target 98924; HLA-A*01:01; UGT2B11; ENSG00000213759; TAA
ALKTVINDPLY

SEQ ID NO: 98925 - protein, 11 aa, Homo sapiens
  misc_feature: Table A; Target 98925; HLA-A*29:02; UGT2B11; ENSG00000213759; TAA
ALKTVINDPLY

SEQ ID NO: 98926 - protein, 11 aa, Homo sapiens
  misc_feature: Table A; Target 98926; HLA-A*30:02; UGT2B11; ENSG00000213759; TAA
ALKTVINDPLY

SEQ ID NO: 98927 - protein, 11 aa, Homo sapiens
  misc_feature: Table A; Target 98927; HLA-B*15:01; UGT2B11; ENSG00000213759; TAA
ALKTVINDPLY

SEQ ID NO: 98928 - protein, 8 aa, Homo sapiens
  misc_feature: Table A; Target 98928; HLA-A*02:01; UGT2B11; ENSG00000213759; TAA
ALLNIRFV

SEQ ID NO: 98929 - protein, 8 aa, Homo sapiens
  misc_feature: Table A; Target 98929; HLA-A*02:03; UGT2B11; ENSG00000213759; TAA
ALLNIRFV

SEQ ID NO: 98930 - protein, 8 aa, Homo sapiens
  misc_feature: Table A; Target 98930; HLA-A*02:04; UGT2B11; ENSG00000213759; TAA
ALLNIRFV

SEQ ID NO: 98931 - protein, 9 aa, Homo sapiens
  misc_feature: Table A; Target 98931; HLA-A*02:04; UGT2B11; ENSG00000213759; TAA
ALLNIRFVY

SEQ ID NO: 98932 - protein, 9 aa, Homo sapiens
  misc_feature: Table A; Target 98932; HLA-A*03:01; UGT2B11; ENSG00000213759; TAA
ALLNIRFVY

SEQ ID NO: 98933 - protein, 9 aa, Homo sapiens
  misc_feature: Table A; Target 98933; HLA-A*29:02; UGT2B11; ENSG00000213759; TAA
ALLNIRFVY

SEQ ID NO: 98934 - protein, 9 aa, Homo sapiens
  misc_feature: Table A; Target 98934; HLA-A*30:02; UGT2B11; ENSG00000213759; TAA
ALLNIRFVY

SEQ ID NO: 98935 - protein, 9 aa, Homo sapiens
  misc_feature: Table A; Target 98935; HLA-A*31:01; UGT2B11; ENSG00000213759; TAA
ALLNIRFVY

SEQ ID NO: 98936 - protein, 9 aa, Homo sapiens
  misc_feature: Table A; Target 98936; HLA-A*32:01; UGT2B11; ENSG00000213759; TAA
ALLNIRFVY

SEQ ID NO: 98937 - protein, 9 aa, Homo sapiens
  misc_feature: Table A; Target 98937; HLA-B*15:01; UGT2B11; ENSG00000213759; TAA
ALLNIRFVY

SEQ ID NO: 98938 - protein, 9 aa, Homo sapiens
  misc_feature: Table A; Target 98938; HLA-B*15:03; UGT2B11; ENSG00000213759; TAA
ALLNIRFVY

SEQ ID NO: 98939 - protein, 9 aa, Homo sapiens
  misc_feature: Table A; Target 98939; HLA-B*44:02; UGT2B11; ENSG00000213759; TAA
ALLNIRFVY

SEQ ID NO: 98940 - protein, 9 aa, Homo sapiens
  misc_feature: Table A; Target 98940; HLA-B*44:03; UGT2B11; ENSG00000213759; TAA
ALLNIRFVY

SEQ ID NO: 98941 - protein, 9 aa, Homo sapiens
  misc_feature: Table A; Target 98941; HLA-B*46:01; UGT2B11; ENSG00000213759; TAA
ALLNIRFVY

SEQ ID NO: 98942 - protein, 9 aa, Homo sapiens
  misc_feature: Table A; Target 98942; HLA-B*57:01; UGT2B11; ENSG00000213759; TAA
ALLNIRFVY

SEQ ID NO: 98943 - protein, 9 aa, Homo sapiens
  misc_feature: Table A; Target 98943; HLA-C*02:02; UGT2B11; ENSG00000213759; TAA
ALLNIRFVY

SEQ ID NO: 98944 - protein, 9 aa, Homo sapiens
  misc_feature: Table A; Target 98944; HLA-C*16:01; UGT2B11; ENSG00000213759; TAA
ALLNIRFVY

SEQ ID NO: 98945 - protein, 10 aa, Homo sapiens
  misc_feature: Table A; Target 98945; HLA-A*02:01; UGT2B11; ENSG00000213759; TAA
ALLNIRFVYS

SEQ ID NO: 98946 - protein, 10 aa, Homo sapiens
  misc_feature: Table A; Target 98946; HLA-A*02:04; UGT2B11; ENSG00000213759; TAA
ALLNIRFVYS

SEQ ID NO: 98947 - protein, 11 aa, Homo sapiens
  misc_feature: Table A; Target 98947; HLA-A*02:01; UGT2B11; ENSG00000213759; TAA
ALLNIRFVYSL

SEQ ID NO: 98948 - protein, 11 aa, Homo sapiens
  misc_feature: Table A; Target 98948; HLA-A*02:04; UGT2B11; ENSG00000213759; TAA
ALLNIRFVYSL

SEQ ID NO: 98949 - protein, 8 aa, Homo sapiens
  misc_feature: Table A; Target 98949; HLA-A*30:01; UGT2B11; ENSG00000213759; TAA
ANVIATAL

SEQ ID NO: 98950 - protein, 8 aa, Homo sapiens
  misc_feature: Table A; Target 98950; HLA-B*08:01; UGT2B11; ENSG00000213759; TAA
ANVIATAL

SEQ ID NO: 98951 - protein, 8 aa, Homo sapiens
  misc_feature: Table A; Target 98951; HLA-B*27:05; UGT2B11; ENSG00000213759; TAA
ANVIATAL

SEQ ID NO: 98952 - protein, 8 aa, Homo sapiens
  misc_feature: Table A; Target 98952; HLA-B*37:01; UGT2B11; ENSG00000213759; TAA
ANVIATAL

SEQ ID NO: 98953 - protein, 8 aa, Homo sapiens
  misc_feature: Table A; Target 98953; HLA-B*40:02; UGT2B11; ENSG00000213759; TAA
ANVIATAL

SEQ ID NO: 98954 - protein, 8 aa, Homo sapiens
  misc_feature: Table A; Target 98954; HLA-C*01:02; UGT2B11; ENSG00000213759; TAA
ANVIATAL

SEQ ID NO: 98955 - protein, 8 aa, Homo sapiens
  misc_feature: Table A; Target 98955; HLA-C*03:03; UGT2B11; ENSG00000213759; TAA
ANVIATAL

SEQ ID NO: 98956 - protein, 8 aa, Homo sapiens
  misc_feature: Table A; Target 98956; HLA-C*03:04; UGT2B11; ENSG00000213759; TAA
ANVIATAL

SEQ ID NO: 98957 - protein, 8 aa, Homo sapiens
  misc_feature: Table A; Target 98957; HLA-C*04:01; UGT2B11; ENSG00000213759; TAA
ANVIATAL

SEQ ID NO: 98958 - protein, 8 aa, Homo sapiens
  misc_feature: Table A; Target 98958; HLA-C*07:01; UGT2B11; ENSG00000213759; TAA
ANVIATAL

SEQ ID NO: 98959 - protein, 8 aa, Homo sapiens
  misc_feature: Table A; Target 98959; HLA-C*07:02; UGT2B11; ENSG00000213759; TAA
ANVIATAL

SEQ ID NO: 98960 - protein, 8 aa, Homo sapiens
  misc_feature: Table A; Target 98960; HLA-C*14:02; UGT2B11; ENSG00000213759; TAA
ANVIATAL

SEQ ID NO: 98961 - protein, 8 aa, Homo sapiens
  misc_feature: Table A; Target 98961; HLA-C*16:01; UGT2B11; ENSG00000213759; TAA
ANVIATAL

SEQ ID NO: 98962 - protein, 8 aa, Homo sapiens
  misc_feature: Table A; Target 98962; HLA-B*37:01; UGT2B11; ENSG00000213759; TAA
ASSASILF

SEQ ID NO: 98963 - protein, 8 aa, Homo sapiens
  misc_feature: Table A; Target 98963; HLA-B*58:01; UGT2B11; ENSG00000213759; TAA
ASSASILF

SEQ ID NO: 98964 - protein, 8 aa, Homo sapiens
  misc_feature: Table A; Target 98964; HLA-C*16:01; UGT2B11; ENSG00000213759; TAA
ASTLKFEV

SEQ ID NO: 98965 - protein, 9 aa, Homo sapiens
  misc_feature: Table A; Target 98965; HLA-A*01:01; UGT2B11; ENSG00000213759; TAA
ASTLKFEVY

SEQ ID NO: 98966 - protein, 9 aa, Homo sapiens
  misc_feature: Table A; Target 98966; HLA-A*29:02; UGT2B11; ENSG00000213759; TAA
ASTLKFEVY

SEQ ID NO: 98967 - protein, 9 aa, Homo sapiens
  misc_feature: Table A; Target 98967; HLA-A*30:02; UGT2B11; ENSG00000213759; TAA
ASTLKFEVY

SEQ ID NO: 98968 - protein, 9 aa, Homo sapiens
  misc_feature: Table A; Target 98968; HLA-A*32:01; UGT2B11; ENSG00000213759; TAA
ASTLKFEVY

SEQ ID NO: 98969 - protein, 9 aa, Homo sapiens
  misc_feature: Table A; Target 98969; HLA-B*15:01; UGT2B11; ENSG00000213759; TAA
ASTLKFEVY

SEQ ID NO: 98970 - protein, 9 aa, Homo sapiens
  misc_feature: Table A; Target 98970; HLA-B*15:03; UGT2B11; ENSG00000213759; TAA
ASTLKFEVY

SEQ ID NO: 98971 - protein, 9 aa, Homo sapiens
  misc_feature: Table A; Target 98971; HLA-B*46:01; UGT2B11; ENSG00000213759; TAA
ASTLKFEVY

SEQ ID NO: 98972 - protein, 9 aa, Homo sapiens
  misc_feature: Table A; Target 98972; HLA-B*57:01; UGT2B11; ENSG00000213759; TAA
ASTLKFEVY

SEQ ID NO: 98973 - protein, 9 aa, Homo sapiens
  misc_feature: Table A; Target 98973; HLA-B*58:01; UGT2B11; ENSG00000213759; TAA
ASTLKFEVY

SEQ ID NO: 98974 - protein, 9 aa, Homo sapiens
  misc_feature: Table A; Target 98974; HLA-C*02:02; UGT2B11; ENSG00000213759; TAA
ASTLKFEVY

SEQ ID NO: 98975 - protein, 9 aa, Homo sapiens
  misc_feature: Table A; Target 98975; HLA-C*16:01; UGT2B11; ENSG00000213759; TAA
ASTLKFEVY

SEQ ID NO: 98976 - protein, 10 aa, Homo sapiens
  misc_feature: Table A; Target 98976; HLA-A*03:01; UGT2B11; ENSG00000213759; TAA
ATALAKIPQK

SEQ ID NO: 98977 - protein, 10 aa, Homo sapiens
  misc_feature: Table A; Target 98977; HLA-A*03:02; UGT2B11; ENSG00000213759; TAA
ATALAKIPQK

SEQ ID NO: 98978 - protein, 10 aa, Homo sapiens
  misc_feature: Table A; Target 98978; HLA-A*11:01; UGT2B11; ENSG00000213759; TAA
ATALAKIPQK

SEQ ID NO: 98979 - protein, 10 aa, Homo sapiens
  misc_feature: Table A; Target 98979; HLA-A*68:01; UGT2B11; ENSG00000213759; TAA
ATALAKIPQK

SEQ ID NO: 98980 - protein, 11 aa, Homo sapiens
  misc_feature: Table A; Target 98980; HLA-A*68:02; UGT2B11; ENSG00000213759; TAA
ATALAKIPQKV

SEQ ID NO: 98981 - protein, 9 aa, Homo sapiens
  misc_feature: Table A; Target 98981; HLA-A*03:01; UGT2B11; ENSG00000213759; TAA
ATVIFIITK

SEQ ID NO: 98982 - protein, 9 aa, Homo sapiens
  misc_feature: Table A; Target 98982; HLA-A*03:02; UGT2B11; ENSG00000213759; TAA
ATVIFIITK

SEQ ID NO: 98983 - protein, 9 aa, Homo sapiens
  misc_feature: Table A; Target 98983; HLA-A*11:01; UGT2B11; ENSG00000213759; TAA
ATVIFIITK

SEQ ID NO: 98984 - protein, 9 aa, Homo sapiens
  misc_feature: Table A; Target 98984; HLA-A*31:01; UGT2B11; ENSG00000213759; TAA
ATVIFIITK

SEQ ID NO: 98985 - protein, 9 aa, Homo sapiens
  misc_feature: Table A; Target 98985; HLA-A*68:01; UGT2B11; ENSG00000213759; TAA
ATVIFIITK

SEQ ID NO: 98986 - protein, 9 aa, Homo sapiens
  misc_feature: Table A; Target 98986; HLA-B*27:02; UGT2B11; ENSG00000213759; TAA
ATVIFIITK

SEQ ID NO: 98987 - protein, 9 aa, Homo sapiens
  misc_feature: Table A; Target 98987; HLA-B*57:01; UGT2B11; ENSG00000213759; TAA
ATVIFIITK

SEQ ID NO: 98988 - protein, 9 aa, Homo sapiens
  misc_feature: Table A; Target 98988; HLA-C*07:06; UGT2B11; ENSG00000213759; TAA
ATVIFIITK

SEQ ID NO: 98989 - protein, 10 aa, Homo sapiens
  misc_feature: Table A; Target 98989; HLA-A*25:01; UGT2B11; ENSG00000213759; TAA
ATVIFIITKF

SEQ ID NO: 98990 - protein, 10 aa, Homo sapiens
  misc_feature: Table A; Target 98990; HLA-A*26:01; UGT2B11; ENSG00000213759; TAA
ATVIFIITKF

SEQ ID NO: 98991 - protein, 10 aa, Homo sapiens
  misc_feature: Table A; Target 98991; HLA-A*68:02; UGT2B11; ENSG00000213759; TAA
ATVIFIITKF

SEQ ID NO: 98992 - protein, 10 aa, Homo sapiens
  misc_feature: Table A; Target 98992; HLA-B*44:02; UGT2B11; ENSG00000213759; TAA
ATVIFIITKF

SEQ ID NO: 98993 - protein, 10 aa, Homo sapiens
  misc_feature: Table A; Target 98993; HLA-B*57:01; UGT2B11; ENSG00000213759; TAA
ATVIFIITKF

SEQ ID NO: 98994 - protein, 9 aa, Homo sapiens
  misc_feature: Table A; Target 98994; HLA-A*02:01; UGT2B11; ENSG00000213759; TAA
AVFPCGELL

SEQ ID NO: 98995 - protein, 9 aa, Homo sapiens
  misc_feature: Table A; Target 98995; HLA-A*02:04; UGT2B11; ENSG00000213759; TAA
AVFPCGELL

SEQ ID NO: 98996 - protein, 9 aa, Homo sapiens
  misc_feature: Table A; Target 98996; HLA-A*02:07; UGT2B11; ENSG00000213759; TAA
AVFPCGELL

SEQ ID NO: 98997 - protein, 9 aa, Homo sapiens
  misc_feature: Table A; Target 98997; HLA-A*03:02; UGT2B11; ENSG00000213759; TAA
AVFPCGELL

SEQ ID NO: 98998 - protein, 9 aa, Homo sapiens
  misc_feature: Table A; Target 98998; HLA-A*23:01; UGT2B11; ENSG00000213759; TAA
AVFPCGELL

SEQ ID NO: 98999 - protein, 9 aa, Homo sapiens
  misc_feature: Table A; Target 98999; HLA-A*24:02; UGT2B11; ENSG00000213759; TAA
AVFPCGELL

SEQ ID NO: 99000 - protein, 9 aa, Homo sapiens
  misc_feature: Table A; Target 99000; HLA-A*32:01; UGT2B11; ENSG00000213759; TAA
AVFPCGELL

SEQ ID NO: 99001 - protein, 9 aa, Homo sapiens
  misc_feature: Table A; Target 99001; HLA-A*68:02; UGT2B11; ENSG00000213759; TAA
AVFPCGELL

SEQ ID NO: 99002 - protein, 9 aa, Homo sapiens
  misc_feature: Table A; Target 99002; HLA-B*13:02; UGT2B11; ENSG00000213759; TAA
AVFPCGELL

SEQ ID NO: 99003 - protein, 9 aa, Homo sapiens
  misc_feature: Table A; Target 99003; HLA-B*15:01; UGT2B11; ENSG00000213759; TAA
AVFPCGELL

SEQ ID NO: 99004 - protein, 9 aa, Homo sapiens
  misc_feature: Table A; Target 99004; HLA-B*27:05; UGT2B11; ENSG00000213759; TAA
AVFPCGELL

SEQ ID NO: 99005 - protein, 9 aa, Homo sapiens
  misc_feature: Table A; Target 99005; HLA-B*38:01; UGT2B11; ENSG00000213759; TAA
AVFPCGELL

SEQ ID NO: 99006 - protein, 9 aa, Homo sapiens
  misc_feature: Table A; Target 99006; HLA-B*58:01; UGT2B11; ENSG00000213759; TAA
AVFPCGELL

SEQ ID NO: 99007 - protein, 9 aa, Homo sapiens
  misc_feature: Table A; Target 99007; HLA-C*02:02; UGT2B11; ENSG00000213759; TAA
AVFPCGELL

SEQ ID NO: 99008 - protein, 9 aa, Homo sapiens
  misc_feature: Table A; Target 99008; HLA-C*03:03; UGT2B11; ENSG00000213759; TAA
AVFPCGELL

SEQ ID NO: 99009 - protein, 9 aa, Homo sapiens
  misc_feature: Table A; Target 99009; HLA-C*03:04; UGT2B11; ENSG00000213759; TAA
AVFPCGELL

SEQ ID NO: 99010 - protein, 11 aa, Homo sapiens
  misc_feature: Table A; Target 99010; HLA-B*56:01; UGT2B11; ENSG00000213759; TAA
AVFPCGELLAA

SEQ ID NO: 99011 - protein, 9 aa, Homo sapiens
  misc_feature: Table A; Target 99011; HLA-A*24:02; UGT2B11; ENSG00000213759; TAA
AVRLDFNTM

SEQ ID NO: 99012 - protein, 9 aa, Homo sapiens
  misc_feature: Table A; Target 99012; HLA-A*31:01; UGT2B11; ENSG00000213759; TAA
AVRLDFNTM

SEQ ID NO: 99013 - protein, 9 aa, Homo sapiens
  misc_feature: Table A; Target 99013; HLA-A*32:01; UGT2B11; ENSG00000213759; TAA
AVRLDFNTM

SEQ ID NO: 99014 - protein, 9 aa, Homo sapiens
  misc_feature: Table A; Target 99014; HLA-B*07:02; UGT2B11; ENSG00000213759; TAA
AVRLDFNTM

SEQ ID NO: 99015 - protein, 9 aa, Homo sapiens
  misc_feature: Table A; Target 99015; HLA-B*08:01; UGT2B11; ENSG00000213759; TAA
AVRLDFNTM

SEQ ID NO: 99016 - protein, 9 aa, Homo sapiens
  misc_feature: Table A; Target 99016; HLA-B*15:01; UGT2B11; ENSG00000213759; TAA
AVRLDFNTM

SEQ ID NO: 99017 - protein, 9 aa, Homo sapiens
  misc_feature: Table A; Target 99017; HLA-B*15:03; UGT2B11; ENSG00000213759; TAA
AVRLDFNTM

SEQ ID NO: 99018 - protein, 9 aa, Homo sapiens
  misc_feature: Table A; Target 99018; HLA-B*37:01; UGT2B11; ENSG00000213759; TAA
AVRLDFNTM

SEQ ID NO: 99019 - protein, 9 aa, Homo sapiens
  misc_feature: Table A; Target 99019; HLA-B*40:02; UGT2B11; ENSG00000213759; TAA
AVRLDFNTM

SEQ ID NO: 99020 - protein, 9 aa, Homo sapiens
  misc_feature: Table A; Target 99020; HLA-B*46:01; UGT2B11; ENSG00000213759; TAA
AVRLDFNTM

SEQ ID NO: 99021 - protein, 9 aa, Homo sapiens
  misc_feature: Table A; Target 99021; HLA-B*56:01; UGT2B11; ENSG00000213759; TAA
AVRLDFNTM

SEQ ID NO: 99022 - protein, 9 aa, Homo sapiens
  misc_feature: Table A; Target 99022; HLA-B*57:01; UGT2B11; ENSG00000213759; TAA
AVRLDFNTM

SEQ ID NO: 99023 - protein, 9 aa, Homo sapiens
  misc_feature: Table A; Target 99023; HLA-C*01:02; UGT2B11; ENSG00000213759; TAA
AVRLDFNTM

SEQ ID NO: 99024 - protein, 9 aa, Homo sapiens
  misc_feature: Table A; Target 99024; HLA-C*06:02; UGT2B11; ENSG00000213759; TAA
AVRLDFNTM

SEQ ID NO: 99025 - protein, 9 aa, Homo sapiens
  misc_feature: Table A; Target 99025; HLA-C*07:02; UGT2B11; ENSG00000213759; TAA
AVRLDFNTM

SEQ ID NO: 99026 - protein, 9 aa, Homo sapiens
  misc_feature: Table A; Target 99026; HLA-C*07:04; UGT2B11; ENSG00000213759; TAA
AVRLDFNTM

SEQ ID NO: 99027 - protein, 9 aa, Homo sapiens
  misc_feature: Table A; Target 99027; HLA-C*14:02; UGT2B11; ENSG00000213759; TAA
AVRLDFNTM

SEQ ID NO: 99028 - protein, 9 aa, Homo sapiens
  misc_feature: Table A; Target 99028; HLA-A*68:02; UGT2B11; ENSG00000213759; TAA
CVATVIFII

SEQ ID NO: 99029 - protein, 11 aa, Homo sapiens
  misc_feature: Table A; Target 99029; HLA-A*11:01; UGT2B11; ENSG00000213759; TAA
CVATVIFIITK

SEQ ID NO: 99030 - protein, 8 aa, Homo sapiens
  misc_feature: Table A; Target 99030; HLA-A*33:01; UGT2B11; ENSG00000213759; TAA
DALGLNTR

SEQ ID NO: 99031 - protein, 8 aa, Homo sapiens
  misc_feature: Table A; Target 99031; HLA-A*33:03; UGT2B11; ENSG00000213759; TAA
DALGLNTR

SEQ ID NO: 99032 - protein, 8 aa, Homo sapiens
  misc_feature: Table A; Target 99032; HLA-B*51:01; UGT2B11; ENSG00000213759; TAA
DALGLNTR

SEQ ID NO: 99033 - protein, 9 aa, Homo sapiens
  misc_feature: Table A; Target 99033; HLA-A*33:01; UGT2B11; ENSG00000213759; TAA
DALGLNTRL

SEQ ID NO: 99034 - protein, 9 aa, Homo sapiens
  misc_feature: Table A; Target 99034; HLA-B*35:03; UGT2B11; ENSG00000213759; TAA
DALGLNTRL

SEQ ID NO: 99035 - protein, 9 aa, Homo sapiens
  misc_feature: Table A; Target 99035; HLA-B*51:01; UGT2B11; ENSG00000213759; TAA
DALGLNTRL

SEQ ID NO: 99036 - protein, 10 aa, Homo sapiens
  misc_feature: Table A; Target 99036; HLA-A*25:01; UGT2B11; ENSG00000213759; TAA
DALGLNTRLY

SEQ ID NO: 99037 - protein, 10 aa, Homo sapiens
  misc_feature: Table A; Target 99037; HLA-A*26:01; UGT2B11; ENSG00000213759; TAA
DALGLNTRLY

SEQ ID NO: 99038 - protein, 10 aa, Homo sapiens
  misc_feature: Table A; Target 99038; HLA-B*35:01; UGT2B11; ENSG00000213759; TAA
DALGLNTRLY

SEQ ID NO: 99039 - protein, 10 aa, Homo sapiens
  misc_feature: Table A; Target 99039; HLA-C*07:01; UGT2B11; ENSG00000213759; TAA
DALGLNTRLY

SEQ ID NO: 99040 - protein, 11 aa, Homo sapiens
  misc_feature: Table A; Target 99040; HLA-A*33:01; UGT2B11; ENSG00000213759; TAA
DALGLNTRLYK

SEQ ID NO: 99041 - protein, 9 aa, Homo sapiens
  misc_feature: Table A; Target 99041; HLA-A*33:01; UGT2B11; ENSG00000213759; TAA
DASTLKFEV

SEQ ID NO: 99042 - protein, 9 aa, Homo sapiens
  misc_feature: Table A; Target 99042; HLA-A*68:02; UGT2B11; ENSG00000213759; TAA
DASTLKFEV

SEQ ID NO: 99043 - protein, 9 aa, Homo sapiens
  misc_feature: Table A; Target 99043; HLA-B*51:01; UGT2B11; ENSG00000213759; TAA
DASTLKFEV

SEQ ID NO: 99044 - protein, 9 aa, Homo sapiens
  misc_feature: Table A; Target 99044; HLA-C*12:03; UGT2B11; ENSG00000213759; TAA
DASTLKFEV

SEQ ID NO: 99045 - protein, 9 aa, Homo sapiens
  misc_feature: Table A; Target 99045; HLA-C*16:02; UGT2B11; ENSG00000213759; TAA
DASTLKFEV

SEQ ID NO: 99046 - protein, 10 aa, Homo sapiens
  misc_feature: Table A; Target 99046; HLA-A*25:01; UGT2B11; ENSG00000213759; TAA
DASTLKFEVY

SEQ ID NO: 99047 - protein, 10 aa, Homo sapiens
  misc_feature: Table A; Target 99047; HLA-A*26:01; UGT2B11; ENSG00000213759; TAA
DASTLKFEVY

SEQ ID NO: 99048 - protein, 10 aa, Homo sapiens
  misc_feature: Table A; Target 99048; HLA-B*35:01; UGT2B11; ENSG00000213759; TAA
DASTLKFEVY

SEQ ID NO: 99049 - protein, 10 aa, Homo sapiens
  misc_feature: Table A; Target 99049; HLA-C*03:03; UGT2B11; ENSG00000213759; TAA
DASTLKFEVY

SEQ ID NO: 99050 - protein, 9 aa, Homo sapiens
  misc_feature: Table A; Target 99050; HLA-A*68:02; UGT2B11; ENSG00000213759; TAA
DAVFPCGEL

SEQ ID NO: 99051 - protein, 9 aa, Homo sapiens
  misc_feature: Table A; Target 99051; HLA-B*35:01; UGT2B11; ENSG00000213759; TAA
DAVFPCGEL

SEQ ID NO: 99052 - protein, 9 aa, Homo sapiens
  misc_feature: Table A; Target 99052; HLA-B*35:03; UGT2B11; ENSG00000213759; TAA
DAVFPCGEL

SEQ ID NO: 99053 - protein, 9 aa, Homo sapiens
  misc_feature: Table A; Target 99053; HLA-B*51:01; UGT2B11; ENSG00000213759; TAA
DAVFPCGEL

SEQ ID NO: 99054 - protein, 9 aa, Homo sapiens
  misc_feature: Table A; Target 99054; HLA-C*03:04; UGT2B11; ENSG00000213759; TAA
DAVFPCGEL

SEQ ID NO: 99055 - protein, 10 aa, Homo sapiens
  misc_feature: Table A; Target 99055; HLA-A*68:02; UGT2B11; ENSG00000213759; TAA
DAVFPCGELL

SEQ ID NO: 99056 - protein, 10 aa, Homo sapiens
  misc_feature: Table A; Target 99056; HLA-C*07:01; UGT2B11; ENSG00000213759; TAA
DAVFPCGELL

SEQ ID NO: 99057 - protein, 11 aa, Homo sapiens
  misc_feature: Table A; Target 99057; HLA-A*33:01; UGT2B11; ENSG00000213759; TAA
DFNTMSSTDLL

SEQ ID NO: 99058 - protein, 9 aa, Homo sapiens
  misc_feature: Table A; Target 99058; HLA-A*33:01; UGT2B11; ENSG00000213759; TAA
DFVGGFHCK

SEQ ID NO: 99059 - protein, 9 aa, Homo sapiens
  misc_feature: Table A; Target 99059; HLA-A*33:03; UGT2B11; ENSG00000213759; TAA
DFVGGFHCK

SEQ ID NO: 99060 - protein, 9 aa, Homo sapiens
  misc_feature: Table A; Target 99060; HLA-A*26:01; UGT2B11; ENSG00000213759; TAA
DIVFADAVF

SEQ ID NO: 99061 - protein, 9 aa, Homo sapiens
  misc_feature: Table A; Target 99061; HLA-A*33:01; UGT2B11; ENSG00000213759; TAA
DLLGHPKTR

SEQ ID NO: 99062 - protein, 9 aa, Homo sapiens
  misc_feature: Table A; Target 99062; HLA-A*33:03; UGT2B11; ENSG00000213759; TAA
DLLGHPKTR

SEQ ID NO: 99063 - protein, 9 aa, Homo sapiens
  misc_feature: Table A; Target 99063; HLA-A*02:03; UGT2B11; ENSG00000213759; TAA
DLLNALKTV

SEQ ID NO: 99064 - protein, 9 aa, Homo sapiens
  misc_feature: Table A; Target 99064; HLA-B*51:01; UGT2B11; ENSG00000213759; TAA
DLLNALKTV

SEQ ID NO: 99065 - protein, 8 aa, Homo sapiens
  misc_feature: Table A; Target 99065; HLA-B*08:01; UGT2B11; ENSG00000213759; TAA
DMKKWDQF

SEQ ID NO: 99066 - protein, 9 aa, Homo sapiens
  misc_feature: Table A; Target 99066; HLA-A*33:01; UGT2B11; ENSG00000213759; TAA
DNIAHMKAK

SEQ ID NO: 99067 - protein, 8 aa, Homo sapiens
  misc_feature: Table A; Target 99067; HLA-B*08:01; UGT2B11; ENSG00000213759; TAA
DPLYKENI

SEQ ID NO: 99068 - protein, 8 aa, Homo sapiens
  misc_feature: Table A; Target 99068; HLA-B*51:01; UGT2B11; ENSG00000213759; TAA
DPLYKENI

SEQ ID NO: 99069 - protein, 9 aa, Homo sapiens
  misc_feature: Table A; Target 99069; HLA-B*08:01; UGT2B11; ENSG00000213759; TAA
DPLYKENIM

SEQ ID NO: 99070 - protein, 9 aa, Homo sapiens
  misc_feature: Table A; Target 99070; HLA-B*35:01; UGT2B11; ENSG00000213759; TAA
DPLYKENIM

SEQ ID NO: 99071 - protein, 9 aa, Homo sapiens
  misc_feature: Table A; Target 99071; HLA-B*35:03; UGT2B11; ENSG00000213759; TAA
DPLYKENIM

SEQ ID NO: 99072 - protein, 9 aa, Homo sapiens
  misc_feature: Table A; Target 99072; HLA-B*51:01; UGT2B11; ENSG00000213759; TAA
DPLYKENIM

SEQ ID NO: 99073 - protein, 9 aa, Homo sapiens
  misc_feature: Table A; Target 99073; HLA-B*55:01; UGT2B11; ENSG00000213759; TAA
DPLYKENIM

SEQ ID NO: 99074 - protein, 9 aa, Homo sapiens
  misc_feature: Table A; Target 99074; HLA-C*03:03; UGT2B11; ENSG00000213759; TAA
DPLYKENIM

SEQ ID NO: 99075 - protein, 11 aa, Homo sapiens
  misc_feature: Table A; Target 99075; HLA-A*33:01; UGT2B11; ENSG00000213759; TAA
DPLYKENIMKL

SEQ ID NO: 99076 - protein, 8 aa, Homo sapiens
  misc_feature: Table A; Target 99076; HLA-B*07:02; UGT2B11; ENSG00000213759; TAA
DPNDASTL

SEQ ID NO: 99077 - protein, 8 aa, Homo sapiens
  misc_feature: Table A; Target 99077; HLA-B*35:01; UGT2B11; ENSG00000213759; TAA
DPNDASTL

SEQ ID NO: 99078 - protein, 8 aa, Homo sapiens
  misc_feature: Table A; Target 99078; HLA-B*35:03; UGT2B11; ENSG00000213759; TAA
DPNDASTL

SEQ ID NO: 99079 - protein, 8 aa, Homo sapiens
  misc_feature: Table A; Target 99079; HLA-B*51:01; UGT2B11; ENSG00000213759; TAA
DPNDASTL

SEQ ID NO: 99080 - protein, 9 aa, Homo sapiens
  misc_feature: Table A; Target 99080; HLA-A*33:01; UGT2B11; ENSG00000213759; TAA
DPNDASTLK

SEQ ID NO: 99081 - protein, 10 aa, Homo sapiens
  misc_feature: Table A; Target 99081; HLA-A*23:01; UGT2B11; ENSG00000213759; TAA
DPNDASTLKF

SEQ ID NO: 99082 - protein, 10 aa, Homo sapiens
  misc_feature: Table A; Target 99082; HLA-A*25:01; UGT2B11; ENSG00000213759; TAA
DPNDASTLKF

SEQ ID NO: 99083 - protein, 10 aa, Homo sapiens
  misc_feature: Table A; Target 99083; HLA-A*26:01; UGT2B11; ENSG00000213759; TAA
DPNDASTLKF

SEQ ID NO: 99084 - protein, 10 aa, Homo sapiens
  misc_feature: Table A; Target 99084; HLA-A*33:01; UGT2B11; ENSG00000213759; TAA
DPNDASTLKF

SEQ ID NO: 99085 - protein, 10 aa, Homo sapiens
  misc_feature: Table A; Target 99085; HLA-A*33:03; UGT2B11; ENSG00000213759; TAA
DPNDASTLKF

SEQ ID NO: 99086 - protein, 10 aa, Homo sapiens
  misc_feature: Table A; Target 99086; HLA-A*68:01; UGT2B11; ENSG00000213759; TAA
DPNDASTLKF

SEQ ID NO: 99087 - protein, 10 aa, Homo sapiens
  misc_feature: Table A; Target 99087; HLA-B*18:01; UGT2B11; ENSG00000213759; TAA
DPNDASTLKF

SEQ ID NO: 99088 - protein, 10 aa, Homo sapiens
  misc_feature: Table A; Target 99088; HLA-B*35:01; UGT2B11; ENSG00000213759; TAA
DPNDASTLKF

SEQ ID NO: 99089 - protein, 10 aa, Homo sapiens
  misc_feature: Table A; Target 99089; HLA-B*38:01; UGT2B11; ENSG00000213759; TAA
DPNDASTLKF

SEQ ID NO: 99090 - protein, 10 aa, Homo sapiens
  misc_feature: Table A; Target 99090; HLA-B*51:01; UGT2B11; ENSG00000213759; TAA
DPNDASTLKF

SEQ ID NO: 99091 - protein, 10 aa, Homo sapiens
  misc_feature: Table A; Target 99091; HLA-C*07:06; UGT2B11; ENSG00000213759; TAA
DPNDASTLKF

SEQ ID NO: 99092 - protein, 8 aa, Homo sapiens
  misc_feature: Table A; Target 99092; HLA-B*18:01; UGT2B11; ENSG00000213759; TAA
DQFYSEVL

SEQ ID NO: 99093 - protein, 8 aa, Homo sapiens
  misc_feature: Table A; Target 99093; HLA-B*39:01; UGT2B11; ENSG00000213759; TAA
DQFYSEVL

SEQ ID NO: 99094 - protein, 8 aa, Homo sapiens
  misc_feature: Table A; Target 99094; HLA-C*07:04; UGT2B11; ENSG00000213759; TAA
DQFYSEVL

SEQ ID NO: 99095 - protein, 10 aa, Homo sapiens
  misc_feature: Table A; Target 99095; HLA-A*33:01; UGT2B11; ENSG00000213759; TAA
DQFYSEVLGR

SEQ ID NO: 99096 - protein, 10 aa, Homo sapiens
  misc_feature: Table A; Target 99096; HLA-A*33:03; UGT2B11; ENSG00000213759; TAA
DQFYSEVLGR

SEQ ID NO: 99097 - protein, 10 aa, Homo sapiens
  misc_feature: Table A; Target 99097; HLA-A*68:01; UGT2B11; ENSG00000213759; TAA
DQFYSEVLGR

SEQ ID NO: 99098 - protein, 10 aa, Homo sapiens
  misc_feature: Table A; Target 99098; HLA-C*07:06; UGT2B11; ENSG00000213759; TAA
DQFYSEVLGR

SEQ ID NO: 99099 - protein, 8 aa, Homo sapiens
  misc_feature: Table A; Target 99099; HLA-A*33:01; UGT2B11; ENSG00000213759; TAA
DQMTFMER

SEQ ID NO: 99100 - protein, 8 aa, Homo sapiens
  misc_feature: Table A; Target 99100; HLA-A*33:03; UGT2B11; ENSG00000213759; TAA
DQMTFMER

SEQ ID NO: 99101 - protein, 8 aa, Homo sapiens
  misc_feature: Table A; Target 99101; HLA-B*27:02; UGT2B11; ENSG00000213759; TAA
DQMTFMER

SEQ ID NO: 99102 - protein, 8 aa, Homo sapiens
  misc_feature: Table A; Target 99102; HLA-C*07:06; UGT2B11; ENSG00000213759; TAA
DQMTFMER

SEQ ID NO: 99103 - protein, 9 aa, Homo sapiens
  misc_feature: Table A; Target 99103; HLA-A*02:01; UGT2B11; ENSG00000213759; TAA
DQMTFMERV

SEQ ID NO: 99104 - protein, 9 aa, Homo sapiens
  misc_feature: Table A; Target 99104; HLA-A*02:03; UGT2B11; ENSG00000213759; TAA
DQMTFMERV

SEQ ID NO: 99105 - protein, 9 aa, Homo sapiens
  misc_feature: Table A; Target 99105; HLA-A*02:04; UGT2B11; ENSG00000213759; TAA
DQMTFMERV

SEQ ID NO: 99106 - protein, 9 aa, Homo sapiens
  misc_feature: Table A; Target 99106; HLA-A*68:02; UGT2B11; ENSG00000213759; TAA
DQMTFMERV

SEQ ID NO: 99107 - protein, 9 aa, Homo sapiens
  misc_feature: Table A; Target 99107; HLA-B*13:02; UGT2B11; ENSG00000213759; TAA
DQMTFMERV

SEQ ID NO: 99108 - protein, 9 aa, Homo sapiens
  misc_feature: Table A; Target 99108; HLA-B*18:01; UGT2B11; ENSG00000213759; TAA
DQMTFMERV

SEQ ID NO: 99109 - protein, 9 aa, Homo sapiens
  misc_feature: Table A; Target 99109; HLA-B*38:01; UGT2B11; ENSG00000213759; TAA
DQMTFMERV

SEQ ID NO: 99110 - protein, 9 aa, Homo sapiens
  misc_feature: Table A; Target 99110; HLA-B*51:01; UGT2B11; ENSG00000213759; TAA
DQMTFMERV

SEQ ID NO: 99111 - protein, 9 aa, Homo sapiens
  misc_feature: Table A; Target 99111; HLA-A*25:01; UGT2B11; ENSG00000213759; TAA
DQPDNIAHM

SEQ ID NO: 99112 - protein, 9 aa, Homo sapiens
  misc_feature: Table A; Target 99112; HLA-A*26:01; UGT2B11; ENSG00000213759; TAA
DQPDNIAHM

SEQ ID NO: 99113 - protein, 9 aa, Homo sapiens
  misc_feature: Table A; Target 99113; HLA-A*33:01; UGT2B11; ENSG00000213759; TAA
DQPDNIAHM

SEQ ID NO: 99114 - protein, 9 aa, Homo sapiens
  misc_feature: Table A; Target 99114; HLA-A*68:01; UGT2B11; ENSG00000213759; TAA
DQPDNIAHM

SEQ ID NO: 99115 - protein, 9 aa, Homo sapiens
  misc_feature: Table A; Target 99115; HLA-A*68:02; UGT2B11; ENSG00000213759; TAA
DQPDNIAHM

SEQ ID NO: 99116 - protein, 9 aa, Homo sapiens
  misc_feature: Table A; Target 99116; HLA-B*38:01; UGT2B11; ENSG00000213759; TAA
DQPDNIAHM

SEQ ID NO: 99117 - protein, 9 aa, Homo sapiens
  misc_feature: Table A; Target 99117; HLA-B*39:01; UGT2B11; ENSG00000213759; TAA
DQPDNIAHM

SEQ ID NO: 99118 - protein, 9 aa, Homo sapiens
  misc_feature: Table A; Target 99118; HLA-B*51:01; UGT2B11; ENSG00000213759; TAA
DQPDNIAHM

SEQ ID NO: 99119 - protein, 9 aa, Homo sapiens
  misc_feature: Table A; Target 99119; HLA-C*07:01; UGT2B11; ENSG00000213759; TAA
DQPDNIAHM

SEQ ID NO: 99120 - protein, 9 aa, Homo sapiens
  misc_feature: Table A; Target 99120; HLA-C*07:04; UGT2B11; ENSG00000213759; TAA
DQPDNIAHM

SEQ ID NO: 99121 - protein, 10 aa, Homo sapiens
  misc_feature: Table A; Target 99121; HLA-A*03:02; UGT2B11; ENSG00000213759; TAA
DQPDNIAHMK

SEQ ID NO: 99122 - protein, 10 aa, Homo sapiens
  misc_feature: Table A; Target 99122; HLA-A*11:01; UGT2B11; ENSG00000213759; TAA
DQPDNIAHMK

SEQ ID NO: 99123 - protein, 10 aa, Homo sapiens
  misc_feature: Table A; Target 99123; HLA-A*26:01; UGT2B11; ENSG00000213759; TAA
DQPDNIAHMK

SEQ ID NO: 99124 - protein, 10 aa, Homo sapiens
  misc_feature: Table A; Target 99124; HLA-A*33:01; UGT2B11; ENSG00000213759; TAA
DQPDNIAHMK

SEQ ID NO: 99125 - protein, 10 aa, Homo sapiens
  misc_feature: Table A; Target 99125; HLA-A*33:03; UGT2B11; ENSG00000213759; TAA
DQPDNIAHMK

SEQ ID NO: 99126 - protein, 10 aa, Homo sapiens
  misc_feature: Table A; Target 99126; HLA-A*68:01; UGT2B11; ENSG00000213759; TAA
DQPDNIAHMK

SEQ ID NO: 99127 - protein, 10 aa, Homo sapiens
  misc_feature: Table A; Target 99127; HLA-B*27:02; UGT2B11; ENSG00000213759; TAA
DQPDNIAHMK

SEQ ID NO: 99128 - protein, 10 aa, Homo sapiens
  misc_feature: Table A; Target 99128; HLA-C*07:01; UGT2B11; ENSG00000213759; TAA
DQPDNIAHMK

SEQ ID NO: 99129 - protein, 9 aa, Homo sapiens
  misc_feature: Table A; Target 99129; HLA-A*25:01; UGT2B11; ENSG00000213759; TAA
DVIGFLLAC

SEQ ID NO: 99130 - protein, 9 aa, Homo sapiens
  misc_feature: Table A; Target 99130; HLA-A*26:01; UGT2B11; ENSG00000213759; TAA
DVIGFLLAC

SEQ ID NO: 99131 - protein, 9 aa, Homo sapiens
  misc_feature: Table A; Target 99131; HLA-A*68:02; UGT2B11; ENSG00000213759; TAA
DVIGFLLAC

SEQ ID NO: 99132 - protein, 9 aa, Homo sapiens
  misc_feature: Table A; Target 99132; HLA-B*54:01; UGT2B11; ENSG00000213759; TAA
DVIGFLLAC

SEQ ID NO: 99133 - protein, 10 aa, Homo sapiens
  misc_feature: Table A; Target 99133; HLA-A*25:01; UGT2B11; ENSG00000213759; TAA
DVIGFLLACV

SEQ ID NO: 99134 - protein, 10 aa, Homo sapiens
  misc_feature: Table A; Target 99134; HLA-A*26:01; UGT2B11; ENSG00000213759; TAA
DVIGFLLACV

SEQ ID NO: 99135 - protein, 10 aa, Homo sapiens
  misc_feature: Table A; Target 99135; HLA-A*68:02; UGT2B11; ENSG00000213759; TAA
DVIGFLLACV

SEQ ID NO: 99136 - protein, 9 aa, Homo sapiens
  misc_feature: Table A; Target 99136; HLA-A*25:01; UGT2B11; ENSG00000213759; TAA
DVVSNKKVM

SEQ ID NO: 99137 - protein, 9 aa, Homo sapiens
  misc_feature: Table A; Target 99137; HLA-A*26:01; UGT2B11; ENSG00000213759; TAA
DVVSNKKVM

SEQ ID NO: 99138 - protein, 9 aa, Homo sapiens
  misc_feature: Table A; Target 99138; HLA-B*08:01; UGT2B11; ENSG00000213759; TAA
DVVSNKKVM

SEQ ID NO: 99139 - protein, 9 aa, Homo sapiens
  misc_feature: Table A; Target 99139; HLA-C*07:01; UGT2B11; ENSG00000213759; TAA
DVVSNKKVM

SEQ ID NO: 99140 - protein, 10 aa, Homo sapiens
  misc_feature: Table A; Target 99140; HLA-A*33:01; UGT2B11; ENSG00000213759; TAA
DVVSNKKVMK

SEQ ID NO: 99141 - protein, 10 aa, Homo sapiens
  misc_feature: Table A; Target 99141; HLA-A*33:03; UGT2B11; ENSG00000213759; TAA
DVVSNKKVMK

SEQ ID NO: 99142 - protein, 10 aa, Homo sapiens
  misc_feature: Table A; Target 99142; HLA-A*68:01; UGT2B11; ENSG00000213759; TAA
DVVSNKKVMK

SEQ ID NO: 99143 - protein, 11 aa, Homo sapiens
  misc_feature: Table A; Target 99143; HLA-A*33:01; UGT2B11; ENSG00000213759; TAA
DVVSNKKVMKK

SEQ ID NO: 99144 - protein, 11 aa, Homo sapiens
  misc_feature: Table A; Target 99144; HLA-A*68:01; UGT2B11; ENSG00000213759; TAA
DVVSNKKVMKK

SEQ ID NO: 99145 - protein, 9 aa, Homo sapiens
  misc_feature: Table A; Target 99145; HLA-A*25:01; UGT2B11; ENSG00000213759; TAA
EAIYHGIPM

SEQ ID NO: 99146 - protein, 9 aa, Homo sapiens
  misc_feature: Table A; Target 99146; HLA-A*26:01; UGT2B11; ENSG00000213759; TAA
EAIYHGIPM

SEQ ID NO: 99147 - protein, 9 aa, Homo sapiens
  misc_feature: Table A; Target 99147; HLA-A*33:01; UGT2B11; ENSG00000213759; TAA
EAIYHGIPM

SEQ ID NO: 99148 - protein, 9 aa, Homo sapiens
  misc_feature: Table A; Target 99148; HLA-A*33:03; UGT2B11; ENSG00000213759; TAA
EAIYHGIPM

SEQ ID NO: 99149 - protein, 9 aa, Homo sapiens
  misc_feature: Table A; Target 99149; HLA-A*68:02; UGT2B11; ENSG00000213759; TAA
EAIYHGIPM

SEQ ID NO: 99150 - protein, 9 aa, Homo sapiens
  misc_feature: Table A; Target 99150; HLA-B*35:01; UGT2B11; ENSG00000213759; TAA
EAIYHGIPM

SEQ ID NO: 99151 - protein, 9 aa, Homo sapiens
  misc_feature: Table A; Target 99151; HLA-B*35:03; UGT2B11; ENSG00000213759; TAA
EAIYHGIPM

SEQ ID NO: 99152 - protein, 9 aa, Homo sapiens
  misc_feature: Table A; Target 99152; HLA-B*46:01; UGT2B11; ENSG00000213759; TAA
EAIYHGIPM

SEQ ID NO: 99153 - protein, 9 aa, Homo sapiens
  misc_feature: Table A; Target 99153; HLA-B*54:01; UGT2B11; ENSG00000213759; TAA
EAIYHGIPM

SEQ ID NO: 99154 - protein, 9 aa, Homo sapiens
  misc_feature: Table A; Target 99154; HLA-C*03:03; UGT2B11; ENSG00000213759; TAA
EAIYHGIPM

SEQ ID NO: 99155 - protein, 9 aa, Homo sapiens
  misc_feature: Table A; Target 99155; HLA-C*03:04; UGT2B11; ENSG00000213759; TAA
EAIYHGIPM

SEQ ID NO: 99156 - protein, 10 aa, Homo sapiens
  misc_feature: Table A; Target 99156; HLA-A*26:01; UGT2B11; ENSG00000213759; TAA
EAIYHGIPMV

SEQ ID NO: 99157 - protein, 10 aa, Homo sapiens
  misc_feature: Table A; Target 99157; HLA-A*68:02; UGT2B11; ENSG00000213759; TAA
EAIYHGIPMV

SEQ ID NO: 99158 - protein, 10 aa, Homo sapiens
  misc_feature: Table A; Target 99158; HLA-A*33:03; UGT2B11; ENSG00000213759; TAA
EFENIIMQQV

SEQ ID NO: 99159 - protein, 10 aa, Homo sapiens
  misc_feature: Table A; Target 99159; HLA-A*68:02; UGT2B11; ENSG00000213759; TAA
EFENIIMQQV

SEQ ID NO: 99160 - protein, 9 aa, Homo sapiens
  misc_feature: Table A; Target 99160; HLA-A*23:01; UGT2B11; ENSG00000213759; TAA
ELLAALLNI

SEQ ID NO: 99161 - protein, 10 aa, Homo sapiens
  misc_feature: Table A; Target 99161; HLA-A*33:03; UGT2B11; ENSG00000213759; TAA
ELLAALLNIR

SEQ ID NO: 99162 - protein, 9 aa, Homo sapiens
  misc_feature: Table A; Target 99162; HLA-A*26:01; UGT2B11; ENSG00000213759; TAA
ELVQRGHEV

SEQ ID NO: 99163 - protein, 9 aa, Homo sapiens
  misc_feature: Table A; Target 99163; HLA-A*68:02; UGT2B11; ENSG00000213759; TAA
ELVQRGHEV

SEQ ID NO: 99164 - protein, 9 aa, Homo sapiens
  misc_feature: Table A; Target 99164; HLA-B*08:01; UGT2B11; ENSG00000213759; TAA
ELVQRGHEV

SEQ ID NO: 99165 - protein, 9 aa, Homo sapiens
  misc_feature: Table A; Target 99165; HLA-A*02:03; UGT2B11; ENSG00000213759; TAA
ELYDIFRNF

SEQ ID NO: 99166 - protein, 9 aa, Homo sapiens
  misc_feature: Table A; Target 99166; HLA-A*02:04; UGT2B11; ENSG00000213759; TAA
ELYDIFRNF

SEQ ID NO: 99167 - protein, 9 aa, Homo sapiens
  misc_feature: Table A; Target 99167; HLA-A*02:07; UGT2B11; ENSG00000213759; TAA
ELYDIFRNF

SEQ ID NO: 99168 - protein, 9 aa, Homo sapiens
  misc_feature: Table A; Target 99168; HLA-A*03:01; UGT2B11; ENSG00000213759; TAA
ELYDIFRNF

SEQ ID NO: 99169 - protein, 9 aa, Homo sapiens
  misc_feature: Table A; Target 99169; HLA-A*23:01; UGT2B11; ENSG00000213759; TAA
ELYDIFRNF

SEQ ID NO: 99170 - protein, 9 aa, Homo sapiens
  misc_feature: Table A; Target 99170; HLA-A*24:02; UGT2B11; ENSG00000213759; TAA
ELYDIFRNF

SEQ ID NO: 99171 - protein, 9 aa, Homo sapiens
  misc_feature: Table A; Target 99171; HLA-A*25:01; UGT2B11; ENSG00000213759; TAA
ELYDIFRNF

SEQ ID NO: 99172 - protein, 9 aa, Homo sapiens
  misc_feature: Table A; Target 99172; HLA-A*26:01; UGT2B11; ENSG00000213759; TAA
ELYDIFRNF

SEQ ID NO: 99173 - protein, 9 aa, Homo sapiens
  misc_feature: Table A; Target 99173; HLA-A*29:02; UGT2B11; ENSG00000213759; TAA
ELYDIFRNF

SEQ ID NO: 99174 - protein, 9 aa, Homo sapiens
  misc_feature: Table A; Target 99174; HLA-A*33:01; UGT2B11; ENSG00000213759; TAA
ELYDIFRNF

SEQ ID NO: 99175 - protein, 9 aa, Homo sapiens
  misc_feature: Table A; Target 99175; HLA-A*33:03; UGT2B11; ENSG00000213759; TAA
ELYDIFRNF

SEQ ID NO: 99176 - protein, 9 aa, Homo sapiens
  misc_feature: Table A; Target 99176; HLA-A*68:02; UGT2B11; ENSG00000213759; TAA
ELYDIFRNF

SEQ ID NO: 99177 - protein, 9 aa, Homo sapiens
  misc_feature: Table A; Target 99177; HLA-B*44:02; UGT2B11; ENSG00000213759; TAA
ELYDIFRNF

SEQ ID NO: 99178 - protein, 9 aa, Homo sapiens
  misc_feature: Table A; Target 99178; HLA-B*44:03; UGT2B11; ENSG00000213759; TAA
ELYDIFRNF

SEQ ID NO: 99179 - protein, 9 aa, Homo sapiens
  misc_feature: Table A; Target 99179; HLA-B*57:01; UGT2B11; ENSG00000213759; TAA
ELYDIFRNF

SEQ ID NO: 99180 - protein, 9 aa, Homo sapiens
  misc_feature: Table A; Target 99180; HLA-A*33:03; UGT2B11; ENSG00000213759; TAA
ENGVVVFSL

SEQ ID NO: 99181 - protein, 8 aa, Homo sapiens
  misc_feature: Table A; Target 99181; HLA-B*51:01; UGT2B11; ENSG00000213759; TAA
ENIIMQQV

SEQ ID NO: 99182 - protein, 8 aa, Homo sapiens
  misc_feature: Table A; Target 99182; HLA-C*07:01; UGT2B11; ENSG00000213759; TAA
ENIIMQQV

SEQ ID NO: 99183 - protein, 9 aa, Homo sapiens
  misc_feature: Table A; Target 99183; HLA-A*33:03; UGT2B11; ENSG00000213759; TAA
ENIIMQQVK

SEQ ID NO: 99184 - protein, 9 aa, Homo sapiens
  misc_feature: Table A; Target 99184; HLA-B*27:02; UGT2B11; ENSG00000213759; TAA
ENIIMQQVK

SEQ ID NO: 99185 - protein, 10 aa, Homo sapiens
  misc_feature: Table A; Target 99185; HLA-A*33:03; UGT2B11; ENSG00000213759; TAA
ENIIMQQVKR

SEQ ID NO: 99186 - protein, 10 aa, Homo sapiens
  misc_feature: Table A; Target 99186; HLA-A*68:01; UGT2B11; ENSG00000213759; TAA
ENIIMQQVKR

SEQ ID NO: 99187 - protein, 9 aa, Homo sapiens
  misc_feature: Table A; Target 99187; HLA-A*01:01; UGT2B11; ENSG00000213759; TAA
EQEILWELY

SEQ ID NO: 99188 - protein, 9 aa, Homo sapiens
  misc_feature: Table A; Target 99188; HLA-A*68:02; UGT2B11; ENSG00000213759; TAA
ERANVIATA

SEQ ID NO: 99189 - protein, 9 aa, Homo sapiens
  misc_feature: Table A; Target 99189; HLA-B*27:05; UGT2B11; ENSG00000213759; TAA
ERANVIATA

SEQ ID NO: 99190 - protein, 9 aa, Homo sapiens
  misc_feature: Table A; Target 99190; HLA-B*39:01; UGT2B11; ENSG00000213759; TAA
ERANVIATA

SEQ ID NO: 99191 - protein, 10 aa, Homo sapiens
  misc_feature: Table A; Target 99191; HLA-A*25:01; UGT2B11; ENSG00000213759; TAA
ERANVIATAL

SEQ ID NO: 99192 - protein, 10 aa, Homo sapiens
  misc_feature: Table A; Target 99192; HLA-A*26:01; UGT2B11; ENSG00000213759; TAA
ERANVIATAL

SEQ ID NO: 99193 - protein, 10 aa, Homo sapiens
  misc_feature: Table A; Target 99193; HLA-A*68:01; UGT2B11; ENSG00000213759; TAA
ERANVIATAL

SEQ ID NO: 99194 - protein, 10 aa, Homo sapiens
  misc_feature: Table A; Target 99194; HLA-A*68:02; UGT2B11; ENSG00000213759; TAA
ERANVIATAL

SEQ ID NO: 99195 - protein, 10 aa, Homo sapiens
  misc_feature: Table A; Target 99195; HLA-B*07:02; UGT2B11; ENSG00000213759; TAA
ERANVIATAL

SEQ ID NO: 99196 - protein, 10 aa, Homo sapiens
  misc_feature: Table A; Target 99196; HLA-B*27:02; UGT2B11; ENSG00000213759; TAA
ERANVIATAL

SEQ ID NO: 99197 - protein, 10 aa, Homo sapiens
  misc_feature: Table A; Target 99197; HLA-B*27:05; UGT2B11; ENSG00000213759; TAA
ERANVIATAL

SEQ ID NO: 99198 - protein, 10 aa, Homo sapiens
  misc_feature: Table A; Target 99198; HLA-B*38:01; UGT2B11; ENSG00000213759; TAA
ERANVIATAL

SEQ ID NO: 99199 - protein, 10 aa, Homo sapiens
  misc_feature: Table A; Target 99199; HLA-B*39:01; UGT2B11; ENSG00000213759; TAA
ERANVIATAL

SEQ ID NO: 99200 - protein, 10 aa, Homo sapiens
  misc_feature: Table A; Target 99200; HLA-C*06:02; UGT2B11; ENSG00000213759; TAA
ERANVIATAL

SEQ ID NO: 99201 - protein, 10 aa, Homo sapiens
  misc_feature: Table A; Target 99201; HLA-C*07:01; UGT2B11; ENSG00000213759; TAA
ERANVIATAL

SEQ ID NO: 99202 - protein, 10 aa, Homo sapiens
  misc_feature: Table A; Target 99202; HLA-C*07:02; UGT2B11; ENSG00000213759; TAA
ERANVIATAL

SEQ ID NO: 99203 - protein, 10 aa, Homo sapiens
  misc_feature: Table A; Target 99203; HLA-C*16:04; UGT2B11; ENSG00000213759; TAA
ERANVIATAL

SEQ ID NO: 99204 - protein, 8 aa, Homo sapiens
  misc_feature: Table A; Target 99204; HLA-C*07:01; UGT2B11; ENSG00000213759; TAA
ERVKNMIY

SEQ ID NO: 99205 - protein, 9 aa, Homo sapiens
  misc_feature: Table A; Target 99205; HLA-A*68:02; UGT2B11; ENSG00000213759; TAA
ERVKNMIYV

SEQ ID NO: 99206 - protein, 9 aa, Homo sapiens
  misc_feature: Table A; Target 99206; HLA-A*25:01; UGT2B11; ENSG00000213759; TAA
ETMGKADIW

SEQ ID NO: 99207 - protein, 9 aa, Homo sapiens
  misc_feature: Table A; Target 99207; HLA-A*26:01; UGT2B11; ENSG00000213759; TAA
ETMGKADIW

SEQ ID NO: 99208 - protein, 9 aa, Homo sapiens
  misc_feature: Table A; Target 99208; HLA-A*33:03; UGT2B11; ENSG00000213759; TAA
ETMGKADIW

SEQ ID NO: 99209 - protein, 9 aa, Homo sapiens
  misc_feature: Table A; Target 99209; HLA-B*44:02; UGT2B11; ENSG00000213759; TAA
ETMGKADIW

SEQ ID NO: 99210 - protein, 9 aa, Homo sapiens
  misc_feature: Table A; Target 99210; HLA-B*57:01; UGT2B11; ENSG00000213759; TAA
ETMGKADIW

SEQ ID NO: 99211 - protein, 11 aa, Homo sapiens
  misc_feature: Table A; Target 99211; HLA-A*26:01; UGT2B11; ENSG00000213759; TAA
ETMGKADIWLM

SEQ ID NO: 99212 - protein, 9 aa, Homo sapiens
  misc_feature: Table A; Target 99212; HLA-A*23:01; UGT2B11; ENSG00000213759; TAA
EVLGRPTTL

SEQ ID NO: 99213 - protein, 9 aa, Homo sapiens
  misc_feature: Table A; Target 99213; HLA-A*25:01; UGT2B11; ENSG00000213759; TAA
EVLGRPTTL

SEQ ID NO: 99214 - protein, 9 aa, Homo sapiens
  misc_feature: Table A; Target 99214; HLA-A*26:01; UGT2B11; ENSG00000213759; TAA
EVLGRPTTL

SEQ ID NO: 99215 - protein, 9 aa, Homo sapiens
  misc_feature: Table A; Target 99215; HLA-A*32:01; UGT2B11; ENSG00000213759; TAA
EVLGRPTTL

SEQ ID NO: 99216 - protein, 9 aa, Homo sapiens
  misc_feature: Table A; Target 99216; HLA-A*33:01; UGT2B11; ENSG00000213759; TAA
EVLGRPTTL

SEQ ID NO: 99217 - protein, 9 aa, Homo sapiens
  misc_feature: Table A; Target 99217; HLA-A*33:03; UGT2B11; ENSG00000213759; TAA
EVLGRPTTL

SEQ ID NO: 99218 - protein, 9 aa, Homo sapiens
  misc_feature: Table A; Target 99218; HLA-A*68:02; UGT2B11; ENSG00000213759; TAA
EVLGRPTTL

SEQ ID NO: 99219 - protein, 9 aa, Homo sapiens
  misc_feature: Table A; Target 99219; HLA-B*08:01; UGT2B11; ENSG00000213759; TAA
EVLGRPTTL

SEQ ID NO: 99220 - protein, 9 aa, Homo sapiens
  misc_feature: Table A; Target 99220; HLA-B*35:03; UGT2B11; ENSG00000213759; TAA
EVLGRPTTL

SEQ ID NO: 99221 - protein, 9 aa, Homo sapiens
  misc_feature: Table A; Target 99221; HLA-B*40:02; UGT2B11; ENSG00000213759; TAA
EVLGRPTTL

SEQ ID NO: 99222 - protein, 9 aa, Homo sapiens
  misc_feature: Table A; Target 99222; HLA-C*01:02; UGT2B11; ENSG00000213759; TAA
EVLGRPTTL

SEQ ID NO: 99223 - protein, 9 aa, Homo sapiens
  misc_feature: Table A; Target 99223; HLA-C*07:02; UGT2B11; ENSG00000213759; TAA
EVLGRPTTL

SEQ ID NO: 99224 - protein, 9 aa, Homo sapiens
  misc_feature: Table A; Target 99224; HLA-C*12:03; UGT2B11; ENSG00000213759; TAA
EVLGRPTTL

SEQ ID NO: 99225 - protein, 9 aa, Homo sapiens
  misc_feature: Table A; Target 99225; HLA-C*14:02; UGT2B11; ENSG00000213759; TAA
EVLGRPTTL

SEQ ID NO: 99226 - protein, 10 aa, Homo sapiens
  misc_feature: Table A; Target 99226; HLA-A*25:01; UGT2B11; ENSG00000213759; TAA
EVLGRPTTLF

SEQ ID NO: 99227 - protein, 10 aa, Homo sapiens
  misc_feature: Table A; Target 99227; HLA-A*26:01; UGT2B11; ENSG00000213759; TAA
EVLGRPTTLF

SEQ ID NO: 99228 - protein, 9 aa, Homo sapiens
  misc_feature: Table A; Target 99228; HLA-A*25:01; UGT2B11; ENSG00000213759; TAA
EVTVLASSA

SEQ ID NO: 99229 - protein, 9 aa, Homo sapiens
  misc_feature: Table A; Target 99229; HLA-A*26:01; UGT2B11; ENSG00000213759; TAA
EVTVLASSA

SEQ ID NO: 99230 - protein, 9 aa, Homo sapiens
  misc_feature: Table A; Target 99230; HLA-A*33:03; UGT2B11; ENSG00000213759; TAA
EVTVLASSA

SEQ ID NO: 99231 - protein, 9 aa, Homo sapiens
  misc_feature: Table A; Target 99231; HLA-B*54:01; UGT2B11; ENSG00000213759; TAA
EVTVLASSA

SEQ ID NO: 99232 - protein, 11 aa, Homo sapiens
  misc_feature: Table A; Target 99232; HLA-A*25:01; UGT2B11; ENSG00000213759; TAA
EVTVLASSASI

SEQ ID NO: 99233 - protein, 9 aa, Homo sapiens
  misc_feature: Table A; Target 99233; HLA-A*01:01; UGT2B11; ENSG00000213759; TAA
EVYPTSLTK

SEQ ID NO: 99234 - protein, 9 aa, Homo sapiens
  misc_feature: Table A; Target 99234; HLA-A*03:01; UGT2B11; ENSG00000213759; TAA
EVYPTSLTK

SEQ ID NO: 99235 - protein, 9 aa, Homo sapiens
  misc_feature: Table A; Target 99235; HLA-A*03:02; UGT2B11; ENSG00000213759; TAA
EVYPTSLTK

SEQ ID NO: 99236 - protein, 9 aa, Homo sapiens
  misc_feature: Table A; Target 99236; HLA-A*11:01; UGT2B11; ENSG00000213759; TAA
EVYPTSLTK

SEQ ID NO: 99237 - protein, 9 aa, Homo sapiens
  misc_feature: Table A; Target 99237; HLA-A*25:01; UGT2B11; ENSG00000213759; TAA
EVYPTSLTK

SEQ ID NO: 99238 - protein, 9 aa, Homo sapiens
  misc_feature: Table A; Target 99238; HLA-A*26:01; UGT2B11; ENSG00000213759; TAA
EVYPTSLTK

SEQ ID NO: 99239 - protein, 9 aa, Homo sapiens
  misc_feature: Table A; Target 99239; HLA-A*29:02; UGT2B11; ENSG00000213759; TAA
EVYPTSLTK

SEQ ID NO: 99240 - protein, 9 aa, Homo sapiens
  misc_feature: Table A; Target 99240; HLA-A*31:01; UGT2B11; ENSG00000213759; TAA
EVYPTSLTK

SEQ ID NO: 99241 - protein, 9 aa, Homo sapiens
  misc_feature: Table A; Target 99241; HLA-A*33:01; UGT2B11; ENSG00000213759; TAA
EVYPTSLTK

SEQ ID NO: 99242 - protein, 9 aa, Homo sapiens
  misc_feature: Table A; Target 99242; HLA-A*33:03; UGT2B11; ENSG00000213759; TAA
EVYPTSLTK

SEQ ID NO: 99243 - protein, 9 aa, Homo sapiens
  misc_feature: Table A; Target 99243; HLA-A*68:01; UGT2B11; ENSG00000213759; TAA
EVYPTSLTK

SEQ ID NO: 99244 - protein, 9 aa, Homo sapiens
  misc_feature: Table A; Target 99244; HLA-A*68:02; UGT2B11; ENSG00000213759; TAA
EVYPTSLTK

SEQ ID NO: 99245 - protein, 9 aa, Homo sapiens
  misc_feature: Table A; Target 99245; HLA-B*13:02; UGT2B11; ENSG00000213759; TAA
EVYPTSLTK

SEQ ID NO: 99246 - protein, 9 aa, Homo sapiens
  misc_feature: Table A; Target 99246; HLA-B*27:05; UGT2B11; ENSG00000213759; TAA
EVYPTSLTK

SEQ ID NO: 99247 - protein, 9 aa, Homo sapiens
  misc_feature: Table A; Target 99247; HLA-B*35:01; UGT2B11; ENSG00000213759; TAA
EVYPTSLTK

SEQ ID NO: 99248 - protein, 9 aa, Homo sapiens
  misc_feature: Table A; Target 99248; HLA-B*51:01; UGT2B11; ENSG00000213759; TAA
EVYPTSLTK

SEQ ID NO: 99249 - protein, 9 aa, Homo sapiens
  misc_feature: Table A; Target 99249; HLA-C*02:02; UGT2B11; ENSG00000213759; TAA
EVYPTSLTK

SEQ ID NO: 99250 - protein, 9 aa, Homo sapiens
  misc_feature: Table A; Target 99250; HLA-C*03:03; UGT2B11; ENSG00000213759; TAA
EVYPTSLTK

SEQ ID NO: 99251 - protein, 9 aa, Homo sapiens
  misc_feature: Table A; Target 99251; HLA-C*06:02; UGT2B11; ENSG00000213759; TAA
EVYPTSLTK

SEQ ID NO: 99252 - protein, 9 aa, Homo sapiens
  misc_feature: Table A; Target 99252; HLA-C*07:06; UGT2B11; ENSG00000213759; TAA
EVYPTSLTK

SEQ ID NO: 99253 - protein, 10 aa, Homo sapiens
  misc_feature: Table A; Target 99253; HLA-A*25:01; UGT2B11; ENSG00000213759; TAA
EVYPTSLTKT

SEQ ID NO: 99254 - protein, 10 aa, Homo sapiens
  misc_feature: Table A; Target 99254; HLA-A*26:01; UGT2B11; ENSG00000213759; TAA
EVYPTSLTKT

SEQ ID NO: 99255 - protein, 10 aa, Homo sapiens
  misc_feature: Table A; Target 99255; HLA-A*33:01; UGT2B11; ENSG00000213759; TAA
EVYPTSLTKT

SEQ ID NO: 99256 - protein, 10 aa, Homo sapiens
  misc_feature: Table A; Target 99256; HLA-A*33:03; UGT2B11; ENSG00000213759; TAA
EVYPTSLTKT

SEQ ID NO: 99257 - protein, 10 aa, Homo sapiens
  misc_feature: Table A; Target 99257; HLA-A*68:01; UGT2B11; ENSG00000213759; TAA
EVYPTSLTKT

SEQ ID NO: 99258 - protein, 10 aa, Homo sapiens
  misc_feature: Table A; Target 99258; HLA-A*68:02; UGT2B11; ENSG00000213759; TAA
EVYPTSLTKT

SEQ ID NO: 99259 - protein, 11 aa, Homo sapiens
  misc_feature: Table A; Target 99259; HLA-A*33:01; UGT2B11; ENSG00000213759; TAA
EVYPTSLTKTE

SEQ ID NO: 99260 - protein, 9 aa, Homo sapiens
  misc_feature: Table A; Target 99260; HLA-B*54:01; UGT2B11; ENSG00000213759; TAA
FADAVFPCG

SEQ ID NO: 99261 - protein, 9 aa, Homo sapiens
  misc_feature: Table A; Target 99261; HLA-A*03:01; UGT2B11; ENSG00000213759; TAA
FCKDVVSNK

SEQ ID NO: 99262 - protein, 9 aa, Homo sapiens
  misc_feature: Table A; Target 99262; HLA-A*31:01; UGT2B11; ENSG00000213759; TAA
FCKDVVSNK

SEQ ID NO: 99263 - protein, 9 aa, Homo sapiens
  misc_feature: Table A; Target 99263; HLA-A*33:01; UGT2B11; ENSG00000213759; TAA
FCKDVVSNK

SEQ ID NO: 99264 - protein, 9 aa, Homo sapiens
  misc_feature: Table A; Target 99264; HLA-A*33:03; UGT2B11; ENSG00000213759; TAA
FCKDVVSNK

SEQ ID NO: 99265 - protein, 9 aa, Homo sapiens
  misc_feature: Table A; Target 99265; HLA-A*30:01; UGT2B11; ENSG00000213759; TAA
FDGNKPDAL

SEQ ID NO: 99266 - protein, 9 aa, Homo sapiens
  misc_feature: Table A; Target 99266; HLA-B*38:01; UGT2B11; ENSG00000213759; TAA
FDGNKPDAL

SEQ ID NO: 99267 - protein, 9 aa, Homo sapiens
  misc_feature: Table A; Target 99267; HLA-B*40:01; UGT2B11; ENSG00000213759; TAA
FDGNKPDAL

SEQ ID NO: 99268 - protein, 9 aa, Homo sapiens
  misc_feature: Table A; Target 99268; HLA-B*40:02; UGT2B11; ENSG00000213759; TAA
FDGNKPDAL

SEQ ID NO: 99269 - protein, 9 aa, Homo sapiens
  misc_feature: Table A; Target 99269; HLA-C*07:02; UGT2B11; ENSG00000213759; TAA
FDGNKPDAL

SEQ ID NO: 99270 - protein, 9 aa, Homo sapiens
  misc_feature: Table A; Target 99270; HLA-C*07:04; UGT2B11; ENSG00000213759; TAA
FDGNKPDAL

SEQ ID NO: 99271 - protein, 9 aa, Homo sapiens
  misc_feature: Table A; Target 99271; HLA-B*40:02; UGT2B11; ENSG00000213759; TAA
FDIVFADAV

SEQ ID NO: 99272 - protein, 9 aa, Homo sapiens
  misc_feature: Table A; Target 99272; HLA-B*49:01; UGT2B11; ENSG00000213759; TAA
FDIVFADAV

SEQ ID NO: 99273 - protein, 9 aa, Homo sapiens
  misc_feature: Table A; Target 99273; HLA-A*02:07; UGT2B11; ENSG00000213759; TAA
FDPNDASTL

SEQ ID NO: 99274 - protein, 9 aa, Homo sapiens
  misc_feature: Table A; Target 99274; HLA-A*30:01; UGT2B11; ENSG00000213759; TAA
FDPNDASTL

SEQ ID NO: 99275 - protein, 9 aa, Homo sapiens
  misc_feature: Table A; Target 99275; HLA-B*38:01; UGT2B11; ENSG00000213759; TAA
FDPNDASTL

SEQ ID NO: 99276 - protein, 9 aa, Homo sapiens
  misc_feature: Table A; Target 99276; HLA-B*40:01; UGT2B11; ENSG00000213759; TAA
FDPNDASTL

SEQ ID NO: 99277 - protein, 9 aa, Homo sapiens
  misc_feature: Table A; Target 99277; HLA-C*01:02; UGT2B11; ENSG00000213759; TAA
FDPNDASTL

SEQ ID NO: 99278 - protein, 9 aa, Homo sapiens
  misc_feature: Table A; Target 99278; HLA-C*14:02; UGT2B11; ENSG00000213759; TAA
FDPNDASTL

SEQ ID NO: 99279 - protein, 11 aa, Homo sapiens
  misc_feature: Table A; Target 99279; HLA-A*24:02; UGT2B11; ENSG00000213759; TAA
FDPNDASTLKF

SEQ ID NO: 99280 - protein, 11 aa, Homo sapiens
  misc_feature: Table A; Target 99280; HLA-A*26:01; UGT2B11; ENSG00000213759; TAA
FDPNDASTLKF

SEQ ID NO: 99281 - protein, 10 aa, Homo sapiens
  misc_feature: Table A; Target 99281; HLA-B*40:02; UGT2B11; ENSG00000213759; TAA
FDQPDNIAHM

SEQ ID NO: 99282 - protein, 10 aa, Homo sapiens
  misc_feature: Table A; Target 99282; HLA-C*04:01; UGT2B11; ENSG00000213759; TAA
FDQPDNIAHM

SEQ ID NO: 99283 - protein, 10 aa, Homo sapiens
  misc_feature: Table A; Target 99283; HLA-C*07:01; UGT2B11; ENSG00000213759; TAA
FDQPDNIAHM

SEQ ID NO: 99284 - protein, 10 aa, Homo sapiens
  misc_feature: Table A; Target 99284; HLA-C*12:03; UGT2B11; ENSG00000213759; TAA
FDQPDNIAHM

SEQ ID NO: 99285 - protein, 11 aa, Homo sapiens
  misc_feature: Table A; Target 99285; HLA-A*03:02; UGT2B11; ENSG00000213759; TAA
FDQPDNIAHMK

SEQ ID NO: 99286 - protein, 9 aa, Homo sapiens
  misc_feature: Table A; Target 99286; HLA-A*02:03; UGT2B11; ENSG00000213759; TAA
FENIIMQQV

SEQ ID NO: 99287 - protein, 9 aa, Homo sapiens
  misc_feature: Table A; Target 99287; HLA-A*02:07; UGT2B11; ENSG00000213759; TAA
FENIIMQQV

SEQ ID NO: 99288 - protein, 9 aa, Homo sapiens
  misc_feature: Table A; Target 99288; HLA-A*30:01; UGT2B11; ENSG00000213759; TAA
FENIIMQQV

SEQ ID NO: 99289 - protein, 9 aa, Homo sapiens
  misc_feature: Table A; Target 99289; HLA-A*68:02; UGT2B11; ENSG00000213759; TAA
FENIIMQQV

SEQ ID NO: 99290 - protein, 9 aa, Homo sapiens
  misc_feature: Table A; Target 99290; HLA-B*13:02; UGT2B11; ENSG00000213759; TAA
FENIIMQQV

SEQ ID NO: 99291 - protein, 9 aa, Homo sapiens
  misc_feature: Table A; Target 99291; HLA-B*18:01; UGT2B11; ENSG00000213759; TAA
FENIIMQQV

SEQ ID NO: 99292 - protein, 9 aa, Homo sapiens
  misc_feature: Table A; Target 99292; HLA-B*27:05; UGT2B11; ENSG00000213759; TAA
FENIIMQQV

SEQ ID NO: 99293 - protein, 9 aa, Homo sapiens
  misc_feature: Table A; Target 99293; HLA-B*37:01; UGT2B11; ENSG00000213759; TAA
FENIIMQQV

SEQ ID NO: 99294 - protein, 9 aa, Homo sapiens
  misc_feature: Table A; Target 99294; HLA-B*38:01; UGT2B11; ENSG00000213759; TAA
FENIIMQQV

SEQ ID NO: 99295 - protein, 9 aa, Homo sapiens
  misc_feature: Table A; Target 99295; HLA-B*39:01; UGT2B11; ENSG00000213759; TAA
FENIIMQQV

SEQ ID NO: 99296 - protein, 9 aa, Homo sapiens
  misc_feature: Table A; Target 99296; HLA-B*40:01; UGT2B11; ENSG00000213759; TAA
FENIIMQQV

SEQ ID NO: 99297 - protein, 9 aa, Homo sapiens
  misc_feature: Table A; Target 99297; HLA-B*40:02; UGT2B11; ENSG00000213759; TAA
FENIIMQQV

SEQ ID NO: 99298 - protein, 9 aa, Homo sapiens
  misc_feature: Table A; Target 99298; HLA-B*44:02; UGT2B11; ENSG00000213759; TAA
FENIIMQQV

SEQ ID NO: 99299 - protein, 9 aa, Homo sapiens
  misc_feature: Table A; Target 99299; HLA-B*44:03; UGT2B11; ENSG00000213759; TAA
FENIIMQQV

SEQ ID NO: 99300 - protein, 9 aa, Homo sapiens
  misc_feature: Table A; Target 99300; HLA-B*49:01; UGT2B11; ENSG00000213759; TAA
FENIIMQQV

SEQ ID NO: 99301 - protein, 9 aa, Homo sapiens
  misc_feature: Table A; Target 99301; HLA-B*51:01; UGT2B11; ENSG00000213759; TAA
FENIIMQQV

SEQ ID NO: 99302 - protein, 9 aa, Homo sapiens
  misc_feature: Table A; Target 99302; HLA-B*54:01; UGT2B11; ENSG00000213759; TAA
FENIIMQQV

SEQ ID NO: 99303 - protein, 9 aa, Homo sapiens
  misc_feature: Table A; Target 99303; HLA-C*02:02; UGT2B11; ENSG00000213759; TAA
FENIIMQQV

SEQ ID NO: 99304 - protein, 9 aa, Homo sapiens
  misc_feature: Table A; Target 99304; HLA-C*04:01; UGT2B11; ENSG00000213759; TAA
FENIIMQQV

SEQ ID NO: 99305 - protein, 9 aa, Homo sapiens
  misc_feature: Table A; Target 99305; HLA-C*06:02; UGT2B11; ENSG00000213759; TAA
FENIIMQQV

SEQ ID NO: 99306 - protein, 9 aa, Homo sapiens
  misc_feature: Table A; Target 99306; HLA-C*07:01; UGT2B11; ENSG00000213759; TAA
FENIIMQQV

SEQ ID NO: 99307 - protein, 9 aa, Homo sapiens
  misc_feature: Table A; Target 99307; HLA-C*07:04; UGT2B11; ENSG00000213759; TAA
FENIIMQQV

SEQ ID NO: 99308 - protein, 9 aa, Homo sapiens
  misc_feature: Table A; Target 99308; HLA-C*12:03; UGT2B11; ENSG00000213759; TAA
FENIIMQQV

SEQ ID NO: 99309 - protein, 9 aa, Homo sapiens
  misc_feature: Table A; Target 99309; HLA-C*16:02; UGT2B11; ENSG00000213759; TAA
FENIIMQQV

SEQ ID NO: 99310 - protein, 9 aa, Homo sapiens
  misc_feature: Table A; Target 99310; HLA-C*16:04; UGT2B11; ENSG00000213759; TAA
FENIIMQQV

SEQ ID NO: 99311 - protein, 10 aa, Homo sapiens
  misc_feature: Table A; Target 99311; HLA-B*49:01; UGT2B11; ENSG00000213759; TAA
FENIIMQQVK

SEQ ID NO: 99312 - protein, 9 aa, Homo sapiens
  misc_feature: Table A; Target 99312; HLA-B*40:01; UGT2B11; ENSG00000213759; TAA
FETMGKADI

SEQ ID NO: 99313 - protein, 9 aa, Homo sapiens
  misc_feature: Table A; Target 99313; HLA-B*49:01; UGT2B11; ENSG00000213759; TAA
FETMGKADI

SEQ ID NO: 99314 - protein, 9 aa, Homo sapiens
  misc_feature: Table A; Target 99314; HLA-C*07:04; UGT2B11; ENSG00000213759; TAA
FETMGKADI

SEQ ID NO: 99315 - protein, 10 aa, Homo sapiens
  misc_feature: Table A; Target 99315; HLA-B*44:02; UGT2B11; ENSG00000213759; TAA
FETMGKADIW

SEQ ID NO: 99316 - protein, 8 aa, Homo sapiens
  misc_feature: Table A; Target 99316; HLA-A*30:01; UGT2B11; ENSG00000213759; TAA
FEVYPTSL

SEQ ID NO: 99317 - protein, 8 aa, Homo sapiens
  misc_feature: Table A; Target 99317; HLA-B*08:01; UGT2B11; ENSG00000213759; TAA
FEVYPTSL

SEQ ID NO: 99318 - protein, 8 aa, Homo sapiens
  misc_feature: Table A; Target 99318; HLA-B*18:01; UGT2B11; ENSG00000213759; TAA
FEVYPTSL

SEQ ID NO: 99319 - protein, 8 aa, Homo sapiens
  misc_feature: Table A; Target 99319; HLA-B*37:01; UGT2B11; ENSG00000213759; TAA
FEVYPTSL

SEQ ID NO: 99320 - protein, 8 aa, Homo sapiens
  misc_feature: Table A; Target 99320; HLA-B*39:01; UGT2B11; ENSG00000213759; TAA
FEVYPTSL

SEQ ID NO: 99321 - protein, 8 aa, Homo sapiens
  misc_feature: Table A; Target 99321; HLA-B*40:01; UGT2B11; ENSG00000213759; TAA
FEVYPTSL

SEQ ID NO: 99322 - protein, 8 aa, Homo sapiens
  misc_feature: Table A; Target 99322; HLA-B*40:02; UGT2B11; ENSG00000213759; TAA
FEVYPTSL

SEQ ID NO: 99323 - protein, 8 aa, Homo sapiens
  misc_feature: Table A; Target 99323; HLA-B*49:01; UGT2B11; ENSG00000213759; TAA
FEVYPTSL

SEQ ID NO: 99324 - protein, 8 aa, Homo sapiens
  misc_feature: Table A; Target 99324; HLA-C*03:03; UGT2B11; ENSG00000213759; TAA
FEVYPTSL

SEQ ID NO: 99325 - protein, 8 aa, Homo sapiens
  misc_feature: Table A; Target 99325; HLA-C*03:04; UGT2B11; ENSG00000213759; TAA
FEVYPTSL

SEQ ID NO: 99326 - protein, 8 aa, Homo sapiens
  misc_feature: Table A; Target 99326; HLA-C*07:04; UGT2B11; ENSG00000213759; TAA
FEVYPTSL

SEQ ID NO: 99327 - protein, 9 aa, Homo sapiens
  misc_feature: Table A; Target 99327; HLA-B*49:01; UGT2B11; ENSG00000213759; TAA
FEVYPTSLT

SEQ ID NO: 99328 - protein, 10 aa, Homo sapiens
  misc_feature: Table A; Target 99328; HLA-B*27:02; UGT2B11; ENSG00000213759; TAA
FEVYPTSLTK

SEQ ID NO: 99329 - protein, 10 aa, Homo sapiens
  misc_feature: Table A; Target 99329; HLA-B*49:01; UGT2B11; ENSG00000213759; TAA
FEVYPTSLTK

SEQ ID NO: 99330 - protein, 11 aa, Homo sapiens
  misc_feature: Table A; Target 99330; HLA-B*49:01; UGT2B11; ENSG00000213759; TAA
FEVYPTSLTKT

SEQ ID NO: 99331 - protein, 8 aa, Homo sapiens
  misc_feature: Table A; Target 99331; HLA-C*04:01; UGT2B11; ENSG00000213759; TAA
FFDQPDNI

SEQ ID NO: 99332 - protein, 9 aa, Homo sapiens
  misc_feature: Table A; Target 99332; HLA-B*35:03; UGT2B11; ENSG00000213759; TAA
FFDQPDNIA

SEQ ID NO: 99333 - protein, 10 aa, Homo sapiens
  misc_feature: Table A; Target 99333; HLA-C*04:01; UGT2B11; ENSG00000213759; TAA
FFDQPDNIAH

SEQ ID NO: 99334 - protein, 11 aa, Homo sapiens
  misc_feature: Table A; Target 99334; HLA-A*02:07; UGT2B11; ENSG00000213759; TAA
FFDQPDNIAHM

SEQ ID NO: 99335 - protein, 11 aa, Homo sapiens
  misc_feature: Table A; Target 99335; HLA-B*55:01; UGT2B11; ENSG00000213759; TAA
FFDQPDNIAHM

SEQ ID NO: 99336 - protein, 11 aa, Homo sapiens
  misc_feature: Table A; Target 99336; HLA-C*04:01; UGT2B11; ENSG00000213759; TAA
FFDQPDNIAHM

SEQ ID NO: 99337 - protein, 9 aa, Homo sapiens
  misc_feature: Table A; Target 99337; HLA-A*02:01; UGT2B11; ENSG00000213759; TAA
FLLACVATV

SEQ ID NO: 99338 - protein, 9 aa, Homo sapiens
  misc_feature: Table A; Target 99338; HLA-A*02:03; UGT2B11; ENSG00000213759; TAA
FLLACVATV

SEQ ID NO: 99339 - protein, 9 aa, Homo sapiens
  misc_feature: Table A; Target 99339; HLA-A*02:04; UGT2B11; ENSG00000213759; TAA
FLLACVATV

SEQ ID NO: 99340 - protein, 9 aa, Homo sapiens
  misc_feature: Table A; Target 99340; HLA-B*55:01; UGT2B11; ENSG00000213759; TAA
FLLACVATV

SEQ ID NO: 99341 - protein, 8 aa, Homo sapiens
  misc_feature: Table A; Target 99341; HLA-A*02:07; UGT2B11; ENSG00000213759; TAA
FLPNVDFV

SEQ ID NO: 99342 - protein, 10 aa, Homo sapiens
  misc_feature: Table A; Target 99342; HLA-A*02:07; UGT2B11; ENSG00000213759; TAA
FLPNVDFVGG

SEQ ID NO: 99343 - protein, 11 aa, Homo sapiens
  misc_feature: Table A; Target 99343; HLA-A*02:07; UGT2B11; ENSG00000213759; TAA
FLPNVDFVGGF

SEQ ID NO: 99344 - protein, 10 aa, Homo sapiens
  misc_feature: Table A; Target 99344; HLA-A*01:01; UGT2B11; ENSG00000213759; TAA
FMERVKNMIY

SEQ ID NO: 99345 - protein, 9 aa, Homo sapiens
  misc_feature: Table A; Target 99345; HLA-B*39:01; UGT2B11; ENSG00000213759; TAA
FNTMSSTDL

SEQ ID NO: 99346 - protein, 9 aa, Homo sapiens
  misc_feature: Table A; Target 99346; HLA-C*07:02; UGT2B11; ENSG00000213759; TAA
FNTMSSTDL

SEQ ID NO: 99347 - protein, 10 aa, Homo sapiens
  misc_feature: Table A; Target 99347; HLA-C*07:02; UGT2B11; ENSG00000213759; TAA
FNTMSSTDLL

SEQ ID NO: 99348 - protein, 9 aa, Homo sapiens
  misc_feature: Table A; Target 99348; HLA-B*54:01; UGT2B11; ENSG00000213759; TAA
FPCGELLAA

SEQ ID NO: 99349 - protein, 9 aa, Homo sapiens
  misc_feature: Table A; Target 99349; HLA-B*56:01; UGT2B11; ENSG00000213759; TAA
FPCGELLAA

SEQ ID NO: 99350 - protein, 10 aa, Homo sapiens
  misc_feature: Table A; Target 99350; HLA-B*35:03; UGT2B11; ENSG00000213759; TAA
FPCGELLAAL

SEQ ID NO: 99351 - protein, 9 aa, Homo sapiens
  misc_feature: Table A; Target 99351; HLA-A*02:01; UGT2B11; ENSG00000213759; TAA
FPHPFLPNV

SEQ ID NO: 99352 - protein, 9 aa, Homo sapiens
  misc_feature: Table A; Target 99352; HLA-A*02:04; UGT2B11; ENSG00000213759; TAA
FPHPFLPNV

SEQ ID NO: 99353 - protein, 9 aa, Homo sapiens
  misc_feature: Table A; Target 99353; HLA-A*02:07; UGT2B11; ENSG00000213759; TAA
FPHPFLPNV

SEQ ID NO: 99354 - protein, 9 aa, Homo sapiens
  misc_feature: Table A; Target 99354; HLA-A*68:02; UGT2B11; ENSG00000213759; TAA
FPHPFLPNV

SEQ ID NO: 99355 - protein, 9 aa, Homo sapiens
  misc_feature: Table A; Target 99355; HLA-B*51:01; UGT2B11; ENSG00000213759; TAA
FPHPFLPNV

SEQ ID NO: 99356 - protein, 9 aa, Homo sapiens
  misc_feature: Table A; Target 99356; HLA-B*54:01; UGT2B11; ENSG00000213759; TAA
FPHPFLPNV

SEQ ID NO: 99357 - protein, 9 aa, Homo sapiens
  misc_feature: Table A; Target 99357; HLA-B*56:01; UGT2B11; ENSG00000213759; TAA
FPHPFLPNV

SEQ ID NO: 99358 - protein, 8 aa, Homo sapiens
  misc_feature: Table A; Target 99358; HLA-B*51:01; UGT2B11; ENSG00000213759; TAA
FPPSYIPI

SEQ ID NO: 99359 - protein, 9 aa, Homo sapiens
  misc_feature: Table A; Target 99359; HLA-A*02:07; UGT2B11; ENSG00000213759; TAA
FPPSYIPIV

SEQ ID NO: 99360 - protein, 9 aa, Homo sapiens
  misc_feature: Table A; Target 99360; HLA-B*51:01; UGT2B11; ENSG00000213759; TAA
FPPSYIPIV

SEQ ID NO: 99361 - protein, 9 aa, Homo sapiens
  misc_feature: Table A; Target 99361; HLA-B*54:01; UGT2B11; ENSG00000213759; TAA
FPPSYIPIV

SEQ ID NO: 99362 - protein, 9 aa, Homo sapiens
  misc_feature: Table A; Target 99362; HLA-B*56:01; UGT2B11; ENSG00000213759; TAA
FPPSYIPIV

SEQ ID NO: 99363 - protein, 10 aa, Homo sapiens
  misc_feature: Table A; Target 99363; HLA-B*35:01; UGT2B11; ENSG00000213759; TAA
FPPSYIPIVM

SEQ ID NO: 99364 - protein, 10 aa, Homo sapiens
  misc_feature: Table A; Target 99364; HLA-B*35:03; UGT2B11; ENSG00000213759; TAA
FPPSYIPIVM

SEQ ID NO: 99365 - protein, 10 aa, Homo sapiens
  misc_feature: Table A; Target 99365; HLA-B*51:01; UGT2B11; ENSG00000213759; TAA
FPPSYIPIVM

SEQ ID NO: 99366 - protein, 10 aa, Homo sapiens
  misc_feature: Table A; Target 99366; HLA-B*54:01; UGT2B11; ENSG00000213759; TAA
FPPSYIPIVM

SEQ ID NO: 99367 - protein, 10 aa, Homo sapiens
  misc_feature: Table A; Target 99367; HLA-B*56:01; UGT2B11; ENSG00000213759; TAA
FPPSYIPIVM

SEQ ID NO: 99368 - protein, 8 aa, Homo sapiens
  misc_feature: Table A; Target 99368; HLA-A*02:04; UGT2B11; ENSG00000213759; TAA
FQFPHPFL

SEQ ID NO: 99369 - protein, 8 aa, Homo sapiens
  misc_feature: Table A; Target 99369; HLA-B*13:02; UGT2B11; ENSG00000213759; TAA
FQFPHPFL

SEQ ID NO: 99370 - protein, 9 aa, Homo sapiens
  misc_feature: Table A; Target 99370; HLA-A*02:01; UGT2B11; ENSG00000213759; TAA
FQFPHPFLP

SEQ ID NO: 99371 - protein, 9 aa, Homo sapiens
  misc_feature: Table A; Target 99371; HLA-A*02:03; UGT2B11; ENSG00000213759; TAA
FQFPHPFLP

SEQ ID NO: 99372 - protein, 9 aa, Homo sapiens
  misc_feature: Table A; Target 99372; HLA-A*02:04; UGT2B11; ENSG00000213759; TAA
FQFPHPFLP

SEQ ID NO: 99373 - protein, 11 aa, Homo sapiens
  misc_feature: Table A; Target 99373; HLA-A*02:01; UGT2B11; ENSG00000213759; TAA
FQFPHPFLPNV

SEQ ID NO: 99374 - protein, 11 aa, Homo sapiens
  misc_feature: Table A; Target 99374; HLA-A*02:03; UGT2B11; ENSG00000213759; TAA
FQFPHPFLPNV

SEQ ID NO: 99375 - protein, 11 aa, Homo sapiens
  misc_feature: Table A; Target 99375; HLA-A*02:04; UGT2B11; ENSG00000213759; TAA
FQFPHPFLPNV

SEQ ID NO: 99376 - protein, 9 aa, Homo sapiens
  misc_feature: Table A; Target 99376; HLA-B*44:02; UGT2B11; ENSG00000213759; TAA
FQMSDMKKW

SEQ ID NO: 99377 - protein, 8 aa, Homo sapiens
  misc_feature: Table A; Target 99377; HLA-B*13:02; UGT2B11; ENSG00000213759; TAA
FQYHSLDV

SEQ ID NO: 99378 - protein, 9 aa, Homo sapiens
  misc_feature: Table A; Target 99378; HLA-A*02:03; UGT2B11; ENSG00000213759; TAA
FQYHSLDVI

SEQ ID NO: 99379 - protein, 9 aa, Homo sapiens
  misc_feature: Table A; Target 99379; HLA-B*13:02; UGT2B11; ENSG00000213759; TAA
FQYHSLDVI

SEQ ID NO: 99380 - protein, 9 aa, Homo sapiens
  misc_feature: Table A; Target 99380; HLA-C*12:03; UGT2B11; ENSG00000213759; TAA
FSLGSVISN

SEQ ID NO: 99381 - protein, 10 aa, Homo sapiens
  misc_feature: Table A; Target 99381; HLA-C*02:02; UGT2B11; ENSG00000213759; TAA
FSLGSVISNM

SEQ ID NO: 99382 - protein, 10 aa, Homo sapiens
  misc_feature: Table A; Target 99382; HLA-C*03:03; UGT2B11; ENSG00000213759; TAA
FSLGSVISNM

SEQ ID NO: 99383 - protein, 10 aa, Homo sapiens
  misc_feature: Table A; Target 99383; HLA-C*03:04; UGT2B11; ENSG00000213759; TAA
FSLGSVISNM

SEQ ID NO: 99384 - protein, 10 aa, Homo sapiens
  misc_feature: Table A; Target 99384; HLA-C*07:02; UGT2B11; ENSG00000213759; TAA
FSLGSVISNM

SEQ ID NO: 99385 - protein, 9 aa, Homo sapiens
  misc_feature: Table A; Target 99385; HLA-B*57:01; UGT2B11; ENSG00000213759; TAA
FSQEQEILW

SEQ ID NO: 99386 - protein, 9 aa, Homo sapiens
  misc_feature: Table A; Target 99386; HLA-B*58:01; UGT2B11; ENSG00000213759; TAA
FSQEQEILW

SEQ ID NO: 99387 - protein, 10 aa, Homo sapiens
  misc_feature: Table A; Target 99387; HLA-C*03:03; UGT2B11; ENSG00000213759; TAA
FSSGSCGKVL

SEQ ID NO: 99388 - protein, 10 aa, Homo sapiens
  misc_feature: Table A; Target 99388; HLA-C*03:04; UGT2B11; ENSG00000213759; TAA
FSSGSCGKVL

SEQ ID NO: 99389 - protein, 9 aa, Homo sapiens
  misc_feature: Table A; Target 99389; HLA-A*02:07; UGT2B11; ENSG00000213759; TAA
FTPGYTIER

SEQ ID NO: 99390 - protein, 9 aa, Homo sapiens
  misc_feature: Table A; Target 99390; HLA-A*11:01; UGT2B11; ENSG00000213759; TAA
FTPGYTIER

SEQ ID NO: 99391 - protein, 9 aa, Homo sapiens
  misc_feature: Table A; Target 99391; HLA-A*26:01; UGT2B11; ENSG00000213759; TAA
FTPGYTIER

SEQ ID NO: 99392 - protein, 9 aa, Homo sapiens
  misc_feature: Table A; Target 99392; HLA-A*29:02; UGT2B11; ENSG00000213759; TAA
FTPGYTIER

SEQ ID NO: 99393 - protein, 9 aa, Homo sapiens
  misc_feature: Table A; Target 99393; HLA-A*31:01; UGT2B11; ENSG00000213759; TAA
FTPGYTIER

SEQ ID NO: 99394 - protein, 9 aa, Homo sapiens
  misc_feature: Table A; Target 99394; HLA-A*33:01; UGT2B11; ENSG00000213759; TAA
FTPGYTIER

SEQ ID NO: 99395 - protein, 9 aa, Homo sapiens
  misc_feature: Table A; Target 99395; HLA-A*33:03; UGT2B11; ENSG00000213759; TAA
FTPGYTIER

SEQ ID NO: 99396 - protein, 9 aa, Homo sapiens
  misc_feature: Table A; Target 99396; HLA-A*68:01; UGT2B11; ENSG00000213759; TAA
FTPGYTIER

SEQ ID NO: 99397 - protein, 9 aa, Homo sapiens
  misc_feature: Table A; Target 99397; HLA-A*68:02; UGT2B11; ENSG00000213759; TAA
FTPGYTIER

SEQ ID NO: 99398 - protein, 9 aa, Homo sapiens
  misc_feature: Table A; Target 99398; HLA-B*27:02; UGT2B11; ENSG00000213759; TAA
FTPGYTIER

SEQ ID NO: 99399 - protein, 9 aa, Homo sapiens
  misc_feature: Table A; Target 99399; HLA-C*01:02; UGT2B11; ENSG00000213759; TAA
FTPGYTIER

SEQ ID NO: 99400 - protein, 9 aa, Homo sapiens
  misc_feature: Table A; Target 99400; HLA-C*02:02; UGT2B11; ENSG00000213759; TAA
FTPGYTIER

SEQ ID NO: 99401 - protein, 9 aa, Homo sapiens
  misc_feature: Table A; Target 99401; HLA-C*07:02; UGT2B11; ENSG00000213759; TAA
FTPGYTIER

SEQ ID NO: 99402 - protein, 9 aa, Homo sapiens
  misc_feature: Table A; Target 99402; HLA-C*07:06; UGT2B11; ENSG00000213759; TAA
FTPGYTIER

SEQ ID NO: 99403 - protein, 9 aa, Homo sapiens
  misc_feature: Table A; Target 99403; HLA-A*03:01; UGT2B11; ENSG00000213759; TAA
FVMPHKGAK

SEQ ID NO: 99404 - protein, 9 aa, Homo sapiens
  misc_feature: Table A; Target 99404; HLA-A*03:02; UGT2B11; ENSG00000213759; TAA
FVMPHKGAK

SEQ ID NO: 99405 - protein, 9 aa, Homo sapiens
  misc_feature: Table A; Target 99405; HLA-A*11:01; UGT2B11; ENSG00000213759; TAA
FVMPHKGAK

SEQ ID NO: 99406 - protein, 9 aa, Homo sapiens
  misc_feature: Table A; Target 99406; HLA-A*32:01; UGT2B11; ENSG00000213759; TAA
FVMPHKGAK

SEQ ID NO: 99407 - protein, 8 aa, Homo sapiens
  misc_feature: Table A; Target 99407; HLA-C*12:03; UGT2B11; ENSG00000213759; TAA
FVQSSGEN

SEQ ID NO: 99408 - protein, 10 aa, Homo sapiens
  misc_feature: Table A; Target 99408; HLA-B*39:01; UGT2B11; ENSG00000213759; TAA
FVQSSGENGV

SEQ ID NO: 99409 - protein, 11 aa, Homo sapiens
  misc_feature: Table A; Target 99409; HLA-B*27:05; UGT2B11; ENSG00000213759; TAA
FVQSSGENGVV

SEQ ID NO: 99410 - protein, 11 aa, Homo sapiens
  misc_feature: Table A; Target 99410; HLA-C*04:01; UGT2B11; ENSG00000213759; TAA
FVQSSGENGVV

SEQ ID NO: 99411 - protein, 11 aa, Homo sapiens
  misc_feature: Table A; Target 99411; HLA-C*06:02; UGT2B11; ENSG00000213759; TAA
FVQSSGENGVV

SEQ ID NO: 99412 - protein, 11 aa, Homo sapiens
  misc_feature: Table A; Target 99412; HLA-C*12:03; UGT2B11; ENSG00000213759; TAA
FVQSSGENGVV

SEQ ID NO: 99413 - protein, 8 aa, Homo sapiens
  misc_feature: Table A; Target 99413; HLA-A*33:03; UGT2B11; ENSG00000213759; TAA
FYSEVLGR

SEQ ID NO: 99414 - protein, 8 aa, Homo sapiens
  misc_feature: Table A; Target 99414; HLA-B*27:02; UGT2B11; ENSG00000213759; TAA
FYSEVLGR

SEQ ID NO: 99415 - protein, 8 aa, Homo sapiens
  misc_feature: Table A; Target 99415; HLA-C*16:01; UGT2B11; ENSG00000213759; TAA
GAAVRLDF

SEQ ID NO: 99416 - protein, 8 aa, Homo sapiens
  misc_feature: Table A; Target 99416; HLA-B*56:01; UGT2B11; ENSG00000213759; TAA
GANGIYEA

SEQ ID NO: 99417 - protein, 9 aa, Homo sapiens
  misc_feature: Table A; Target 99417; HLA-A*68:02; UGT2B11; ENSG00000213759; TAA
GANGIYEAI

SEQ ID NO: 99418 - protein, 9 aa, Homo sapiens
  misc_feature: Table A; Target 99418; HLA-B*13:02; UGT2B11; ENSG00000213759; TAA
GANGIYEAI

SEQ ID NO: 99419 - protein, 9 aa, Homo sapiens
  misc_feature: Table A; Target 99419; HLA-B*27:05; UGT2B11; ENSG00000213759; TAA
GANGIYEAI

SEQ ID NO: 99420 - protein, 9 aa, Homo sapiens
  misc_feature: Table A; Target 99420; HLA-B*35:03; UGT2B11; ENSG00000213759; TAA
GANGIYEAI

SEQ ID NO: 99421 - protein, 9 aa, Homo sapiens
  misc_feature: Table A; Target 99421; HLA-B*38:01; UGT2B11; ENSG00000213759; TAA
GANGIYEAI

SEQ ID NO: 99422 - protein, 9 aa, Homo sapiens
  misc_feature: Table A; Target 99422; HLA-B*46:01; UGT2B11; ENSG00000213759; TAA
GANGIYEAI

SEQ ID NO: 99423 - protein, 9 aa, Homo sapiens
  misc_feature: Table A; Target 99423; HLA-B*58:01; UGT2B11; ENSG00000213759; TAA
GANGIYEAI

SEQ ID NO: 99424 - protein, 9 aa, Homo sapiens
  misc_feature: Table A; Target 99424; HLA-C*01:02; UGT2B11; ENSG00000213759; TAA
GANGIYEAI

SEQ ID NO: 99425 - protein, 9 aa, Homo sapiens
  misc_feature: Table A; Target 99425; HLA-C*02:02; UGT2B11; ENSG00000213759; TAA
GANGIYEAI

SEQ ID NO: 99426 - protein, 9 aa, Homo sapiens
  misc_feature: Table A; Target 99426; HLA-C*03:03; UGT2B11; ENSG00000213759; TAA
GANGIYEAI

SEQ ID NO: 99427 - protein, 9 aa, Homo sapiens
  misc_feature: Table A; Target 99427; HLA-C*03:04; UGT2B11; ENSG00000213759; TAA
GANGIYEAI

SEQ ID NO: 99428 - protein, 9 aa, Homo sapiens
  misc_feature: Table A; Target 99428; HLA-C*12:03; UGT2B11; ENSG00000213759; TAA
GANGIYEAI

SEQ ID NO: 99429 - protein, 9 aa, Homo sapiens
  misc_feature: Table A; Target 99429; HLA-C*16:02; UGT2B11; ENSG00000213759; TAA
GANGIYEAI

SEQ ID NO: 99430 - protein, 9 aa, Homo sapiens
  misc_feature: Table A; Target 99430; HLA-C*16:04; UGT2B11; ENSG00000213759; TAA
GANGIYEAI

SEQ ID NO: 99431 - protein, 10 aa, Homo sapiens
  misc_feature: Table A; Target 99431; HLA-A*29:02; UGT2B11; ENSG00000213759; TAA
GANGIYEAIY

SEQ ID NO: 99432 - protein, 10 aa, Homo sapiens
  misc_feature: Table A; Target 99432; HLA-A*30:02; UGT2B11; ENSG00000213759; TAA
GANGIYEAIY

SEQ ID NO: 99433 - protein, 10 aa, Homo sapiens
  misc_feature: Table A; Target 99433; HLA-B*15:01; UGT2B11; ENSG00000213759; TAA
GANGIYEAIY

SEQ ID NO: 99434 - protein, 8 aa, Homo sapiens
  misc_feature: Table A; Target 99434; HLA-A*30:01; UGT2B11; ENSG00000213759; TAA
GELLAALL

SEQ ID NO: 99435 - protein, 8 aa, Homo sapiens
  misc_feature: Table A; Target 99435; HLA-B*18:01; UGT2B11; ENSG00000213759; TAA
GELLAALL

SEQ ID NO: 99436 - protein, 8 aa, Homo sapiens
  misc_feature: Table A; Target 99436; HLA-B*37:01; UGT2B11; ENSG00000213759; TAA
GELLAALL

SEQ ID NO: 99437 - protein, 8 aa, Homo sapiens
  misc_feature: Table A; Target 99437; HLA-B*40:01; UGT2B11; ENSG00000213759; TAA
GELLAALL

SEQ ID NO: 99438 - protein, 8 aa, Homo sapiens
  misc_feature: Table A; Target 99438; HLA-B*49:01; UGT2B11; ENSG00000213759; TAA
GELLAALL

SEQ ID NO: 99439 - protein, 10 aa, Homo sapiens
  misc_feature: Table A; Target 99439; HLA-B*49:01; UGT2B11; ENSG00000213759; TAA
GELLAALLNI

SEQ ID NO: 99440 - protein, 8 aa, Homo sapiens
  misc_feature: Table A; Target 99440; HLA-A*30:01; UGT2B11; ENSG00000213759; TAA
GENGVVVF

SEQ ID NO: 99441 - protein, 8 aa, Homo sapiens
  misc_feature: Table A; Target 99441; HLA-B*15:01; UGT2B11; ENSG00000213759; TAA
GENGVVVF

SEQ ID NO: 99442 - protein, 8 aa, Homo sapiens
  misc_feature: Table A; Target 99442; HLA-B*15:03; UGT2B11; ENSG00000213759; TAA
GENGVVVF

SEQ ID NO: 99443 - protein, 8 aa, Homo sapiens
  misc_feature: Table A; Target 99443; HLA-B*18:01; UGT2B11; ENSG00000213759; TAA
GENGVVVF

SEQ ID NO: 99444 - protein, 8 aa, Homo sapiens
  misc_feature: Table A; Target 99444; HLA-B*37:01; UGT2B11; ENSG00000213759; TAA
GENGVVVF

SEQ ID NO: 99445 - protein, 8 aa, Homo sapiens
  misc_feature: Table A; Target 99445; HLA-B*39:01; UGT2B11; ENSG00000213759; TAA
GENGVVVF

SEQ ID NO: 99446 - protein, 8 aa, Homo sapiens
  misc_feature: Table A; Target 99446; HLA-B*40:01; UGT2B11; ENSG00000213759; TAA
GENGVVVF

SEQ ID NO: 99447 - protein, 8 aa, Homo sapiens
  misc_feature: Table A; Target 99447; HLA-B*40:02; UGT2B11; ENSG00000213759; TAA
GENGVVVF

SEQ ID NO: 99448 - protein, 8 aa, Homo sapiens
  misc_feature: Table A; Target 99448; HLA-B*44:02; UGT2B11; ENSG00000213759; TAA
GENGVVVF

SEQ ID NO: 99449 - protein, 8 aa, Homo sapiens
  misc_feature: Table A; Target 99449; HLA-B*44:03; UGT2B11; ENSG00000213759; TAA
GENGVVVF

SEQ ID NO: 99450 - protein, 8 aa, Homo sapiens
  misc_feature: Table A; Target 99450; HLA-B*49:01; UGT2B11; ENSG00000213759; TAA
GENGVVVF

SEQ ID NO: 99451 - protein, 8 aa, Homo sapiens
  misc_feature: Table A; Target 99451; HLA-C*04:01; UGT2B11; ENSG00000213759; TAA
GENGVVVF

SEQ ID NO: 99452 - protein, 8 aa, Homo sapiens
  misc_feature: Table A; Target 99452; HLA-C*07:04; UGT2B11; ENSG00000213759; TAA
GENGVVVF

SEQ ID NO: 99453 - protein, 8 aa, Homo sapiens
  misc_feature: Table A; Target 99453; HLA-C*16:04; UGT2B11; ENSG00000213759; TAA
GENGVVVF

SEQ ID NO: 99454 - protein, 9 aa, Homo sapiens
  misc_feature: Table A; Target 99454; HLA-B*27:05; UGT2B11; ENSG00000213759; TAA
GENGVVVFS

SEQ ID NO: 99455 - protein, 9 aa, Homo sapiens
  misc_feature: Table A; Target 99455; HLA-B*49:01; UGT2B11; ENSG00000213759; TAA
GENGVVVFS

SEQ ID NO: 99456 - protein, 10 aa, Homo sapiens
  misc_feature: Table A; Target 99456; HLA-A*30:01; UGT2B11; ENSG00000213759; TAA
GENGVVVFSL

SEQ ID NO: 99457 - protein, 10 aa, Homo sapiens
  misc_feature: Table A; Target 99457; HLA-B*18:01; UGT2B11; ENSG00000213759; TAA
GENGVVVFSL

SEQ ID NO: 99458 - protein, 10 aa, Homo sapiens
  misc_feature: Table A; Target 99458; HLA-B*40:01; UGT2B11; ENSG00000213759; TAA
GENGVVVFSL

SEQ ID NO: 99459 - protein, 10 aa, Homo sapiens
  misc_feature: Table A; Target 99459; HLA-B*40:02; UGT2B11; ENSG00000213759; TAA
GENGVVVFSL

SEQ ID NO: 99460 - protein, 10 aa, Homo sapiens
  misc_feature: Table A; Target 99460; HLA-B*44:02; UGT2B11; ENSG00000213759; TAA
GENGVVVFSL

SEQ ID NO: 99461 - protein, 10 aa, Homo sapiens
  misc_feature: Table A; Target 99461; HLA-B*44:03; UGT2B11; ENSG00000213759; TAA
GENGVVVFSL

SEQ ID NO: 99462 - protein, 10 aa, Homo sapiens
  misc_feature: Table A; Target 99462; HLA-B*49:01; UGT2B11; ENSG00000213759; TAA
GENGVVVFSL

SEQ ID NO: 99463 - protein, 9 aa, Homo sapiens
  misc_feature: Table A; Target 99463; HLA-A*02:01; UGT2B11; ENSG00000213759; TAA
GGANGIYEA

SEQ ID NO: 99464 - protein, 10 aa, Homo sapiens
  misc_feature: Table A; Target 99464; HLA-B*27:02; UGT2B11; ENSG00000213759; TAA
GGANGIYEAI

SEQ ID NO: 99465 - protein, 10 aa, Homo sapiens
  misc_feature: Table A; Target 99465; HLA-B*27:05; UGT2B11; ENSG00000213759; TAA
GGANGIYEAI

SEQ ID NO: 99466 - protein, 11 aa, Homo sapiens
  misc_feature: Table A; Target 99466; HLA-A*30:02; UGT2B11; ENSG00000213759; TAA
GGANGIYEAIY

SEQ ID NO: 99467 - protein, 9 aa, Homo sapiens
  misc_feature: Table A; Target 99467; HLA-A*30:02; UGT2B11; ENSG00000213759; TAA
GGLIFPPSY

SEQ ID NO: 99468 - protein, 9 aa, Homo sapiens
  misc_feature: Table A; Target 99468; HLA-B*15:03; UGT2B11; ENSG00000213759; TAA
GGLIFPPSY

SEQ ID NO: 99469 - protein, 9 aa, Homo sapiens
  misc_feature: Table A; Target 99469; HLA-C*01:02; UGT2B11; ENSG00000213759; TAA
GIPMVGIPL

SEQ ID NO: 99470 - protein, 8 aa, Homo sapiens
  misc_feature: Table A; Target 99470; HLA-A*03:01; UGT2B11; ENSG00000213759; TAA
GIYEAIYH

SEQ ID NO: 99471 - protein, 10 aa, Homo sapiens
  misc_feature: Table A; Target 99471; HLA-A*02:07; UGT2B11; ENSG00000213759; TAA
GIYEAIYHGI

SEQ ID NO: 99472 - protein, 10 aa, Homo sapiens
  misc_feature: Table A; Target 99472; HLA-B*15:03; UGT2B11; ENSG00000213759; TAA
GKVLVWAAEY

SEQ ID NO: 99473 - protein, 8 aa, Homo sapiens
  misc_feature: Table A; Target 99473; HLA-A*30:02; UGT2B11; ENSG00000213759; TAA
GLIFPPSY

SEQ ID NO: 99474 - protein, 9 aa, Homo sapiens
  misc_feature: Table A; Target 99474; HLA-A*02:03; UGT2B11; ENSG00000213759; TAA
GLIFPPSYI

SEQ ID NO: 99475 - protein, 9 aa, Homo sapiens
  misc_feature: Table A; Target 99475; HLA-A*02:04; UGT2B11; ENSG00000213759; TAA
GLIFPPSYI

SEQ ID NO: 99476 - protein, 9 aa, Homo sapiens
  misc_feature: Table A; Target 99476; HLA-B*13:02; UGT2B11; ENSG00000213759; TAA
GLIFPPSYI

SEQ ID NO: 99477 - protein, 9 aa, Homo sapiens
  misc_feature: Table A; Target 99477; HLA-A*29:02; UGT2B11; ENSG00000213759; TAA
GNKPDALGL

SEQ ID NO: 99478 - protein, 9 aa, Homo sapiens
  misc_feature: Table A; Target 99478; HLA-B*40:02; UGT2B11; ENSG00000213759; TAA
GNKPDALGL

SEQ ID NO: 99479 - protein, 9 aa, Homo sapiens
  misc_feature: Table A; Target 99479; HLA-C*07:02; UGT2B11; ENSG00000213759; TAA
GNKPDALGL

SEQ ID NO: 99480 - protein, 10 aa, Homo sapiens
  misc_feature: Table A; Target 99480; HLA-B*27:05; UGT2B11; ENSG00000213759; TAA
GRPTTLFETM

SEQ ID NO: 99481 - protein, 9 aa, Homo sapiens
  misc_feature: Table A; Target 99481; HLA-A*25:01; UGT2B11; ENSG00000213759; TAA
GSCGKVLVW

SEQ ID NO: 99482 - protein, 9 aa, Homo sapiens
  misc_feature: Table A; Target 99482; HLA-B*57:01; UGT2B11; ENSG00000213759; TAA
GSCGKVLVW

SEQ ID NO: 99483 - protein, 9 aa, Homo sapiens
  misc_feature: Table A; Target 99483; HLA-B*58:01; UGT2B11; ENSG00000213759; TAA
GSCGKVLVW

SEQ ID NO: 99484 - protein, 9 aa, Homo sapiens
  misc_feature: Table A; Target 99484; HLA-C*12:03; UGT2B11; ENSG00000213759; TAA
GSCGKVLVW

SEQ ID NO: 99485 - protein, 9 aa, Homo sapiens
  misc_feature: Table A; Target 99485; HLA-B*58:01; UGT2B11; ENSG00000213759; TAA
GSVISNMTA

SEQ ID NO: 99486 - protein, 11 aa, Homo sapiens
  misc_feature: Table A; Target 99486; HLA-B*27:02; UGT2B11; ENSG00000213759; TAA
GSVISNMTAER

SEQ ID NO: 99487 - protein, 11 aa, Homo sapiens
  misc_feature: Table A; Target 99487; HLA-C*07:06; UGT2B11; ENSG00000213759; TAA
GSVISNMTAER

SEQ ID NO: 99488 - protein, 10 aa, Homo sapiens
  misc_feature: Table A; Target 99488; HLA-A*03:01; UGT2B11; ENSG00000213759; TAA
HCKPAKPLPK

SEQ ID NO: 99489 - protein, 8 aa, Homo sapiens
  misc_feature: Table A; Target 99489; HLA-B*37:01; UGT2B11; ENSG00000213759; TAA
HDQPVKPL

SEQ ID NO: 99490 - protein, 8 aa, Homo sapiens
  misc_feature: Table A; Target 99490; HLA-B*18:01; UGT2B11; ENSG00000213759; TAA
HEVTVLAS

SEQ ID NO: 99491 - protein, 9 aa, Homo sapiens
  misc_feature: Table A; Target 99491; HLA-B*18:01; UGT2B11; ENSG00000213759; TAA
HEVTVLASS

SEQ ID NO: 99492 - protein, 9 aa, Homo sapiens
  misc_feature: Table A; Target 99492; HLA-B*40:02; UGT2B11; ENSG00000213759; TAA
HEVTVLASS

SEQ ID NO: 99493 - protein, 10 aa, Homo sapiens
  misc_feature: Table A; Target 99493; HLA-A*30:01; UGT2B11; ENSG00000213759; TAA
HEVTVLASSA

SEQ ID NO: 99494 - protein, 10 aa, Homo sapiens
  misc_feature: Table A; Target 99494; HLA-B*18:01; UGT2B11; ENSG00000213759; TAA
HEVTVLASSA

SEQ ID NO: 99495 - protein, 10 aa, Homo sapiens
  misc_feature: Table A; Target 99495; HLA-B*40:01; UGT2B11; ENSG00000213759; TAA
HEVTVLASSA

SEQ ID NO: 99496 - protein, 10 aa, Homo sapiens
  misc_feature: Table A; Target 99496; HLA-B*40:02; UGT2B11; ENSG00000213759; TAA
HEVTVLASSA

SEQ ID NO: 99497 - protein, 10 aa, Homo sapiens
  misc_feature: Table A; Target 99497; HLA-B*49:01; UGT2B11; ENSG00000213759; TAA
HEVTVLASSA

SEQ ID NO: 99498 - protein, 8 aa, Homo sapiens
  misc_feature: Table A; Target 99498; HLA-C*07:01; UGT2B11; ENSG00000213759; TAA
HGGANGIY

SEQ ID NO: 99499 - protein, 8 aa, Homo sapiens
  misc_feature: Table A; Target 99499; HLA-C*12:03; UGT2B11; ENSG00000213759; TAA
HGGANGIY

SEQ ID NO: 99500 - protein, 8 aa, Homo sapiens
  misc_feature: Table A; Target 99500; HLA-B*51:01; UGT2B11; ENSG00000213759; TAA
HGIPMVGI

SEQ ID NO: 99501 - protein, 9 aa, Homo sapiens
  misc_feature: Table A; Target 99501; HLA-A*02:03; UGT2B11; ENSG00000213759; TAA
HMKAKGAAV

SEQ ID NO: 99502 - protein, 9 aa, Homo sapiens
  misc_feature: Table A; Target 99502; HLA-B*08:01; UGT2B11; ENSG00000213759; TAA
HMKAKGAAV

SEQ ID NO: 99503 - protein, 10 aa, Homo sapiens
  misc_feature: Table A; Target 99503; HLA-A*33:01; UGT2B11; ENSG00000213759; TAA
HMKAKGAAVR

SEQ ID NO: 99504 - protein, 9 aa, Homo sapiens
  misc_feature: Table A; Target 99504; HLA-B*35:01; UGT2B11; ENSG00000213759; TAA
HPFLPNVDF

SEQ ID NO: 99505 - protein, 9 aa, Homo sapiens
  misc_feature: Table A; Target 99505; HLA-B*35:03; UGT2B11; ENSG00000213759; TAA
HPFLPNVDF

SEQ ID NO: 99506 - protein, 9 aa, Homo sapiens
  misc_feature: Table A; Target 99506; HLA-B*54:01; UGT2B11; ENSG00000213759; TAA
HPFLPNVDF

SEQ ID NO: 99507 - protein, 9 aa, Homo sapiens
  misc_feature: Table A; Target 99507; HLA-B*55:01; UGT2B11; ENSG00000213759; TAA
HPFLPNVDF

SEQ ID NO: 99508 - protein, 10 aa, Homo sapiens
  misc_feature: Table A; Target 99508; HLA-B*54:01; UGT2B11; ENSG00000213759; TAA
HPFLPNVDFV

SEQ ID NO: 99509 - protein, 10 aa, Homo sapiens
  misc_feature: Table A; Target 99509; HLA-B*56:01; UGT2B11; ENSG00000213759; TAA
HPFLPNVDFV

SEQ ID NO: 99510 - protein, 8 aa, Homo sapiens
  misc_feature: Table A; Target 99510; HLA-B*08:01; UGT2B11; ENSG00000213759; TAA
HPKTRAFI

SEQ ID NO: 99511 - protein, 8 aa, Homo sapiens
  misc_feature: Table A; Target 99511; HLA-B*57:01; UGT2B11; ENSG00000213759; TAA
HSLDVIGF

SEQ ID NO: 99512 - protein, 8 aa, Homo sapiens
  misc_feature: Table A; Target 99512; HLA-B*58:01; UGT2B11; ENSG00000213759; TAA
HSLDVIGF

SEQ ID NO: 99513 - protein, 8 aa, Homo sapiens
  misc_feature: Table A; Target 99513; HLA-C*07:04; UGT2B11; ENSG00000213759; TAA
HSLDVIGF

SEQ ID NO: 99514 - protein, 9 aa, Homo sapiens
  misc_feature: Table A; Target 99514; HLA-A*02:04; UGT2B11; ENSG00000213759; TAA
HSLDVIGFL

SEQ ID NO: 99515 - protein, 9 aa, Homo sapiens
  misc_feature: Table A; Target 99515; HLA-A*68:02; UGT2B11; ENSG00000213759; TAA
HSLDVIGFL

SEQ ID NO: 99516 - protein, 9 aa, Homo sapiens
  misc_feature: Table A; Target 99516; HLA-B*57:01; UGT2B11; ENSG00000213759; TAA
HSLDVIGFL

SEQ ID NO: 99517 - protein, 10 aa, Homo sapiens
  misc_feature: Table A; Target 99517; HLA-A*02:04; UGT2B11; ENSG00000213759; TAA
HSLDVIGFLL

SEQ ID NO: 99518 - protein, 10 aa, Homo sapiens
  misc_feature: Table A; Target 99518; HLA-A*68:02; UGT2B11; ENSG00000213759; TAA
HSLDVIGFLL

SEQ ID NO: 99519 - protein, 10 aa, Homo sapiens
  misc_feature: Table A; Target 99519; HLA-B*57:01; UGT2B11; ENSG00000213759; TAA
HSLDVIGFLL

SEQ ID NO: 99520 - protein, 11 aa, Homo sapiens
  misc_feature: Table A; Target 99520; HLA-B*54:01; UGT2B11; ENSG00000213759; TAA
HSLDVIGFLLA

SEQ ID NO: 99521 - protein, 8 aa, Homo sapiens
  misc_feature: Table A; Target 99521; HLA-B*51:01; UGT2B11; ENSG00000213759; TAA
IATALAKI

SEQ ID NO: 99522 - protein, 8 aa, Homo sapiens
  misc_feature: Table A; Target 99522; HLA-B*58:01; UGT2B11; ENSG00000213759; TAA
IATALAKI

SEQ ID NO: 99523 - protein, 8 aa, Homo sapiens
  misc_feature: Table A; Target 99523; HLA-C*16:02; UGT2B11; ENSG00000213759; TAA
IATALAKI

SEQ ID NO: 99524 - protein, 9 aa, Homo sapiens
  misc_feature: Table A; Target 99524; HLA-C*16:02; UGT2B11; ENSG00000213759; TAA
IATALAKIP

SEQ ID NO: 99525 - protein, 8 aa, Homo sapiens
  misc_feature: Table A; Target 99525; HLA-B*49:01; UGT2B11; ENSG00000213759; TAA
IEFVMPHK

SEQ ID NO: 99526 - protein, 9 aa, Homo sapiens
  misc_feature: Table A; Target 99526; HLA-B*49:01; UGT2B11; ENSG00000213759; TAA
IEFVMPHKG

SEQ ID NO: 99527 - protein, 10 aa, Homo sapiens
  misc_feature: Table A; Target 99527; HLA-A*24:02; UGT2B11; ENSG00000213759; TAA
IFIITKFCLF

SEQ ID NO: 99528 - protein, 9 aa, Homo sapiens
  misc_feature: Table A; Target 99528; HLA-A*23:01; UGT2B11; ENSG00000213759; TAA
IFPPSYIPI

SEQ ID NO: 99529 - protein, 9 aa, Homo sapiens
  misc_feature: Table A; Target 99529; HLA-A*24:02; UGT2B11; ENSG00000213759; TAA
IFPPSYIPI

SEQ ID NO: 99530 - protein, 11 aa, Homo sapiens
  misc_feature: Table A; Target 99530; HLA-A*23:01; UGT2B11; ENSG00000213759; TAA
IFPPSYIPIVM

SEQ ID NO: 99531 - protein, 11 aa, Homo sapiens
  misc_feature: Table A; Target 99531; HLA-A*24:02; UGT2B11; ENSG00000213759; TAA
IFPPSYIPIVM

SEQ ID NO: 99532 - protein, 8 aa, Homo sapiens
  misc_feature: Table A; Target 99532; HLA-B*51:01; UGT2B11; ENSG00000213759; TAA
IGFLLACV

SEQ ID NO: 99533 - protein, 9 aa, Homo sapiens
  misc_feature: Table A; Target 99533; HLA-B*57:01; UGT2B11; ENSG00000213759; TAA
IIMQQVKRW

SEQ ID NO: 99534 - protein, 10 aa, Homo sapiens
  misc_feature: Table A; Target 99534; HLA-A*02:01; UGT2B11; ENSG00000213759; TAA
ILFDPNDAST

SEQ ID NO: 99535 - protein, 10 aa, Homo sapiens
  misc_feature: Table A; Target 99535; HLA-A*02:03; UGT2B11; ENSG00000213759; TAA
ILFDPNDAST

SEQ ID NO: 99536 - protein, 11 aa, Homo sapiens
  misc_feature: Table A; Target 99536; HLA-A*02:01; UGT2B11; ENSG00000213759; TAA
ILFDPNDASTL

SEQ ID NO: 99537 - protein, 11 aa, Homo sapiens
  misc_feature: Table A; Target 99537; HLA-A*02:03; UGT2B11; ENSG00000213759; TAA
ILFDPNDASTL

SEQ ID NO: 99538 - protein, 11 aa, Homo sapiens
  misc_feature: Table A; Target 99538; HLA-A*02:04; UGT2B11; ENSG00000213759; TAA
ILFDPNDASTL

SEQ ID NO: 99539 - protein, 11 aa, Homo sapiens
  misc_feature: Table A; Target 99539; HLA-A*02:07; UGT2B11; ENSG00000213759; TAA
ILFDPNDASTL

SEQ ID NO: 99540 - protein, 11 aa, Homo sapiens
  misc_feature: Table A; Target 99540; HLA-A*03:01; UGT2B11; ENSG00000213759; TAA
ILFDPNDASTL

SEQ ID NO: 99541 - protein, 11 aa, Homo sapiens
  misc_feature: Table A; Target 99541; HLA-A*03:02; UGT2B11; ENSG00000213759; TAA
ILFDPNDASTL

SEQ ID NO: 99542 - protein, 11 aa, Homo sapiens
  misc_feature: Table A; Target 99542; HLA-A*23:01; UGT2B11; ENSG00000213759; TAA
ILFDPNDASTL

SEQ ID NO: 99543 - protein, 11 aa, Homo sapiens
  misc_feature: Table A; Target 99543; HLA-A*24:02; UGT2B11; ENSG00000213759; TAA
ILFDPNDASTL

SEQ ID NO: 99544 - protein, 11 aa, Homo sapiens
  misc_feature: Table A; Target 99544; HLA-A*25:01; UGT2B11; ENSG00000213759; TAA
ILFDPNDASTL

SEQ ID NO: 99545 - protein, 11 aa, Homo sapiens
  misc_feature: Table A; Target 99545; HLA-A*26:01; UGT2B11; ENSG00000213759; TAA
ILFDPNDASTL

SEQ ID NO: 99546 - protein, 11 aa, Homo sapiens
  misc_feature: Table A; Target 99546; HLA-A*30:01; UGT2B11; ENSG00000213759; TAA
ILFDPNDASTL

SEQ ID NO: 99547 - protein, 11 aa, Homo sapiens
  misc_feature: Table A; Target 99547; HLA-A*31:01; UGT2B11; ENSG00000213759; TAA
ILFDPNDASTL

SEQ ID NO: 99548 - protein, 11 aa, Homo sapiens
  misc_feature: Table A; Target 99548; HLA-A*32:01; UGT2B11; ENSG00000213759; TAA
ILFDPNDASTL

SEQ ID NO: 99549 - protein, 11 aa, Homo sapiens
  misc_feature: Table A; Target 99549; HLA-A*68:02; UGT2B11; ENSG00000213759; TAA
ILFDPNDASTL

SEQ ID NO: 99550 - protein, 11 aa, Homo sapiens
  misc_feature: Table A; Target 99550; HLA-B*13:02; UGT2B11; ENSG00000213759; TAA
ILFDPNDASTL

SEQ ID NO: 99551 - protein, 11 aa, Homo sapiens
  misc_feature: Table A; Target 99551; HLA-B*15:01; UGT2B11; ENSG00000213759; TAA
ILFDPNDASTL

SEQ ID NO: 99552 - protein, 11 aa, Homo sapiens
  misc_feature: Table A; Target 99552; HLA-B*15:03; UGT2B11; ENSG00000213759; TAA
ILFDPNDASTL

SEQ ID NO: 99553 - protein, 11 aa, Homo sapiens
  misc_feature: Table A; Target 99553; HLA-B*27:05; UGT2B11; ENSG00000213759; TAA
ILFDPNDASTL

SEQ ID NO: 99554 - protein, 11 aa, Homo sapiens
  misc_feature: Table A; Target 99554; HLA-B*35:03; UGT2B11; ENSG00000213759; TAA
ILFDPNDASTL

SEQ ID NO: 99555 - protein, 11 aa, Homo sapiens
  misc_feature: Table A; Target 99555; HLA-B*38:01; UGT2B11; ENSG00000213759; TAA
ILFDPNDASTL

SEQ ID NO: 99556 - protein, 11 aa, Homo sapiens
  misc_feature: Table A; Target 99556; HLA-B*39:01; UGT2B11; ENSG00000213759; TAA
ILFDPNDASTL

SEQ ID NO: 99557 - protein, 11 aa, Homo sapiens
  misc_feature: Table A; Target 99557; HLA-B*40:01; UGT2B11; ENSG00000213759; TAA
ILFDPNDASTL

SEQ ID NO: 99558 - protein, 11 aa, Homo sapiens
  misc_feature: Table A; Target 99558; HLA-B*40:02; UGT2B11; ENSG00000213759; TAA
ILFDPNDASTL

SEQ ID NO: 99559 - protein, 11 aa, Homo sapiens
  misc_feature: Table A; Target 99559; HLA-B*46:01; UGT2B11; ENSG00000213759; TAA
ILFDPNDASTL

SEQ ID NO: 99560 - protein, 11 aa, Homo sapiens
  misc_feature: Table A; Target 99560; HLA-B*55:01; UGT2B11; ENSG00000213759; TAA
ILFDPNDASTL

SEQ ID NO: 99561 - protein, 11 aa, Homo sapiens
  misc_feature: Table A; Target 99561; HLA-B*58:01; UGT2B11; ENSG00000213759; TAA
ILFDPNDASTL

SEQ ID NO: 99562 - protein, 11 aa, Homo sapiens
  misc_feature: Table A; Target 99562; HLA-C*01:02; UGT2B11; ENSG00000213759; TAA
ILFDPNDASTL

SEQ ID NO: 99563 - protein, 11 aa, Homo sapiens
  misc_feature: Table A; Target 99563; HLA-C*02:02; UGT2B11; ENSG00000213759; TAA
ILFDPNDASTL

SEQ ID NO: 99564 - protein, 11 aa, Homo sapiens
  misc_feature: Table A; Target 99564; HLA-C*03:03; UGT2B11; ENSG00000213759; TAA
ILFDPNDASTL

SEQ ID NO: 99565 - protein, 11 aa, Homo sapiens
  misc_feature: Table A; Target 99565; HLA-C*03:04; UGT2B11; ENSG00000213759; TAA
ILFDPNDASTL

SEQ ID NO: 99566 - protein, 11 aa, Homo sapiens
  misc_feature: Table A; Target 99566; HLA-C*05:01; UGT2B11; ENSG00000213759; TAA
ILFDPNDASTL

SEQ ID NO: 99567 - protein, 11 aa, Homo sapiens
  misc_feature: Table A; Target 99567; HLA-C*06:02; UGT2B11; ENSG00000213759; TAA
ILFDPNDASTL

SEQ ID NO: 99568 - protein, 11 aa, Homo sapiens
  misc_feature: Table A; Target 99568; HLA-C*07:04; UGT2B11; ENSG00000213759; TAA
ILFDPNDASTL

SEQ ID NO: 99569 - protein, 11 aa, Homo sapiens
  misc_feature: Table A; Target 99569; HLA-C*12:03; UGT2B11; ENSG00000213759; TAA
ILFDPNDASTL

SEQ ID NO: 99570 - protein, 11 aa, Homo sapiens
  misc_feature: Table A; Target 99570; HLA-C*14:02; UGT2B11; ENSG00000213759; TAA
ILFDPNDASTL

SEQ ID NO: 99571 - protein, 11 aa, Homo sapiens
  misc_feature: Table A; Target 99571; HLA-C*16:01; UGT2B11; ENSG00000213759; TAA
ILFDPNDASTL

SEQ ID NO: 99572 - protein, 11 aa, Homo sapiens
  misc_feature: Table A; Target 99572; HLA-C*16:02; UGT2B11; ENSG00000213759; TAA
ILFDPNDASTL

SEQ ID NO: 99573 - protein, 11 aa, Homo sapiens
  misc_feature: Table A; Target 99573; HLA-C*16:04; UGT2B11; ENSG00000213759; TAA
ILFDPNDASTL

SEQ ID NO: 99574 - protein, 8 aa, Homo sapiens
  misc_feature: Table A; Target 99574; HLA-A*31:01; UGT2B11; ENSG00000213759; TAA
ILKELVQR

SEQ ID NO: 99575 - protein, 8 aa, Homo sapiens
  misc_feature: Table A; Target 99575; HLA-A*33:01; UGT2B11; ENSG00000213759; TAA
ILKELVQR

SEQ ID NO: 99576 - protein, 8 aa, Homo sapiens
  misc_feature: Table A; Target 99576; HLA-A*33:03; UGT2B11; ENSG00000213759; TAA
ILKELVQR

SEQ ID NO: 99577 - protein, 9 aa, Homo sapiens
  misc_feature: Table A; Target 99577; HLA-A*02:03; UGT2B11; ENSG00000213759; TAA
ILKELVQRG

SEQ ID NO: 99578 - protein, 9 aa, Homo sapiens
  misc_feature: Table A; Target 99578; HLA-A*02:07; UGT2B11; ENSG00000213759; TAA
ILWELYDIF

SEQ ID NO: 99579 - protein, 8 aa, Homo sapiens
  misc_feature: Table A; Target 99579; HLA-B*07:02; UGT2B11; ENSG00000213759; TAA
IPIVMSKL

SEQ ID NO: 99580 - protein, 8 aa, Homo sapiens
  misc_feature: Table A; Target 99580; HLA-B*08:01; UGT2B11; ENSG00000213759; TAA
IPIVMSKL

SEQ ID NO: 99581 - protein, 8 aa, Homo sapiens
  misc_feature: Table A; Target 99581; HLA-B*35:01; UGT2B11; ENSG00000213759; TAA
IPIVMSKL

SEQ ID NO: 99582 - protein, 8 aa, Homo sapiens
  misc_feature: Table A; Target 99582; HLA-B*35:03; UGT2B11; ENSG00000213759; TAA
IPIVMSKL

SEQ ID NO: 99583 - protein, 8 aa, Homo sapiens
  misc_feature: Table A; Target 99583; HLA-B*51:01; UGT2B11; ENSG00000213759; TAA
IPIVMSKL

SEQ ID NO: 99584 - protein, 8 aa, Homo sapiens
  misc_feature: Table A; Target 99584; HLA-B*56:01; UGT2B11; ENSG00000213759; TAA
IPIVMSKL

SEQ ID NO: 99585 - protein, 8 aa, Homo sapiens
  misc_feature: Table A; Target 99585; HLA-C*07:02; UGT2B11; ENSG00000213759; TAA
IPIVMSKL

SEQ ID NO: 99586 - protein, 8 aa, Homo sapiens
  misc_feature: Table A; Target 99586; HLA-B*07:02; UGT2B11; ENSG00000213759; TAA
IPMVGIPL

SEQ ID NO: 99587 - protein, 8 aa, Homo sapiens
  misc_feature: Table A; Target 99587; HLA-B*08:01; UGT2B11; ENSG00000213759; TAA
IPMVGIPL

SEQ ID NO: 99588 - protein, 8 aa, Homo sapiens
  misc_feature: Table A; Target 99588; HLA-B*35:01; UGT2B11; ENSG00000213759; TAA
IPMVGIPL

SEQ ID NO: 99589 - protein, 8 aa, Homo sapiens
  misc_feature: Table A; Target 99589; HLA-B*35:03; UGT2B11; ENSG00000213759; TAA
IPMVGIPL

SEQ ID NO: 99590 - protein, 8 aa, Homo sapiens
  misc_feature: Table A; Target 99590; HLA-B*51:01; UGT2B11; ENSG00000213759; TAA
IPMVGIPL

SEQ ID NO: 99591 - protein, 8 aa, Homo sapiens
  misc_feature: Table A; Target 99591; HLA-C*07:02; UGT2B11; ENSG00000213759; TAA
IPMVGIPL

SEQ ID NO: 99592 - protein, 9 aa, Homo sapiens
  misc_feature: Table A; Target 99592; HLA-A*23:01; UGT2B11; ENSG00000213759; TAA
IPMVGIPLF

SEQ ID NO: 99593 - protein, 9 aa, Homo sapiens
  misc_feature: Table A; Target 99593; HLA-A*24:02; UGT2B11; ENSG00000213759; TAA
IPMVGIPLF

SEQ ID NO: 99594 - protein, 9 aa, Homo sapiens
  misc_feature: Table A; Target 99594; HLA-B*07:02; UGT2B11; ENSG00000213759; TAA
IPMVGIPLF

SEQ ID NO: 99595 - protein, 9 aa, Homo sapiens
  misc_feature: Table A; Target 99595; HLA-B*35:01; UGT2B11; ENSG00000213759; TAA
IPMVGIPLF

SEQ ID NO: 99596 - protein, 9 aa, Homo sapiens
  misc_feature: Table A; Target 99596; HLA-B*35:03; UGT2B11; ENSG00000213759; TAA
IPMVGIPLF

SEQ ID NO: 99597 - protein, 9 aa, Homo sapiens
  misc_feature: Table A; Target 99597; HLA-B*51:01; UGT2B11; ENSG00000213759; TAA
IPMVGIPLF

SEQ ID NO: 99598 - protein, 9 aa, Homo sapiens
  misc_feature: Table A; Target 99598; HLA-B*54:01; UGT2B11; ENSG00000213759; TAA
IPMVGIPLF

SEQ ID NO: 99599 - protein, 9 aa, Homo sapiens
  misc_feature: Table A; Target 99599; HLA-B*55:01; UGT2B11; ENSG00000213759; TAA
IPMVGIPLF

SEQ ID NO: 99600 - protein, 9 aa, Homo sapiens
  misc_feature: Table A; Target 99600; HLA-B*56:01; UGT2B11; ENSG00000213759; TAA
IPMVGIPLF

SEQ ID NO: 99601 - protein, 9 aa, Homo sapiens
  misc_feature: Table A; Target 99601; HLA-A*24:02; UGT2B11; ENSG00000213759; TAA
IPQKVLWRF

SEQ ID NO: 99602 - protein, 9 aa, Homo sapiens
  misc_feature: Table A; Target 99602; HLA-B*35:01; UGT2B11; ENSG00000213759; TAA
IPQNDLLGH

SEQ ID NO: 99603 - protein, 9 aa, Homo sapiens
  misc_feature: Table A; Target 99603; HLA-B*55:01; UGT2B11; ENSG00000213759; TAA
IPQNDLLGH

SEQ ID NO: 99604 - protein, 11 aa, Homo sapiens
  misc_feature: Table A; Target 99604; HLA-A*03:02; UGT2B11; ENSG00000213759; TAA
IPQNDLLGHPK

SEQ ID NO: 99605 - protein, 11 aa, Homo sapiens
  misc_feature: Table A; Target 99605; HLA-A*11:01; UGT2B11; ENSG00000213759; TAA
IPQNDLLGHPK

SEQ ID NO: 99606 - protein, 11 aa, Homo sapiens
  misc_feature: Table A; Target 99606; HLA-A*31:01; UGT2B11; ENSG00000213759; TAA
IPQNDLLGHPK

SEQ ID NO: 99607 - protein, 11 aa, Homo sapiens
  misc_feature: Table A; Target 99607; HLA-A*33:01; UGT2B11; ENSG00000213759; TAA
IPQNDLLGHPK

SEQ ID NO: 99608 - protein, 11 aa, Homo sapiens
  misc_feature: Table A; Target 99608; HLA-A*68:01; UGT2B11; ENSG00000213759; TAA
IPQNDLLGHPK

SEQ ID NO: 99609 - protein, 11 aa, Homo sapiens
  misc_feature: Table A; Target 99609; HLA-B*27:02; UGT2B11; ENSG00000213759; TAA
IPQNDLLGHPK

SEQ ID NO: 99610 - protein, 11 aa, Homo sapiens
  misc_feature: Table A; Target 99610; HLA-B*54:01; UGT2B11; ENSG00000213759; TAA
IPQNDLLGHPK

SEQ ID NO: 99611 - protein, 11 aa, Homo sapiens
  misc_feature: Table A; Target 99611; HLA-B*56:01; UGT2B11; ENSG00000213759; TAA
IPQNDLLGHPK

SEQ ID NO: 99612 - protein, 11 aa, Homo sapiens
  misc_feature: Table A; Target 99612; HLA-C*04:01; UGT2B11; ENSG00000213759; TAA
IPQNDLLGHPK

SEQ ID NO: 99613 - protein, 11 aa, Homo sapiens
  misc_feature: Table A; Target 99613; HLA-C*07:06; UGT2B11; ENSG00000213759; TAA
IPQNDLLGHPK

SEQ ID NO: 99614 - protein, 8 aa, Homo sapiens
  misc_feature: Table A; Target 99614; HLA-B*15:03; UGT2B11; ENSG00000213759; TAA
IQHDQPVK

SEQ ID NO: 99615 - protein, 8 aa, Homo sapiens
  misc_feature: Table A; Target 99615; HLA-B*27:05; UGT2B11; ENSG00000213759; TAA
IQHDQPVK

SEQ ID NO: 99616 - protein, 8 aa, Homo sapiens
  misc_feature: Table A; Target 99616; HLA-B*39:01; UGT2B11; ENSG00000213759; TAA
IQHDQPVK

SEQ ID NO: 99617 - protein, 8 aa, Homo sapiens
  misc_feature: Table A; Target 99617; HLA-C*06:02; UGT2B11; ENSG00000213759; TAA
IQHDQPVK

SEQ ID NO: 99618 - protein, 8 aa, Homo sapiens
  misc_feature: Table A; Target 99618; HLA-C*16:01; UGT2B11; ENSG00000213759; TAA
IQHDQPVK

SEQ ID NO: 99619 - protein, 9 aa, Homo sapiens
  misc_feature: Table A; Target 99619; HLA-B*13:02; UGT2B11; ENSG00000213759; TAA
IQHDQPVKP

SEQ ID NO: 99620 - protein, 9 aa, Homo sapiens
  misc_feature: Table A; Target 99620; HLA-B*27:05; UGT2B11; ENSG00000213759; TAA
IQHDQPVKP

SEQ ID NO: 99621 - protein, 9 aa, Homo sapiens
  misc_feature: Table A; Target 99621; HLA-C*06:02; UGT2B11; ENSG00000213759; TAA
IQHDQPVKP

SEQ ID NO: 99622 - protein, 9 aa, Homo sapiens
  misc_feature: Table A; Target 99622; HLA-C*07:04; UGT2B11; ENSG00000213759; TAA
IQHDQPVKP

SEQ ID NO: 99623 - protein, 10 aa, Homo sapiens
  misc_feature: Table A; Target 99623; HLA-A*02:03; UGT2B11; ENSG00000213759; TAA
IQHDQPVKPL

SEQ ID NO: 99624 - protein, 8 aa, Homo sapiens
  misc_feature: Table A; Target 99624; HLA-A*31:01; UGT2B11; ENSG00000213759; TAA
ISNMTAER

SEQ ID NO: 99625 - protein, 8 aa, Homo sapiens
  misc_feature: Table A; Target 99625; HLA-A*33:01; UGT2B11; ENSG00000213759; TAA
ISNMTAER

SEQ ID NO: 99626 - protein, 8 aa, Homo sapiens
  misc_feature: Table A; Target 99626; HLA-A*33:03; UGT2B11; ENSG00000213759; TAA
ISNMTAER

SEQ ID NO: 99627 - protein, 8 aa, Homo sapiens
  misc_feature: Table A; Target 99627; HLA-C*07:06; UGT2B11; ENSG00000213759; TAA
ISNMTAER

SEQ ID NO: 99628 - protein, 9 aa, Homo sapiens
  misc_feature: Table A; Target 99628; HLA-A*32:01; UGT2B11; ENSG00000213759; TAA
ITHGGANGI

SEQ ID NO: 99629 - protein, 9 aa, Homo sapiens
  misc_feature: Table A; Target 99629; HLA-B*13:02; UGT2B11; ENSG00000213759; TAA
ITHGGANGI

SEQ ID NO: 99630 - protein, 9 aa, Homo sapiens
  misc_feature: Table A; Target 99630; HLA-C*01:02; UGT2B11; ENSG00000213759; TAA
ITHGGANGI

SEQ ID NO: 99631 - protein, 9 aa, Homo sapiens
  misc_feature: Table A; Target 99631; HLA-C*16:02; UGT2B11; ENSG00000213759; TAA
ITHGGANGI

SEQ ID NO: 99632 - protein, 10 aa, Homo sapiens
  misc_feature: Table A; Target 99632; HLA-A*01:01; UGT2B11; ENSG00000213759; TAA
ITHGGANGIY

SEQ ID NO: 99633 - protein, 10 aa, Homo sapiens
  misc_feature: Table A; Target 99633; HLA-A*26:01; UGT2B11; ENSG00000213759; TAA
ITHGGANGIY

SEQ ID NO: 99634 - protein, 10 aa, Homo sapiens
  misc_feature: Table A; Target 99634; HLA-A*29:02; UGT2B11; ENSG00000213759; TAA
ITHGGANGIY

SEQ ID NO: 99635 - protein, 10 aa, Homo sapiens
  misc_feature: Table A; Target 99635; HLA-A*30:02; UGT2B11; ENSG00000213759; TAA
ITHGGANGIY

SEQ ID NO: 99636 - protein, 10 aa, Homo sapiens
  misc_feature: Table A; Target 99636; HLA-A*32:01; UGT2B11; ENSG00000213759; TAA
ITHGGANGIY

SEQ ID NO: 99637 - protein, 10 aa, Homo sapiens
  misc_feature: Table A; Target 99637; HLA-B*15:01; UGT2B11; ENSG00000213759; TAA
ITHGGANGIY

SEQ ID NO: 99638 - protein, 10 aa, Homo sapiens
  misc_feature: Table A; Target 99638; HLA-B*46:01; UGT2B11; ENSG00000213759; TAA
ITHGGANGIY

SEQ ID NO: 99639 - protein, 10 aa, Homo sapiens
  misc_feature: Table A; Target 99639; HLA-C*01:02; UGT2B11; ENSG00000213759; TAA
ITHGGANGIY

SEQ ID NO: 99640 - protein, 10 aa, Homo sapiens
  misc_feature: Table A; Target 99640; HLA-C*07:01; UGT2B11; ENSG00000213759; TAA
ITHGGANGIY

SEQ ID NO: 99641 - protein, 10 aa, Homo sapiens
  misc_feature: Table A; Target 99641; HLA-C*07:04; UGT2B11; ENSG00000213759; TAA
ITHGGANGIY

SEQ ID NO: 99642 - protein, 10 aa, Homo sapiens
  misc_feature: Table A; Target 99642; HLA-C*14:02; UGT2B11; ENSG00000213759; TAA
ITHGGANGIY

SEQ ID NO: 99643 - protein, 9 aa, Homo sapiens
  misc_feature: Table A; Target 99643; HLA-A*23:01; UGT2B11; ENSG00000213759; TAA
IYEAIYHGI

SEQ ID NO: 99644 - protein, 9 aa, Homo sapiens
  misc_feature: Table A; Target 99644; HLA-A*24:02; UGT2B11; ENSG00000213759; TAA
IYEAIYHGI

SEQ ID NO: 99645 - protein, 8 aa, Homo sapiens
  misc_feature: Table A; Target 99645; HLA-C*04:01; UGT2B11; ENSG00000213759; TAA
IYHGIPMV

SEQ ID NO: 99646 - protein, 8 aa, Homo sapiens
  misc_feature: Table A; Target 99646; HLA-C*06:02; UGT2B11; ENSG00000213759; TAA
IYHGIPMV

SEQ ID NO: 99647 - protein, 8 aa, Homo sapiens
  misc_feature: Table A; Target 99647; HLA-C*07:02; UGT2B11; ENSG00000213759; TAA
IYHGIPMV

SEQ ID NO: 99648 - protein, 9 aa, Homo sapiens
  misc_feature: Table A; Target 99648; HLA-A*24:02; UGT2B11; ENSG00000213759; TAA
IYHGIPMVG

SEQ ID NO: 99649 - protein, 10 aa, Homo sapiens
  misc_feature: Table A; Target 99649; HLA-A*23:01; UGT2B11; ENSG00000213759; TAA
IYHGIPMVGI

SEQ ID NO: 99650 - protein, 10 aa, Homo sapiens
  misc_feature: Table A; Target 99650; HLA-A*24:02; UGT2B11; ENSG00000213759; TAA
IYHGIPMVGI

SEQ ID NO: 99651 - protein, 9 aa, Homo sapiens
  misc_feature: Table A; Target 99651; HLA-A*24:02; UGT2B11; ENSG00000213759; TAA
IYVLYFDFW

SEQ ID NO: 99652 - protein, 9 aa, Homo sapiens
  misc_feature: Table A; Target 99652; HLA-A*31:01; UGT2B11; ENSG00000213759; TAA
KAKGAAVRL

SEQ ID NO: 99653 - protein, 9 aa, Homo sapiens
  misc_feature: Table A; Target 99653; HLA-B*07:02; UGT2B11; ENSG00000213759; TAA
KAKGAAVRL

SEQ ID NO: 99654 - protein, 9 aa, Homo sapiens
  misc_feature: Table A; Target 99654; HLA-C*06:02; UGT2B11; ENSG00000213759; TAA
KAKGAAVRL

SEQ ID NO: 99655 - protein, 9 aa, Homo sapiens
  misc_feature: Table A; Target 99655; HLA-C*12:03; UGT2B11; ENSG00000213759; TAA
KAKGAAVRL

SEQ ID NO: 99656 - protein, 9 aa, Homo sapiens
  misc_feature: Table A; Target 99656; HLA-C*16:02; UGT2B11; ENSG00000213759; TAA
KAKGAAVRL

SEQ ID NO: 99657 - protein, 11 aa, Homo sapiens
  misc_feature: Table A; Target 99657; HLA-B*57:01; UGT2B11; ENSG00000213759; TAA
KAKGAAVRLDF

SEQ ID NO: 99658 - protein, 8 aa, Homo sapiens
  misc_feature: Table A; Target 99658; HLA-B*37:01; UGT2B11; ENSG00000213759; TAA
KDVVSNKK

SEQ ID NO: 99659 - protein, 8 aa, Homo sapiens
  misc_feature: Table A; Target 99659; HLA-C*06:02; UGT2B11; ENSG00000213759; TAA
KDVVSNKK

SEQ ID NO: 99660 - protein, 9 aa, Homo sapiens
  misc_feature: Table A; Target 99660; HLA-B*40:02; UGT2B11; ENSG00000213759; TAA
KDVVSNKKV

SEQ ID NO: 99661 - protein, 9 aa, Homo sapiens
  misc_feature: Table A; Target 99661; HLA-C*06:02; UGT2B11; ENSG00000213759; TAA
KDVVSNKKV

SEQ ID NO: 99662 - protein, 10 aa, Homo sapiens
  misc_feature: Table A; Target 99662; HLA-B*40:02; UGT2B11; ENSG00000213759; TAA
KDVVSNKKVM

SEQ ID NO: 99663 - protein, 10 aa, Homo sapiens
  misc_feature: Table A; Target 99663; HLA-C*04:01; UGT2B11; ENSG00000213759; TAA
KDVVSNKKVM

SEQ ID NO: 99664 - protein, 10 aa, Homo sapiens
  misc_feature: Table A; Target 99664; HLA-B*37:01; UGT2B11; ENSG00000213759; TAA
KELVQRGHEV

SEQ ID NO: 99665 - protein, 9 aa, Homo sapiens
  misc_feature: Table A; Target 99665; HLA-B*49:01; UGT2B11; ENSG00000213759; TAA
KEMEEFVQS

SEQ ID NO: 99666 - protein, 9 aa, Homo sapiens
  misc_feature: Table A; Target 99666; HLA-A*23:01; UGT2B11; ENSG00000213759; TAA
KFEVYPTSL

SEQ ID NO: 99667 - protein, 9 aa, Homo sapiens
  misc_feature: Table A; Target 99667; HLA-B*35:03; UGT2B11; ENSG00000213759; TAA
KFEVYPTSL

SEQ ID NO: 99668 - protein, 9 aa, Homo sapiens
  misc_feature: Table A; Target 99668; HLA-B*37:01; UGT2B11; ENSG00000213759; TAA
KFEVYPTSL

SEQ ID NO: 99669 - protein, 9 aa, Homo sapiens
  misc_feature: Table A; Target 99669; HLA-B*40:01; UGT2B11; ENSG00000213759; TAA
KFEVYPTSL

SEQ ID NO: 99670 - protein, 9 aa, Homo sapiens
  misc_feature: Table A; Target 99670; HLA-B*40:02; UGT2B11; ENSG00000213759; TAA
KFEVYPTSL

SEQ ID NO: 99671 - protein, 9 aa, Homo sapiens
  misc_feature: Table A; Target 99671; HLA-B*55:01; UGT2B11; ENSG00000213759; TAA
KFEVYPTSL

SEQ ID NO: 99672 - protein, 9 aa, Homo sapiens
  misc_feature: Table A; Target 99672; HLA-C*01:02; UGT2B11; ENSG00000213759; TAA
KFEVYPTSL

SEQ ID NO: 99673 - protein, 9 aa, Homo sapiens
  misc_feature: Table A; Target 99673; HLA-C*04:01; UGT2B11; ENSG00000213759; TAA
KFEVYPTSL

SEQ ID NO: 99674 - protein, 9 aa, Homo sapiens
  misc_feature: Table A; Target 99674; HLA-C*07:02; UGT2B11; ENSG00000213759; TAA
KFEVYPTSL

SEQ ID NO: 99675 - protein, 9 aa, Homo sapiens
  misc_feature: Table A; Target 99675; HLA-C*07:04; UGT2B11; ENSG00000213759; TAA
KFEVYPTSL

SEQ ID NO: 99676 - protein, 9 aa, Homo sapiens
  misc_feature: Table A; Target 99676; HLA-C*14:02; UGT2B11; ENSG00000213759; TAA
KFEVYPTSL

SEQ ID NO: 99677 - protein, 9 aa, Homo sapiens
  misc_feature: Table A; Target 99677; HLA-A*32:01; UGT2B11; ENSG00000213759; TAA
KGAAVRLDF

SEQ ID NO: 99678 - protein, 9 aa, Homo sapiens
  misc_feature: Table A; Target 99678; HLA-B*57:01; UGT2B11; ENSG00000213759; TAA
KGAAVRLDF

SEQ ID NO: 99679 - protein, 9 aa, Homo sapiens
  misc_feature: Table A; Target 99679; HLA-B*58:01; UGT2B11; ENSG00000213759; TAA
KGAAVRLDF

SEQ ID NO: 99680 - protein, 9 aa, Homo sapiens
  misc_feature: Table A; Target 99680; HLA-C*16:01; UGT2B11; ENSG00000213759; TAA
KGAAVRLDF

SEQ ID NO: 99681 - protein, 10 aa, Homo sapiens
  misc_feature: Table A; Target 99681; HLA-A*02:07; UGT2B11; ENSG00000213759; TAA
KIPQKVLWRF

SEQ ID NO: 99682 - protein, 10 aa, Homo sapiens
  misc_feature: Table A; Target 99682; HLA-A*02:07; UGT2B11; ENSG00000213759; TAA
KLQESRFDIV

SEQ ID NO: 99683 - protein, 11 aa, Homo sapiens
  misc_feature: Table A; Target 99683; HLA-A*02:07; UGT2B11; ENSG00000213759; TAA
KLQESRFDIVF

SEQ ID NO: 99684 - protein, 8 aa, Homo sapiens
  misc_feature: Table A; Target 99684; HLA-A*32:01; UGT2B11; ENSG00000213759; TAA
KLSDQMTF

SEQ ID NO: 99685 - protein, 8 aa, Homo sapiens
  misc_feature: Table A; Target 99685; HLA-B*37:01; UGT2B11; ENSG00000213759; TAA
KLSDQMTF

SEQ ID NO: 99686 - protein, 8 aa, Homo sapiens
  misc_feature: Table A; Target 99686; HLA-B*58:01; UGT2B11; ENSG00000213759; TAA
KLSDQMTF

SEQ ID NO: 99687 - protein, 9 aa, Homo sapiens
  misc_feature: Table A; Target 99687; HLA-A*02:01; UGT2B11; ENSG00000213759; TAA
KLSDQMTFM

SEQ ID NO: 99688 - protein, 9 aa, Homo sapiens
  misc_feature: Table A; Target 99688; HLA-A*02:03; UGT2B11; ENSG00000213759; TAA
KLSDQMTFM

SEQ ID NO: 99689 - protein, 9 aa, Homo sapiens
  misc_feature: Table A; Target 99689; HLA-A*02:04; UGT2B11; ENSG00000213759; TAA
KLSDQMTFM

SEQ ID NO: 99690 - protein, 9 aa, Homo sapiens
  misc_feature: Table A; Target 99690; HLA-A*02:07; UGT2B11; ENSG00000213759; TAA
KLSDQMTFM

SEQ ID NO: 99691 - protein, 9 aa, Homo sapiens
  misc_feature: Table A; Target 99691; HLA-A*03:01; UGT2B11; ENSG00000213759; TAA
KLSDQMTFM

SEQ ID NO: 99692 - protein, 9 aa, Homo sapiens
  misc_feature: Table A; Target 99692; HLA-A*03:02; UGT2B11; ENSG00000213759; TAA
KLSDQMTFM

SEQ ID NO: 99693 - protein, 9 aa, Homo sapiens
  misc_feature: Table A; Target 99693; HLA-A*32:01; UGT2B11; ENSG00000213759; TAA
KLSDQMTFM

SEQ ID NO: 99694 - protein, 9 aa, Homo sapiens
  misc_feature: Table A; Target 99694; HLA-B*13:02; UGT2B11; ENSG00000213759; TAA
KLSDQMTFM

SEQ ID NO: 99695 - protein, 9 aa, Homo sapiens
  misc_feature: Table A; Target 99695; HLA-B*27:05; UGT2B11; ENSG00000213759; TAA
KLSDQMTFM

SEQ ID NO: 99696 - protein, 9 aa, Homo sapiens
  misc_feature: Table A; Target 99696; HLA-B*46:01; UGT2B11; ENSG00000213759; TAA
KLSDQMTFM

SEQ ID NO: 99697 - protein, 9 aa, Homo sapiens
  misc_feature: Table A; Target 99697; HLA-B*55:01; UGT2B11; ENSG00000213759; TAA
KLSDQMTFM

SEQ ID NO: 99698 - protein, 11 aa, Homo sapiens
  misc_feature: Table A; Target 99698; HLA-A*03:01; UGT2B11; ENSG00000213759; TAA
KLSDQMTFMER

SEQ ID NO: 99699 - protein, 11 aa, Homo sapiens
  misc_feature: Table A; Target 99699; HLA-A*31:01; UGT2B11; ENSG00000213759; TAA
KLSDQMTFMER

SEQ ID NO: 99700 - protein, 10 aa, Homo sapiens
  misc_feature: Table A; Target 99700; HLA-B*07:02; UGT2B11; ENSG00000213759; TAA
KPAKPLPKEM

SEQ ID NO: 99701 - protein, 10 aa, Homo sapiens
  misc_feature: Table A; Target 99701; HLA-C*07:02; UGT2B11; ENSG00000213759; TAA
KPAKPLPKEM

SEQ ID NO: 99702 - protein, 10 aa, Homo sapiens
  misc_feature: Table A; Target 99702; HLA-B*56:01; UGT2B11; ENSG00000213759; TAA
KPDALGLNTR

SEQ ID NO: 99703 - protein, 11 aa, Homo sapiens
  misc_feature: Table A; Target 99703; HLA-B*07:02; UGT2B11; ENSG00000213759; TAA
KPDALGLNTRL

SEQ ID NO: 99704 - protein, 11 aa, Homo sapiens
  misc_feature: Table A; Target 99704; HLA-C*07:02; UGT2B11; ENSG00000213759; TAA
KPDALGLNTRL

SEQ ID NO: 99705 - protein, 10 aa, Homo sapiens
  misc_feature: Table A; Target 99705; HLA-B*35:01; UGT2B11; ENSG00000213759; TAA
KPLPKEMEEF

SEQ ID NO: 99706 - protein, 10 aa, Homo sapiens
  misc_feature: Table A; Target 99706; HLA-A*03:01; UGT2B11; ENSG00000213759; TAA
KTILKELVQR

SEQ ID NO: 99707 - protein, 10 aa, Homo sapiens
  misc_feature: Table A; Target 99707; HLA-A*11:01; UGT2B11; ENSG00000213759; TAA
KTILKELVQR

SEQ ID NO: 99708 - protein, 10 aa, Homo sapiens
  misc_feature: Table A; Target 99708; HLA-A*31:01; UGT2B11; ENSG00000213759; TAA
KTILKELVQR

SEQ ID NO: 99709 - protein, 10 aa, Homo sapiens
  misc_feature: Table A; Target 99709; HLA-A*33:01; UGT2B11; ENSG00000213759; TAA
KTILKELVQR

SEQ ID NO: 99710 - protein, 10 aa, Homo sapiens
  misc_feature: Table A; Target 99710; HLA-A*33:03; UGT2B11; ENSG00000213759; TAA
KTILKELVQR

SEQ ID NO: 99711 - protein, 9 aa, Homo sapiens
  misc_feature: Table A; Target 99711; HLA-A*01:01; UGT2B11; ENSG00000213759; TAA
KTVINDPLY

SEQ ID NO: 99712 - protein, 9 aa, Homo sapiens
  misc_feature: Table A; Target 99712; HLA-A*11:01; UGT2B11; ENSG00000213759; TAA
KTVINDPLY

SEQ ID NO: 99713 - protein, 9 aa, Homo sapiens
  misc_feature: Table A; Target 99713; HLA-A*26:01; UGT2B11; ENSG00000213759; TAA
KTVINDPLY

SEQ ID NO: 99714 - protein, 9 aa, Homo sapiens
  misc_feature: Table A; Target 99714; HLA-A*29:02; UGT2B11; ENSG00000213759; TAA
KTVINDPLY

SEQ ID NO: 99715 - protein, 9 aa, Homo sapiens
  misc_feature: Table A; Target 99715; HLA-A*30:02; UGT2B11; ENSG00000213759; TAA
KTVINDPLY

SEQ ID NO: 99716 - protein, 9 aa, Homo sapiens
  misc_feature: Table A; Target 99716; HLA-A*32:01; UGT2B11; ENSG00000213759; TAA
KTVINDPLY

SEQ ID NO: 99717 - protein, 9 aa, Homo sapiens
  misc_feature: Table A; Target 99717; HLA-B*15:01; UGT2B11; ENSG00000213759; TAA
KTVINDPLY

SEQ ID NO: 99718 - protein, 9 aa, Homo sapiens
  misc_feature: Table A; Target 99718; HLA-B*15:03; UGT2B11; ENSG00000213759; TAA
KTVINDPLY

SEQ ID NO: 99719 - protein, 9 aa, Homo sapiens
  misc_feature: Table A; Target 99719; HLA-B*27:02; UGT2B11; ENSG00000213759; TAA
KTVINDPLY

SEQ ID NO: 99720 - protein, 9 aa, Homo sapiens
  misc_feature: Table A; Target 99720; HLA-B*27:05; UGT2B11; ENSG00000213759; TAA
KTVINDPLY

SEQ ID NO: 99721 - protein, 9 aa, Homo sapiens
  misc_feature: Table A; Target 99721; HLA-B*57:01; UGT2B11; ENSG00000213759; TAA
KTVINDPLY

SEQ ID NO: 99722 - protein, 9 aa, Homo sapiens
  misc_feature: Table A; Target 99722; HLA-B*58:01; UGT2B11; ENSG00000213759; TAA
KTVINDPLY

SEQ ID NO: 99723 - protein, 9 aa, Homo sapiens
  misc_feature: Table A; Target 99723; HLA-C*06:02; UGT2B11; ENSG00000213759; TAA
KTVINDPLY

SEQ ID NO: 99724 - protein, 9 aa, Homo sapiens
  misc_feature: Table A; Target 99724; HLA-C*07:01; UGT2B11; ENSG00000213759; TAA
KTVINDPLY

SEQ ID NO: 99725 - protein, 9 aa, Homo sapiens
  misc_feature: Table A; Target 99725; HLA-C*16:01; UGT2B11; ENSG00000213759; TAA
KTVINDPLY

SEQ ID NO: 99726 - protein, 9 aa, Homo sapiens
  misc_feature: Table A; Target 99726; HLA-C*16:02; UGT2B11; ENSG00000213759; TAA
KTVINDPLY

SEQ ID NO: 99727 - protein, 10 aa, Homo sapiens
  misc_feature: Table A; Target 99727; HLA-A*01:01; UGT2B11; ENSG00000213759; TAA
KTVINDPLYK

SEQ ID NO: 99728 - protein, 10 aa, Homo sapiens
  misc_feature: Table A; Target 99728; HLA-A*03:01; UGT2B11; ENSG00000213759; TAA
KTVINDPLYK

SEQ ID NO: 99729 - protein, 10 aa, Homo sapiens
  misc_feature: Table A; Target 99729; HLA-A*03:02; UGT2B11; ENSG00000213759; TAA
KTVINDPLYK

SEQ ID NO: 99730 - protein, 10 aa, Homo sapiens
  misc_feature: Table A; Target 99730; HLA-A*11:01; UGT2B11; ENSG00000213759; TAA
KTVINDPLYK

SEQ ID NO: 99731 - protein, 10 aa, Homo sapiens
  misc_feature: Table A; Target 99731; HLA-A*31:01; UGT2B11; ENSG00000213759; TAA
KTVINDPLYK

SEQ ID NO: 99732 - protein, 10 aa, Homo sapiens
  misc_feature: Table A; Target 99732; HLA-A*68:01; UGT2B11; ENSG00000213759; TAA
KTVINDPLYK

SEQ ID NO: 99733 - protein, 10 aa, Homo sapiens
  misc_feature: Table A; Target 99733; HLA-B*27:02; UGT2B11; ENSG00000213759; TAA
KTVINDPLYK

SEQ ID NO: 99734 - protein, 10 aa, Homo sapiens
  misc_feature: Table A; Target 99734; HLA-B*27:05; UGT2B11; ENSG00000213759; TAA
KTVINDPLYK

SEQ ID NO: 99735 - protein, 10 aa, Homo sapiens
  misc_feature: Table A; Target 99735; HLA-B*57:01; UGT2B11; ENSG00000213759; TAA
KTVINDPLYK

SEQ ID NO: 99736 - protein, 10 aa, Homo sapiens
  misc_feature: Table A; Target 99736; HLA-B*58:01; UGT2B11; ENSG00000213759; TAA
KTVINDPLYK

SEQ ID NO: 99737 - protein, 10 aa, Homo sapiens
  misc_feature: Table A; Target 99737; HLA-C*06:02; UGT2B11; ENSG00000213759; TAA
KTVINDPLYK

SEQ ID NO: 99738 - protein, 10 aa, Homo sapiens
  misc_feature: Table A; Target 99738; HLA-C*07:01; UGT2B11; ENSG00000213759; TAA
KTVINDPLYK

SEQ ID NO: 99739 - protein, 10 aa, Homo sapiens
  misc_feature: Table A; Target 99739; HLA-C*07:02; UGT2B11; ENSG00000213759; TAA
KTVINDPLYK

SEQ ID NO: 99740 - protein, 9 aa, Homo sapiens
  misc_feature: Table A; Target 99740; HLA-A*03:01; UGT2B11; ENSG00000213759; TAA
KVLVWAAEY

SEQ ID NO: 99741 - protein, 9 aa, Homo sapiens
  misc_feature: Table A; Target 99741; HLA-A*29:02; UGT2B11; ENSG00000213759; TAA
KVLVWAAEY

SEQ ID NO: 99742 - protein, 9 aa, Homo sapiens
  misc_feature: Table A; Target 99742; HLA-A*30:02; UGT2B11; ENSG00000213759; TAA
KVLVWAAEY

SEQ ID NO: 99743 - protein, 9 aa, Homo sapiens
  misc_feature: Table A; Target 99743; HLA-A*31:01; UGT2B11; ENSG00000213759; TAA
KVLVWAAEY

SEQ ID NO: 99744 - protein, 9 aa, Homo sapiens
  misc_feature: Table A; Target 99744; HLA-A*32:01; UGT2B11; ENSG00000213759; TAA
KVLVWAAEY

SEQ ID NO: 99745 - protein, 9 aa, Homo sapiens
  misc_feature: Table A; Target 99745; HLA-B*15:01; UGT2B11; ENSG00000213759; TAA
KVLVWAAEY

SEQ ID NO: 99746 - protein, 9 aa, Homo sapiens
  misc_feature: Table A; Target 99746; HLA-B*46:01; UGT2B11; ENSG00000213759; TAA
KVLVWAAEY

SEQ ID NO: 99747 - protein, 9 aa, Homo sapiens
  misc_feature: Table A; Target 99747; HLA-B*57:01; UGT2B11; ENSG00000213759; TAA
KVLVWAAEY

SEQ ID NO: 99748 - protein, 9 aa, Homo sapiens
  misc_feature: Table A; Target 99748; HLA-B*58:01; UGT2B11; ENSG00000213759; TAA
KVLVWAAEY

SEQ ID NO: 99749 - protein, 9 aa, Homo sapiens
  misc_feature: Table A; Target 99749; HLA-A*23:01; UGT2B11; ENSG00000213759; TAA
KWIPQNDLL

SEQ ID NO: 99750 - protein, 9 aa, Homo sapiens
  misc_feature: Table A; Target 99750; HLA-A*24:02; UGT2B11; ENSG00000213759; TAA
KWIPQNDLL

SEQ ID NO: 99751 - protein, 9 aa, Homo sapiens
  misc_feature: Table A; Target 99751; HLA-A*23:01; UGT2B11; ENSG00000213759; TAA
KWTSVLLLI

SEQ ID NO: 99752 - protein, 9 aa, Homo sapiens
  misc_feature: Table A; Target 99752; HLA-A*24:02; UGT2B11; ENSG00000213759; TAA
KWTSVLLLI

SEQ ID NO: 99753 - protein, 9 aa, Homo sapiens
  misc_feature: Table A; Target 99753; HLA-B*57:01; UGT2B11; ENSG00000213759; TAA
LAALLNIRF

SEQ ID NO: 99754 - protein, 9 aa, Homo sapiens
  misc_feature: Table A; Target 99754; HLA-C*02:02; UGT2B11; ENSG00000213759; TAA
LAALLNIRF

SEQ ID NO: 99755 - protein, 8 aa, Homo sapiens
  misc_feature: Table A; Target 99755; HLA-B*51:01; UGT2B11; ENSG00000213759; TAA
LACVATVI

SEQ ID NO: 99756 - protein, 9 aa, Homo sapiens
  misc_feature: Table A; Target 99756; HLA-C*12:03; UGT2B11; ENSG00000213759; TAA
LACVATVIF

SEQ ID NO: 99757 - protein, 8 aa, Homo sapiens
  misc_feature: Table A; Target 99757; HLA-B*08:01; UGT2B11; ENSG00000213759; TAA
LAKIPQKV

SEQ ID NO: 99758 - protein, 8 aa, Homo sapiens
  misc_feature: Table A; Target 99758; HLA-B*51:01; UGT2B11; ENSG00000213759; TAA
LAKIPQKV

SEQ ID NO: 99759 - protein, 9 aa, Homo sapiens
  misc_feature: Table A; Target 99759; HLA-B*08:01; UGT2B11; ENSG00000213759; TAA
LAKIPQKVL

SEQ ID NO: 99760 - protein, 10 aa, Homo sapiens
  misc_feature: Table A; Target 99760; HLA-B*57:01; UGT2B11; ENSG00000213759; TAA
LAKIPQKVLW

SEQ ID NO: 99761 - protein, 8 aa, Homo sapiens
  misc_feature: Table A; Target 99761; HLA-C*03:03; UGT2B11; ENSG00000213759; TAA
LASSASIL

SEQ ID NO: 99762 - protein, 8 aa, Homo sapiens
  misc_feature: Table A; Target 99762; HLA-C*03:04; UGT2B11; ENSG00000213759; TAA
LASSASIL

SEQ ID NO: 99763 - protein, 8 aa, Homo sapiens
  misc_feature: Table A; Target 99763; HLA-C*05:01; UGT2B11; ENSG00000213759; TAA
LASSASIL

SEQ ID NO: 99764 - protein, 8 aa, Homo sapiens
  misc_feature: Table A; Target 99764; HLA-C*12:03; UGT2B11; ENSG00000213759; TAA
LASSASIL

SEQ ID NO: 99765 - protein, 9 aa, Homo sapiens
  misc_feature: Table A; Target 99765; HLA-A*23:01; UGT2B11; ENSG00000213759; TAA
LASSASILF

SEQ ID NO: 99766 - protein, 9 aa, Homo sapiens
  misc_feature: Table A; Target 99766; HLA-B*35:01; UGT2B11; ENSG00000213759; TAA
LASSASILF

SEQ ID NO: 99767 - protein, 9 aa, Homo sapiens
  misc_feature: Table A; Target 99767; HLA-B*35:03; UGT2B11; ENSG00000213759; TAA
LASSASILF

SEQ ID NO: 99768 - protein, 9 aa, Homo sapiens
  misc_feature: Table A; Target 99768; HLA-B*38:01; UGT2B11; ENSG00000213759; TAA
LASSASILF

SEQ ID NO: 99769 - protein, 9 aa, Homo sapiens
  misc_feature: Table A; Target 99769; HLA-B*46:01; UGT2B11; ENSG00000213759; TAA
LASSASILF

SEQ ID NO: 99770 - protein, 9 aa, Homo sapiens
  misc_feature: Table A; Target 99770; HLA-B*57:01; UGT2B11; ENSG00000213759; TAA
LASSASILF

SEQ ID NO: 99771 - protein, 9 aa, Homo sapiens
  misc_feature: Table A; Target 99771; HLA-B*58:01; UGT2B11; ENSG00000213759; TAA
LASSASILF

SEQ ID NO: 99772 - protein, 9 aa, Homo sapiens
  misc_feature: Table A; Target 99772; HLA-C*02:02; UGT2B11; ENSG00000213759; TAA
LASSASILF

SEQ ID NO: 99773 - protein, 9 aa, Homo sapiens
  misc_feature: Table A; Target 99773; HLA-C*03:03; UGT2B11; ENSG00000213759; TAA
LASSASILF

SEQ ID NO: 99774 - protein, 9 aa, Homo sapiens
  misc_feature: Table A; Target 99774; HLA-C*03:04; UGT2B11; ENSG00000213759; TAA
LASSASILF

SEQ ID NO: 99775 - protein, 9 aa, Homo sapiens
  misc_feature: Table A; Target 99775; HLA-C*05:01; UGT2B11; ENSG00000213759; TAA
LASSASILF

SEQ ID NO: 99776 - protein, 9 aa, Homo sapiens
  misc_feature: Table A; Target 99776; HLA-C*07:04; UGT2B11; ENSG00000213759; TAA
LASSASILF

SEQ ID NO: 99777 - protein, 9 aa, Homo sapiens
  misc_feature: Table A; Target 99777; HLA-C*07:06; UGT2B11; ENSG00000213759; TAA
LASSASILF

SEQ ID NO: 99778 - protein, 9 aa, Homo sapiens
  misc_feature: Table A; Target 99778; HLA-C*12:03; UGT2B11; ENSG00000213759; TAA
LASSASILF

SEQ ID NO: 99779 - protein, 9 aa, Homo sapiens
  misc_feature: Table A; Target 99779; HLA-C*16:01; UGT2B11; ENSG00000213759; TAA
LASSASILF

SEQ ID NO: 99780 - protein, 9 aa, Homo sapiens
  misc_feature: Table A; Target 99780; HLA-C*16:04; UGT2B11; ENSG00000213759; TAA
LASSASILF

SEQ ID NO: 99781 - protein, 8 aa, Homo sapiens
  misc_feature: Table A; Target 99781; HLA-B*37:01; UGT2B11; ENSG00000213759; TAA
LDVIGFLL

SEQ ID NO: 99782 - protein, 8 aa, Homo sapiens
  misc_feature: Table A; Target 99782; HLA-B*40:02; UGT2B11; ENSG00000213759; TAA
LDVIGFLL

SEQ ID NO: 99783 - protein, 10 aa, Homo sapiens
  misc_feature: Table A; Target 99783; HLA-A*23:01; UGT2B11; ENSG00000213759; TAA
LFDPNDASTL

SEQ ID NO: 99784 - protein, 10 aa, Homo sapiens
  misc_feature: Table A; Target 99784; HLA-B*27:05; UGT2B11; ENSG00000213759; TAA
LFDPNDASTL

SEQ ID NO: 99785 - protein, 10 aa, Homo sapiens
  misc_feature: Table A; Target 99785; HLA-B*35:01; UGT2B11; ENSG00000213759; TAA
LFDPNDASTL

SEQ ID NO: 99786 - protein, 10 aa, Homo sapiens
  misc_feature: Table A; Target 99786; HLA-B*35:03; UGT2B11; ENSG00000213759; TAA
LFDPNDASTL

SEQ ID NO: 99787 - protein, 10 aa, Homo sapiens
  misc_feature: Table A; Target 99787; HLA-B*38:01; UGT2B11; ENSG00000213759; TAA
LFDPNDASTL

SEQ ID NO: 99788 - protein, 10 aa, Homo sapiens
  misc_feature: Table A; Target 99788; HLA-B*39:01; UGT2B11; ENSG00000213759; TAA
LFDPNDASTL

SEQ ID NO: 99789 - protein, 10 aa, Homo sapiens
  misc_feature: Table A; Target 99789; HLA-B*40:01; UGT2B11; ENSG00000213759; TAA
LFDPNDASTL

SEQ ID NO: 99790 - protein, 10 aa, Homo sapiens
  misc_feature: Table A; Target 99790; HLA-B*55:01; UGT2B11; ENSG00000213759; TAA
LFDPNDASTL

SEQ ID NO: 99791 - protein, 10 aa, Homo sapiens
  misc_feature: Table A; Target 99791; HLA-C*03:03; UGT2B11; ENSG00000213759; TAA
LFDPNDASTL

SEQ ID NO: 99792 - protein, 10 aa, Homo sapiens
  misc_feature: Table A; Target 99792; HLA-C*03:04; UGT2B11; ENSG00000213759; TAA
LFDPNDASTL

SEQ ID NO: 99793 - protein, 10 aa, Homo sapiens
  misc_feature: Table A; Target 99793; HLA-C*04:01; UGT2B11; ENSG00000213759; TAA
LFDPNDASTL

SEQ ID NO: 99794 - protein, 10 aa, Homo sapiens
  misc_feature: Table A; Target 99794; HLA-C*05:01; UGT2B11; ENSG00000213759; TAA
LFDPNDASTL

SEQ ID NO: 99795 - protein, 10 aa, Homo sapiens
  misc_feature: Table A; Target 99795; HLA-C*07:04; UGT2B11; ENSG00000213759; TAA
LFDPNDASTL

SEQ ID NO: 99796 - protein, 10 aa, Homo sapiens
  misc_feature: Table A; Target 99796; HLA-C*14:02; UGT2B11; ENSG00000213759; TAA
LFDPNDASTL

SEQ ID NO: 99797 - protein, 11 aa, Homo sapiens
  misc_feature: Table A; Target 99797; HLA-B*27:05; UGT2B11; ENSG00000213759; TAA
LFDPNDASTLK

SEQ ID NO: 99798 - protein, 9 aa, Homo sapiens
  misc_feature: Table A; Target 99798; HLA-A*23:01; UGT2B11; ENSG00000213759; TAA
LFFDQPDNI

SEQ ID NO: 99799 - protein, 9 aa, Homo sapiens
  misc_feature: Table A; Target 99799; HLA-B*46:01; UGT2B11; ENSG00000213759; TAA
LGHPKTRAF

SEQ ID NO: 99800 - protein, 8 aa, Homo sapiens
  misc_feature: Table A; Target 99800; HLA-C*07:01; UGT2B11; ENSG00000213759; TAA
LGLNTRLY

SEQ ID NO: 99801 - protein, 8 aa, Homo sapiens
  misc_feature: Table A; Target 99801; HLA-B*46:01; UGT2B11; ENSG00000213759; TAA
LGRPTTLF

SEQ ID NO: 99802 - protein, 8 aa, Homo sapiens
  misc_feature: Table A; Target 99802; HLA-B*27:05; UGT2B11; ENSG00000213759; TAA
LGSVISNM

SEQ ID NO: 99803 - protein, 8 aa, Homo sapiens
  misc_feature: Table A; Target 99803; HLA-C*01:02; UGT2B11; ENSG00000213759; TAA
LGSVISNM

SEQ ID NO: 99804 - protein, 8 aa, Homo sapiens
  misc_feature: Table A; Target 99804; HLA-C*04:01; UGT2B11; ENSG00000213759; TAA
LGSVISNM

SEQ ID NO: 99805 - protein, 8 aa, Homo sapiens
  misc_feature: Table A; Target 99805; HLA-C*07:04; UGT2B11; ENSG00000213759; TAA
LGSVISNM

SEQ ID NO: 99806 - protein, 8 aa, Homo sapiens
  misc_feature: Table A; Target 99806; HLA-C*12:03; UGT2B11; ENSG00000213759; TAA
LGSVISNM

SEQ ID NO: 99807 - protein, 9 aa, Homo sapiens
  misc_feature: Table A; Target 99807; HLA-B*27:05; UGT2B11; ENSG00000213759; TAA
LGSVISNMT

SEQ ID NO: 99808 - protein, 9 aa, Homo sapiens
  misc_feature: Table A; Target 99808; HLA-C*06:02; UGT2B11; ENSG00000213759; TAA
LGSVISNMT

SEQ ID NO: 99809 - protein, 8 aa, Homo sapiens
  misc_feature: Table A; Target 99809; HLA-A*02:03; UGT2B11; ENSG00000213759; TAA
LIFPPSYI

SEQ ID NO: 99810 - protein, 10 aa, Homo sapiens
  misc_feature: Table A; Target 99810; HLA-A*02:07; UGT2B11; ENSG00000213759; TAA
LIFPPSYIPI

SEQ ID NO: 99811 - protein, 10 aa, Homo sapiens
  misc_feature: Table A; Target 99811; HLA-A*68:02; UGT2B11; ENSG00000213759; TAA
LIFPPSYIPI

SEQ ID NO: 99812 - protein, 11 aa, Homo sapiens
  misc_feature: Table A; Target 99812; HLA-A*02:01; UGT2B11; ENSG00000213759; TAA
LIFPPSYIPIV

SEQ ID NO: 99813 - protein, 11 aa, Homo sapiens
  misc_feature: Table A; Target 99813; HLA-A*02:04; UGT2B11; ENSG00000213759; TAA
LIFPPSYIPIV

SEQ ID NO: 99814 - protein, 11 aa, Homo sapiens
  misc_feature: Table A; Target 99814; HLA-A*02:07; UGT2B11; ENSG00000213759; TAA
LIFPPSYIPIV

SEQ ID NO: 99815 - protein, 9 aa, Homo sapiens
  misc_feature: Table A; Target 99815; HLA-B*13:02; UGT2B11; ENSG00000213759; TAA
LLACVATVI

SEQ ID NO: 99816 - protein, 8 aa, Homo sapiens
  misc_feature: Table A; Target 99816; HLA-B*46:01; UGT2B11; ENSG00000213759; TAA
LLIHLSCY

SEQ ID NO: 99817 - protein, 9 aa, Homo sapiens
  misc_feature: Table A; Target 99817; HLA-A*29:02; UGT2B11; ENSG00000213759; TAA
LLLIHLSCY

SEQ ID NO: 99818 - protein, 8 aa, Homo sapiens
  misc_feature: Table A; Target 99818; HLA-A*02:03; UGT2B11; ENSG00000213759; TAA
LLNALKTV

SEQ ID NO: 99819 - protein, 9 aa, Homo sapiens
  misc_feature: Table A; Target 99819; HLA-A*02:03; UGT2B11; ENSG00000213759; TAA
LLNALKTVI

SEQ ID NO: 99820 - protein, 9 aa, Homo sapiens
  misc_feature: Table A; Target 99820; HLA-A*02:04; UGT2B11; ENSG00000213759; TAA
LLNALKTVI

SEQ ID NO: 99821 - protein, 9 aa, Homo sapiens
  misc_feature: Table A; Target 99821; HLA-A*32:01; UGT2B11; ENSG00000213759; TAA
LLNALKTVI

SEQ ID NO: 99822 - protein, 9 aa, Homo sapiens
  misc_feature: Table A; Target 99822; HLA-B*08:01; UGT2B11; ENSG00000213759; TAA
LLNALKTVI

SEQ ID NO: 99823 - protein, 9 aa, Homo sapiens
  misc_feature: Table A; Target 99823; HLA-B*13:02; UGT2B11; ENSG00000213759; TAA
LLNALKTVI

SEQ ID NO: 99824 - protein, 9 aa, Homo sapiens
  misc_feature: Table A; Target 99824; HLA-C*07:04; UGT2B11; ENSG00000213759; TAA
LLNALKTVI

SEQ ID NO: 99825 - protein, 8 aa, Homo sapiens
  misc_feature: Table A; Target 99825; HLA-A*29:02; UGT2B11; ENSG00000213759; TAA
LLNIRFVY

SEQ ID NO: 99826 - protein, 10 aa, Homo sapiens
  misc_feature: Table A; Target 99826; HLA-A*02:04; UGT2B11; ENSG00000213759; TAA
LLNIRFVYSL

SEQ ID NO: 99827 - protein, 8 aa, Homo sapiens
  misc_feature: Table A; Target 99827; HLA-B*08:01; UGT2B11; ENSG00000213759; TAA
LNALKTVI

SEQ ID NO: 99828 - protein, 8 aa, Homo sapiens
  misc_feature: Table A; Target 99828; HLA-B*08:01; UGT2B11; ENSG00000213759; TAA
LPKEMEEF

SEQ ID NO: 99829 - protein, 8 aa, Homo sapiens
  misc_feature: Table A; Target 99829; HLA-B*46:01; UGT2B11; ENSG00000213759; TAA
LPKEMEEF

SEQ ID NO: 99830 - protein, 9 aa, Homo sapiens
  misc_feature: Table A; Target 99830; HLA-B*51:01; UGT2B11; ENSG00000213759; TAA
LPKEMEEFV

SEQ ID NO: 99831 - protein, 9 aa, Homo sapiens
  misc_feature: Table A; Target 99831; HLA-B*54:01; UGT2B11; ENSG00000213759; TAA
LPKEMEEFV

SEQ ID NO: 99832 - protein, 9 aa, Homo sapiens
  misc_feature: Table A; Target 99832; HLA-C*16:04; UGT2B11; ENSG00000213759; TAA
LRFTPGYTI

SEQ ID NO: 99833 - protein, 8 aa, Homo sapiens
  misc_feature: Table A; Target 99833; HLA-A*01:01; UGT2B11; ENSG00000213759; TAA
LSDQMTFM

SEQ ID NO: 99834 - protein, 8 aa, Homo sapiens
  misc_feature: Table A; Target 99834; HLA-C*04:01; UGT2B11; ENSG00000213759; TAA
LSDQMTFM

SEQ ID NO: 99835 - protein, 8 aa, Homo sapiens
  misc_feature: Table A; Target 99835; HLA-C*05:01; UGT2B11; ENSG00000213759; TAA
LSDQMTFM

SEQ ID NO: 99836 - protein, 10 aa, Homo sapiens
  misc_feature: Table A; Target 99836; HLA-A*01:01; UGT2B11; ENSG00000213759; TAA
LSDQMTFMER

SEQ ID NO: 99837 - protein, 9 aa, Homo sapiens
  misc_feature: Table A; Target 99837; HLA-A*24:02; UGT2B11; ENSG00000213759; TAA
LTKTEFENI

SEQ ID NO: 99838 - protein, 9 aa, Homo sapiens
  misc_feature: Table A; Target 99838; HLA-A*25:01; UGT2B11; ENSG00000213759; TAA
LTKTEFENI

SEQ ID NO: 99839 - protein, 9 aa, Homo sapiens
  misc_feature: Table A; Target 99839; HLA-B*57:01; UGT2B11; ENSG00000213759; TAA
LTKTEFENI

SEQ ID NO: 99840 - protein, 9 aa, Homo sapiens
  misc_feature: Table A; Target 99840; HLA-A*02:04; UGT2B11; ENSG00000213759; TAA
LTWFQYHSL

SEQ ID NO: 99841 - protein, 10 aa, Homo sapiens
  misc_feature: Table A; Target 99841; HLA-B*57:01; UGT2B11; ENSG00000213759; TAA
LVWAAEYSHW

SEQ ID NO: 99842 - protein, 8 aa, Homo sapiens
  misc_feature: Table A; Target 99842; HLA-A*24:02; UGT2B11; ENSG00000213759; TAA
LYDIFRNF

SEQ ID NO: 99843 - protein, 8 aa, Homo sapiens
  misc_feature: Table A; Target 99843; HLA-A*31:01; UGT2B11; ENSG00000213759; TAA
LYDIFRNF

SEQ ID NO: 99844 - protein, 8 aa, Homo sapiens
  misc_feature: Table A; Target 99844; HLA-C*04:01; UGT2B11; ENSG00000213759; TAA
LYDIFRNF

SEQ ID NO: 99845 - protein, 8 aa, Homo sapiens
  misc_feature: Table A; Target 99845; HLA-C*07:01; UGT2B11; ENSG00000213759; TAA
LYDIFRNF

SEQ ID NO: 99846 - protein, 9 aa, Homo sapiens
  misc_feature: Table A; Target 99846; HLA-A*24:02; UGT2B11; ENSG00000213759; TAA
LYFDFWFQM

SEQ ID NO: 99847 - protein, 9 aa, Homo sapiens
  misc_feature: Table A; Target 99847; HLA-A*29:02; UGT2B11; ENSG00000213759; TAA
LYFDFWFQM

SEQ ID NO: 99848 - protein, 9 aa, Homo sapiens
  misc_feature: Table A; Target 99848; HLA-A*23:01; UGT2B11; ENSG00000213759; TAA
LYFSQEQEI

SEQ ID NO: 99849 - protein, 9 aa, Homo sapiens
  misc_feature: Table A; Target 99849; HLA-A*24:02; UGT2B11; ENSG00000213759; TAA
LYFSQEQEI

SEQ ID NO: 99850 - protein, 9 aa, Homo sapiens
  misc_feature: Table A; Target 99850; HLA-C*01:02; UGT2B11; ENSG00000213759; TAA
LYFSQEQEI

SEQ ID NO: 99851 - protein, 9 aa, Homo sapiens
  misc_feature: Table A; Target 99851; HLA-C*14:02; UGT2B11; ENSG00000213759; TAA
LYFSQEQEI

SEQ ID NO: 99852 - protein, 11 aa, Homo sapiens
  misc_feature: Table A; Target 99852; HLA-A*24:02; UGT2B11; ENSG00000213759; TAA
LYFSQEQEILW

SEQ ID NO: 99853 - protein, 9 aa, Homo sapiens
  misc_feature: Table A; Target 99853; HLA-A*23:01; UGT2B11; ENSG00000213759; TAA
LYKENIMKL

SEQ ID NO: 99854 - protein, 9 aa, Homo sapiens
  misc_feature: Table A; Target 99854; HLA-A*24:02; UGT2B11; ENSG00000213759; TAA
LYKENIMKL

SEQ ID NO: 99855 - protein, 9 aa, Homo sapiens
  misc_feature: Table A; Target 99855; HLA-B*40:02; UGT2B11; ENSG00000213759; TAA
LYKENIMKL

SEQ ID NO: 99856 - protein, 9 aa, Homo sapiens
  misc_feature: Table A; Target 99856; HLA-C*14:02; UGT2B11; ENSG00000213759; TAA
LYKENIMKL

SEQ ID NO: 99857 - protein, 11 aa, Homo sapiens
  misc_feature: Table A; Target 99857; HLA-A*24:02; UGT2B11; ENSG00000213759; TAA
LYKWIPQNDLL

SEQ ID NO: 99858 - protein, 9 aa, Homo sapiens
  misc_feature: Table A; Target 99858; HLA-B*07:02; UGT2B11; ENSG00000213759; TAA
MPHKGAKHL

SEQ ID NO: 99859 - protein, 9 aa, Homo sapiens
  misc_feature: Table A; Target 99859; HLA-B*08:01; UGT2B11; ENSG00000213759; TAA
MPHKGAKHL

SEQ ID NO: 99860 - protein, 9 aa, Homo sapiens
  misc_feature: Table A; Target 99860; HLA-C*04:01; UGT2B11; ENSG00000213759; TAA
MPHKGAKHL

SEQ ID NO: 99861 - protein, 10 aa, Homo sapiens
  misc_feature: Table A; Target 99861; HLA-B*57:01; UGT2B11; ENSG00000213759; TAA
MSKLSDQMTF

SEQ ID NO: 99862 - protein, 10 aa, Homo sapiens
  misc_feature: Table A; Target 99862; HLA-B*07:02; UGT2B11; ENSG00000213759; TAA
MSSTDLLNAL

SEQ ID NO: 99863 - protein, 10 aa, Homo sapiens
  misc_feature: Table A; Target 99863; HLA-C*07:02; UGT2B11; ENSG00000213759; TAA
MSSTDLLNAL

SEQ ID NO: 99864 - protein, 11 aa, Homo sapiens
  misc_feature: Table A; Target 99864; HLA-A*01:01; UGT2B11; ENSG00000213759; TAA
MSSTDLLNALK

SEQ ID NO: 99865 - protein, 11 aa, Homo sapiens
  misc_feature: Table A; Target 99865; HLA-A*11:01; UGT2B11; ENSG00000213759; TAA
MSSTDLLNALK

SEQ ID NO: 99866 - protein, 11 aa, Homo sapiens
  misc_feature: Table A; Target 99866; HLA-B*27:02; UGT2B11; ENSG00000213759; TAA
MSSTDLLNALK

SEQ ID NO: 99867 - protein, 11 aa, Homo sapiens
  misc_feature: Table A; Target 99867; HLA-C*07:06; UGT2B11; ENSG00000213759; TAA
MSSTDLLNALK

SEQ ID NO: 99868 - protein, 9 aa, Homo sapiens
  misc_feature: Table A; Target 99868; HLA-A*02:03; UGT2B11; ENSG00000213759; TAA
MTAERANVI

SEQ ID NO: 99869 - protein, 9 aa, Homo sapiens
  misc_feature: Table A; Target 99869; HLA-A*24:02; UGT2B11; ENSG00000213759; TAA
MTAERANVI

SEQ ID NO: 99870 - protein, 9 aa, Homo sapiens
  misc_feature: Table A; Target 99870; HLA-A*25:01; UGT2B11; ENSG00000213759; TAA
MTAERANVI

SEQ ID NO: 99871 - protein, 9 aa, Homo sapiens
  misc_feature: Table A; Target 99871; HLA-A*26:01; UGT2B11; ENSG00000213759; TAA
MTAERANVI

SEQ ID NO: 99872 - protein, 9 aa, Homo sapiens
  misc_feature: Table A; Target 99872; HLA-A*32:01; UGT2B11; ENSG00000213759; TAA
MTAERANVI

SEQ ID NO: 99873 - protein, 9 aa, Homo sapiens
  misc_feature: Table A; Target 99873; HLA-A*33:03; UGT2B11; ENSG00000213759; TAA
MTAERANVI

SEQ ID NO: 99874 - protein, 9 aa, Homo sapiens
  misc_feature: Table A; Target 99874; HLA-A*68:02; UGT2B11; ENSG00000213759; TAA
MTAERANVI

SEQ ID NO: 99875 - protein, 9 aa, Homo sapiens
  misc_feature: Table A; Target 99875; HLA-B*07:02; UGT2B11; ENSG00000213759; TAA
MTAERANVI

SEQ ID NO: 99876 - protein, 9 aa, Homo sapiens
  misc_feature: Table A; Target 99876; HLA-B*08:01; UGT2B11; ENSG00000213759; TAA
MTAERANVI

SEQ ID NO: 99877 - protein, 9 aa, Homo sapiens
  misc_feature: Table A; Target 99877; HLA-B*13:02; UGT2B11; ENSG00000213759; TAA
MTAERANVI

SEQ ID NO: 99878 - protein, 9 aa, Homo sapiens
  misc_feature: Table A; Target 99878; HLA-B*35:03; UGT2B11; ENSG00000213759; TAA
MTAERANVI

SEQ ID NO: 99879 - protein, 9 aa, Homo sapiens
  misc_feature: Table A; Target 99879; HLA-B*38:01; UGT2B11; ENSG00000213759; TAA
MTAERANVI

SEQ ID NO: 99880 - protein, 9 aa, Homo sapiens
  misc_feature: Table A; Target 99880; HLA-B*40:02; UGT2B11; ENSG00000213759; TAA
MTAERANVI

SEQ ID NO: 99881 - protein, 9 aa, Homo sapiens
  misc_feature: Table A; Target 99881; HLA-B*51:01; UGT2B11; ENSG00000213759; TAA
MTAERANVI

SEQ ID NO: 99882 - protein, 9 aa, Homo sapiens
  misc_feature: Table A; Target 99882; HLA-B*54:01; UGT2B11; ENSG00000213759; TAA
MTAERANVI

SEQ ID NO: 99883 - protein, 9 aa, Homo sapiens
  misc_feature: Table A; Target 99883; HLA-B*58:01; UGT2B11; ENSG00000213759; TAA
MTAERANVI

SEQ ID NO: 99884 - protein, 9 aa, Homo sapiens
  misc_feature: Table A; Target 99884; HLA-C*01:02; UGT2B11; ENSG00000213759; TAA
MTAERANVI

SEQ ID NO: 99885 - protein, 9 aa, Homo sapiens
  misc_feature: Table A; Target 99885; HLA-C*02:02; UGT2B11; ENSG00000213759; TAA
MTAERANVI

SEQ ID NO: 99886 - protein, 9 aa, Homo sapiens
  misc_feature: Table A; Target 99886; HLA-C*03:03; UGT2B11; ENSG00000213759; TAA
MTAERANVI

SEQ ID NO: 99887 - protein, 9 aa, Homo sapiens
  misc_feature: Table A; Target 99887; HLA-C*03:04; UGT2B11; ENSG00000213759; TAA
MTAERANVI

SEQ ID NO: 99888 - protein, 9 aa, Homo sapiens
  misc_feature: Table A; Target 99888; HLA-C*06:02; UGT2B11; ENSG00000213759; TAA
MTAERANVI

SEQ ID NO: 99889 - protein, 9 aa, Homo sapiens
  misc_feature: Table A; Target 99889; HLA-C*07:04; UGT2B11; ENSG00000213759; TAA
MTAERANVI

SEQ ID NO: 99890 - protein, 9 aa, Homo sapiens
  misc_feature: Table A; Target 99890; HLA-C*12:03; UGT2B11; ENSG00000213759; TAA
MTAERANVI

SEQ ID NO: 99891 - protein, 9 aa, Homo sapiens
  misc_feature: Table A; Target 99891; HLA-C*16:01; UGT2B11; ENSG00000213759; TAA
MTAERANVI

SEQ ID NO: 99892 - protein, 9 aa, Homo sapiens
  misc_feature: Table A; Target 99892; HLA-C*16:02; UGT2B11; ENSG00000213759; TAA
MTAERANVI

SEQ ID NO: 99893 - protein, 8 aa, Homo sapiens
  misc_feature: Table A; Target 99893; HLA-B*18:01; UGT2B11; ENSG00000213759; TAA
NDASTLKF

SEQ ID NO: 99894 - protein, 8 aa, Homo sapiens
  misc_feature: Table A; Target 99894; HLA-B*37:01; UGT2B11; ENSG00000213759; TAA
NDASTLKF

SEQ ID NO: 99895 - protein, 8 aa, Homo sapiens
  misc_feature: Table A; Target 99895; HLA-B*37:01; UGT2B11; ENSG00000213759; TAA
NDLLGHPK

SEQ ID NO: 99896 - protein, 8 aa, Homo sapiens
  misc_feature: Table A; Target 99896; HLA-B*18:01; UGT2B11; ENSG00000213759; TAA
NGVVVFSL

SEQ ID NO: 99897 - protein, 8 aa, Homo sapiens
  misc_feature: Table A; Target 99897; HLA-C*07:01; UGT2B11; ENSG00000213759; TAA
NIIMQQVK

SEQ ID NO: 99898 - protein, 9 aa, Homo sapiens
  misc_feature: Table A; Target 99898; HLA-A*68:01; UGT2B11; ENSG00000213759; TAA
NIIMQQVKR

SEQ ID NO: 99899 - protein, 9 aa, Homo sapiens
  misc_feature: Table A; Target 99899; HLA-A*33:01; UGT2B11; ENSG00000213759; TAA
NIRFVYSLR

SEQ ID NO: 99900 - protein, 9 aa, Homo sapiens
  misc_feature: Table A; Target 99900; HLA-A*02:03; UGT2B11; ENSG00000213759; TAA
NMKTILKEL

SEQ ID NO: 99901 - protein, 8 aa, Homo sapiens
  misc_feature: Table A; Target 99901; HLA-C*01:02; UGT2B11; ENSG00000213759; TAA
NTMSSTDL

SEQ ID NO: 99902 - protein, 8 aa, Homo sapiens
  misc_feature: Table A; Target 99902; HLA-C*03:03; UGT2B11; ENSG00000213759; TAA
NTMSSTDL

SEQ ID NO: 99903 - protein, 8 aa, Homo sapiens
  misc_feature: Table A; Target 99903; HLA-C*03:04; UGT2B11; ENSG00000213759; TAA
NTMSSTDL

SEQ ID NO: 99904 - protein, 8 aa, Homo sapiens
  misc_feature: Table A; Target 99904; HLA-C*05:01; UGT2B11; ENSG00000213759; TAA
NTMSSTDL

SEQ ID NO: 99905 - protein, 8 aa, Homo sapiens
  misc_feature: Table A; Target 99905; HLA-C*14:02; UGT2B11; ENSG00000213759; TAA
NTMSSTDL

SEQ ID NO: 99906 - protein, 9 aa, Homo sapiens
  misc_feature: Table A; Target 99906; HLA-A*01:01; UGT2B11; ENSG00000213759; TAA
NTMSSTDLL

SEQ ID NO: 99907 - protein, 9 aa, Homo sapiens
  misc_feature: Table A; Target 99907; HLA-A*26:01; UGT2B11; ENSG00000213759; TAA
NTMSSTDLL

SEQ ID NO: 99908 - protein, 9 aa, Homo sapiens
  misc_feature: Table A; Target 99908; HLA-A*68:02; UGT2B11; ENSG00000213759; TAA
NTMSSTDLL

SEQ ID NO: 99909 - protein, 9 aa, Homo sapiens
  misc_feature: Table A; Target 99909; HLA-B*35:03; UGT2B11; ENSG00000213759; TAA
NTMSSTDLL

SEQ ID NO: 99910 - protein, 9 aa, Homo sapiens
  misc_feature: Table A; Target 99910; HLA-B*38:01; UGT2B11; ENSG00000213759; TAA
NTMSSTDLL

SEQ ID NO: 99911 - protein, 9 aa, Homo sapiens
  misc_feature: Table A; Target 99911; HLA-B*39:01; UGT2B11; ENSG00000213759; TAA
NTMSSTDLL

SEQ ID NO: 99912 - protein, 9 aa, Homo sapiens
  misc_feature: Table A; Target 99912; HLA-C*01:02; UGT2B11; ENSG00000213759; TAA
NTMSSTDLL

SEQ ID NO: 99913 - protein, 9 aa, Homo sapiens
  misc_feature: Table A; Target 99913; HLA-C*05:01; UGT2B11; ENSG00000213759; TAA
NTMSSTDLL

SEQ ID NO: 99914 - protein, 8 aa, Homo sapiens
  misc_feature: Table A; Target 99914; HLA-C*05:01; UGT2B11; ENSG00000213759; TAA
NVDFVGGF

SEQ ID NO: 99915 - protein, 8 aa, Homo sapiens
  misc_feature: Table A; Target 99915; HLA-B*56:01; UGT2B11; ENSG00000213759; TAA
NVIATALA

SEQ ID NO: 99916 - protein, 9 aa, Homo sapiens
  misc_feature: Table A; Target 99916; HLA-A*03:01; UGT2B11; ENSG00000213759; TAA
NVIATALAK

SEQ ID NO: 99917 - protein, 9 aa, Homo sapiens
  misc_feature: Table A; Target 99917; HLA-A*03:02; UGT2B11; ENSG00000213759; TAA
NVIATALAK

SEQ ID NO: 99918 - protein, 9 aa, Homo sapiens
  misc_feature: Table A; Target 99918; HLA-A*11:01; UGT2B11; ENSG00000213759; TAA
NVIATALAK

SEQ ID NO: 99919 - protein, 9 aa, Homo sapiens
  misc_feature: Table A; Target 99919; HLA-A*26:01; UGT2B11; ENSG00000213759; TAA
NVIATALAK

SEQ ID NO: 99920 - protein, 9 aa, Homo sapiens
  misc_feature: Table A; Target 99920; HLA-A*68:01; UGT2B11; ENSG00000213759; TAA
NVIATALAK

SEQ ID NO: 99921 - protein, 9 aa, Homo sapiens
  misc_feature: Table A; Target 99921; HLA-C*07:06; UGT2B11; ENSG00000213759; TAA
NVIATALAK

SEQ ID NO: 99922 - protein, 10 aa, Homo sapiens
  misc_feature: Table A; Target 99922; HLA-A*25:01; UGT2B11; ENSG00000213759; TAA
NVIATALAKI

SEQ ID NO: 99923 - protein, 10 aa, Homo sapiens
  misc_feature: Table A; Target 99923; HLA-A*26:01; UGT2B11; ENSG00000213759; TAA
NVIATALAKI

SEQ ID NO: 99924 - protein, 10 aa, Homo sapiens
  misc_feature: Table A; Target 99924; HLA-A*68:02; UGT2B11; ENSG00000213759; TAA
NVIATALAKI

SEQ ID NO: 99925 - protein, 8 aa, Homo sapiens
  misc_feature: Table A; Target 99925; HLA-A*03:02; UGT2B11; ENSG00000213759; TAA
PDNIAHMK

SEQ ID NO: 99926 - protein, 8 aa, Homo sapiens
  misc_feature: Table A; Target 99926; HLA-B*07:02; UGT2B11; ENSG00000213759; TAA
PDNIAHMK

SEQ ID NO: 99927 - protein, 8 aa, Homo sapiens
  misc_feature: Table A; Target 99927; HLA-B*27:02; UGT2B11; ENSG00000213759; TAA
PDNIAHMK

SEQ ID NO: 99928 - protein, 8 aa, Homo sapiens
  misc_feature: Table A; Target 99928; HLA-C*04:01; UGT2B11; ENSG00000213759; TAA
PDNIAHMK

SEQ ID NO: 99929 - protein, 8 aa, Homo sapiens
  misc_feature: Table A; Target 99929; HLA-C*06:02; UGT2B11; ENSG00000213759; TAA
PDNIAHMK

SEQ ID NO: 99930 - protein, 8 aa, Homo sapiens
  misc_feature: Table A; Target 99930; HLA-C*07:01; UGT2B11; ENSG00000213759; TAA
PDNIAHMK

SEQ ID NO: 99931 - protein, 8 aa, Homo sapiens
  misc_feature: Table A; Target 99931; HLA-C*07:02; UGT2B11; ENSG00000213759; TAA
PDNIAHMK

SEQ ID NO: 99932 - protein, 9 aa, Homo sapiens
  misc_feature: Table A; Target 99932; HLA-A*03:01; UGT2B11; ENSG00000213759; TAA
PLYKENIMK

SEQ ID NO: 99933 - protein, 9 aa, Homo sapiens
  misc_feature: Table A; Target 99933; HLA-A*24:02; UGT2B11; ENSG00000213759; TAA
PMVGIPLFF

SEQ ID NO: 99934 - protein, 9 aa, Homo sapiens
  misc_feature: Table A; Target 99934; HLA-B*35:01; UGT2B11; ENSG00000213759; TAA
PPSYIPIVM

SEQ ID NO: 99935 - protein, 10 aa, Homo sapiens
  misc_feature: Table A; Target 99935; HLA-C*04:01; UGT2B11; ENSG00000213759; TAA
PPSYIPIVMS

SEQ ID NO: 99936 - protein, 10 aa, Homo sapiens
  misc_feature: Table A; Target 99936; HLA-A*03:02; UGT2B11; ENSG00000213759; TAA
PQNDLLGHPK

SEQ ID NO: 99937 - protein, 10 aa, Homo sapiens
  misc_feature: Table A; Target 99937; HLA-A*11:01; UGT2B11; ENSG00000213759; TAA
PQNDLLGHPK

SEQ ID NO: 99938 - protein, 10 aa, Homo sapiens
  misc_feature: Table A; Target 99938; HLA-A*31:01; UGT2B11; ENSG00000213759; TAA
PQNDLLGHPK

SEQ ID NO: 99939 - protein, 10 aa, Homo sapiens
  misc_feature: Table A; Target 99939; HLA-A*33:01; UGT2B11; ENSG00000213759; TAA
PQNDLLGHPK

SEQ ID NO: 99940 - protein, 10 aa, Homo sapiens
  misc_feature: Table A; Target 99940; HLA-B*27:02; UGT2B11; ENSG00000213759; TAA
PQNDLLGHPK

SEQ ID NO: 99941 - protein, 10 aa, Homo sapiens
  misc_feature: Table A; Target 99941; HLA-C*06:02; UGT2B11; ENSG00000213759; TAA
PQNDLLGHPK

SEQ ID NO: 99942 - protein, 8 aa, Homo sapiens
  misc_feature: Table A; Target 99942; HLA-C*12:03; UGT2B11; ENSG00000213759; TAA
PSYIPIVM

SEQ ID NO: 99943 - protein, 10 aa, Homo sapiens
  misc_feature: Table A; Target 99943; HLA-B*27:02; UGT2B11; ENSG00000213759; TAA
PTTLFETMGK

SEQ ID NO: 99944 - protein, 9 aa, Homo sapiens
  misc_feature: Table A; Target 99944; HLA-C*07:02; UGT2B11; ENSG00000213759; TAA
PVKPLDRAV

SEQ ID NO: 99945 - protein, 8 aa, Homo sapiens
  misc_feature: Table A; Target 99945; HLA-B*18:01; UGT2B11; ENSG00000213759; TAA
QEILWELY

SEQ ID NO: 99946 - protein, 9 aa, Homo sapiens
  misc_feature: Table A; Target 99946; HLA-A*02:04; UGT2B11; ENSG00000213759; TAA
QEQEILWEL

SEQ ID NO: 99947 - protein, 9 aa, Homo sapiens
  misc_feature: Table A; Target 99947; HLA-A*30:01; UGT2B11; ENSG00000213759; TAA
QEQEILWEL

SEQ ID NO: 99948 - protein, 9 aa, Homo sapiens
  misc_feature: Table A; Target 99948; HLA-B*18:01; UGT2B11; ENSG00000213759; TAA
QEQEILWEL

SEQ ID NO: 99949 - protein, 9 aa, Homo sapiens
  misc_feature: Table A; Target 99949; HLA-B*38:01; UGT2B11; ENSG00000213759; TAA
QEQEILWEL

SEQ ID NO: 99950 - protein, 9 aa, Homo sapiens
  misc_feature: Table A; Target 99950; HLA-B*40:01; UGT2B11; ENSG00000213759; TAA
QEQEILWEL

SEQ ID NO: 99951 - protein, 9 aa, Homo sapiens
  misc_feature: Table A; Target 99951; HLA-B*40:02; UGT2B11; ENSG00000213759; TAA
QEQEILWEL

SEQ ID NO: 99952 - protein, 9 aa, Homo sapiens
  misc_feature: Table A; Target 99952; HLA-B*44:02; UGT2B11; ENSG00000213759; TAA
QEQEILWEL

SEQ ID NO: 99953 - protein, 9 aa, Homo sapiens
  misc_feature: Table A; Target 99953; HLA-B*44:03; UGT2B11; ENSG00000213759; TAA
QEQEILWEL

SEQ ID NO: 99954 - protein, 9 aa, Homo sapiens
  misc_feature: Table A; Target 99954; HLA-B*49:01; UGT2B11; ENSG00000213759; TAA
QEQEILWEL

SEQ ID NO: 99955 - protein, 10 aa, Homo sapiens
  misc_feature: Table A; Target 99955; HLA-B*44:02; UGT2B11; ENSG00000213759; TAA
QEQEILWELY

SEQ ID NO: 99956 - protein, 10 aa, Homo sapiens
  misc_feature: Table A; Target 99956; HLA-B*44:03; UGT2B11; ENSG00000213759; TAA
QEQEILWELY

SEQ ID NO: 99957 - protein, 8 aa, Homo sapiens
  misc_feature: Table A; Target 99957; HLA-B*49:01; UGT2B11; ENSG00000213759; TAA
QESRFDIV

SEQ ID NO: 99958 - protein, 9 aa, Homo sapiens
  misc_feature: Table A; Target 99958; HLA-A*30:01; UGT2B11; ENSG00000213759; TAA
QESRFDIVF

SEQ ID NO: 99959 - protein, 9 aa, Homo sapiens
  misc_feature: Table A; Target 99959; HLA-B*18:01; UGT2B11; ENSG00000213759; TAA
QESRFDIVF

SEQ ID NO: 99960 - protein, 9 aa, Homo sapiens
  misc_feature: Table A; Target 99960; HLA-B*37:01; UGT2B11; ENSG00000213759; TAA
QESRFDIVF

SEQ ID NO: 99961 - protein, 9 aa, Homo sapiens
  misc_feature: Table A; Target 99961; HLA-B*38:01; UGT2B11; ENSG00000213759; TAA
QESRFDIVF

SEQ ID NO: 99962 - protein, 9 aa, Homo sapiens
  misc_feature: Table A; Target 99962; HLA-B*40:01; UGT2B11; ENSG00000213759; TAA
QESRFDIVF

SEQ ID NO: 99963 - protein, 9 aa, Homo sapiens
  misc_feature: Table A; Target 99963; HLA-B*40:02; UGT2B11; ENSG00000213759; TAA
QESRFDIVF

SEQ ID NO: 99964 - protein, 9 aa, Homo sapiens
  misc_feature: Table A; Target 99964; HLA-B*44:02; UGT2B11; ENSG00000213759; TAA
QESRFDIVF

SEQ ID NO: 99965 - protein, 9 aa, Homo sapiens
  misc_feature: Table A; Target 99965; HLA-B*44:03; UGT2B11; ENSG00000213759; TAA
QESRFDIVF

SEQ ID NO: 99966 - protein, 9 aa, Homo sapiens
  misc_feature: Table A; Target 99966; HLA-B*49:01; UGT2B11; ENSG00000213759; TAA
QESRFDIVF

SEQ ID NO: 99967 - protein, 9 aa, Homo sapiens
  misc_feature: Table A; Target 99967; HLA-B*57:01; UGT2B11; ENSG00000213759; TAA
QESRFDIVF

SEQ ID NO: 99968 - protein, 9 aa, Homo sapiens
  misc_feature: Table A; Target 99968; HLA-C*16:04; UGT2B11; ENSG00000213759; TAA
QESRFDIVF

SEQ ID NO: 99969 - protein, 9 aa, Homo sapiens
  misc_feature: Table A; Target 99969; HLA-A*31:01; UGT2B11; ENSG00000213759; TAA
QFYSEVLGR

SEQ ID NO: 99970 - protein, 9 aa, Homo sapiens
  misc_feature: Table A; Target 99970; HLA-A*33:01; UGT2B11; ENSG00000213759; TAA
QFYSEVLGR

SEQ ID NO: 99971 - protein, 9 aa, Homo sapiens
  misc_feature: Table A; Target 99971; HLA-A*33:03; UGT2B11; ENSG00000213759; TAA
QFYSEVLGR

SEQ ID NO: 99972 - protein, 9 aa, Homo sapiens
  misc_feature: Table A; Target 99972; HLA-B*38:01; UGT2B11; ENSG00000213759; TAA
QHDQPVKPL

SEQ ID NO: 99973 - protein, 9 aa, Homo sapiens
  misc_feature: Table A; Target 99973; HLA-B*39:01; UGT2B11; ENSG00000213759; TAA
QHDQPVKPL

SEQ ID NO: 99974 - protein, 9 aa, Homo sapiens
  misc_feature: Table A; Target 99974; HLA-A*33:03; UGT2B11; ENSG00000213759; TAA
QNDLLGHPK

SEQ ID NO: 99975 - protein, 8 aa, Homo sapiens
  misc_feature: Table A; Target 99975; HLA-B*35:01; UGT2B11; ENSG00000213759; TAA
QPDNIAHM

SEQ ID NO: 99976 - protein, 8 aa, Homo sapiens
  misc_feature: Table A; Target 99976; HLA-B*35:03; UGT2B11; ENSG00000213759; TAA
QPDNIAHM

SEQ ID NO: 99977 - protein, 8 aa, Homo sapiens
  misc_feature: Table A; Target 99977; HLA-B*55:01; UGT2B11; ENSG00000213759; TAA
QPDNIAHM

SEQ ID NO: 99978 - protein, 8 aa, Homo sapiens
  misc_feature: Table A; Target 99978; HLA-C*04:01; UGT2B11; ENSG00000213759; TAA
QPDNIAHM

SEQ ID NO: 99979 - protein, 8 aa, Homo sapiens
  misc_feature: Table A; Target 99979; HLA-C*05:01; UGT2B11; ENSG00000213759; TAA
QPDNIAHM

SEQ ID NO: 99980 - protein, 9 aa, Homo sapiens
  misc_feature: Table A; Target 99980; HLA-A*01:01; UGT2B11; ENSG00000213759; TAA
QPDNIAHMK

SEQ ID NO: 99981 - protein, 9 aa, Homo sapiens
  misc_feature: Table A; Target 99981; HLA-A*03:02; UGT2B11; ENSG00000213759; TAA
QPDNIAHMK

SEQ ID NO: 99982 - protein, 9 aa, Homo sapiens
  misc_feature: Table A; Target 99982; HLA-A*33:03; UGT2B11; ENSG00000213759; TAA
QPDNIAHMK

SEQ ID NO: 99983 - protein, 9 aa, Homo sapiens
  misc_feature: Table A; Target 99983; HLA-A*68:01; UGT2B11; ENSG00000213759; TAA
QPDNIAHMK

SEQ ID NO: 99984 - protein, 9 aa, Homo sapiens
  misc_feature: Table A; Target 99984; HLA-B*27:02; UGT2B11; ENSG00000213759; TAA
QPDNIAHMK

SEQ ID NO: 99985 - protein, 9 aa, Homo sapiens
  misc_feature: Table A; Target 99985; HLA-B*35:01; UGT2B11; ENSG00000213759; TAA
QPDNIAHMK

SEQ ID NO: 99986 - protein, 9 aa, Homo sapiens
  misc_feature: Table A; Target 99986; HLA-B*35:03; UGT2B11; ENSG00000213759; TAA
QPDNIAHMK

SEQ ID NO: 99987 - protein, 9 aa, Homo sapiens
  misc_feature: Table A; Target 99987; HLA-B*55:01; UGT2B11; ENSG00000213759; TAA
QPDNIAHMK

SEQ ID NO: 99988 - protein, 10 aa, Homo sapiens
  misc_feature: Table A; Target 99988; HLA-B*54:01; UGT2B11; ENSG00000213759; TAA
QPDNIAHMKA

SEQ ID NO: 99989 - protein, 10 aa, Homo sapiens
  misc_feature: Table A; Target 99989; HLA-B*55:01; UGT2B11; ENSG00000213759; TAA
QPDNIAHMKA

SEQ ID NO: 99990 - protein, 10 aa, Homo sapiens
  misc_feature: Table A; Target 99990; HLA-B*56:01; UGT2B11; ENSG00000213759; TAA
QPDNIAHMKA

SEQ ID NO: 99991 - protein, 9 aa, Homo sapiens
  misc_feature: Table A; Target 99991; HLA-B*54:01; UGT2B11; ENSG00000213759; TAA
QPVKPLDRA

SEQ ID NO: 99992 - protein, 9 aa, Homo sapiens
  misc_feature: Table A; Target 99992; HLA-B*55:01; UGT2B11; ENSG00000213759; TAA
QPVKPLDRA

SEQ ID NO: 99993 - protein, 9 aa, Homo sapiens
  misc_feature: Table A; Target 99993; HLA-B*56:01; UGT2B11; ENSG00000213759; TAA
QPVKPLDRA

SEQ ID NO: 99994 - protein, 10 aa, Homo sapiens
  misc_feature: Table A; Target 99994; HLA-B*07:02; UGT2B11; ENSG00000213759; TAA
QPVKPLDRAV

SEQ ID NO: 99995 - protein, 10 aa, Homo sapiens
  misc_feature: Table A; Target 99995; HLA-B*56:01; UGT2B11; ENSG00000213759; TAA
QPVKPLDRAV

SEQ ID NO: 99996 - protein, 11 aa, Homo sapiens
  misc_feature: Table A; Target 99996; HLA-B*35:01; UGT2B11; ENSG00000213759; TAA
QPVKPLDRAVF

SEQ ID NO: 99997 - protein, 9 aa, Homo sapiens
  misc_feature: Table A; Target 99997; HLA-B*27:05; UGT2B11; ENSG00000213759; TAA
QRGHEVTVL

SEQ ID NO: 99998 - protein, 9 aa, Homo sapiens
  misc_feature: Table A; Target 99998; HLA-B*38:01; UGT2B11; ENSG00000213759; TAA
QRGHEVTVL

SEQ ID NO: 99999 - protein, 9 aa, Homo sapiens
  misc_feature: Table A; Target 99999; HLA-C*07:01; UGT2B11; ENSG00000213759; TAA
QRGHEVTVL

SEQ ID NO: 100000 - protein, 11 aa, Homo sapiens
  misc_feature: Table A; Target 100000; HLA-B*39:01; UGT2B11; ENSG00000213759; TAA
QSSGENGVVVF

SEQ ID NO: 100001 - protein, 11 aa, Homo sapiens
  misc_feature: Table A; Target 100001; HLA-C*07:04; UGT2B11; ENSG00000213759; TAA
QSSGENGVVVF

SEQ ID NO: 100002 - protein, 11 aa, Homo sapiens
  misc_feature: Table A; Target 100002; HLA-C*07:06; UGT2B11; ENSG00000213759; TAA
QSSGENGVVVF

SEQ ID NO: 100003 - protein, 9 aa, Homo sapiens
  misc_feature: Table A; Target 100003; HLA-A*31:01; UGT2B11; ENSG00000213759; TAA
QVKRWSDIR

SEQ ID NO: 100004 - protein, 10 aa, Homo sapiens
  misc_feature: Table A; Target 100004; HLA-A*24:02; UGT2B11; ENSG00000213759; TAA
QYHSLDVIGF

SEQ ID NO: 100005 - protein, 9 aa, Homo sapiens
  misc_feature: Table A; Target 100005; HLA-A*02:07; UGT2B11; ENSG00000213759; TAA
RANVIATAL

SEQ ID NO: 100006 - protein, 9 aa, Homo sapiens
  misc_feature: Table A; Target 100006; HLA-A*03:01; UGT2B11; ENSG00000213759; TAA
RANVIATAL

SEQ ID NO: 100007 - protein, 9 aa, Homo sapiens
  misc_feature: Table A; Target 100007; HLA-A*03:02; UGT2B11; ENSG00000213759; TAA
RANVIATAL

SEQ ID NO: 100008 - protein, 9 aa, Homo sapiens
  misc_feature: Table A; Target 100008; HLA-A*23:01; UGT2B11; ENSG00000213759; TAA
RANVIATAL

SEQ ID NO: 100009 - protein, 9 aa, Homo sapiens
  misc_feature: Table A; Target 100009; HLA-A*24:02; UGT2B11; ENSG00000213759; TAA
RANVIATAL

SEQ ID NO: 100010 - protein, 9 aa, Homo sapiens
  misc_feature: Table A; Target 100010; HLA-A*30:01; UGT2B11; ENSG00000213759; TAA
RANVIATAL

SEQ ID NO: 100011 - protein, 9 aa, Homo sapiens
  misc_feature: Table A; Target 100011; HLA-A*31:01; UGT2B11; ENSG00000213759; TAA
RANVIATAL

SEQ ID NO: 100012 - protein, 9 aa, Homo sapiens
  misc_feature: Table A; Target 100012; HLA-A*32:01; UGT2B11; ENSG00000213759; TAA
RANVIATAL

SEQ ID NO: 100013 - protein, 9 aa, Homo sapiens
  misc_feature: Table A; Target 100013; HLA-B*07:02; UGT2B11; ENSG00000213759; TAA
RANVIATAL

SEQ ID NO: 100014 - protein, 9 aa, Homo sapiens
  misc_feature: Table A; Target 100014; HLA-B*08:01; UGT2B11; ENSG00000213759; TAA
RANVIATAL

SEQ ID NO: 100015 - protein, 9 aa, Homo sapiens
  misc_feature: Table A; Target 100015; HLA-B*13:02; UGT2B11; ENSG00000213759; TAA
RANVIATAL

SEQ ID NO: 100016 - protein, 9 aa, Homo sapiens
  misc_feature: Table A; Target 100016; HLA-B*15:01; UGT2B11; ENSG00000213759; TAA
RANVIATAL

SEQ ID NO: 100017 - protein, 9 aa, Homo sapiens
  misc_feature: Table A; Target 100017; HLA-B*15:03; UGT2B11; ENSG00000213759; TAA
RANVIATAL

SEQ ID NO: 100018 - protein, 9 aa, Homo sapiens
  misc_feature: Table A; Target 100018; HLA-B*27:02; UGT2B11; ENSG00000213759; TAA
RANVIATAL

SEQ ID NO: 100019 - protein, 9 aa, Homo sapiens
  misc_feature: Table A; Target 100019; HLA-B*27:05; UGT2B11; ENSG00000213759; TAA
RANVIATAL

SEQ ID NO: 100020 - protein, 9 aa, Homo sapiens
  misc_feature: Table A; Target 100020; HLA-B*35:01; UGT2B11; ENSG00000213759; TAA
RANVIATAL

SEQ ID NO: 100021 - protein, 9 aa, Homo sapiens
  misc_feature: Table A; Target 100021; HLA-B*35:03; UGT2B11; ENSG00000213759; TAA
RANVIATAL

SEQ ID NO: 100022 - protein, 9 aa, Homo sapiens
  misc_feature: Table A; Target 100022; HLA-B*37:01; UGT2B11; ENSG00000213759; TAA
RANVIATAL

SEQ ID NO: 100023 - protein, 9 aa, Homo sapiens
  misc_feature: Table A; Target 100023; HLA-B*38:01; UGT2B11; ENSG00000213759; TAA
RANVIATAL

SEQ ID NO: 100024 - protein, 9 aa, Homo sapiens
  misc_feature: Table A; Target 100024; HLA-B*39:01; UGT2B11; ENSG00000213759; TAA
RANVIATAL

SEQ ID NO: 100025 - protein, 9 aa, Homo sapiens
  misc_feature: Table A; Target 100025; HLA-B*40:01; UGT2B11; ENSG00000213759; TAA
RANVIATAL

SEQ ID NO: 100026 - protein, 9 aa, Homo sapiens
  misc_feature: Table A; Target 100026; HLA-B*40:02; UGT2B11; ENSG00000213759; TAA
RANVIATAL

SEQ ID NO: 100027 - protein, 9 aa, Homo sapiens
  misc_feature: Table A; Target 100027; HLA-B*46:01; UGT2B11; ENSG00000213759; TAA
RANVIATAL

SEQ ID NO: 100028 - protein, 9 aa, Homo sapiens
  misc_feature: Table A; Target 100028; HLA-B*54:01; UGT2B11; ENSG00000213759; TAA
RANVIATAL

SEQ ID NO: 100029 - protein, 9 aa, Homo sapiens
  misc_feature: Table A; Target 100029; HLA-B*55:01; UGT2B11; ENSG00000213759; TAA
RANVIATAL

SEQ ID NO: 100030 - protein, 9 aa, Homo sapiens
  misc_feature: Table A; Target 100030; HLA-B*56:01; UGT2B11; ENSG00000213759; TAA
RANVIATAL

SEQ ID NO: 100031 - protein, 9 aa, Homo sapiens
  misc_feature: Table A; Target 100031; HLA-B*57:01; UGT2B11; ENSG00000213759; TAA
RANVIATAL

SEQ ID NO: 100032 - protein, 9 aa, Homo sapiens
  misc_feature: Table A; Target 100032; HLA-B*58:01; UGT2B11; ENSG00000213759; TAA
RANVIATAL

SEQ ID NO: 100033 - protein, 9 aa, Homo sapiens
  misc_feature: Table A; Target 100033; HLA-C*01:02; UGT2B11; ENSG00000213759; TAA
RANVIATAL

SEQ ID NO: 100034 - protein, 9 aa, Homo sapiens
  misc_feature: Table A; Target 100034; HLA-C*02:02; UGT2B11; ENSG00000213759; TAA
RANVIATAL

SEQ ID NO: 100035 - protein, 9 aa, Homo sapiens
  misc_feature: Table A; Target 100035; HLA-C*03:03; UGT2B11; ENSG00000213759; TAA
RANVIATAL

SEQ ID NO: 100036 - protein, 9 aa, Homo sapiens
  misc_feature: Table A; Target 100036; HLA-C*03:04; UGT2B11; ENSG00000213759; TAA
RANVIATAL

SEQ ID NO: 100037 - protein, 9 aa, Homo sapiens
  misc_feature: Table A; Target 100037; HLA-C*05:01; UGT2B11; ENSG00000213759; TAA
RANVIATAL

SEQ ID NO: 100038 - protein, 9 aa, Homo sapiens
  misc_feature: Table A; Target 100038; HLA-C*06:02; UGT2B11; ENSG00000213759; TAA
RANVIATAL

SEQ ID NO: 100039 - protein, 9 aa, Homo sapiens
  misc_feature: Table A; Target 100039; HLA-C*07:02; UGT2B11; ENSG00000213759; TAA
RANVIATAL

SEQ ID NO: 100040 - protein, 9 aa, Homo sapiens
  misc_feature: Table A; Target 100040; HLA-C*07:04; UGT2B11; ENSG00000213759; TAA
RANVIATAL

SEQ ID NO: 100041 - protein, 9 aa, Homo sapiens
  misc_feature: Table A; Target 100041; HLA-C*07:06; UGT2B11; ENSG00000213759; TAA
RANVIATAL

SEQ ID NO: 100042 - protein, 9 aa, Homo sapiens
  misc_feature: Table A; Target 100042; HLA-C*12:03; UGT2B11; ENSG00000213759; TAA
RANVIATAL

SEQ ID NO: 100043 - protein, 9 aa, Homo sapiens
  misc_feature: Table A; Target 100043; HLA-C*14:02; UGT2B11; ENSG00000213759; TAA
RANVIATAL

SEQ ID NO: 100044 - protein, 9 aa, Homo sapiens
  misc_feature: Table A; Target 100044; HLA-C*16:01; UGT2B11; ENSG00000213759; TAA
RANVIATAL

SEQ ID NO: 100045 - protein, 9 aa, Homo sapiens
  misc_feature: Table A; Target 100045; HLA-C*16:02; UGT2B11; ENSG00000213759; TAA
RANVIATAL

SEQ ID NO: 100046 - protein, 9 aa, Homo sapiens
  misc_feature: Table A; Target 100046; HLA-C*16:04; UGT2B11; ENSG00000213759; TAA
RANVIATAL

SEQ ID NO: 100047 - protein, 11 aa, Homo sapiens
  misc_feature: Table A; Target 100047; HLA-A*03:01; UGT2B11; ENSG00000213759; TAA
RANVIATALAK

SEQ ID NO: 100048 - protein, 11 aa, Homo sapiens
  misc_feature: Table A; Target 100048; HLA-A*03:02; UGT2B11; ENSG00000213759; TAA
RANVIATALAK

SEQ ID NO: 100049 - protein, 9 aa, Homo sapiens
  misc_feature: Table A; Target 100049; HLA-A*02:04; UGT2B11; ENSG00000213759; TAA
RAVFWIEFV

SEQ ID NO: 100050 - protein, 10 aa, Homo sapiens
  misc_feature: Table A; Target 100050; HLA-C*07:02; UGT2B11; ENSG00000213759; TAA
RFDGNKPDAL

SEQ ID NO: 100051 - protein, 8 aa, Homo sapiens
  misc_feature: Table A; Target 100051; HLA-A*23:01; UGT2B11; ENSG00000213759; TAA
RFTPGYTI

SEQ ID NO: 100052 - protein, 8 aa, Homo sapiens
  misc_feature: Table A; Target 100052; HLA-A*24:02; UGT2B11; ENSG00000213759; TAA
RFTPGYTI

SEQ ID NO: 100053 - protein, 10 aa, Homo sapiens
  misc_feature: Table A; Target 100053; HLA-A*31:01; UGT2B11; ENSG00000213759; TAA
RFTPGYTIER

SEQ ID NO: 100054 - protein, 8 aa, Homo sapiens
  misc_feature: Table A; Target 100054; HLA-B*08:01; UGT2B11; ENSG00000213759; TAA
RGHEVTVL

SEQ ID NO: 100055 - protein, 9 aa, Homo sapiens
  misc_feature: Table A; Target 100055; HLA-A*03:01; UGT2B11; ENSG00000213759; TAA
RIQHDQPVK

SEQ ID NO: 100056 - protein, 9 aa, Homo sapiens
  misc_feature: Table A; Target 100056; HLA-A*03:02; UGT2B11; ENSG00000213759; TAA
RIQHDQPVK

SEQ ID NO: 100057 - protein, 9 aa, Homo sapiens
  misc_feature: Table A; Target 100057; HLA-A*11:01; UGT2B11; ENSG00000213759; TAA
RIQHDQPVK

SEQ ID NO: 100058 - protein, 9 aa, Homo sapiens
  misc_feature: Table A; Target 100058; HLA-A*24:02; UGT2B11; ENSG00000213759; TAA
RPTTLFETM

SEQ ID NO: 100059 - protein, 9 aa, Homo sapiens
  misc_feature: Table A; Target 100059; HLA-B*07:02; UGT2B11; ENSG00000213759; TAA
RPTTLFETM

SEQ ID NO: 100060 - protein, 9 aa, Homo sapiens
  misc_feature: Table A; Target 100060; HLA-B*35:01; UGT2B11; ENSG00000213759; TAA
RPTTLFETM

SEQ ID NO: 100061 - protein, 9 aa, Homo sapiens
  misc_feature: Table A; Target 100061; HLA-B*35:03; UGT2B11; ENSG00000213759; TAA
RPTTLFETM

SEQ ID NO: 100062 - protein, 9 aa, Homo sapiens
  misc_feature: Table A; Target 100062; HLA-B*54:01; UGT2B11; ENSG00000213759; TAA
RPTTLFETM

SEQ ID NO: 100063 - protein, 9 aa, Homo sapiens
  misc_feature: Table A; Target 100063; HLA-B*55:01; UGT2B11; ENSG00000213759; TAA
RPTTLFETM

SEQ ID NO: 100064 - protein, 9 aa, Homo sapiens
  misc_feature: Table A; Target 100064; HLA-B*56:01; UGT2B11; ENSG00000213759; TAA
RPTTLFETM

SEQ ID NO: 100065 - protein, 9 aa, Homo sapiens
  misc_feature: Table A; Target 100065; HLA-B*57:01; UGT2B11; ENSG00000213759; TAA
RPTTLFETM

SEQ ID NO: 100066 - protein, 9 aa, Homo sapiens
  misc_feature: Table A; Target 100066; HLA-C*03:03; UGT2B11; ENSG00000213759; TAA
RPTTLFETM

SEQ ID NO: 100067 - protein, 9 aa, Homo sapiens
  misc_feature: Table A; Target 100067; HLA-C*07:02; UGT2B11; ENSG00000213759; TAA
RPTTLFETM

SEQ ID NO: 100068 - protein, 11 aa, Homo sapiens
  misc_feature: Table A; Target 100068; HLA-B*27:02; UGT2B11; ENSG00000213759; TAA
RPTTLFETMGK

SEQ ID NO: 100069 - protein, 9 aa, Homo sapiens
  misc_feature: Table A; Target 100069; HLA-A*25:01; UGT2B11; ENSG00000213759; TAA
RVAAHDLTW

SEQ ID NO: 100070 - protein, 9 aa, Homo sapiens
  misc_feature: Table A; Target 100070; HLA-A*32:01; UGT2B11; ENSG00000213759; TAA
RVAAHDLTW

SEQ ID NO: 100071 - protein, 9 aa, Homo sapiens
  misc_feature: Table A; Target 100071; HLA-B*57:01; UGT2B11; ENSG00000213759; TAA
RVAAHDLTW

SEQ ID NO: 100072 - protein, 9 aa, Homo sapiens
  misc_feature: Table A; Target 100072; HLA-B*58:01; UGT2B11; ENSG00000213759; TAA
RVAAHDLTW

SEQ ID NO: 100073 - protein, 9 aa, Homo sapiens
  misc_feature: Table A; Target 100073; HLA-A*02:04; UGT2B11; ENSG00000213759; TAA
RVKNMIYVL

SEQ ID NO: 100074 - protein, 9 aa, Homo sapiens
  misc_feature: Table A; Target 100074; HLA-B*08:01; UGT2B11; ENSG00000213759; TAA
RVKNMIYVL

SEQ ID NO: 100075 - protein, 10 aa, Homo sapiens
  misc_feature: Table A; Target 100075; HLA-A*29:02; UGT2B11; ENSG00000213759; TAA
RVKNMIYVLY

SEQ ID NO: 100076 - protein, 10 aa, Homo sapiens
  misc_feature: Table A; Target 100076; HLA-A*31:01; UGT2B11; ENSG00000213759; TAA
RVKNMIYVLY

SEQ ID NO: 100077 - protein, 10 aa, Homo sapiens
  misc_feature: Table A; Target 100077; HLA-B*57:01; UGT2B11; ENSG00000213759; TAA
RVKNMIYVLY

SEQ ID NO: 100078 - protein, 11 aa, Homo sapiens
  misc_feature: Table A; Target 100078; HLA-A*03:01; UGT2B11; ENSG00000213759; TAA
SCYFSSGSCGK

SEQ ID NO: 100079 - protein, 11 aa, Homo sapiens
  misc_feature: Table A; Target 100079; HLA-A*03:02; UGT2B11; ENSG00000213759; TAA
SCYFSSGSCGK

SEQ ID NO: 100080 - protein, 11 aa, Homo sapiens
  misc_feature: Table A; Target 100080; HLA-A*11:01; UGT2B11; ENSG00000213759; TAA
SCYFSSGSCGK

SEQ ID NO: 100081 - protein, 8 aa, Homo sapiens
  misc_feature: Table A; Target 100081; HLA-B*37:01; UGT2B11; ENSG00000213759; TAA
SDIRKDSF

SEQ ID NO: 100082 - protein, 9 aa, Homo sapiens
  misc_feature: Table A; Target 100082; HLA-A*11:01; UGT2B11; ENSG00000213759; TAA
SDQMTFMER

SEQ ID NO: 100083 - protein, 9 aa, Homo sapiens
  misc_feature: Table A; Target 100083; HLA-A*31:01; UGT2B11; ENSG00000213759; TAA
SDQMTFMER

SEQ ID NO: 100084 - protein, 9 aa, Homo sapiens
  misc_feature: Table A; Target 100084; HLA-A*33:01; UGT2B11; ENSG00000213759; TAA
SDQMTFMER

SEQ ID NO: 100085 - protein, 9 aa, Homo sapiens
  misc_feature: Table A; Target 100085; HLA-B*40:02; UGT2B11; ENSG00000213759; TAA
SEVLGRPTT

SEQ ID NO: 100086 - protein, 9 aa, Homo sapiens
  misc_feature: Table A; Target 100086; HLA-B*44:02; UGT2B11; ENSG00000213759; TAA
SEVLGRPTT

SEQ ID NO: 100087 - protein, 9 aa, Homo sapiens
  misc_feature: Table A; Target 100087; HLA-B*44:03; UGT2B11; ENSG00000213759; TAA
SEVLGRPTT

SEQ ID NO: 100088 - protein, 9 aa, Homo sapiens
  misc_feature: Table A; Target 100088; HLA-B*49:01; UGT2B11; ENSG00000213759; TAA
SEVLGRPTT

SEQ ID NO: 100089 - protein, 10 aa, Homo sapiens
  misc_feature: Table A; Target 100089; HLA-A*30:01; UGT2B11; ENSG00000213759; TAA
SEVLGRPTTL

SEQ ID NO: 100090 - protein, 10 aa, Homo sapiens
  misc_feature: Table A; Target 100090; HLA-B*37:01; UGT2B11; ENSG00000213759; TAA
SEVLGRPTTL

SEQ ID NO: 100091 - protein, 10 aa, Homo sapiens
  misc_feature: Table A; Target 100091; HLA-B*40:01; UGT2B11; ENSG00000213759; TAA
SEVLGRPTTL

SEQ ID NO: 100092 - protein, 10 aa, Homo sapiens
  misc_feature: Table A; Target 100092; HLA-B*40:02; UGT2B11; ENSG00000213759; TAA
SEVLGRPTTL

SEQ ID NO: 100093 - protein, 10 aa, Homo sapiens
  misc_feature: Table A; Target 100093; HLA-B*44:02; UGT2B11; ENSG00000213759; TAA
SEVLGRPTTL

SEQ ID NO: 100094 - protein, 10 aa, Homo sapiens
  misc_feature: Table A; Target 100094; HLA-B*44:03; UGT2B11; ENSG00000213759; TAA
SEVLGRPTTL

SEQ ID NO: 100095 - protein, 10 aa, Homo sapiens
  misc_feature: Table A; Target 100095; HLA-B*49:01; UGT2B11; ENSG00000213759; TAA
SEVLGRPTTL

SEQ ID NO: 100096 - protein, 11 aa, Homo sapiens
  misc_feature: Table A; Target 100096; HLA-B*44:02; UGT2B11; ENSG00000213759; TAA
SEVLGRPTTLF

SEQ ID NO: 100097 - protein, 11 aa, Homo sapiens
  misc_feature: Table A; Target 100097; HLA-B*44:03; UGT2B11; ENSG00000213759; TAA
SEVLGRPTTLF

SEQ ID NO: 100098 - protein, 9 aa, Homo sapiens
  misc_feature: Table A; Target 100098; HLA-A*24:02; UGT2B11; ENSG00000213759; TAA
SFQFPHPFL

SEQ ID NO: 100099 - protein, 8 aa, Homo sapiens
  misc_feature: Table A; Target 100099; HLA-C*05:01; UGT2B11; ENSG00000213759; TAA
SGENGVVV

SEQ ID NO: 100100 - protein, 9 aa, Homo sapiens
  misc_feature: Table A; Target 100100; HLA-B*15:03; UGT2B11; ENSG00000213759; TAA
SGENGVVVF

SEQ ID NO: 100101 - protein, 9 aa, Homo sapiens
  misc_feature: Table A; Target 100101; HLA-B*18:01; UGT2B11; ENSG00000213759; TAA
SGENGVVVF

SEQ ID NO: 100102 - protein, 9 aa, Homo sapiens
  misc_feature: Table A; Target 100102; HLA-B*27:05; UGT2B11; ENSG00000213759; TAA
SGENGVVVF

SEQ ID NO: 100103 - protein, 9 aa, Homo sapiens
  misc_feature: Table A; Target 100103; HLA-B*35:01; UGT2B11; ENSG00000213759; TAA
SGENGVVVF

SEQ ID NO: 100104 - protein, 9 aa, Homo sapiens
  misc_feature: Table A; Target 100104; HLA-B*35:03; UGT2B11; ENSG00000213759; TAA
SGENGVVVF

SEQ ID NO: 100105 - protein, 9 aa, Homo sapiens
  misc_feature: Table A; Target 100105; HLA-B*38:01; UGT2B11; ENSG00000213759; TAA
SGENGVVVF

SEQ ID NO: 100106 - protein, 9 aa, Homo sapiens
  misc_feature: Table A; Target 100106; HLA-B*39:01; UGT2B11; ENSG00000213759; TAA
SGENGVVVF

SEQ ID NO: 100107 - protein, 9 aa, Homo sapiens
  misc_feature: Table A; Target 100107; HLA-C*03:03; UGT2B11; ENSG00000213759; TAA
SGENGVVVF

SEQ ID NO: 100108 - protein, 9 aa, Homo sapiens
  misc_feature: Table A; Target 100108; HLA-C*03:04; UGT2B11; ENSG00000213759; TAA
SGENGVVVF

SEQ ID NO: 100109 - protein, 9 aa, Homo sapiens
  misc_feature: Table A; Target 100109; HLA-C*04:01; UGT2B11; ENSG00000213759; TAA
SGENGVVVF

SEQ ID NO: 100110 - protein, 9 aa, Homo sapiens
  misc_feature: Table A; Target 100110; HLA-C*05:01; UGT2B11; ENSG00000213759; TAA
SGENGVVVF

SEQ ID NO: 100111 - protein, 9 aa, Homo sapiens
  misc_feature: Table A; Target 100111; HLA-C*07:04; UGT2B11; ENSG00000213759; TAA
SGENGVVVF

SEQ ID NO: 100112 - protein, 9 aa, Homo sapiens
  misc_feature: Table A; Target 100112; HLA-C*07:06; UGT2B11; ENSG00000213759; TAA
SGENGVVVF

SEQ ID NO: 100113 - protein, 9 aa, Homo sapiens
  misc_feature: Table A; Target 100113; HLA-C*12:03; UGT2B11; ENSG00000213759; TAA
SGENGVVVF

SEQ ID NO: 100114 - protein, 9 aa, Homo sapiens
  misc_feature: Table A; Target 100114; HLA-C*16:02; UGT2B11; ENSG00000213759; TAA
SGENGVVVF

SEQ ID NO: 100115 - protein, 9 aa, Homo sapiens
  misc_feature: Table A; Target 100115; HLA-C*16:04; UGT2B11; ENSG00000213759; TAA
SGENGVVVF

SEQ ID NO: 100116 - protein, 9 aa, Homo sapiens
  misc_feature: Table A; Target 100116; HLA-A*23:01; UGT2B11; ENSG00000213759; TAA
SKLSDQMTF

SEQ ID NO: 100117 - protein, 9 aa, Homo sapiens
  misc_feature: Table A; Target 100117; HLA-B*15:03; UGT2B11; ENSG00000213759; TAA
SKLSDQMTF

SEQ ID NO: 100118 - protein, 9 aa, Homo sapiens
  misc_feature: Table A; Target 100118; HLA-B*38:01; UGT2B11; ENSG00000213759; TAA
SKLSDQMTF

SEQ ID NO: 100119 - protein, 8 aa, Homo sapiens
  misc_feature: Table A; Target 100119; HLA-C*04:01; UGT2B11; ENSG00000213759; TAA
SLDVIGFL

SEQ ID NO: 100120 - protein, 8 aa, Homo sapiens
  misc_feature: Table A; Target 100120; HLA-C*05:01; UGT2B11; ENSG00000213759; TAA
SLDVIGFL

SEQ ID NO: 100121 - protein, 9 aa, Homo sapiens
  misc_feature: Table A; Target 100121; HLA-A*01:01; UGT2B11; ENSG00000213759; TAA
SLDVIGFLL

SEQ ID NO: 100122 - protein, 9 aa, Homo sapiens
  misc_feature: Table A; Target 100122; HLA-A*02:01; UGT2B11; ENSG00000213759; TAA
SLDVIGFLL

SEQ ID NO: 100123 - protein, 9 aa, Homo sapiens
  misc_feature: Table A; Target 100123; HLA-A*02:04; UGT2B11; ENSG00000213759; TAA
SLDVIGFLL

SEQ ID NO: 100124 - protein, 9 aa, Homo sapiens
  misc_feature: Table A; Target 100124; HLA-A*02:07; UGT2B11; ENSG00000213759; TAA
SLDVIGFLL

SEQ ID NO: 100125 - protein, 9 aa, Homo sapiens
  misc_feature: Table A; Target 100125; HLA-B*38:01; UGT2B11; ENSG00000213759; TAA
SLDVIGFLL

SEQ ID NO: 100126 - protein, 10 aa, Homo sapiens
  misc_feature: Table A; Target 100126; HLA-A*02:01; UGT2B11; ENSG00000213759; TAA
SLDVIGFLLA

SEQ ID NO: 100127 - protein, 10 aa, Homo sapiens
  misc_feature: Table A; Target 100127; HLA-A*02:07; UGT2B11; ENSG00000213759; TAA
SLDVIGFLLA

SEQ ID NO: 100128 - protein, 9 aa, Homo sapiens
  misc_feature: Table A; Target 100128; HLA-A*02:01; UGT2B11; ENSG00000213759; TAA
SLGSVISNM

SEQ ID NO: 100129 - protein, 9 aa, Homo sapiens
  misc_feature: Table A; Target 100129; HLA-A*02:03; UGT2B11; ENSG00000213759; TAA
SLGSVISNM

SEQ ID NO: 100130 - protein, 9 aa, Homo sapiens
  misc_feature: Table A; Target 100130; HLA-A*02:04; UGT2B11; ENSG00000213759; TAA
SLGSVISNM

SEQ ID NO: 100131 - protein, 9 aa, Homo sapiens
  misc_feature: Table A; Target 100131; HLA-A*02:07; UGT2B11; ENSG00000213759; TAA
SLGSVISNM

SEQ ID NO: 100132 - protein, 9 aa, Homo sapiens
  misc_feature: Table A; Target 100132; HLA-A*03:01; UGT2B11; ENSG00000213759; TAA
SLGSVISNM

SEQ ID NO: 100133 - protein, 9 aa, Homo sapiens
  misc_feature: Table A; Target 100133; HLA-A*03:02; UGT2B11; ENSG00000213759; TAA
SLGSVISNM

SEQ ID NO: 100134 - protein, 9 aa, Homo sapiens
  misc_feature: Table A; Target 100134; HLA-A*26:01; UGT2B11; ENSG00000213759; TAA
SLGSVISNM

SEQ ID NO: 100135 - protein, 9 aa, Homo sapiens
  misc_feature: Table A; Target 100135; HLA-A*30:01; UGT2B11; ENSG00000213759; TAA
SLGSVISNM

SEQ ID NO: 100136 - protein, 9 aa, Homo sapiens
  misc_feature: Table A; Target 100136; HLA-A*31:01; UGT2B11; ENSG00000213759; TAA
SLGSVISNM

SEQ ID NO: 100137 - protein, 9 aa, Homo sapiens
  misc_feature: Table A; Target 100137; HLA-A*32:01; UGT2B11; ENSG00000213759; TAA
SLGSVISNM

SEQ ID NO: 100138 - protein, 9 aa, Homo sapiens
  misc_feature: Table A; Target 100138; HLA-A*68:02; UGT2B11; ENSG00000213759; TAA
SLGSVISNM

SEQ ID NO: 100139 - protein, 9 aa, Homo sapiens
  misc_feature: Table A; Target 100139; HLA-B*13:02; UGT2B11; ENSG00000213759; TAA
SLGSVISNM

SEQ ID NO: 100140 - protein, 9 aa, Homo sapiens
  misc_feature: Table A; Target 100140; HLA-B*15:01; UGT2B11; ENSG00000213759; TAA
SLGSVISNM

SEQ ID NO: 100141 - protein, 9 aa, Homo sapiens
  misc_feature: Table A; Target 100141; HLA-B*27:05; UGT2B11; ENSG00000213759; TAA
SLGSVISNM

SEQ ID NO: 100142 - protein, 9 aa, Homo sapiens
  misc_feature: Table A; Target 100142; HLA-B*37:01; UGT2B11; ENSG00000213759; TAA
SLGSVISNM

SEQ ID NO: 100143 - protein, 9 aa, Homo sapiens
  misc_feature: Table A; Target 100143; HLA-B*38:01; UGT2B11; ENSG00000213759; TAA
SLGSVISNM

SEQ ID NO: 100144 - protein, 9 aa, Homo sapiens
  misc_feature: Table A; Target 100144; HLA-B*39:01; UGT2B11; ENSG00000213759; TAA
SLGSVISNM

SEQ ID NO: 100145 - protein, 9 aa, Homo sapiens
  misc_feature: Table A; Target 100145; HLA-B*46:01; UGT2B11; ENSG00000213759; TAA
SLGSVISNM

SEQ ID NO: 100146 - protein, 9 aa, Homo sapiens
  misc_feature: Table A; Target 100146; HLA-B*55:01; UGT2B11; ENSG00000213759; TAA
SLGSVISNM

SEQ ID NO: 100147 - protein, 9 aa, Homo sapiens
  misc_feature: Table A; Target 100147; HLA-C*01:02; UGT2B11; ENSG00000213759; TAA
SLGSVISNM

SEQ ID NO: 100148 - protein, 9 aa, Homo sapiens
  misc_feature: Table A; Target 100148; HLA-C*02:02; UGT2B11; ENSG00000213759; TAA
SLGSVISNM

SEQ ID NO: 100149 - protein, 9 aa, Homo sapiens
  misc_feature: Table A; Target 100149; HLA-C*04:01; UGT2B11; ENSG00000213759; TAA
SLGSVISNM

SEQ ID NO: 100150 - protein, 9 aa, Homo sapiens
  misc_feature: Table A; Target 100150; HLA-C*06:02; UGT2B11; ENSG00000213759; TAA
SLGSVISNM

SEQ ID NO: 100151 - protein, 9 aa, Homo sapiens
  misc_feature: Table A; Target 100151; HLA-C*07:04; UGT2B11; ENSG00000213759; TAA
SLGSVISNM

SEQ ID NO: 100152 - protein, 9 aa, Homo sapiens
  misc_feature: Table A; Target 100152; HLA-C*12:03; UGT2B11; ENSG00000213759; TAA
SLGSVISNM

SEQ ID NO: 100153 - protein, 9 aa, Homo sapiens
  misc_feature: Table A; Target 100153; HLA-C*14:02; UGT2B11; ENSG00000213759; TAA
SLGSVISNM

SEQ ID NO: 100154 - protein, 9 aa, Homo sapiens
  misc_feature: Table A; Target 100154; HLA-C*16:01; UGT2B11; ENSG00000213759; TAA
SLGSVISNM

SEQ ID NO: 100155 - protein, 9 aa, Homo sapiens
  misc_feature: Table A; Target 100155; HLA-C*16:02; UGT2B11; ENSG00000213759; TAA
SLGSVISNM

SEQ ID NO: 100156 - protein, 11 aa, Homo sapiens
  misc_feature: Table A; Target 100156; HLA-A*02:01; UGT2B11; ENSG00000213759; TAA
SLGSVISNMTA

SEQ ID NO: 100157 - protein, 11 aa, Homo sapiens
  misc_feature: Table A; Target 100157; HLA-A*02:03; UGT2B11; ENSG00000213759; TAA
SLGSVISNMTA

SEQ ID NO: 100158 - protein, 10 aa, Homo sapiens
  misc_feature: Table A; Target 100158; HLA-A*02:03; UGT2B11; ENSG00000213759; TAA
SLRFTPGYTI

SEQ ID NO: 100159 - protein, 10 aa, Homo sapiens
  misc_feature: Table A; Target 100159; HLA-B*27:05; UGT2B11; ENSG00000213759; TAA
SRIQHDQPVK

SEQ ID NO: 100160 - protein, 10 aa, Homo sapiens
  misc_feature: Table A; Target 100160; HLA-C*07:04; UGT2B11; ENSG00000213759; TAA
SSGENGVVVF

SEQ ID NO: 100161 - protein, 9 aa, Homo sapiens
  misc_feature: Table A; Target 100161; HLA-A*02:04; UGT2B11; ENSG00000213759; TAA
SSTDLLNAL

SEQ ID NO: 100162 - protein, 9 aa, Homo sapiens
  misc_feature: Table A; Target 100162; HLA-A*25:01; UGT2B11; ENSG00000213759; TAA
SSTDLLNAL

SEQ ID NO: 100163 - protein, 9 aa, Homo sapiens
  misc_feature: Table A; Target 100163; HLA-A*32:01; UGT2B11; ENSG00000213759; TAA
SSTDLLNAL

SEQ ID NO: 100164 - protein, 9 aa, Homo sapiens
  misc_feature: Table A; Target 100164; HLA-A*68:02; UGT2B11; ENSG00000213759; TAA
SSTDLLNAL

SEQ ID NO: 100165 - protein, 9 aa, Homo sapiens
  misc_feature: Table A; Target 100165; HLA-B*18:01; UGT2B11; ENSG00000213759; TAA
SSTDLLNAL

SEQ ID NO: 100166 - protein, 9 aa, Homo sapiens
  misc_feature: Table A; Target 100166; HLA-B*27:05; UGT2B11; ENSG00000213759; TAA
SSTDLLNAL

SEQ ID NO: 100167 - protein, 9 aa, Homo sapiens
  misc_feature: Table A; Target 100167; HLA-B*35:03; UGT2B11; ENSG00000213759; TAA
SSTDLLNAL

SEQ ID NO: 100168 - protein, 9 aa, Homo sapiens
  misc_feature: Table A; Target 100168; HLA-B*39:01; UGT2B11; ENSG00000213759; TAA
SSTDLLNAL

SEQ ID NO: 100169 - protein, 9 aa, Homo sapiens
  misc_feature: Table A; Target 100169; HLA-B*40:01; UGT2B11; ENSG00000213759; TAA
SSTDLLNAL

SEQ ID NO: 100170 - protein, 9 aa, Homo sapiens
  misc_feature: Table A; Target 100170; HLA-B*40:02; UGT2B11; ENSG00000213759; TAA
SSTDLLNAL

SEQ ID NO: 100171 - protein, 9 aa, Homo sapiens
  misc_feature: Table A; Target 100171; HLA-B*46:01; UGT2B11; ENSG00000213759; TAA
SSTDLLNAL

SEQ ID NO: 100172 - protein, 9 aa, Homo sapiens
  misc_feature: Table A; Target 100172; HLA-B*58:01; UGT2B11; ENSG00000213759; TAA
SSTDLLNAL

SEQ ID NO: 100173 - protein, 9 aa, Homo sapiens
  misc_feature: Table A; Target 100173; HLA-C*01:02; UGT2B11; ENSG00000213759; TAA
SSTDLLNAL

SEQ ID NO: 100174 - protein, 9 aa, Homo sapiens
  misc_feature: Table A; Target 100174; HLA-C*02:02; UGT2B11; ENSG00000213759; TAA
SSTDLLNAL

SEQ ID NO: 100175 - protein, 9 aa, Homo sapiens
  misc_feature: Table A; Target 100175; HLA-C*03:03; UGT2B11; ENSG00000213759; TAA
SSTDLLNAL

SEQ ID NO: 100176 - protein, 9 aa, Homo sapiens
  misc_feature: Table A; Target 100176; HLA-C*03:04; UGT2B11; ENSG00000213759; TAA
SSTDLLNAL

SEQ ID NO: 100177 - protein, 9 aa, Homo sapiens
  misc_feature: Table A; Target 100177; HLA-C*06:02; UGT2B11; ENSG00000213759; TAA
SSTDLLNAL

SEQ ID NO: 100178 - protein, 9 aa, Homo sapiens
  misc_feature: Table A; Target 100178; HLA-C*07:04; UGT2B11; ENSG00000213759; TAA
SSTDLLNAL

SEQ ID NO: 100179 - protein, 9 aa, Homo sapiens
  misc_feature: Table A; Target 100179; HLA-C*07:06; UGT2B11; ENSG00000213759; TAA
SSTDLLNAL

SEQ ID NO: 100180 - protein, 9 aa, Homo sapiens
  misc_feature: Table A; Target 100180; HLA-C*12:03; UGT2B11; ENSG00000213759; TAA
SSTDLLNAL

SEQ ID NO: 100181 - protein, 9 aa, Homo sapiens
  misc_feature: Table A; Target 100181; HLA-C*14:02; UGT2B11; ENSG00000213759; TAA
SSTDLLNAL

SEQ ID NO: 100182 - protein, 9 aa, Homo sapiens
  misc_feature: Table A; Target 100182; HLA-C*16:01; UGT2B11; ENSG00000213759; TAA
SSTDLLNAL

SEQ ID NO: 100183 - protein, 9 aa, Homo sapiens
  misc_feature: Table A; Target 100183; HLA-C*16:02; UGT2B11; ENSG00000213759; TAA
SSTDLLNAL

SEQ ID NO: 100184 - protein, 10 aa, Homo sapiens
  misc_feature: Table A; Target 100184; HLA-A*01:01; UGT2B11; ENSG00000213759; TAA
SSTDLLNALK

SEQ ID NO: 100185 - protein, 10 aa, Homo sapiens
  misc_feature: Table A; Target 100185; HLA-A*03:02; UGT2B11; ENSG00000213759; TAA
SSTDLLNALK

SEQ ID NO: 100186 - protein, 10 aa, Homo sapiens
  misc_feature: Table A; Target 100186; HLA-A*11:01; UGT2B11; ENSG00000213759; TAA
SSTDLLNALK

SEQ ID NO: 100187 - protein, 10 aa, Homo sapiens
  misc_feature: Table A; Target 100187; HLA-A*68:01; UGT2B11; ENSG00000213759; TAA
SSTDLLNALK

SEQ ID NO: 100188 - protein, 10 aa, Homo sapiens
  misc_feature: Table A; Target 100188; HLA-A*68:02; UGT2B11; ENSG00000213759; TAA
SSTDLLNALK

SEQ ID NO: 100189 - protein, 10 aa, Homo sapiens
  misc_feature: Table A; Target 100189; HLA-B*27:02; UGT2B11; ENSG00000213759; TAA
SSTDLLNALK

SEQ ID NO: 100190 - protein, 10 aa, Homo sapiens
  misc_feature: Table A; Target 100190; HLA-B*27:05; UGT2B11; ENSG00000213759; TAA
SSTDLLNALK

SEQ ID NO: 100191 - protein, 10 aa, Homo sapiens
  misc_feature: Table A; Target 100191; HLA-C*06:02; UGT2B11; ENSG00000213759; TAA
SSTDLLNALK

SEQ ID NO: 100192 - protein, 10 aa, Homo sapiens
  misc_feature: Table A; Target 100192; HLA-C*07:06; UGT2B11; ENSG00000213759; TAA
SSTDLLNALK

SEQ ID NO: 100193 - protein, 8 aa, Homo sapiens
  misc_feature: Table A; Target 100193; HLA-C*04:01; UGT2B11; ENSG00000213759; TAA
STDLLNAL

SEQ ID NO: 100194 - protein, 8 aa, Homo sapiens
  misc_feature: Table A; Target 100194; HLA-C*05:01; UGT2B11; ENSG00000213759; TAA
STDLLNAL

SEQ ID NO: 100195 - protein, 9 aa, Homo sapiens
  misc_feature: Table A; Target 100195; HLA-A*01:01; UGT2B11; ENSG00000213759; TAA
STDLLNALK

SEQ ID NO: 100196 - protein, 9 aa, Homo sapiens
  misc_feature: Table A; Target 100196; HLA-A*03:01; UGT2B11; ENSG00000213759; TAA
STDLLNALK

SEQ ID NO: 100197 - protein, 9 aa, Homo sapiens
  misc_feature: Table A; Target 100197; HLA-A*03:02; UGT2B11; ENSG00000213759; TAA
STDLLNALK

SEQ ID NO: 100198 - protein, 9 aa, Homo sapiens
  misc_feature: Table A; Target 100198; HLA-A*11:01; UGT2B11; ENSG00000213759; TAA
STDLLNALK

SEQ ID NO: 100199 - protein, 9 aa, Homo sapiens
  misc_feature: Table A; Target 100199; HLA-A*68:01; UGT2B11; ENSG00000213759; TAA
STDLLNALK

SEQ ID NO: 100200 - protein, 9 aa, Homo sapiens
  misc_feature: Table A; Target 100200; HLA-B*27:02; UGT2B11; ENSG00000213759; TAA
STDLLNALK

SEQ ID NO: 100201 - protein, 9 aa, Homo sapiens
  misc_feature: Table A; Target 100201; HLA-C*07:06; UGT2B11; ENSG00000213759; TAA
STDLLNALK

SEQ ID NO: 100202 - protein, 11 aa, Homo sapiens
  misc_feature: Table A; Target 100202; HLA-A*02:07; UGT2B11; ENSG00000213759; TAA
STDLLNALKTV

SEQ ID NO: 100203 - protein, 8 aa, Homo sapiens
  misc_feature: Table A; Target 100203; HLA-B*57:01; UGT2B11; ENSG00000213759; TAA
STLKFEVY

SEQ ID NO: 100204 - protein, 8 aa, Homo sapiens
  misc_feature: Table A; Target 100204; HLA-B*56:01; UGT2B11; ENSG00000213759; TAA
SVISNMTA

SEQ ID NO: 100205 - protein, 9 aa, Homo sapiens
  misc_feature: Table A; Target 100205; HLA-A*25:01; UGT2B11; ENSG00000213759; TAA
SVISNMTAE

SEQ ID NO: 100206 - protein, 9 aa, Homo sapiens
  misc_feature: Table A; Target 100206; HLA-A*26:01; UGT2B11; ENSG00000213759; TAA
SVISNMTAE

SEQ ID NO: 100207 - protein, 9 aa, Homo sapiens
  misc_feature: Table A; Target 100207; HLA-B*46:01; UGT2B11; ENSG00000213759; TAA
SVISNMTAE

SEQ ID NO: 100208 - protein, 9 aa, Homo sapiens
  misc_feature: Table A; Target 100208; HLA-C*01:02; UGT2B11; ENSG00000213759; TAA
SVISNMTAE

SEQ ID NO: 100209 - protein, 10 aa, Homo sapiens
  misc_feature: Table A; Target 100209; HLA-A*03:02; UGT2B11; ENSG00000213759; TAA
SVISNMTAER

SEQ ID NO: 100210 - protein, 10 aa, Homo sapiens
  misc_feature: Table A; Target 100210; HLA-A*11:01; UGT2B11; ENSG00000213759; TAA
SVISNMTAER

SEQ ID NO: 100211 - protein, 10 aa, Homo sapiens
  misc_feature: Table A; Target 100211; HLA-A*25:01; UGT2B11; ENSG00000213759; TAA
SVISNMTAER

SEQ ID NO: 100212 - protein, 10 aa, Homo sapiens
  misc_feature: Table A; Target 100212; HLA-A*26:01; UGT2B11; ENSG00000213759; TAA
SVISNMTAER

SEQ ID NO: 100213 - protein, 10 aa, Homo sapiens
  misc_feature: Table A; Target 100213; HLA-A*31:01; UGT2B11; ENSG00000213759; TAA
SVISNMTAER

SEQ ID NO: 100214 - protein, 10 aa, Homo sapiens
  misc_feature: Table A; Target 100214; HLA-A*33:01; UGT2B11; ENSG00000213759; TAA
SVISNMTAER

SEQ ID NO: 100215 - protein, 10 aa, Homo sapiens
  misc_feature: Table A; Target 100215; HLA-A*33:03; UGT2B11; ENSG00000213759; TAA
SVISNMTAER

SEQ ID NO: 100216 - protein, 10 aa, Homo sapiens
  misc_feature: Table A; Target 100216; HLA-A*68:01; UGT2B11; ENSG00000213759; TAA
SVISNMTAER

SEQ ID NO: 100217 - protein, 10 aa, Homo sapiens
  misc_feature: Table A; Target 100217; HLA-A*68:02; UGT2B11; ENSG00000213759; TAA
SVISNMTAER

SEQ ID NO: 100218 - protein, 10 aa, Homo sapiens
  misc_feature: Table A; Target 100218; HLA-B*27:02; UGT2B11; ENSG00000213759; TAA
SVISNMTAER

SEQ ID NO: 100219 - protein, 10 aa, Homo sapiens
  misc_feature: Table A; Target 100219; HLA-C*07:06; UGT2B11; ENSG00000213759; TAA
SVISNMTAER

SEQ ID NO: 100220 - protein, 8 aa, Homo sapiens
  misc_feature: Table A; Target 100220; HLA-A*02:04; UGT2B11; ENSG00000213759; TAA
SVLLLIHL

SEQ ID NO: 100221 - protein, 9 aa, Homo sapiens
  misc_feature: Table A; Target 100221; HLA-A*23:01; UGT2B11; ENSG00000213759; TAA
SYIPIVMSK

SEQ ID NO: 100222 - protein, 9 aa, Homo sapiens
  misc_feature: Table A; Target 100222; HLA-A*24:02; UGT2B11; ENSG00000213759; TAA
SYIPIVMSK

SEQ ID NO: 100223 - protein, 9 aa, Homo sapiens
  misc_feature: Table A; Target 100223; HLA-A*29:02; UGT2B11; ENSG00000213759; TAA
SYIPIVMSK

SEQ ID NO: 100224 - protein, 9 aa, Homo sapiens
  misc_feature: Table A; Target 100224; HLA-A*31:01; UGT2B11; ENSG00000213759; TAA
SYIPIVMSK

SEQ ID NO: 100225 - protein, 9 aa, Homo sapiens
  misc_feature: Table A; Target 100225; HLA-A*33:03; UGT2B11; ENSG00000213759; TAA
SYIPIVMSK

SEQ ID NO: 100226 - protein, 10 aa, Homo sapiens
  misc_feature: Table A; Target 100226; HLA-A*23:01; UGT2B11; ENSG00000213759; TAA
SYIPIVMSKL

SEQ ID NO: 100227 - protein, 10 aa, Homo sapiens
  misc_feature: Table A; Target 100227; HLA-A*24:02; UGT2B11; ENSG00000213759; TAA
SYIPIVMSKL

SEQ ID NO: 100228 - protein, 8 aa, Homo sapiens
  misc_feature: Table A; Target 100228; HLA-B*51:01; UGT2B11; ENSG00000213759; TAA
TAERANVI

SEQ ID NO: 100229 - protein, 8 aa, Homo sapiens
  misc_feature: Table A; Target 100229; HLA-C*05:01; UGT2B11; ENSG00000213759; TAA
TAERANVI

SEQ ID NO: 100230 - protein, 8 aa, Homo sapiens
  misc_feature: Table A; Target 100230; HLA-C*07:04; UGT2B11; ENSG00000213759; TAA
TAERANVI

SEQ ID NO: 100231 - protein, 8 aa, Homo sapiens
  misc_feature: Table A; Target 100231; HLA-C*12:03; UGT2B11; ENSG00000213759; TAA
TAERANVI

SEQ ID NO: 100232 - protein, 8 aa, Homo sapiens
  misc_feature: Table A; Target 100232; HLA-C*16:02; UGT2B11; ENSG00000213759; TAA
TAERANVI

SEQ ID NO: 100233 - protein, 9 aa, Homo sapiens
  misc_feature: Table A; Target 100233; HLA-A*03:01; UGT2B11; ENSG00000213759; TAA
TALAKIPQK

SEQ ID NO: 100234 - protein, 9 aa, Homo sapiens
  misc_feature: Table A; Target 100234; HLA-A*03:02; UGT2B11; ENSG00000213759; TAA
TALAKIPQK

SEQ ID NO: 100235 - protein, 9 aa, Homo sapiens
  misc_feature: Table A; Target 100235; HLA-A*11:01; UGT2B11; ENSG00000213759; TAA
TALAKIPQK

SEQ ID NO: 100236 - protein, 9 aa, Homo sapiens
  misc_feature: Table A; Target 100236; HLA-A*31:01; UGT2B11; ENSG00000213759; TAA
TALAKIPQK

SEQ ID NO: 100237 - protein, 9 aa, Homo sapiens
  misc_feature: Table A; Target 100237; HLA-A*33:01; UGT2B11; ENSG00000213759; TAA
TALAKIPQK

SEQ ID NO: 100238 - protein, 9 aa, Homo sapiens
  misc_feature: Table A; Target 100238; HLA-A*33:03; UGT2B11; ENSG00000213759; TAA
TALAKIPQK

SEQ ID NO: 100239 - protein, 9 aa, Homo sapiens
  misc_feature: Table A; Target 100239; HLA-A*68:01; UGT2B11; ENSG00000213759; TAA
TALAKIPQK

SEQ ID NO: 100240 - protein, 9 aa, Homo sapiens
  misc_feature: Table A; Target 100240; HLA-C*07:06; UGT2B11; ENSG00000213759; TAA
TALAKIPQK

SEQ ID NO: 100241 - protein, 8 aa, Homo sapiens
  misc_feature: Table A; Target 100241; HLA-B*27:02; UGT2B11; ENSG00000213759; TAA
TDLLNALK

SEQ ID NO: 100242 - protein, 8 aa, Homo sapiens
  misc_feature: Table A; Target 100242; HLA-C*07:01; UGT2B11; ENSG00000213759; TAA
TDLLNALK

SEQ ID NO: 100243 - protein, 9 aa, Homo sapiens
  misc_feature: Table A; Target 100243; HLA-C*06:02; UGT2B11; ENSG00000213759; TAA
TDLLNALKT

SEQ ID NO: 100244 - protein, 9 aa, Homo sapiens
  misc_feature: Table A; Target 100244; HLA-C*07:01; UGT2B11; ENSG00000213759; TAA
TDLLNALKT

SEQ ID NO: 100245 - protein, 10 aa, Homo sapiens
  misc_feature: Table A; Target 100245; HLA-C*04:01; UGT2B11; ENSG00000213759; TAA
TDLLNALKTV

SEQ ID NO: 100246 - protein, 8 aa, Homo sapiens
  misc_feature: Table A; Target 100246; HLA-A*30:01; UGT2B11; ENSG00000213759; TAA
TEFENIIM

SEQ ID NO: 100247 - protein, 8 aa, Homo sapiens
  misc_feature: Table A; Target 100247; HLA-B*18:01; UGT2B11; ENSG00000213759; TAA
TEFENIIM

SEQ ID NO: 100248 - protein, 8 aa, Homo sapiens
  misc_feature: Table A; Target 100248; HLA-B*40:01; UGT2B11; ENSG00000213759; TAA
TEFENIIM

SEQ ID NO: 100249 - protein, 8 aa, Homo sapiens
  misc_feature: Table A; Target 100249; HLA-B*40:02; UGT2B11; ENSG00000213759; TAA
TEFENIIM

SEQ ID NO: 100250 - protein, 8 aa, Homo sapiens
  misc_feature: Table A; Target 100250; HLA-B*49:01; UGT2B11; ENSG00000213759; TAA
TEFENIIM

SEQ ID NO: 100251 - protein, 9 aa, Homo sapiens
  misc_feature: Table A; Target 100251; HLA-A*30:01; UGT2B11; ENSG00000213759; TAA
TEFENIIMQ

SEQ ID NO: 100252 - protein, 9 aa, Homo sapiens
  misc_feature: Table A; Target 100252; HLA-B*49:01; UGT2B11; ENSG00000213759; TAA
TEFENIIMQ

SEQ ID NO: 100253 - protein, 10 aa, Homo sapiens
  misc_feature: Table A; Target 100253; HLA-B*44:02; UGT2B11; ENSG00000213759; TAA
TEFENIIMQQ

SEQ ID NO: 100254 - protein, 11 aa, Homo sapiens
  misc_feature: Table A; Target 100254; HLA-A*30:01; UGT2B11; ENSG00000213759; TAA
TEFENIIMQQV

SEQ ID NO: 100255 - protein, 11 aa, Homo sapiens
  misc_feature: Table A; Target 100255; HLA-A*68:02; UGT2B11; ENSG00000213759; TAA
TEFENIIMQQV

SEQ ID NO: 100256 - protein, 11 aa, Homo sapiens
  misc_feature: Table A; Target 100256; HLA-B*18:01; UGT2B11; ENSG00000213759; TAA
TEFENIIMQQV

SEQ ID NO: 100257 - protein, 11 aa, Homo sapiens
  misc_feature: Table A; Target 100257; HLA-B*38:01; UGT2B11; ENSG00000213759; TAA
TEFENIIMQQV

SEQ ID NO: 100258 - protein, 11 aa, Homo sapiens
  misc_feature: Table A; Target 100258; HLA-B*40:02; UGT2B11; ENSG00000213759; TAA
TEFENIIMQQV

SEQ ID NO: 100259 - protein, 11 aa, Homo sapiens
  misc_feature: Table A; Target 100259; HLA-B*44:02; UGT2B11; ENSG00000213759; TAA
TEFENIIMQQV

SEQ ID NO: 100260 - protein, 11 aa, Homo sapiens
  misc_feature: Table A; Target 100260; HLA-B*44:03; UGT2B11; ENSG00000213759; TAA
TEFENIIMQQV

SEQ ID NO: 100261 - protein, 11 aa, Homo sapiens
  misc_feature: Table A; Target 100261; HLA-B*49:01; UGT2B11; ENSG00000213759; TAA
TEFENIIMQQV

SEQ ID NO: 100262 - protein, 9 aa, Homo sapiens
  misc_feature: Table A; Target 100262; HLA-B*08:01; UGT2B11; ENSG00000213759; TAA
TFMERVKNM

SEQ ID NO: 100263 - protein, 8 aa, Homo sapiens
  misc_feature: Table A; Target 100263; HLA-B*38:01; UGT2B11; ENSG00000213759; TAA
THGGANGI

SEQ ID NO: 100264 - protein, 8 aa, Homo sapiens
  misc_feature: Table A; Target 100264; HLA-B*39:01; UGT2B11; ENSG00000213759; TAA
THGGANGI

SEQ ID NO: 100265 - protein, 9 aa, Homo sapiens
  misc_feature: Table A; Target 100265; HLA-B*39:01; UGT2B11; ENSG00000213759; TAA
THGGANGIY

SEQ ID NO: 100266 - protein, 9 aa, Homo sapiens
  misc_feature: Table A; Target 100266; HLA-C*07:01; UGT2B11; ENSG00000213759; TAA
THGGANGIY

SEQ ID NO: 100267 - protein, 11 aa, Homo sapiens
  misc_feature: Table A; Target 100267; HLA-B*38:01; UGT2B11; ENSG00000213759; TAA
THGGANGIYEA

SEQ ID NO: 100268 - protein, 11 aa, Homo sapiens
  misc_feature: Table A; Target 100268; HLA-B*39:01; UGT2B11; ENSG00000213759; TAA
THGGANGIYEA

SEQ ID NO: 100269 - protein, 9 aa, Homo sapiens
  misc_feature: Table A; Target 100269; HLA-A*31:01; UGT2B11; ENSG00000213759; TAA
TILKELVQR

SEQ ID NO: 100270 - protein, 9 aa, Homo sapiens
  misc_feature: Table A; Target 100270; HLA-A*33:01; UGT2B11; ENSG00000213759; TAA
TILKELVQR

SEQ ID NO: 100271 - protein, 9 aa, Homo sapiens
  misc_feature: Table A; Target 100271; HLA-A*33:03; UGT2B11; ENSG00000213759; TAA
TILKELVQR

SEQ ID NO: 100272 - protein, 9 aa, Homo sapiens
  misc_feature: Table A; Target 100272; HLA-A*68:01; UGT2B11; ENSG00000213759; TAA
TILKELVQR

SEQ ID NO: 100273 - protein, 9 aa, Homo sapiens
  misc_feature: Table A; Target 100273; HLA-C*07:06; UGT2B11; ENSG00000213759; TAA
TILKELVQR

SEQ ID NO: 100274 - protein, 9 aa, Homo sapiens
  misc_feature: Table A; Target 100274; HLA-B*38:01; UGT2B11; ENSG00000213759; TAA
TKTEFENII

SEQ ID NO: 100275 - protein, 8 aa, Homo sapiens
  misc_feature: Table A; Target 100275; HLA-A*03:01; UGT2B11; ENSG00000213759; TAA
TLFETMGK

SEQ ID NO: 100276 - protein, 8 aa, Homo sapiens
  misc_feature: Table A; Target 100276; HLA-A*03:02; UGT2B11; ENSG00000213759; TAA
TLFETMGK

SEQ ID NO: 100277 - protein, 9 aa, Homo sapiens
  misc_feature: Table A; Target 100277; HLA-A*02:03; UGT2B11; ENSG00000213759; TAA
TLFETMGKA

SEQ ID NO: 100278 - protein, 9 aa, Homo sapiens
  misc_feature: Table A; Target 100278; HLA-B*55:01; UGT2B11; ENSG00000213759; TAA
TLFETMGKA

SEQ ID NO: 100279 - protein, 11 aa, Homo sapiens
  misc_feature: Table A; Target 100279; HLA-A*02:03; UGT2B11; ENSG00000213759; TAA
TLKFEVYPTSL

SEQ ID NO: 100280 - protein, 8 aa, Homo sapiens
  misc_feature: Table A; Target 100280; HLA-B*08:01; UGT2B11; ENSG00000213759; TAA
TLKWTSVL

SEQ ID NO: 100281 - protein, 9 aa, Homo sapiens
  misc_feature: Table A; Target 100281; HLA-A*02:03; UGT2B11; ENSG00000213759; TAA
TLKWTSVLL

SEQ ID NO: 100282 - protein, 9 aa, Homo sapiens
  misc_feature: Table A; Target 100282; HLA-A*02:04; UGT2B11; ENSG00000213759; TAA
TLKWTSVLL

SEQ ID NO: 100283 - protein, 11 aa, Homo sapiens
  misc_feature: Table A; Target 100283; HLA-C*04:01; UGT2B11; ENSG00000213759; TAA
TMSSTDLLNAL

SEQ ID NO: 100284 - protein, 8 aa, Homo sapiens
  misc_feature: Table A; Target 100284; HLA-A*33:03; UGT2B11; ENSG00000213759; TAA
TPGYTIER

SEQ ID NO: 100285 - protein, 8 aa, Homo sapiens
  misc_feature: Table A; Target 100285; HLA-A*68:01; UGT2B11; ENSG00000213759; TAA
TPGYTIER

SEQ ID NO: 100286 - protein, 8 aa, Homo sapiens
  misc_feature: Table A; Target 100286; HLA-B*56:01; UGT2B11; ENSG00000213759; TAA
TPGYTIER

SEQ ID NO: 100287 - protein, 8 aa, Homo sapiens
  misc_feature: Table A; Target 100287; HLA-C*07:06; UGT2B11; ENSG00000213759; TAA
TPGYTIER

SEQ ID NO: 100288 - protein, 9 aa, Homo sapiens
  misc_feature: Table A; Target 100288; HLA-C*06:02; UGT2B11; ENSG00000213759; TAA
TRAFITHGG

SEQ ID NO: 100289 - protein, 8 aa, Homo sapiens
  misc_feature: Table A; Target 100289; HLA-B*08:01; UGT2B11; ENSG00000213759; TAA
TSLTKTEF

SEQ ID NO: 100290 - protein, 8 aa, Homo sapiens
  misc_feature: Table A; Target 100290; HLA-B*58:01; UGT2B11; ENSG00000213759; TAA
TSLTKTEF

SEQ ID NO: 100291 - protein, 8 aa, Homo sapiens
  misc_feature: Table A; Target 100291; HLA-C*16:01; UGT2B11; ENSG00000213759; TAA
TSLTKTEF

SEQ ID NO: 100292 - protein, 9 aa, Homo sapiens
  misc_feature: Table A; Target 100292; HLA-A*68:02; UGT2B11; ENSG00000213759; TAA
TSVLLLIHL

SEQ ID NO: 100293 - protein, 9 aa, Homo sapiens
  misc_feature: Table A; Target 100293; HLA-C*06:02; UGT2B11; ENSG00000213759; TAA
TSVLLLIHL

SEQ ID NO: 100294 - protein, 9 aa, Homo sapiens
  misc_feature: Table A; Target 100294; HLA-A*03:01; UGT2B11; ENSG00000213759; TAA
TTLFETMGK

SEQ ID NO: 100295 - protein, 9 aa, Homo sapiens
  misc_feature: Table A; Target 100295; HLA-A*03:02; UGT2B11; ENSG00000213759; TAA
TTLFETMGK

SEQ ID NO: 100296 - protein, 9 aa, Homo sapiens
  misc_feature: Table A; Target 100296; HLA-A*11:01; UGT2B11; ENSG00000213759; TAA
TTLFETMGK

SEQ ID NO: 100297 - protein, 9 aa, Homo sapiens
  misc_feature: Table A; Target 100297; HLA-A*68:01; UGT2B11; ENSG00000213759; TAA
TTLFETMGK

SEQ ID NO: 100298 - protein, 9 aa, Homo sapiens
  misc_feature: Table A; Target 100298; HLA-B*27:02; UGT2B11; ENSG00000213759; TAA
TTLFETMGK

SEQ ID NO: 100299 - protein, 9 aa, Homo sapiens
  misc_feature: Table A; Target 100299; HLA-C*06:02; UGT2B11; ENSG00000213759; TAA
TTLFETMGK

SEQ ID NO: 100300 - protein, 9 aa, Homo sapiens
  misc_feature: Table A; Target 100300; HLA-C*07:01; UGT2B11; ENSG00000213759; TAA
TTLFETMGK

SEQ ID NO: 100301 - protein, 9 aa, Homo sapiens
  misc_feature: Table A; Target 100301; HLA-C*07:06; UGT2B11; ENSG00000213759; TAA
TTLFETMGK

SEQ ID NO: 100302 - protein, 8 aa, Homo sapiens
  misc_feature: Table A; Target 100302; HLA-A*11:01; UGT2B11; ENSG00000213759; TAA
TVIFIITK

SEQ ID NO: 100303 - protein, 8 aa, Homo sapiens
  misc_feature: Table A; Target 100303; HLA-B*27:02; UGT2B11; ENSG00000213759; TAA
TVIFIITK

SEQ ID NO: 100304 - protein, 9 aa, Homo sapiens
  misc_feature: Table A; Target 100304; HLA-A*02:03; UGT2B11; ENSG00000213759; TAA
TVIFIITKF

SEQ ID NO: 100305 - protein, 9 aa, Homo sapiens
  misc_feature: Table A; Target 100305; HLA-A*02:04; UGT2B11; ENSG00000213759; TAA
TVIFIITKF

SEQ ID NO: 100306 - protein, 9 aa, Homo sapiens
  misc_feature: Table A; Target 100306; HLA-A*02:07; UGT2B11; ENSG00000213759; TAA
TVIFIITKF

SEQ ID NO: 100307 - protein, 9 aa, Homo sapiens
  misc_feature: Table A; Target 100307; HLA-A*23:01; UGT2B11; ENSG00000213759; TAA
TVIFIITKF

SEQ ID NO: 100308 - protein, 9 aa, Homo sapiens
  misc_feature: Table A; Target 100308; HLA-A*24:02; UGT2B11; ENSG00000213759; TAA
TVIFIITKF

SEQ ID NO: 100309 - protein, 9 aa, Homo sapiens
  misc_feature: Table A; Target 100309; HLA-A*25:01; UGT2B11; ENSG00000213759; TAA
TVIFIITKF

SEQ ID NO: 100310 - protein, 9 aa, Homo sapiens
  misc_feature: Table A; Target 100310; HLA-A*26:01; UGT2B11; ENSG00000213759; TAA
TVIFIITKF

SEQ ID NO: 100311 - protein, 9 aa, Homo sapiens
  misc_feature: Table A; Target 100311; HLA-A*29:02; UGT2B11; ENSG00000213759; TAA
TVIFIITKF

SEQ ID NO: 100312 - protein, 9 aa, Homo sapiens
  misc_feature: Table A; Target 100312; HLA-A*68:01; UGT2B11; ENSG00000213759; TAA
TVIFIITKF

SEQ ID NO: 100313 - protein, 9 aa, Homo sapiens
  misc_feature: Table A; Target 100313; HLA-A*68:02; UGT2B11; ENSG00000213759; TAA
TVIFIITKF

SEQ ID NO: 100314 - protein, 9 aa, Homo sapiens
  misc_feature: Table A; Target 100314; HLA-B*15:01; UGT2B11; ENSG00000213759; TAA
TVIFIITKF

SEQ ID NO: 100315 - protein, 9 aa, Homo sapiens
  misc_feature: Table A; Target 100315; HLA-B*35:01; UGT2B11; ENSG00000213759; TAA
TVIFIITKF

SEQ ID NO: 100316 - protein, 9 aa, Homo sapiens
  misc_feature: Table A; Target 100316; HLA-B*44:02; UGT2B11; ENSG00000213759; TAA
TVIFIITKF

SEQ ID NO: 100317 - protein, 9 aa, Homo sapiens
  misc_feature: Table A; Target 100317; HLA-B*44:03; UGT2B11; ENSG00000213759; TAA
TVIFIITKF

SEQ ID NO: 100318 - protein, 9 aa, Homo sapiens
  misc_feature: Table A; Target 100318; HLA-B*57:01; UGT2B11; ENSG00000213759; TAA
TVIFIITKF

SEQ ID NO: 100319 - protein, 9 aa, Homo sapiens
  misc_feature: Table A; Target 100319; HLA-B*58:01; UGT2B11; ENSG00000213759; TAA
TVIFIITKF

SEQ ID NO: 100320 - protein, 9 aa, Homo sapiens
  misc_feature: Table A; Target 100320; HLA-C*02:02; UGT2B11; ENSG00000213759; TAA
TVIFIITKF

SEQ ID NO: 100321 - protein, 9 aa, Homo sapiens
  misc_feature: Table A; Target 100321; HLA-C*07:04; UGT2B11; ENSG00000213759; TAA
TVIFIITKF

SEQ ID NO: 100322 - protein, 9 aa, Homo sapiens
  misc_feature: Table A; Target 100322; HLA-C*12:03; UGT2B11; ENSG00000213759; TAA
TVIFIITKF

SEQ ID NO: 100323 - protein, 8 aa, Homo sapiens
  misc_feature: Table A; Target 100323; HLA-A*30:02; UGT2B11; ENSG00000213759; TAA
TVINDPLY

SEQ ID NO: 100324 - protein, 8 aa, Homo sapiens
  misc_feature: Table A; Target 100324; HLA-B*15:01; UGT2B11; ENSG00000213759; TAA
TVINDPLY

SEQ ID NO: 100325 - protein, 8 aa, Homo sapiens
  misc_feature: Table A; Target 100325; HLA-B*35:01; UGT2B11; ENSG00000213759; TAA
TVINDPLY

SEQ ID NO: 100326 - protein, 8 aa, Homo sapiens
  misc_feature: Table A; Target 100326; HLA-B*39:01; UGT2B11; ENSG00000213759; TAA
TVINDPLY

SEQ ID NO: 100327 - protein, 8 aa, Homo sapiens
  misc_feature: Table A; Target 100327; HLA-B*55:01; UGT2B11; ENSG00000213759; TAA
TVINDPLY

SEQ ID NO: 100328 - protein, 8 aa, Homo sapiens
  misc_feature: Table A; Target 100328; HLA-C*03:03; UGT2B11; ENSG00000213759; TAA
TVINDPLY

SEQ ID NO: 100329 - protein, 8 aa, Homo sapiens
  misc_feature: Table A; Target 100329; HLA-C*07:01; UGT2B11; ENSG00000213759; TAA
TVINDPLY

SEQ ID NO: 100330 - protein, 9 aa, Homo sapiens
  misc_feature: Table A; Target 100330; HLA-A*01:01; UGT2B11; ENSG00000213759; TAA
TVINDPLYK

SEQ ID NO: 100331 - protein, 9 aa, Homo sapiens
  misc_feature: Table A; Target 100331; HLA-A*03:01; UGT2B11; ENSG00000213759; TAA
TVINDPLYK

SEQ ID NO: 100332 - protein, 9 aa, Homo sapiens
  misc_feature: Table A; Target 100332; HLA-A*03:02; UGT2B11; ENSG00000213759; TAA
TVINDPLYK

SEQ ID NO: 100333 - protein, 9 aa, Homo sapiens
  misc_feature: Table A; Target 100333; HLA-A*11:01; UGT2B11; ENSG00000213759; TAA
TVINDPLYK

SEQ ID NO: 100334 - protein, 9 aa, Homo sapiens
  misc_feature: Table A; Target 100334; HLA-A*26:01; UGT2B11; ENSG00000213759; TAA
TVINDPLYK

SEQ ID NO: 100335 - protein, 9 aa, Homo sapiens
  misc_feature: Table A; Target 100335; HLA-A*29:02; UGT2B11; ENSG00000213759; TAA
TVINDPLYK

SEQ ID NO: 100336 - protein, 9 aa, Homo sapiens
  misc_feature: Table A; Target 100336; HLA-A*31:01; UGT2B11; ENSG00000213759; TAA
TVINDPLYK

SEQ ID NO: 100337 - protein, 9 aa, Homo sapiens
  misc_feature: Table A; Target 100337; HLA-A*33:01; UGT2B11; ENSG00000213759; TAA
TVINDPLYK

SEQ ID NO: 100338 - protein, 9 aa, Homo sapiens
  misc_feature: Table A; Target 100338; HLA-A*33:03; UGT2B11; ENSG00000213759; TAA
TVINDPLYK

SEQ ID NO: 100339 - protein, 9 aa, Homo sapiens
  misc_feature: Table A; Target 100339; HLA-A*68:01; UGT2B11; ENSG00000213759; TAA
TVINDPLYK

SEQ ID NO: 100340 - protein, 9 aa, Homo sapiens
  misc_feature: Table A; Target 100340; HLA-A*68:02; UGT2B11; ENSG00000213759; TAA
TVINDPLYK

SEQ ID NO: 100341 - protein, 9 aa, Homo sapiens
  misc_feature: Table A; Target 100341; HLA-B*13:02; UGT2B11; ENSG00000213759; TAA
TVINDPLYK

SEQ ID NO: 100342 - protein, 9 aa, Homo sapiens
  misc_feature: Table A; Target 100342; HLA-B*27:02; UGT2B11; ENSG00000213759; TAA
TVINDPLYK

SEQ ID NO: 100343 - protein, 9 aa, Homo sapiens
  misc_feature: Table A; Target 100343; HLA-B*27:05; UGT2B11; ENSG00000213759; TAA
TVINDPLYK

SEQ ID NO: 100344 - protein, 9 aa, Homo sapiens
  misc_feature: Table A; Target 100344; HLA-B*57:01; UGT2B11; ENSG00000213759; TAA
TVINDPLYK

SEQ ID NO: 100345 - protein, 9 aa, Homo sapiens
  misc_feature: Table A; Target 100345; HLA-B*58:01; UGT2B11; ENSG00000213759; TAA
TVINDPLYK

SEQ ID NO: 100346 - protein, 9 aa, Homo sapiens
  misc_feature: Table A; Target 100346; HLA-C*02:02; UGT2B11; ENSG00000213759; TAA
TVINDPLYK

SEQ ID NO: 100347 - protein, 9 aa, Homo sapiens
  misc_feature: Table A; Target 100347; HLA-C*04:01; UGT2B11; ENSG00000213759; TAA
TVINDPLYK

SEQ ID NO: 100348 - protein, 9 aa, Homo sapiens
  misc_feature: Table A; Target 100348; HLA-C*06:02; UGT2B11; ENSG00000213759; TAA
TVINDPLYK

SEQ ID NO: 100349 - protein, 9 aa, Homo sapiens
  misc_feature: Table A; Target 100349; HLA-C*07:06; UGT2B11; ENSG00000213759; TAA
TVINDPLYK

SEQ ID NO: 100350 - protein, 9 aa, Homo sapiens
  misc_feature: Table A; Target 100350; HLA-A*23:01; UGT2B11; ENSG00000213759; TAA
TVLASSASI

SEQ ID NO: 100351 - protein, 9 aa, Homo sapiens
  misc_feature: Table A; Target 100351; HLA-A*25:01; UGT2B11; ENSG00000213759; TAA
TVLASSASI

SEQ ID NO: 100352 - protein, 9 aa, Homo sapiens
  misc_feature: Table A; Target 100352; HLA-B*13:02; UGT2B11; ENSG00000213759; TAA
TVLASSASI

SEQ ID NO: 100353 - protein, 9 aa, Homo sapiens
  misc_feature: Table A; Target 100353; HLA-B*51:01; UGT2B11; ENSG00000213759; TAA
TVLASSASI

SEQ ID NO: 100354 - protein, 9 aa, Homo sapiens
  misc_feature: Table A; Target 100354; HLA-C*01:02; UGT2B11; ENSG00000213759; TAA
TVLASSASI

SEQ ID NO: 100355 - protein, 9 aa, Homo sapiens
  misc_feature: Table A; Target 100355; HLA-C*14:02; UGT2B11; ENSG00000213759; TAA
TVLASSASI

SEQ ID NO: 100356 - protein, 11 aa, Homo sapiens
  misc_feature: Table A; Target 100356; HLA-A*23:01; UGT2B11; ENSG00000213759; TAA
TVLASSASILF

SEQ ID NO: 100357 - protein, 8 aa, Homo sapiens
  misc_feature: Table A; Target 100357; HLA-B*57:01; UGT2B11; ENSG00000213759; TAA
VAAHDLTW

SEQ ID NO: 100358 - protein, 8 aa, Homo sapiens
  misc_feature: Table A; Target 100358; HLA-B*58:01; UGT2B11; ENSG00000213759; TAA
VAAHDLTW

SEQ ID NO: 100359 - protein, 9 aa, Homo sapiens
  misc_feature: Table A; Target 100359; HLA-B*57:01; UGT2B11; ENSG00000213759; TAA
VAAHDLTWF

SEQ ID NO: 100360 - protein, 8 aa, Homo sapiens
  misc_feature: Table A; Target 100360; HLA-A*23:01; UGT2B11; ENSG00000213759; TAA
VATVIFII

SEQ ID NO: 100361 - protein, 8 aa, Homo sapiens
  misc_feature: Table A; Target 100361; HLA-B*13:02; UGT2B11; ENSG00000213759; TAA
VATVIFII

SEQ ID NO: 100362 - protein, 8 aa, Homo sapiens
  misc_feature: Table A; Target 100362; HLA-B*51:01; UGT2B11; ENSG00000213759; TAA
VATVIFII

SEQ ID NO: 100363 - protein, 8 aa, Homo sapiens
  misc_feature: Table A; Target 100363; HLA-C*12:03; UGT2B11; ENSG00000213759; TAA
VATVIFII

SEQ ID NO: 100364 - protein, 9 aa, Homo sapiens
  misc_feature: Table A; Target 100364; HLA-C*12:03; UGT2B11; ENSG00000213759; TAA
VATVIFIIT

SEQ ID NO: 100365 - protein, 10 aa, Homo sapiens
  misc_feature: Table A; Target 100365; HLA-A*03:01; UGT2B11; ENSG00000213759; TAA
VDFVGGFHCK

SEQ ID NO: 100366 - protein, 10 aa, Homo sapiens
  misc_feature: Table A; Target 100366; HLA-A*11:01; UGT2B11; ENSG00000213759; TAA
VDFVGGFHCK

SEQ ID NO: 100367 - protein, 8 aa, Homo sapiens
  misc_feature: Table A; Target 100367; HLA-C*01:02; UGT2B11; ENSG00000213759; TAA
VFPCGELL

SEQ ID NO: 100368 - protein, 8 aa, Homo sapiens
  misc_feature: Table A; Target 100368; HLA-C*14:02; UGT2B11; ENSG00000213759; TAA
VFSLGSVI

SEQ ID NO: 100369 - protein, 8 aa, Homo sapiens
  misc_feature: Table A; Target 100369; HLA-A*03:01; UGT2B11; ENSG00000213759; TAA
VIATALAK

SEQ ID NO: 100370 - protein, 8 aa, Homo sapiens
  misc_feature: Table A; Target 100370; HLA-A*03:02; UGT2B11; ENSG00000213759; TAA
VIATALAK

SEQ ID NO: 100371 - protein, 9 aa, Homo sapiens
  misc_feature: Table A; Target 100371; HLA-A*02:03; UGT2B11; ENSG00000213759; TAA
VIATALAKI

SEQ ID NO: 100372 - protein, 9 aa, Homo sapiens
  misc_feature: Table A; Target 100372; HLA-A*23:01; UGT2B11; ENSG00000213759; TAA
VIATALAKI

SEQ ID NO: 100373 - protein, 9 aa, Homo sapiens
  misc_feature: Table A; Target 100373; HLA-A*24:02; UGT2B11; ENSG00000213759; TAA
VIATALAKI

SEQ ID NO: 100374 - protein, 9 aa, Homo sapiens
  misc_feature: Table A; Target 100374; HLA-B*13:02; UGT2B11; ENSG00000213759; TAA
VIATALAKI

SEQ ID NO: 100375 - protein, 9 aa, Homo sapiens
  misc_feature: Table A; Target 100375; HLA-B*46:01; UGT2B11; ENSG00000213759; TAA
VIATALAKI

SEQ ID NO: 100376 - protein, 9 aa, Homo sapiens
  misc_feature: Table A; Target 100376; HLA-C*06:02; UGT2B11; ENSG00000213759; TAA
VIATALAKI

SEQ ID NO: 100377 - protein, 8 aa, Homo sapiens
  misc_feature: Table A; Target 100377; HLA-B*18:01; UGT2B11; ENSG00000213759; TAA
VIFIITKF

SEQ ID NO: 100378 - protein, 8 aa, Homo sapiens
  misc_feature: Table A; Target 100378; HLA-B*57:01; UGT2B11; ENSG00000213759; TAA
VIFIITKF

SEQ ID NO: 100379 - protein, 8 aa, Homo sapiens
  misc_feature: Table A; Target 100379; HLA-A*01:01; UGT2B11; ENSG00000213759; TAA
VINDPLYK

SEQ ID NO: 100380 - protein, 8 aa, Homo sapiens
  misc_feature: Table A; Target 100380; HLA-A*03:01; UGT2B11; ENSG00000213759; TAA
VINDPLYK

SEQ ID NO: 100381 - protein, 8 aa, Homo sapiens
  misc_feature: Table A; Target 100381; HLA-A*03:02; UGT2B11; ENSG00000213759; TAA
VINDPLYK

SEQ ID NO: 100382 - protein, 8 aa, Homo sapiens
  misc_feature: Table A; Target 100382; HLA-A*11:01; UGT2B11; ENSG00000213759; TAA
VINDPLYK

SEQ ID NO: 100383 - protein, 8 aa, Homo sapiens
  misc_feature: Table A; Target 100383; HLA-C*06:02; UGT2B11; ENSG00000213759; TAA
VINDPLYK

SEQ ID NO: 100384 - protein, 9 aa, Homo sapiens
  misc_feature: Table A; Target 100384; HLA-A*03:02; UGT2B11; ENSG00000213759; TAA
VISNMTAER

SEQ ID NO: 100385 - protein, 9 aa, Homo sapiens
  misc_feature: Table A; Target 100385; HLA-A*11:01; UGT2B11; ENSG00000213759; TAA
VISNMTAER

SEQ ID NO: 100386 - protein, 9 aa, Homo sapiens
  misc_feature: Table A; Target 100386; HLA-A*31:01; UGT2B11; ENSG00000213759; TAA
VISNMTAER

SEQ ID NO: 100387 - protein, 9 aa, Homo sapiens
  misc_feature: Table A; Target 100387; HLA-A*33:01; UGT2B11; ENSG00000213759; TAA
VISNMTAER

SEQ ID NO: 100388 - protein, 9 aa, Homo sapiens
  misc_feature: Table A; Target 100388; HLA-A*33:03; UGT2B11; ENSG00000213759; TAA
VISNMTAER

SEQ ID NO: 100389 - protein, 9 aa, Homo sapiens
  misc_feature: Table A; Target 100389; HLA-A*68:01; UGT2B11; ENSG00000213759; TAA
VISNMTAER

SEQ ID NO: 100390 - protein, 9 aa, Homo sapiens
  misc_feature: Table A; Target 100390; HLA-B*27:05; UGT2B11; ENSG00000213759; TAA
VISNMTAER

SEQ ID NO: 100391 - protein, 9 aa, Homo sapiens
  misc_feature: Table A; Target 100391; HLA-C*07:06; UGT2B11; ENSG00000213759; TAA
VISNMTAER

SEQ ID NO: 100392 - protein, 9 aa, Homo sapiens
  misc_feature: Table A; Target 100392; HLA-B*15:03; UGT2B11; ENSG00000213759; TAA
VKNMIYVLY

SEQ ID NO: 100393 - protein, 9 aa, Homo sapiens
  misc_feature: Table A; Target 100393; HLA-B*15:03; UGT2B11; ENSG00000213759; TAA
VKPLDRAVF

SEQ ID NO: 100394 - protein, 9 aa, Homo sapiens
  misc_feature: Table A; Target 100394; HLA-A*02:03; UGT2B11; ENSG00000213759; TAA
VLASSASIL

SEQ ID NO: 100395 - protein, 9 aa, Homo sapiens
  misc_feature: Table A; Target 100395; HLA-C*01:02; UGT2B11; ENSG00000213759; TAA
VLASSASIL

SEQ ID NO: 100396 - protein, 9 aa, Homo sapiens
  misc_feature: Table A; Target 100396; HLA-C*03:03; UGT2B11; ENSG00000213759; TAA
VLASSASIL

SEQ ID NO: 100397 - protein, 9 aa, Homo sapiens
  misc_feature: Table A; Target 100397; HLA-C*03:04; UGT2B11; ENSG00000213759; TAA
VLASSASIL

SEQ ID NO: 100398 - protein, 9 aa, Homo sapiens
  misc_feature: Table A; Target 100398; HLA-C*07:04; UGT2B11; ENSG00000213759; TAA
VLASSASIL

SEQ ID NO: 100399 - protein, 9 aa, Homo sapiens
  misc_feature: Table A; Target 100399; HLA-C*14:02; UGT2B11; ENSG00000213759; TAA
VLASSASIL

SEQ ID NO: 100400 - protein, 10 aa, Homo sapiens
  misc_feature: Table A; Target 100400; HLA-A*23:01; UGT2B11; ENSG00000213759; TAA
VLASSASILF

SEQ ID NO: 100401 - protein, 8 aa, Homo sapiens
  misc_feature: Table A; Target 100401; HLA-A*02:01; UGT2B11; ENSG00000213759; TAA
VLGRPTTL

SEQ ID NO: 100402 - protein, 8 aa, Homo sapiens
  misc_feature: Table A; Target 100402; HLA-A*02:03; UGT2B11; ENSG00000213759; TAA
VLGRPTTL

SEQ ID NO: 100403 - protein, 8 aa, Homo sapiens
  misc_feature: Table A; Target 100403; HLA-A*02:04; UGT2B11; ENSG00000213759; TAA
VLGRPTTL

SEQ ID NO: 100404 - protein, 8 aa, Homo sapiens
  misc_feature: Table A; Target 100404; HLA-B*08:01; UGT2B11; ENSG00000213759; TAA
VLGRPTTL

SEQ ID NO: 100405 - protein, 8 aa, Homo sapiens
  misc_feature: Table A; Target 100405; HLA-C*12:03; UGT2B11; ENSG00000213759; TAA
VLGRPTTL

SEQ ID NO: 100406 - protein, 9 aa, Homo sapiens
  misc_feature: Table A; Target 100406; HLA-A*03:01; UGT2B11; ENSG00000213759; TAA
VLGRPTTLF

SEQ ID NO: 100407 - protein, 9 aa, Homo sapiens
  misc_feature: Table A; Target 100407; HLA-A*23:01; UGT2B11; ENSG00000213759; TAA
VLGRPTTLF

SEQ ID NO: 100408 - protein, 9 aa, Homo sapiens
  misc_feature: Table A; Target 100408; HLA-A*24:02; UGT2B11; ENSG00000213759; TAA
VLGRPTTLF

SEQ ID NO: 100409 - protein, 9 aa, Homo sapiens
  misc_feature: Table A; Target 100409; HLA-A*29:02; UGT2B11; ENSG00000213759; TAA
VLGRPTTLF

SEQ ID NO: 100410 - protein, 9 aa, Homo sapiens
  misc_feature: Table A; Target 100410; HLA-A*32:01; UGT2B11; ENSG00000213759; TAA
VLGRPTTLF

SEQ ID NO: 100411 - protein, 9 aa, Homo sapiens
  misc_feature: Table A; Target 100411; HLA-B*15:01; UGT2B11; ENSG00000213759; TAA
VLGRPTTLF

SEQ ID NO: 100412 - protein, 9 aa, Homo sapiens
  misc_feature: Table A; Target 100412; HLA-B*46:01; UGT2B11; ENSG00000213759; TAA
VLGRPTTLF

SEQ ID NO: 100413 - protein, 9 aa, Homo sapiens
  misc_feature: Table A; Target 100413; HLA-C*07:04; UGT2B11; ENSG00000213759; TAA
VLGRPTTLF

SEQ ID NO: 100414 - protein, 8 aa, Homo sapiens
  misc_feature: Table A; Target 100414; HLA-B*15:01; UGT2B11; ENSG00000213759; TAA
VLVWAAEY

SEQ ID NO: 100415 - protein, 8 aa, Homo sapiens
  misc_feature: Table A; Target 100415; HLA-B*15:03; UGT2B11; ENSG00000213759; TAA
VLVWAAEY

SEQ ID NO: 100416 - protein, 8 aa, Homo sapiens
  misc_feature: Table A; Target 100416; HLA-B*46:01; UGT2B11; ENSG00000213759; TAA
VLVWAAEY

SEQ ID NO: 100417 - protein, 9 aa, Homo sapiens
  misc_feature: Table A; Target 100417; HLA-A*31:01; UGT2B11; ENSG00000213759; TAA
VMKKLQESR

SEQ ID NO: 100418 - protein, 9 aa, Homo sapiens
  misc_feature: Table A; Target 100418; HLA-A*33:01; UGT2B11; ENSG00000213759; TAA
VMKKLQESR

SEQ ID NO: 100419 - protein, 9 aa, Homo sapiens
  misc_feature: Table A; Target 100419; HLA-A*33:03; UGT2B11; ENSG00000213759; TAA
VMKKLQESR

SEQ ID NO: 100420 - protein, 11 aa, Homo sapiens
  misc_feature: Table A; Target 100420; HLA-A*24:02; UGT2B11; ENSG00000213759; TAA
VMSKLSDQMTF

SEQ ID NO: 100421 - protein, 11 aa, Homo sapiens
  misc_feature: Table A; Target 100421; HLA-A*32:01; UGT2B11; ENSG00000213759; TAA
VMSKLSDQMTF

SEQ ID NO: 100422 - protein, 9 aa, Homo sapiens
  misc_feature: Table A; Target 100422; HLA-A*02:03; UGT2B11; ENSG00000213759; TAA
VQRGHEVTV

SEQ ID NO: 100423 - protein, 9 aa, Homo sapiens
  misc_feature: Table A; Target 100423; HLA-A*30:01; UGT2B11; ENSG00000213759; TAA
VQRGHEVTV

SEQ ID NO: 100424 - protein, 9 aa, Homo sapiens
  misc_feature: Table A; Target 100424; HLA-A*32:01; UGT2B11; ENSG00000213759; TAA
VQRGHEVTV

SEQ ID NO: 100425 - protein, 9 aa, Homo sapiens
  misc_feature: Table A; Target 100425; HLA-B*08:01; UGT2B11; ENSG00000213759; TAA
VQRGHEVTV

SEQ ID NO: 100426 - protein, 9 aa, Homo sapiens
  misc_feature: Table A; Target 100426; HLA-B*13:02; UGT2B11; ENSG00000213759; TAA
VQRGHEVTV

SEQ ID NO: 100427 - protein, 9 aa, Homo sapiens
  misc_feature: Table A; Target 100427; HLA-B*15:01; UGT2B11; ENSG00000213759; TAA
VQRGHEVTV

SEQ ID NO: 100428 - protein, 9 aa, Homo sapiens
  misc_feature: Table A; Target 100428; HLA-B*15:03; UGT2B11; ENSG00000213759; TAA
VQRGHEVTV

SEQ ID NO: 100429 - protein, 9 aa, Homo sapiens
  misc_feature: Table A; Target 100429; HLA-B*37:01; UGT2B11; ENSG00000213759; TAA
VQRGHEVTV

SEQ ID NO: 100430 - protein, 9 aa, Homo sapiens
  misc_feature: Table A; Target 100430; HLA-B*40:02; UGT2B11; ENSG00000213759; TAA
VQRGHEVTV

SEQ ID NO: 100431 - protein, 9 aa, Homo sapiens
  misc_feature: Table A; Target 100431; HLA-B*46:01; UGT2B11; ENSG00000213759; TAA
VQRGHEVTV

SEQ ID NO: 100432 - protein, 9 aa, Homo sapiens
  misc_feature: Table A; Target 100432; HLA-B*51:01; UGT2B11; ENSG00000213759; TAA
VQRGHEVTV

SEQ ID NO: 100433 - protein, 9 aa, Homo sapiens
  misc_feature: Table A; Target 100433; HLA-B*55:01; UGT2B11; ENSG00000213759; TAA
VQRGHEVTV

SEQ ID NO: 100434 - protein, 9 aa, Homo sapiens
  misc_feature: Table A; Target 100434; HLA-C*02:02; UGT2B11; ENSG00000213759; TAA
VQRGHEVTV

SEQ ID NO: 100435 - protein, 9 aa, Homo sapiens
  misc_feature: Table A; Target 100435; HLA-C*06:02; UGT2B11; ENSG00000213759; TAA
VQRGHEVTV

SEQ ID NO: 100436 - protein, 9 aa, Homo sapiens
  misc_feature: Table A; Target 100436; HLA-C*07:04; UGT2B11; ENSG00000213759; TAA
VQRGHEVTV

SEQ ID NO: 100437 - protein, 9 aa, Homo sapiens
  misc_feature: Table A; Target 100437; HLA-C*12:03; UGT2B11; ENSG00000213759; TAA
VQRGHEVTV

SEQ ID NO: 100438 - protein, 9 aa, Homo sapiens
  misc_feature: Table A; Target 100438; HLA-C*16:02; UGT2B11; ENSG00000213759; TAA
VQRGHEVTV

SEQ ID NO: 100439 - protein, 10 aa, Homo sapiens
  misc_feature: Table A; Target 100439; HLA-B*15:01; UGT2B11; ENSG00000213759; TAA
VQRGHEVTVL

SEQ ID NO: 100440 - protein, 10 aa, Homo sapiens
  misc_feature: Table A; Target 100440; HLA-B*40:02; UGT2B11; ENSG00000213759; TAA
VQRGHEVTVL

SEQ ID NO: 100441 - protein, 11 aa, Homo sapiens
  misc_feature: Table A; Target 100441; HLA-A*31:01; UGT2B11; ENSG00000213759; TAA
VQRGHEVTVLA

SEQ ID NO: 100442 - protein, 9 aa, Homo sapiens
  misc_feature: Table A; Target 100442; HLA-A*02:03; UGT2B11; ENSG00000213759; TAA
VQSSGENGV

SEQ ID NO: 100443 - protein, 9 aa, Homo sapiens
  misc_feature: Table A; Target 100443; HLA-B*13:02; UGT2B11; ENSG00000213759; TAA
VQSSGENGV

SEQ ID NO: 100444 - protein, 9 aa, Homo sapiens
  misc_feature: Table A; Target 100444; HLA-B*39:01; UGT2B11; ENSG00000213759; TAA
VQSSGENGV

SEQ ID NO: 100445 - protein, 10 aa, Homo sapiens
  misc_feature: Table A; Target 100445; HLA-B*27:05; UGT2B11; ENSG00000213759; TAA
VQSSGENGVV

SEQ ID NO: 100446 - protein, 10 aa, Homo sapiens
  misc_feature: Table A; Target 100446; HLA-B*39:01; UGT2B11; ENSG00000213759; TAA
VQSSGENGVV

SEQ ID NO: 100447 - protein, 11 aa, Homo sapiens
  misc_feature: Table A; Target 100447; HLA-B*39:01; UGT2B11; ENSG00000213759; TAA
VQSSGENGVVV

SEQ ID NO: 100448 - protein, 9 aa, Homo sapiens
  misc_feature: Table A; Target 100448; HLA-A*03:01; UGT2B11; ENSG00000213759; TAA
VSNKKVMKK

SEQ ID NO: 100449 - protein, 9 aa, Homo sapiens
  misc_feature: Table A; Target 100449; HLA-A*03:02; UGT2B11; ENSG00000213759; TAA
VSNKKVMKK

SEQ ID NO: 100450 - protein, 9 aa, Homo sapiens
  misc_feature: Table A; Target 100450; HLA-A*11:01; UGT2B11; ENSG00000213759; TAA
VSNKKVMKK

SEQ ID NO: 100451 - protein, 9 aa, Homo sapiens
  misc_feature: Table A; Target 100451; HLA-A*02:03; UGT2B11; ENSG00000213759; TAA
VVFSLGSVI

SEQ ID NO: 100452 - protein, 9 aa, Homo sapiens
  misc_feature: Table A; Target 100452; HLA-A*23:01; UGT2B11; ENSG00000213759; TAA
VVFSLGSVI

SEQ ID NO: 100453 - protein, 9 aa, Homo sapiens
  misc_feature: Table A; Target 100453; HLA-B*13:02; UGT2B11; ENSG00000213759; TAA
VVFSLGSVI

SEQ ID NO: 100454 - protein, 9 aa, Homo sapiens
  misc_feature: Table A; Target 100454; HLA-B*15:03; UGT2B11; ENSG00000213759; TAA
VVFSLGSVI

SEQ ID NO: 100455 - protein, 9 aa, Homo sapiens
  misc_feature: Table A; Target 100455; HLA-B*46:01; UGT2B11; ENSG00000213759; TAA
VVFSLGSVI

SEQ ID NO: 100456 - protein, 9 aa, Homo sapiens
  misc_feature: Table A; Target 100456; HLA-B*51:01; UGT2B11; ENSG00000213759; TAA
VVFSLGSVI

SEQ ID NO: 100457 - protein, 9 aa, Homo sapiens
  misc_feature: Table A; Target 100457; HLA-C*02:02; UGT2B11; ENSG00000213759; TAA
VVFSLGSVI

SEQ ID NO: 100458 - protein, 9 aa, Homo sapiens
  misc_feature: Table A; Target 100458; HLA-C*12:03; UGT2B11; ENSG00000213759; TAA
VVFSLGSVI

SEQ ID NO: 100459 - protein, 8 aa, Homo sapiens
  misc_feature: Table A; Target 100459; HLA-A*32:01; UGT2B11; ENSG00000213759; TAA
VVSNKKVM

SEQ ID NO: 100460 - protein, 8 aa, Homo sapiens
  misc_feature: Table A; Target 100460; HLA-B*08:01; UGT2B11; ENSG00000213759; TAA
VVSNKKVM

SEQ ID NO: 100461 - protein, 8 aa, Homo sapiens
  misc_feature: Table A; Target 100461; HLA-C*07:01; UGT2B11; ENSG00000213759; TAA
VVSNKKVM

SEQ ID NO: 100462 - protein, 8 aa, Homo sapiens
  misc_feature: Table A; Target 100462; HLA-C*16:01; UGT2B11; ENSG00000213759; TAA
VVSNKKVM

SEQ ID NO: 100463 - protein, 8 aa, Homo sapiens
  misc_feature: Table A; Target 100463; HLA-C*16:02; UGT2B11; ENSG00000213759; TAA
VVSNKKVM

SEQ ID NO: 100464 - protein, 9 aa, Homo sapiens
  misc_feature: Table A; Target 100464; HLA-A*03:01; UGT2B11; ENSG00000213759; TAA
VVSNKKVMK

SEQ ID NO: 100465 - protein, 9 aa, Homo sapiens
  misc_feature: Table A; Target 100465; HLA-A*03:02; UGT2B11; ENSG00000213759; TAA
VVSNKKVMK

SEQ ID NO: 100466 - protein, 9 aa, Homo sapiens
  misc_feature: Table A; Target 100466; HLA-A*11:01; UGT2B11; ENSG00000213759; TAA
VVSNKKVMK

SEQ ID NO: 100467 - protein, 10 aa, Homo sapiens
  misc_feature: Table A; Target 100467; HLA-A*03:01; UGT2B11; ENSG00000213759; TAA
VVSNKKVMKK

SEQ ID NO: 100468 - protein, 10 aa, Homo sapiens
  misc_feature: Table A; Target 100468; HLA-A*03:02; UGT2B11; ENSG00000213759; TAA
VVSNKKVMKK

SEQ ID NO: 100469 - protein, 10 aa, Homo sapiens
  misc_feature: Table A; Target 100469; HLA-A*11:01; UGT2B11; ENSG00000213759; TAA
VVSNKKVMKK

SEQ ID NO: 100470 - protein, 9 aa, Homo sapiens
  misc_feature: Table A; Target 100470; HLA-B*56:01; UGT2B11; ENSG00000213759; TAA
VVVFSLGSV

SEQ ID NO: 100471 - protein, 8 aa, Homo sapiens
  misc_feature: Table A; Target 100471; HLA-C*01:02; UGT2B11; ENSG00000213759; TAA
VYPTSLTK

SEQ ID NO: 100472 - protein, 8 aa, Homo sapiens
  misc_feature: Table A; Target 100472; HLA-C*07:01; UGT2B11; ENSG00000213759; TAA
VYPTSLTK

SEQ ID NO: 100473 - protein, 8 aa, Homo sapiens
  misc_feature: Table A; Target 100473; HLA-C*14:02; UGT2B11; ENSG00000213759; TAA
VYPTSLTK

SEQ ID NO: 100474 - protein, 9 aa, Homo sapiens
  misc_feature: Table A; Target 100474; HLA-A*23:01; UGT2B11; ENSG00000213759; TAA
VYPTSLTKT

SEQ ID NO: 100475 - protein, 9 aa, Homo sapiens
  misc_feature: Table A; Target 100475; HLA-A*24:02; UGT2B11; ENSG00000213759; TAA
VYPTSLTKT

SEQ ID NO: 100476 - protein, 9 aa, Homo sapiens
  misc_feature: Table A; Target 100476; HLA-C*01:02; UGT2B11; ENSG00000213759; TAA
VYPTSLTKT

SEQ ID NO: 100477 - protein, 9 aa, Homo sapiens
  misc_feature: Table A; Target 100477; HLA-C*07:01; UGT2B11; ENSG00000213759; TAA
VYPTSLTKT

SEQ ID NO: 100478 - protein, 9 aa, Homo sapiens
  misc_feature: Table A; Target 100478; HLA-C*07:02; UGT2B11; ENSG00000213759; TAA
VYPTSLTKT

SEQ ID NO: 100479 - protein, 9 aa, Homo sapiens
  misc_feature: Table A; Target 100479; HLA-C*14:02; UGT2B11; ENSG00000213759; TAA
VYPTSLTKT

SEQ ID NO: 100480 - protein, 10 aa, Homo sapiens
  misc_feature: Table A; Target 100480; HLA-B*07:02; UGT2B11; ENSG00000213759; TAA
VYPTSLTKTE

SEQ ID NO: 100481 - protein, 11 aa, Homo sapiens
  misc_feature: Table A; Target 100481; HLA-A*23:01; UGT2B11; ENSG00000213759; TAA
VYPTSLTKTEF

SEQ ID NO: 100482 - protein, 11 aa, Homo sapiens
  misc_feature: Table A; Target 100482; HLA-A*24:02; UGT2B11; ENSG00000213759; TAA
VYPTSLTKTEF

SEQ ID NO: 100483 - protein, 11 aa, Homo sapiens
  misc_feature: Table A; Target 100483; HLA-A*29:02; UGT2B11; ENSG00000213759; TAA
VYPTSLTKTEF

SEQ ID NO: 100484 - protein, 11 aa, Homo sapiens
  misc_feature: Table A; Target 100484; HLA-C*01:02; UGT2B11; ENSG00000213759; TAA
VYPTSLTKTEF

SEQ ID NO: 100485 - protein, 11 aa, Homo sapiens
  misc_feature: Table A; Target 100485; HLA-C*14:02; UGT2B11; ENSG00000213759; TAA
VYPTSLTKTEF

SEQ ID NO: 100486 - protein, 10 aa, Homo sapiens
  misc_feature: Table A; Target 100486; HLA-A*29:02; UGT2B11; ENSG00000213759; TAA
VYSLRFTPGY

SEQ ID NO: 100487 - protein, 10 aa, Homo sapiens
  misc_feature: Table A; Target 100487; HLA-B*44:02; UGT2B11; ENSG00000213759; TAA
WELYDIFRNF

SEQ ID NO: 100488 - protein, 9 aa, Homo sapiens
  misc_feature: Table A; Target 100488; HLA-B*57:01; UGT2B11; ENSG00000213759; TAA
WSFQFPHPF

SEQ ID NO: 100489 - protein, 8 aa, Homo sapiens
  misc_feature: Table A; Target 100489; HLA-B*18:01; UGT2B11; ENSG00000213759; TAA
YEAIYHGI

SEQ ID NO: 100490 - protein, 8 aa, Homo sapiens
  misc_feature: Table A; Target 100490; HLA-B*37:01; UGT2B11; ENSG00000213759; TAA
YEAIYHGI

SEQ ID NO: 100491 - protein, 8 aa, Homo sapiens
  misc_feature: Table A; Target 100491; HLA-B*44:02; UGT2B11; ENSG00000213759; TAA
YEAIYHGI

SEQ ID NO: 100492 - protein, 8 aa, Homo sapiens
  misc_feature: Table A; Target 100492; HLA-B*49:01; UGT2B11; ENSG00000213759; TAA
YEAIYHGI

SEQ ID NO: 100493 - protein, 8 aa, Homo sapiens
  misc_feature: Table A; Target 100493; HLA-C*14:02; UGT2B11; ENSG00000213759; TAA
YFSSGSCG

SEQ ID NO: 100494 - protein, 8 aa, Homo sapiens
  misc_feature: Table A; Target 100494; HLA-C*07:04; UGT2B11; ENSG00000213759; TAA
YHGIPMVG

SEQ ID NO: 100495 - protein, 9 aa, Homo sapiens
  misc_feature: Table A; Target 100495; HLA-B*38:01; UGT2B11; ENSG00000213759; TAA
YHGIPMVGI

SEQ ID NO: 100496 - protein, 9 aa, Homo sapiens
  misc_feature: Table A; Target 100496; HLA-B*27:02; UGT2B11; ENSG00000213759; TAA
YHSLDVIGF

SEQ ID NO: 100497 - protein, 9 aa, Homo sapiens
  misc_feature: Table A; Target 100497; HLA-B*38:01; UGT2B11; ENSG00000213759; TAA
YHSLDVIGF

SEQ ID NO: 100498 - protein, 9 aa, Homo sapiens
  misc_feature: Table A; Target 100498; HLA-B*39:01; UGT2B11; ENSG00000213759; TAA
YHSLDVIGF

SEQ ID NO: 100499 - protein, 9 aa, Homo sapiens
  misc_feature: Table A; Target 100499; HLA-C*07:04; UGT2B11; ENSG00000213759; TAA
YHSLDVIGF

SEQ ID NO: 100500 - protein, 10 aa, Homo sapiens
  misc_feature: Table A; Target 100500; HLA-B*38:01; UGT2B11; ENSG00000213759; TAA
YHSLDVIGFL

SEQ ID NO: 100501 - protein, 9 aa, Homo sapiens
  misc_feature: Table A; Target 100501; HLA-A*02:07; UGT2B11; ENSG00000213759; TAA
YIPIVMSKL

SEQ ID NO: 100502 - protein, 9 aa, Homo sapiens
  misc_feature: Table A; Target 100502; HLA-A*24:02; UGT2B11; ENSG00000213759; TAA
YIPIVMSKL

SEQ ID NO: 100503 - protein, 9 aa, Homo sapiens
  misc_feature: Table A; Target 100503; HLA-A*68:02; UGT2B11; ENSG00000213759; TAA
YIPIVMSKL

SEQ ID NO: 100504 - protein, 9 aa, Homo sapiens
  misc_feature: Table A; Target 100504; HLA-B*15:03; UGT2B11; ENSG00000213759; TAA
YKWIPQNDL

SEQ ID NO: 100505 - protein, 8 aa, Homo sapiens
  misc_feature: Table A; Target 100505; HLA-B*51:01; UGT2B11; ENSG00000213759; TAA
YPTSLTKT

SEQ ID NO: 100506 - protein, 8 aa, Homo sapiens
  misc_feature: Table A; Target 100506; HLA-B*54:01; UGT2B11; ENSG00000213759; TAA
YPTSLTKT

SEQ ID NO: 100507 - protein, 8 aa, Homo sapiens
  misc_feature: Table A; Target 100507; HLA-B*55:01; UGT2B11; ENSG00000213759; TAA
YPTSLTKT

SEQ ID NO: 100508 - protein, 8 aa, Homo sapiens
  misc_feature: Table A; Target 100508; HLA-B*56:01; UGT2B11; ENSG00000213759; TAA
YPTSLTKT

SEQ ID NO: 100509 - protein, 8 aa, Homo sapiens
  misc_feature: Table A; Target 100509; HLA-C*16:02; UGT2B11; ENSG00000213759; TAA
YPTSLTKT

SEQ ID NO: 100510 - protein, 10 aa, Homo sapiens
  misc_feature: Table A; Target 100510; HLA-A*23:01; UGT2B11; ENSG00000213759; TAA
YPTSLTKTEF

SEQ ID NO: 100511 - protein, 10 aa, Homo sapiens
  misc_feature: Table A; Target 100511; HLA-A*24:02; UGT2B11; ENSG00000213759; TAA
YPTSLTKTEF

SEQ ID NO: 100512 - protein, 10 aa, Homo sapiens
  misc_feature: Table A; Target 100512; HLA-A*25:01; UGT2B11; ENSG00000213759; TAA
YPTSLTKTEF

SEQ ID NO: 100513 - protein, 10 aa, Homo sapiens
  misc_feature: Table A; Target 100513; HLA-B*07:02; UGT2B11; ENSG00000213759; TAA
YPTSLTKTEF

SEQ ID NO: 100514 - protein, 10 aa, Homo sapiens
  misc_feature: Table A; Target 100514; HLA-B*35:01; UGT2B11; ENSG00000213759; TAA
YPTSLTKTEF

SEQ ID NO: 100515 - protein, 10 aa, Homo sapiens
  misc_feature: Table A; Target 100515; HLA-B*35:03; UGT2B11; ENSG00000213759; TAA
YPTSLTKTEF

SEQ ID NO: 100516 - protein, 10 aa, Homo sapiens
  misc_feature: Table A; Target 100516; HLA-B*38:01; UGT2B11; ENSG00000213759; TAA
YPTSLTKTEF

SEQ ID NO: 100517 - protein, 10 aa, Homo sapiens
  misc_feature: Table A; Target 100517; HLA-B*46:01; UGT2B11; ENSG00000213759; TAA
YPTSLTKTEF

SEQ ID NO: 100518 - protein, 10 aa, Homo sapiens
  misc_feature: Table A; Target 100518; HLA-B*54:01; UGT2B11; ENSG00000213759; TAA
YPTSLTKTEF

SEQ ID NO: 100519 - protein, 10 aa, Homo sapiens
  misc_feature: Table A; Target 100519; HLA-B*55:01; UGT2B11; ENSG00000213759; TAA
YPTSLTKTEF

SEQ ID NO: 100520 - protein, 10 aa, Homo sapiens
  misc_feature: Table A; Target 100520; HLA-B*56:01; UGT2B11; ENSG00000213759; TAA
YPTSLTKTEF

SEQ ID NO: 100521 - protein, 10 aa, Homo sapiens
  misc_feature: Table A; Target 100521; HLA-C*02:02; UGT2B11; ENSG00000213759; TAA
YPTSLTKTEF

SEQ ID NO: 100522 - protein, 10 aa, Homo sapiens
  misc_feature: Table A; Target 100522; HLA-C*04:01; UGT2B11; ENSG00000213759; TAA
YPTSLTKTEF

SEQ ID NO: 100523 - protein, 10 aa, Homo sapiens
  misc_feature: Table A; Target 100523; HLA-C*07:02; UGT2B11; ENSG00000213759; TAA
YPTSLTKTEF

SEQ ID NO: 100524 - protein, 10 aa, Homo sapiens
  misc_feature: Table A; Target 100524; HLA-C*14:02; UGT2B11; ENSG00000213759; TAA
YPTSLTKTEF

SEQ ID NO: 100525 - protein, 10 aa, Homo sapiens
  misc_feature: Table A; Target 100525; HLA-C*16:01; UGT2B11; ENSG00000213759; TAA
YPTSLTKTEF

SEQ ID NO: 100526 - protein, 10 aa, Homo sapiens
  misc_feature: Table A; Target 100526; HLA-C*16:02; UGT2B11; ENSG00000213759; TAA
YPTSLTKTEF

SEQ ID NO: 100527 - protein, 9 aa, Homo sapiens
  misc_feature: Table A; Target 100527; HLA-C*03:04; UGT2B11; ENSG00000213759; TAA
YSEVLGRPT

SEQ ID NO: 100528 - protein, 11 aa, Homo sapiens
  misc_feature: Table A; Target 100528; HLA-C*05:01; UGT2B11; ENSG00000213759; TAA
YSEVLGRPTTL

SEQ ID NO: 100529 - protein, 11 aa, Homo sapiens
  misc_feature: Table A; Target 100529; HLA-C*12:03; UGT2B11; ENSG00000213759; TAA
YSEVLGRPTTL

SEQ ID NO: 100530 - protein, 9 aa, Homo sapiens
  misc_feature: Table A; Target 100530; HLA-A*01:01; UGT2B11; ENSG00000213759; TAA
YSLRFTPGY

SEQ ID NO: 100531 - protein, 9 aa, Homo sapiens
  misc_feature: Table A; Target 100531; HLA-A*26:01; UGT2B11; ENSG00000213759; TAA
YSLRFTPGY

SEQ ID NO: 100532 - protein, 9 aa, Homo sapiens
  misc_feature: Table A; Target 100532; HLA-A*29:02; UGT2B11; ENSG00000213759; TAA
YSLRFTPGY

SEQ ID NO: 100533 - protein, 9 aa, Homo sapiens
  misc_feature: Table A; Target 100533; HLA-A*30:02; UGT2B11; ENSG00000213759; TAA
YSLRFTPGY

SEQ ID NO: 100534 - protein, 9 aa, Homo sapiens
  misc_feature: Table A; Target 100534; HLA-B*57:01; UGT2B11; ENSG00000213759; TAA
YSLRFTPGY

SEQ ID NO: 100535 - protein, 9 aa, Homo sapiens
  misc_feature: Table A; Target 100535; HLA-C*03:03; XAGE3; ENSG00000171402; CTA
AAETQVPDL

SEQ ID NO: 100536 - protein, 9 aa, Homo sapiens
  misc_feature: Table A; Target 100536; HLA-C*05:01; XAGE3; ENSG00000171402; CTA
AAETQVPDL

SEQ ID NO: 100537 - protein, 8 aa, Homo sapiens
  misc_feature: Table A; Target 100537; HLA-A*30:01; XAGE3; ENSG00000171402; CTA
AETQVPDL

SEQ ID NO: 100538 - protein, 8 aa, Homo sapiens
  misc_feature: Table A; Target 100538; HLA-B*18:01; XAGE3; ENSG00000171402; CTA
AETQVPDL

SEQ ID NO: 100539 - protein, 8 aa, Homo sapiens
  misc_feature: Table A; Target 100539; HLA-B*37:01; XAGE3; ENSG00000171402; CTA
AETQVPDL

SEQ ID NO: 100540 - protein, 8 aa, Homo sapiens
  misc_feature: Table A; Target 100540; HLA-B*40:01; XAGE3; ENSG00000171402; CTA
AETQVPDL

SEQ ID NO: 100541 - protein, 8 aa, Homo sapiens
  misc_feature: Table A; Target 100541; HLA-B*40:02; XAGE3; ENSG00000171402; CTA
AETQVPDL

SEQ ID NO: 100542 - protein, 8 aa, Homo sapiens
  misc_feature: Table A; Target 100542; HLA-B*44:02; XAGE3; ENSG00000171402; CTA
AETQVPDL

SEQ ID NO: 100543 - protein, 8 aa, Homo sapiens
  misc_feature: Table A; Target 100543; HLA-B*44:03; XAGE3; ENSG00000171402; CTA
AETQVPDL

SEQ ID NO: 100544 - protein, 8 aa, Homo sapiens
  misc_feature: Table A; Target 100544; HLA-B*49:01; XAGE3; ENSG00000171402; CTA
AETQVPDL

SEQ ID NO: 100545 - protein, 8 aa, Homo sapiens
  misc_feature: Table A; Target 100545; HLA-C*16:04; XAGE3; ENSG00000171402; CTA
AETQVPDL

SEQ ID NO: 100546 - protein, 10 aa, Homo sapiens
  misc_feature: Table A; Target 100546; HLA-A*30:01; XAGE3; ENSG00000171402; CTA
AETQVPDLEA

SEQ ID NO: 100547 - protein, 10 aa, Homo sapiens
  misc_feature: Table A; Target 100547; HLA-B*40:01; XAGE3; ENSG00000171402; CTA
AETQVPDLEA

SEQ ID NO: 100548 - protein, 10 aa, Homo sapiens
  misc_feature: Table A; Target 100548; HLA-B*49:01; XAGE3; ENSG00000171402; CTA
AETQVPDLEA

SEQ ID NO: 100549 - protein, 9 aa, Homo sapiens
  misc_feature: Table A; Target 100549; HLA-A*33:01; XAGE3; ENSG00000171402; CTA
DDQGKILPK

SEQ ID NO: 100550 - protein, 9 aa, Homo sapiens
  misc_feature: Table A; Target 100550; HLA-A*68:01; XAGE3; ENSG00000171402; CTA
DDQGKILPK

SEQ ID NO: 100551 - protein, 9 aa, Homo sapiens
  misc_feature: Table A; Target 100551; HLA-B*27:02; XAGE3; ENSG00000171402; CTA
DDQGKILPK

SEQ ID NO: 100552 - protein, 9 aa, Homo sapiens
  misc_feature: Table A; Target 100552; HLA-A*03:02; XAGE3; ENSG00000171402; CTA
DLQELSQSK

SEQ ID NO: 100553 - protein, 9 aa, Homo sapiens
  misc_feature: Table A; Target 100553; HLA-A*33:03; XAGE3; ENSG00000171402; CTA
DLQELSQSK

SEQ ID NO: 100554 - protein, 11 aa, Homo sapiens
  misc_feature: Table A; Target 100554; HLA-B*27:02; XAGE3; ENSG00000171402; CTA
EADLQELSQSK

SEQ ID NO: 100555 - protein, 11 aa, Homo sapiens
  misc_feature: Table A; Target 100555; HLA-A*33:01; XAGE3; ENSG00000171402; CTA
ESRDPAPGQER

SEQ ID NO: 100556 - protein, 11 aa, Homo sapiens
  misc_feature: Table A; Target 100556; HLA-A*33:03; XAGE3; ENSG00000171402; CTA
ESRDPAPGQER

SEQ ID NO: 100557 - protein, 11 aa, Homo sapiens
  misc_feature: Table A; Target 100557; HLA-C*07:06; XAGE3; ENSG00000171402; CTA
ESRDPAPGQER

SEQ ID NO: 100558 - protein, 9 aa, Homo sapiens
  misc_feature: Table A; Target 100558; HLA-B*07:02; XAGE3; ENSG00000171402; CTA
GPDDQGKIL

SEQ ID NO: 100559 - protein, 9 aa, Homo sapiens
  misc_feature: Table A; Target 100559; HLA-B*35:03; XAGE3; ENSG00000171402; CTA
GPDDQGKIL

SEQ ID NO: 100560 - protein, 9 aa, Homo sapiens
  misc_feature: Table A; Target 100560; HLA-C*07:02; XAGE3; ENSG00000171402; CTA
GPDDQGKIL

SEQ ID NO: 100561 - protein, 11 aa, Homo sapiens
  misc_feature: Table A; Target 100561; HLA-A*03:01; XAGE3; ENSG00000171402; CTA
GPDDQGKILPK

SEQ ID NO: 100562 - protein, 11 aa, Homo sapiens
  misc_feature: Table A; Target 100562; HLA-A*03:02; XAGE3; ENSG00000171402; CTA
GPDDQGKILPK

SEQ ID NO: 100563 - protein, 11 aa, Homo sapiens
  misc_feature: Table A; Target 100563; HLA-A*11:01; XAGE3; ENSG00000171402; CTA
GPDDQGKILPK

SEQ ID NO: 100564 - protein, 11 aa, Homo sapiens
  misc_feature: Table A; Target 100564; HLA-A*68:01; XAGE3; ENSG00000171402; CTA
GPDDQGKILPK

SEQ ID NO: 100565 - protein, 11 aa, Homo sapiens
  misc_feature: Table A; Target 100565; HLA-B*27:02; XAGE3; ENSG00000171402; CTA
GPDDQGKILPK

SEQ ID NO: 100566 - protein, 11 aa, Homo sapiens
  misc_feature: Table A; Target 100566; HLA-B*27:05; XAGE3; ENSG00000171402; CTA
GPDDQGKILPK

SEQ ID NO: 100567 - protein, 11 aa, Homo sapiens
  misc_feature: Table A; Target 100567; HLA-C*07:06; XAGE3; ENSG00000171402; CTA
GPDDQGKILPK

SEQ ID NO: 100568 - protein, 10 aa, Homo sapiens
  misc_feature: Table A; Target 100568; HLA-C*01:02; XAGE3; ENSG00000171402; CTA
KMPEGGDRQP

SEQ ID NO: 100569 - protein, 11 aa, Homo sapiens
  misc_feature: Table A; Target 100569; HLA-B*07:02; XAGE3; ENSG00000171402; CTA
MPEGGDRQPQV

SEQ ID NO: 100570 - protein, 11 aa, Homo sapiens
  misc_feature: Table A; Target 100570; HLA-B*35:01; XAGE3; ENSG00000171402; CTA
MPEGGDRQPQV

SEQ ID NO: 100571 - protein, 11 aa, Homo sapiens
  misc_feature: Table A; Target 100571; HLA-B*35:03; XAGE3; ENSG00000171402; CTA
MPEGGDRQPQV

SEQ ID NO: 100572 - protein, 11 aa, Homo sapiens
  misc_feature: Table A; Target 100572; HLA-B*51:01; XAGE3; ENSG00000171402; CTA
MPEGGDRQPQV

SEQ ID NO: 100573 - protein, 11 aa, Homo sapiens
  misc_feature: Table A; Target 100573; HLA-B*54:01; XAGE3; ENSG00000171402; CTA
MPEGGDRQPQV

SEQ ID NO: 100574 - protein, 11 aa, Homo sapiens
  misc_feature: Table A; Target 100574; HLA-B*55:01; XAGE3; ENSG00000171402; CTA
MPEGGDRQPQV

SEQ ID NO: 100575 - protein, 11 aa, Homo sapiens
  misc_feature: Table A; Target 100575; HLA-B*56:01; XAGE3; ENSG00000171402; CTA
MPEGGDRQPQV

SEQ ID NO: 100576 - protein, 11 aa, Homo sapiens
  misc_feature: Table A; Target 100576; HLA-C*03:03; XAGE3; ENSG00000171402; CTA
MPEGGDRQPQV

SEQ ID NO: 100577 - protein, 11 aa, Homo sapiens
  misc_feature: Table A; Target 100577; HLA-C*04:01; XAGE3; ENSG00000171402; CTA
MPEGGDRQPQV

SEQ ID NO: 100578 - protein, 11 aa, Homo sapiens
  misc_feature: Table A; Target 100578; HLA-C*06:02; XAGE3; ENSG00000171402; CTA
MPEGGDRQPQV

SEQ ID NO: 100579 - protein, 11 aa, Homo sapiens
  misc_feature: Table A; Target 100579; HLA-C*07:02; XAGE3; ENSG00000171402; CTA
MPEGGDRQPQV

SEQ ID NO: 100580 - protein, 11 aa, Homo sapiens
  misc_feature: Table A; Target 100580; HLA-C*12:03; XAGE3; ENSG00000171402; CTA
MPEGGDRQPQV

SEQ ID NO: 100581 - protein, 11 aa, Homo sapiens
  misc_feature: Table A; Target 100581; HLA-C*16:02; XAGE3; ENSG00000171402; CTA
MPEGGDRQPQV

SEQ ID NO: 100582 - protein, 8 aa, Homo sapiens
  misc_feature: Table A; Target 100582; HLA-B*58:01; XAGE3; ENSG00000171402; CTA
RSVPPPEL

SEQ ID NO: 100583 - protein, 9 aa, Homo sapiens
  misc_feature: Table A; Target 100583; HLA-B*57:01; XAGE3; ENSG00000171402; CTA
RSVPPPELI

SEQ ID NO: 100584 - protein, 9 aa, Homo sapiens
  misc_feature: Table A; Target 100584; HLA-B*58:01; XAGE3; ENSG00000171402; CTA
RSVPPPELI

SEQ ID NO: 100585 - protein, 10 aa, Homo sapiens
  misc_feature: Table A; Target 100585; HLA-B*27:05; XAGE3; ENSG00000171402; CTA
SRDPAPGQER

SEQ ID NO: 100586 - protein, 11 aa, Homo sapiens
  misc_feature: Table A; Target 100586; HLA-A*26:01; XAGE3; ENSG00000171402; CTA
SVPPPELIGPM

SEQ ID NO: 100587 - protein, 10 aa, Homo sapiens
  misc_feature: Table A; Target 100587; HLA-B*39:01; XAGE3; ENSG00000171402; CTA
TQVPDLEADL

SEQ ID NO: 100588 - protein, 8 aa, Homo sapiens
  misc_feature: Table A; Target 100588; HLA-B*35:03; XAGE3; ENSG00000171402; CTA
VPDLEADL

SEQ ID NO: 100589 - protein, 8 aa, Homo sapiens
  misc_feature: Table A; Target 100589; HLA-C*05:01; XAGE3; ENSG00000171402; CTA
VPDLEADL

SEQ ID NO: 100590 - protein, 11 aa, Homo sapiens
  misc_feature: Table A; Target 100590; HLA-B*35:01; XAGE3; ENSG00000171402; CTA
VPDLEADLQEL

SEQ ID NO: 100591 - protein, 11 aa, Homo sapiens
  misc_feature: Table A; Target 100591; HLA-B*35:03; XAGE3; ENSG00000171402; CTA
VPDLEADLQEL

SEQ ID NO: 100592 - protein, 11 aa, Homo sapiens
  misc_feature: Table A; Target 100592; HLA-B*55:01; XAGE3; ENSG00000171402; CTA
VPDLEADLQEL

SEQ ID NO: 100593 - protein, 11 aa, Homo sapiens
  misc_feature: Table A; Target 100593; HLA-C*05:01; XAGE3; ENSG00000171402; CTA
VPDLEADLQEL

SEQ ID NO: 100594 - protein, 10 aa, Homo sapiens
  misc_feature: Table A; Target 100594; HLA-B*35:01; XAGE3; ENSG00000171402; CTA
VPPPELIGPM

SEQ ID NO: 100595 - protein, 11 aa, Homo sapiens
  misc_feature: Table A; Target 100595; HLA-B*35:03; XAGE3; ENSG00000171402; CTA
VPPPELIGPML

SEQ ID NO: 100596 - protein, 10 aa, Homo sapiens
  misc_feature: Table A; Target 100596; HLA-B*27:02; XAGE3,XAGE5; ENSG00000171402,ENSG00000171405; CTA,CTA
ADLQELSQSK

SEQ ID NO: 100597 - protein, 9 aa, Homo sapiens
  misc_feature: Table A; Target 100597; HLA-A*33:01; XAGE3,XAGE5; ENSG00000171402,ENSG00000171405; CTA,CTA
DLQELSQSK

SEQ ID NO: 100598 - protein, 10 aa, Homo sapiens
  misc_feature: Table A; Target 100598; HLA-B*15:03; XAGE3,XAGE5; ENSG00000171402,ENSG00000171405; CTA,CTA
GKILPKSEQF

SEQ ID NO: 100599 - protein, 9 aa, Homo sapiens
  misc_feature: Table A; Target 100599; HLA-A*23:01; XAGE3,XAGE5; ENSG00000171402,ENSG00000171405; CTA,CTA
KILPKSEQF

SEQ ID NO: 100600 - protein, 9 aa, Homo sapiens
  misc_feature: Table A; Target 100600; HLA-A*24:02; XAGE3,XAGE5; ENSG00000171402,ENSG00000171405; CTA,CTA
KILPKSEQF

SEQ ID NO: 100601 - protein, 9 aa, Homo sapiens
  misc_feature: Table A; Target 100601; HLA-A*30:02; XAGE3,XAGE5; ENSG00000171402,ENSG00000171405; CTA,CTA
KILPKSEQF

SEQ ID NO: 100602 - protein, 9 aa, Homo sapiens
  misc_feature: Table A; Target 100602; HLA-A*31:01; XAGE3,XAGE5; ENSG00000171402,ENSG00000171405; CTA,CTA
KILPKSEQF

SEQ ID NO: 100603 - protein, 9 aa, Homo sapiens
  misc_feature: Table A; Target 100603; HLA-A*32:01; XAGE3,XAGE5; ENSG00000171402,ENSG00000171405; CTA,CTA
KILPKSEQF

SEQ ID NO: 100604 - protein, 9 aa, Homo sapiens
  misc_feature: Table A; Target 100604; HLA-B*15:01; XAGE3,XAGE5; ENSG00000171402,ENSG00000171405; CTA,CTA
KILPKSEQF

SEQ ID NO: 100605 - protein, 9 aa, Homo sapiens
  misc_feature: Table A; Target 100605; HLA-B*37:01; XAGE3,XAGE5; ENSG00000171402,ENSG00000171405; CTA,CTA
KILPKSEQF

SEQ ID NO: 100606 - protein, 9 aa, Homo sapiens
  misc_feature: Table A; Target 100606; HLA-B*57:01; XAGE3,XAGE5; ENSG00000171402,ENSG00000171405; CTA,CTA
KILPKSEQF

SEQ ID NO: 100607 - protein, 9 aa, Homo sapiens
  misc_feature: Table A; Target 100607; HLA-B*58:01; XAGE3,XAGE5; ENSG00000171402,ENSG00000171405; CTA,CTA
KILPKSEQF

SEQ ID NO: 100608 - protein, 10 aa, Homo sapiens
  misc_feature: Table A; Target 100608; HLA-A*03:01; XAGE3,XAGE5; ENSG00000171402,ENSG00000171405; CTA,CTA
KILPKSEQFK

SEQ ID NO: 100609 - protein, 8 aa, Homo sapiens
  misc_feature: Table A; Target 100609; HLA-A*30:01; XAGE3,XAGE5; ENSG00000171402,ENSG00000171405; CTA,CTA
LEADLQEL

SEQ ID NO: 100610 - protein, 8 aa, Homo sapiens
  misc_feature: Table A; Target 100610; HLA-B*18:01; XAGE3,XAGE5; ENSG00000171402,ENSG00000171405; CTA,CTA
LEADLQEL

SEQ ID NO: 100611 - protein, 8 aa, Homo sapiens
  misc_feature: Table A; Target 100611; HLA-B*40:01; XAGE3,XAGE5; ENSG00000171402,ENSG00000171405; CTA,CTA
LEADLQEL

SEQ ID NO: 100612 - protein, 8 aa, Homo sapiens
  misc_feature: Table A; Target 100612; HLA-B*49:01; XAGE3,XAGE5; ENSG00000171402,ENSG00000171405; CTA,CTA
LEADLQEL

SEQ ID NO: 100613 - protein, 9 aa, Homo sapiens
  misc_feature: Table A; Target 100613; HLA-C*05:01; XAGE5; ENSG00000171405; CTA
AAEIQVPNL

SEQ ID NO: 100614 - protein, 8 aa, Homo sapiens
  misc_feature: Table A; Target 100614; HLA-A*30:01; XAGE5; ENSG00000171405; CTA
AEIQVPNL

SEQ ID NO: 100615 - protein, 8 aa, Homo sapiens
  misc_feature: Table A; Target 100615; HLA-B*18:01; XAGE5; ENSG00000171405; CTA
AEIQVPNL

SEQ ID NO: 100616 - protein, 8 aa, Homo sapiens
  misc_feature: Table A; Target 100616; HLA-B*27:02; XAGE5; ENSG00000171405; CTA
AEIQVPNL

SEQ ID NO: 100617 - protein, 8 aa, Homo sapiens
  misc_feature: Table A; Target 100617; HLA-B*37:01; XAGE5; ENSG00000171405; CTA
AEIQVPNL

SEQ ID NO: 100618 - protein, 8 aa, Homo sapiens
  misc_feature: Table A; Target 100618; HLA-B*40:01; XAGE5; ENSG00000171405; CTA
AEIQVPNL

SEQ ID NO: 100619 - protein, 8 aa, Homo sapiens
  misc_feature: Table A; Target 100619; HLA-B*40:02; XAGE5; ENSG00000171405; CTA
AEIQVPNL

SEQ ID NO: 100620 - protein, 8 aa, Homo sapiens
  misc_feature: Table A; Target 100620; HLA-B*44:02; XAGE5; ENSG00000171405; CTA
AEIQVPNL

SEQ ID NO: 100621 - protein, 8 aa, Homo sapiens
  misc_feature: Table A; Target 100621; HLA-B*44:03; XAGE5; ENSG00000171405; CTA
AEIQVPNL

SEQ ID NO: 100622 - protein, 8 aa, Homo sapiens
  misc_feature: Table A; Target 100622; HLA-B*49:01; XAGE5; ENSG00000171405; CTA
AEIQVPNL

SEQ ID NO: 100623 - protein, 10 aa, Homo sapiens
  misc_feature: Table A; Target 100623; HLA-A*30:01; XAGE5; ENSG00000171405; CTA
AEIQVPNLEA

SEQ ID NO: 100624 - protein, 10 aa, Homo sapiens
  misc_feature: Table A; Target 100624; HLA-B*40:01; XAGE5; ENSG00000171405; CTA
AEIQVPNLEA

SEQ ID NO: 100625 - protein, 10 aa, Homo sapiens
  misc_feature: Table A; Target 100625; HLA-B*44:02; XAGE5; ENSG00000171405; CTA
AEIQVPNLEA

SEQ ID NO: 100626 - protein, 10 aa, Homo sapiens
  misc_feature: Table A; Target 100626; HLA-B*44:03; XAGE5; ENSG00000171405; CTA
AEIQVPNLEA

SEQ ID NO: 100627 - protein, 10 aa, Homo sapiens
  misc_feature: Table A; Target 100627; HLA-B*49:01; XAGE5; ENSG00000171405; CTA
AEIQVPNLEA

SEQ ID NO: 100628 - protein, 8 aa, Homo sapiens
  misc_feature: Table A; Target 100628; HLA-B*13:02; XAGE5; ENSG00000171405; CTA
AQLVGPML

SEQ ID NO: 100629 - protein, 8 aa, Homo sapiens
  misc_feature: Table A; Target 100629; HLA-B*15:01; XAGE5; ENSG00000171405; CTA
AQLVGPML

SEQ ID NO: 100630 - protein, 8 aa, Homo sapiens
  misc_feature: Table A; Target 100630; HLA-B*15:03; XAGE5; ENSG00000171405; CTA
AQLVGPML

SEQ ID NO: 100631 - protein, 8 aa, Homo sapiens
  misc_feature: Table A; Target 100631; HLA-C*03:04; XAGE5; ENSG00000171405; CTA
AQLVGPML

SEQ ID NO: 100632 - protein, 9 aa, Homo sapiens
  misc_feature: Table A; Target 100632; HLA-B*51:01; XAGE5; ENSG00000171405; CTA
DSPDVQGKI

SEQ ID NO: 100633 - protein, 9 aa, Homo sapiens
  misc_feature: Table A; Target 100633; HLA-A*03:02; XAGE5; ENSG00000171405; CTA
DVQGKILPK

SEQ ID NO: 100634 - protein, 9 aa, Homo sapiens
  misc_feature: Table A; Target 100634; HLA-A*11:01; XAGE5; ENSG00000171405; CTA
DVQGKILPK

SEQ ID NO: 100635 - protein, 9 aa, Homo sapiens
  misc_feature: Table A; Target 100635; HLA-A*33:01; XAGE5; ENSG00000171405; CTA
DVQGKILPK

SEQ ID NO: 100636 - protein, 9 aa, Homo sapiens
  misc_feature: Table A; Target 100636; HLA-A*33:03; XAGE5; ENSG00000171405; CTA
DVQGKILPK

SEQ ID NO: 100637 - protein, 9 aa, Homo sapiens
  misc_feature: Table A; Target 100637; HLA-A*68:01; XAGE5; ENSG00000171405; CTA
DVQGKILPK

SEQ ID NO: 100638 - protein, 9 aa, Homo sapiens
  misc_feature: Table A; Target 100638; HLA-C*07:06; XAGE5; ENSG00000171405; CTA
DVQGKILPK

SEQ ID NO: 100639 - protein, 11 aa, Homo sapiens
  misc_feature: Table A; Target 100639; HLA-A*33:01; XAGE5; ENSG00000171405; CTA
ESQDHTPGQKR

SEQ ID NO: 100640 - protein, 11 aa, Homo sapiens
  misc_feature: Table A; Target 100640; HLA-A*33:03; XAGE5; ENSG00000171405; CTA
ESQDHTPGQKR

SEQ ID NO: 100641 - protein, 11 aa, Homo sapiens
  misc_feature: Table A; Target 100641; HLA-A*68:01; XAGE5; ENSG00000171405; CTA
ESQDHTPGQKR

SEQ ID NO: 100642 - protein, 10 aa, Homo sapiens
  misc_feature: Table A; Target 100642; HLA-B*49:01; XAGE5; ENSG00000171405; CTA
GDSPDVQGKI

SEQ ID NO: 100643 - protein, 8 aa, Homo sapiens
  misc_feature: Table A; Target 100643; HLA-A*24:02; XAGE5; ENSG00000171405; CTA
ILPKSEQF

SEQ ID NO: 100644 - protein, 9 aa, Homo sapiens
  misc_feature: Table A; Target 100644; HLA-B*35:03; XAGE5; ENSG00000171405; CTA
LAQLVGPML

SEQ ID NO: 100645 - protein, 9 aa, Homo sapiens
  misc_feature: Table A; Target 100645; HLA-B*51:01; XAGE5; ENSG00000171405; CTA
LAQLVGPML

SEQ ID NO: 100646 - protein, 9 aa, Homo sapiens
  misc_feature: Table A; Target 100646; HLA-C*03:03; XAGE5; ENSG00000171405; CTA
LAQLVGPML

SEQ ID NO: 100647 - protein, 9 aa, Homo sapiens
  misc_feature: Table A; Target 100647; HLA-C*03:04; XAGE5; ENSG00000171405; CTA
LAQLVGPML

SEQ ID NO: 100648 - protein, 11 aa, Homo sapiens
  misc_feature: Table A; Target 100648; HLA-B*07:02; XAGE5; ENSG00000171405; CTA
MPEGGEGKPQL

SEQ ID NO: 100649 - protein, 11 aa, Homo sapiens
  misc_feature: Table A; Target 100649; HLA-B*35:01; XAGE5; ENSG00000171405; CTA
MPEGGEGKPQL

SEQ ID NO: 100650 - protein, 11 aa, Homo sapiens
  misc_feature: Table A; Target 100650; HLA-B*35:03; XAGE5; ENSG00000171405; CTA
MPEGGEGKPQL

SEQ ID NO: 100651 - protein, 11 aa, Homo sapiens
  misc_feature: Table A; Target 100651; HLA-B*38:01; XAGE5; ENSG00000171405; CTA
MPEGGEGKPQL

SEQ ID NO: 100652 - protein, 11 aa, Homo sapiens
  misc_feature: Table A; Target 100652; HLA-B*39:01; XAGE5; ENSG00000171405; CTA
MPEGGEGKPQL

SEQ ID NO: 100653 - protein, 11 aa, Homo sapiens
  misc_feature: Table A; Target 100653; HLA-B*54:01; XAGE5; ENSG00000171405; CTA
MPEGGEGKPQL

SEQ ID NO: 100654 - protein, 11 aa, Homo sapiens
  misc_feature: Table A; Target 100654; HLA-B*55:01; XAGE5; ENSG00000171405; CTA
MPEGGEGKPQL

SEQ ID NO: 100655 - protein, 11 aa, Homo sapiens
  misc_feature: Table A; Target 100655; HLA-C*03:03; XAGE5; ENSG00000171405; CTA
MPEGGEGKPQL

SEQ ID NO: 100656 - protein, 11 aa, Homo sapiens
  misc_feature: Table A; Target 100656; HLA-C*04:01; XAGE5; ENSG00000171405; CTA
MPEGGEGKPQL

SEQ ID NO: 100657 - protein, 11 aa, Homo sapiens
  misc_feature: Table A; Target 100657; HLA-C*05:01; XAGE5; ENSG00000171405; CTA
MPEGGEGKPQL

SEQ ID NO: 100658 - protein, 11 aa, Homo sapiens
  misc_feature: Table A; Target 100658; HLA-C*07:02; XAGE5; ENSG00000171405; CTA
MPEGGEGKPQL

SEQ ID NO: 100659 - protein, 11 aa, Homo sapiens
  misc_feature: Table A; Target 100659; HLA-C*07:06; XAGE5; ENSG00000171405; CTA
MPEGGEGKPQL

SEQ ID NO: 100660 - protein, 10 aa, Homo sapiens
  misc_feature: Table A; Target 100660; HLA-B*40:02; XAGE5; ENSG00000171405; CTA
PEGGEGKPQL

SEQ ID NO: 100661 - protein, 10 aa, Homo sapiens
  misc_feature: Table A; Target 100661; HLA-B*40:01; XAGE5; ENSG00000171405; CTA
REDDQGAAEI

SEQ ID NO: 100662 - protein, 10 aa, Homo sapiens
  misc_feature: Table A; Target 100662; HLA-B*44:02; XAGE5; ENSG00000171405; CTA
REDDQGAAEI

SEQ ID NO: 100663 - protein, 10 aa, Homo sapiens
  misc_feature: Table A; Target 100663; HLA-B*44:03; XAGE5; ENSG00000171405; CTA
REDDQGAAEI

SEQ ID NO: 100664 - protein, 10 aa, Homo sapiens
  misc_feature: Table A; Target 100664; HLA-B*49:01; XAGE5; ENSG00000171405; CTA
REDDQGAAEI

SEQ ID NO: 100665 - protein, 10 aa, Homo sapiens
  misc_feature: Table A; Target 100665; HLA-A*02:01; XAGE5; ENSG00000171405; CTA
RLAQLVGPML

SEQ ID NO: 100666 - protein, 10 aa, Homo sapiens
  misc_feature: Table A; Target 100666; HLA-A*02:04; XAGE5; ENSG00000171405; CTA
RLAQLVGPML

SEQ ID NO: 100667 - protein, 9 aa, Homo sapiens
  misc_feature: Table A; Target 100667; HLA-B*07:02; XAGE5; ENSG00000171405; CTA
SPDVQGKIL

SEQ ID NO: 100668 - protein, 9 aa, Homo sapiens
  misc_feature: Table A; Target 100668; HLA-B*35:03; XAGE5; ENSG00000171405; CTA
SPDVQGKIL

SEQ ID NO: 100669 - protein, 9 aa, Homo sapiens
  misc_feature: Table A; Target 100669; HLA-C*07:02; XAGE5; ENSG00000171405; CTA
SPDVQGKIL

SEQ ID NO: 100670 - protein, 11 aa, Homo sapiens
  misc_feature: Table A; Target 100670; HLA-B*35:03; XAGE5; ENSG00000171405; CTA
VPNLEADLQEL

SEQ ID NO: 100671 - protein, 8 aa, Homo sapiens
  misc_feature: Table A; Target 100671; HLA-B*08:01; ZFP42; ENSG00000179059; CTA
AALRKHLL

SEQ ID NO: 100672 - protein, 9 aa, Homo sapiens
  misc_feature: Table A; Target 100672; HLA-B*40:02; ZFP42; ENSG00000179059; CTA
AEFARKKPP

SEQ ID NO: 100673 - protein, 8 aa, Homo sapiens
  misc_feature: Table A; Target 100673; HLA-A*30:01; ZFP42; ENSG00000179059; CTA
AEIEPVSA

SEQ ID NO: 100674 - protein, 8 aa, Homo sapiens
  misc_feature: Table A; Target 100674; HLA-B*18:01; ZFP42; ENSG00000179059; CTA
AEIEPVSA

SEQ ID NO: 100675 - protein, 8 aa, Homo sapiens
  misc_feature: Table A; Target 100675; HLA-B*37:01; ZFP42; ENSG00000179059; CTA
AEIEPVSA

SEQ ID NO: 100676 - protein, 8 aa, Homo sapiens
  misc_feature: Table A; Target 100676; HLA-B*40:01; ZFP42; ENSG00000179059; CTA
AEIEPVSA

SEQ ID NO: 100677 - protein, 8 aa, Homo sapiens
  misc_feature: Table A; Target 100677; HLA-B*40:02; ZFP42; ENSG00000179059; CTA
AEIEPVSA

SEQ ID NO: 100678 - protein, 8 aa, Homo sapiens
  misc_feature: Table A; Target 100678; HLA-B*49:01; ZFP42; ENSG00000179059; CTA
AEIEPVSA

SEQ ID NO: 100679 - protein, 9 aa, Homo sapiens
  misc_feature: Table A; Target 100679; HLA-A*02:01; ZFP42; ENSG00000179059; CTA
AEIEPVSAV

SEQ ID NO: 100680 - protein, 9 aa, Homo sapiens
  misc_feature: Table A; Target 100680; HLA-A*02:03; ZFP42; ENSG00000179059; CTA
AEIEPVSAV

SEQ ID NO: 100681 - protein, 9 aa, Homo sapiens
  misc_feature: Table A; Target 100681; HLA-A*30:01; ZFP42; ENSG00000179059; CTA
AEIEPVSAV

SEQ ID NO: 100682 - protein, 9 aa, Homo sapiens
  misc_feature: Table A; Target 100682; HLA-B*13:02; ZFP42; ENSG00000179059; CTA
AEIEPVSAV

SEQ ID NO: 100683 - protein, 9 aa, Homo sapiens
  misc_feature: Table A; Target 100683; HLA-B*15:01; ZFP42; ENSG00000179059; CTA
AEIEPVSAV

SEQ ID NO: 100684 - protein, 9 aa, Homo sapiens
  misc_feature: Table A; Target 100684; HLA-B*18:01; ZFP42; ENSG00000179059; CTA
AEIEPVSAV

SEQ ID NO: 100685 - protein, 9 aa, Homo sapiens
  misc_feature: Table A; Target 100685; HLA-B*27:02; ZFP42; ENSG00000179059; CTA
AEIEPVSAV

SEQ ID NO: 100686 - protein, 9 aa, Homo sapiens
  misc_feature: Table A; Target 100686; HLA-B*27:05; ZFP42; ENSG00000179059; CTA
AEIEPVSAV

SEQ ID NO: 100687 - protein, 9 aa, Homo sapiens
  misc_feature: Table A; Target 100687; HLA-B*37:01; ZFP42; ENSG00000179059; CTA
AEIEPVSAV

SEQ ID NO: 100688 - protein, 9 aa, Homo sapiens
  misc_feature: Table A; Target 100688; HLA-B*40:01; ZFP42; ENSG00000179059; CTA
AEIEPVSAV

SEQ ID NO: 100689 - protein, 9 aa, Homo sapiens
  misc_feature: Table A; Target 100689; HLA-B*40:02; ZFP42; ENSG00000179059; CTA
AEIEPVSAV

SEQ ID NO: 100690 - protein, 9 aa, Homo sapiens
  misc_feature: Table A; Target 100690; HLA-B*44:02; ZFP42; ENSG00000179059; CTA
AEIEPVSAV

SEQ ID NO: 100691 - protein, 9 aa, Homo sapiens
  misc_feature: Table A; Target 100691; HLA-B*44:03; ZFP42; ENSG00000179059; CTA
AEIEPVSAV

SEQ ID NO: 100692 - protein, 9 aa, Homo sapiens
  misc_feature: Table A; Target 100692; HLA-B*56:01; ZFP42; ENSG00000179059; CTA
AEIEPVSAV

SEQ ID NO: 100693 - protein, 9 aa, Homo sapiens
  misc_feature: Table A; Target 100693; HLA-C*02:02; ZFP42; ENSG00000179059; CTA
AEIEPVSAV

SEQ ID NO: 100694 - protein, 9 aa, Homo sapiens
  misc_feature: Table A; Target 100694; HLA-C*03:04; ZFP42; ENSG00000179059; CTA
AEIEPVSAV

SEQ ID NO: 100695 - protein, 9 aa, Homo sapiens
  misc_feature: Table A; Target 100695; HLA-C*14:02; ZFP42; ENSG00000179059; CTA
AEIEPVSAV

SEQ ID NO: 100696 - protein, 9 aa, Homo sapiens
  misc_feature: Table A; Target 100696; HLA-C*16:04; ZFP42; ENSG00000179059; CTA
AEIEPVSAV

SEQ ID NO: 100697 - protein, 10 aa, Homo sapiens
  misc_feature: Table A; Target 100697; HLA-A*25:01; ZFP42; ENSG00000179059; CTA
AEIEPVSAVW

SEQ ID NO: 100698 - protein, 10 aa, Homo sapiens
  misc_feature: Table A; Target 100698; HLA-A*30:01; ZFP42; ENSG00000179059; CTA
AEIEPVSAVW

SEQ ID NO: 100699 - protein, 10 aa, Homo sapiens
  misc_feature: Table A; Target 100699; HLA-B*18:01; ZFP42; ENSG00000179059; CTA
AEIEPVSAVW

SEQ ID NO: 100700 - protein, 10 aa, Homo sapiens
  misc_feature: Table A; Target 100700; HLA-B*27:02; ZFP42; ENSG00000179059; CTA
AEIEPVSAVW

SEQ ID NO: 100701 - protein, 10 aa, Homo sapiens
  misc_feature: Table A; Target 100701; HLA-B*27:05; ZFP42; ENSG00000179059; CTA
AEIEPVSAVW

SEQ ID NO: 100702 - protein, 10 aa, Homo sapiens
  misc_feature: Table A; Target 100702; HLA-B*37:01; ZFP42; ENSG00000179059; CTA
AEIEPVSAVW

SEQ ID NO: 100703 - protein, 10 aa, Homo sapiens
  misc_feature: Table A; Target 100703; HLA-B*40:01; ZFP42; ENSG00000179059; CTA
AEIEPVSAVW

SEQ ID NO: 100704 - protein, 10 aa, Homo sapiens
  misc_feature: Table A; Target 100704; HLA-B*40:02; ZFP42; ENSG00000179059; CTA
AEIEPVSAVW

SEQ ID NO: 100705 - protein, 10 aa, Homo sapiens
  misc_feature: Table A; Target 100705; HLA-B*49:01; ZFP42; ENSG00000179059; CTA
AEIEPVSAVW

SEQ ID NO: 100706 - protein, 10 aa, Homo sapiens
  misc_feature: Table A; Target 100706; HLA-B*57:01; ZFP42; ENSG00000179059; CTA
AEIEPVSAVW

SEQ ID NO: 100707 - protein, 10 aa, Homo sapiens
  misc_feature: Table A; Target 100707; HLA-B*58:01; ZFP42; ENSG00000179059; CTA
AEIEPVSAVW

SEQ ID NO: 100708 - protein, 10 aa, Homo sapiens
  misc_feature: Table A; Target 100708; HLA-C*02:02; ZFP42; ENSG00000179059; CTA
AEIEPVSAVW

SEQ ID NO: 100709 - protein, 10 aa, Homo sapiens
  misc_feature: Table A; Target 100709; HLA-C*16:04; ZFP42; ENSG00000179059; CTA
AEIEPVSAVW

SEQ ID NO: 100710 - protein, 8 aa, Homo sapiens
  misc_feature: Table A; Target 100710; HLA-A*23:01; ZFP42; ENSG00000179059; CTA
AFVESSKL

SEQ ID NO: 100711 - protein, 8 aa, Homo sapiens
  misc_feature: Table A; Target 100711; HLA-C*01:02; ZFP42; ENSG00000179059; CTA
AFVESSKL

SEQ ID NO: 100712 - protein, 8 aa, Homo sapiens
  misc_feature: Table A; Target 100712; HLA-C*04:01; ZFP42; ENSG00000179059; CTA
AFVESSKL

SEQ ID NO: 100713 - protein, 8 aa, Homo sapiens
  misc_feature: Table A; Target 100713; HLA-C*14:02; ZFP42; ENSG00000179059; CTA
AFVESSKL

SEQ ID NO: 100714 - protein, 8 aa, Homo sapiens
  misc_feature: Table A; Target 100714; HLA-C*16:01; ZFP42; ENSG00000179059; CTA
AFVESSKL

SEQ ID NO: 100715 - protein, 9 aa, Homo sapiens
  misc_feature: Table A; Target 100715; HLA-A*03:01; ZFP42; ENSG00000179059; CTA
ALCDGYVCY

SEQ ID NO: 100716 - protein, 9 aa, Homo sapiens
  misc_feature: Table A; Target 100716; HLA-A*03:02; ZFP42; ENSG00000179059; CTA
ALCDGYVCY

SEQ ID NO: 100717 - protein, 9 aa, Homo sapiens
  misc_feature: Table A; Target 100717; HLA-A*25:01; ZFP42; ENSG00000179059; CTA
ALCDGYVCY

SEQ ID NO: 100718 - protein, 9 aa, Homo sapiens
  misc_feature: Table A; Target 100718; HLA-A*26:01; ZFP42; ENSG00000179059; CTA
ALCDGYVCY

SEQ ID NO: 100719 - protein, 9 aa, Homo sapiens
  misc_feature: Table A; Target 100719; HLA-A*29:02; ZFP42; ENSG00000179059; CTA
ALCDGYVCY

SEQ ID NO: 100720 - protein, 9 aa, Homo sapiens
  misc_feature: Table A; Target 100720; HLA-A*30:02; ZFP42; ENSG00000179059; CTA
ALCDGYVCY

SEQ ID NO: 100721 - protein, 9 aa, Homo sapiens
  misc_feature: Table A; Target 100721; HLA-B*15:01; ZFP42; ENSG00000179059; CTA
ALCDGYVCY

SEQ ID NO: 100722 - protein, 9 aa, Homo sapiens
  misc_feature: Table A; Target 100722; HLA-C*07:04; ZFP42; ENSG00000179059; CTA
ALCDGYVCY

SEQ ID NO: 100723 - protein, 10 aa, Homo sapiens
  misc_feature: Table A; Target 100723; HLA-B*07:02; ZFP42; ENSG00000179059; CTA
APSGAKPRQG

SEQ ID NO: 100724 - protein, 11 aa, Homo sapiens
  misc_feature: Table A; Target 100724; HLA-B*07:02; ZFP42; ENSG00000179059; CTA
APSGAKPRQGK

SEQ ID NO: 100725 - protein, 10 aa, Homo sapiens
  misc_feature: Table A; Target 100725; HLA-A*01:01; ZFP42; ENSG00000179059; CTA
ASSLECSLEY

SEQ ID NO: 100726 - protein, 10 aa, Homo sapiens
  misc_feature: Table A; Target 100726; HLA-A*30:02; ZFP42; ENSG00000179059; CTA
ASSLECSLEY

SEQ ID NO: 100727 - protein, 10 aa, Homo sapiens
  misc_feature: Table A; Target 100727; HLA-C*07:01; ZFP42; ENSG00000179059; CTA
ASSLECSLEY

SEQ ID NO: 100728 - protein, 9 aa, Homo sapiens
  misc_feature: Table A; Target 100728; HLA-A*29:02; ZFP42; ENSG00000179059; CTA
AVWALCDGY

SEQ ID NO: 100729 - protein, 9 aa, Homo sapiens
  misc_feature: Table A; Target 100729; HLA-A*30:02; ZFP42; ENSG00000179059; CTA
AVWALCDGY

SEQ ID NO: 100730 - protein, 9 aa, Homo sapiens
  misc_feature: Table A; Target 100730; HLA-A*23:01; ZFP42; ENSG00000179059; CTA
CYEPGPQAL

SEQ ID NO: 100731 - protein, 9 aa, Homo sapiens
  misc_feature: Table A; Target 100731; HLA-A*24:02; ZFP42; ENSG00000179059; CTA
CYEPGPQAL

SEQ ID NO: 100732 - protein, 9 aa, Homo sapiens
  misc_feature: Table A; Target 100732; HLA-A*32:01; ZFP42; ENSG00000179059; CTA
CYEPGPQAL

SEQ ID NO: 100733 - protein, 9 aa, Homo sapiens
  misc_feature: Table A; Target 100733; HLA-B*27:05; ZFP42; ENSG00000179059; CTA
CYEPGPQAL

SEQ ID NO: 100734 - protein, 9 aa, Homo sapiens
  misc_feature: Table A; Target 100734; HLA-B*35:03; ZFP42; ENSG00000179059; CTA
CYEPGPQAL

SEQ ID NO: 100735 - protein, 9 aa, Homo sapiens
  misc_feature: Table A; Target 100735; HLA-B*38:01; ZFP42; ENSG00000179059; CTA
CYEPGPQAL

SEQ ID NO: 100736 - protein, 9 aa, Homo sapiens
  misc_feature: Table A; Target 100736; HLA-C*01:02; ZFP42; ENSG00000179059; CTA
CYEPGPQAL

SEQ ID NO: 100737 - protein, 9 aa, Homo sapiens
  misc_feature: Table A; Target 100737; HLA-C*04:01; ZFP42; ENSG00000179059; CTA
CYEPGPQAL

SEQ ID NO: 100738 - protein, 9 aa, Homo sapiens
  misc_feature: Table A; Target 100738; HLA-C*07:02; ZFP42; ENSG00000179059; CTA
CYEPGPQAL

SEQ ID NO: 100739 - protein, 9 aa, Homo sapiens
  misc_feature: Table A; Target 100739; HLA-C*14:02; ZFP42; ENSG00000179059; CTA
CYEPGPQAL

SEQ ID NO: 100740 - protein, 9 aa, Homo sapiens
  misc_feature: Table A; Target 100740; HLA-C*16:02; ZFP42; ENSG00000179059; CTA
CYEPGPQAL

SEQ ID NO: 100741 - protein, 8 aa, Homo sapiens
  misc_feature: Table A; Target 100741; HLA-B*51:01; ZFP42; ENSG00000179059; CTA
DCYIECVI

SEQ ID NO: 100742 - protein, 9 aa, Homo sapiens
  misc_feature: Table A; Target 100742; HLA-A*33:01; ZFP42; ENSG00000179059; CTA
DCYIECVIR

SEQ ID NO: 100743 - protein, 8 aa, Homo sapiens
  misc_feature: Table A; Target 100743; HLA-B*08:01; ZFP42; ENSG00000179059; CTA
DFNLRTHV

SEQ ID NO: 100744 - protein, 9 aa, Homo sapiens
  misc_feature: Table A; Target 100744; HLA-A*33:01; ZFP42; ENSG00000179059; CTA
DFNLRTHVR

SEQ ID NO: 100745 - protein, 9 aa, Homo sapiens
  misc_feature: Table A; Target 100745; HLA-A*33:03; ZFP42; ENSG00000179059; CTA
DFNLRTHVR

SEQ ID NO: 100746 - protein, 11 aa, Homo sapiens
  misc_feature: Table A; Target 100746; HLA-A*25:01; ZFP42; ENSG00000179059; CTA
DLSDPKQLAEF

SEQ ID NO: 100747 - protein, 11 aa, Homo sapiens
  misc_feature: Table A; Target 100747; HLA-A*26:01; ZFP42; ENSG00000179059; CTA
DLSDPKQLAEF

SEQ ID NO: 100748 - protein, 8 aa, Homo sapiens
  misc_feature: Table A; Target 100748; HLA-A*25:01; ZFP42; ENSG00000179059; CTA
DPKQLAEF

SEQ ID NO: 100749 - protein, 8 aa, Homo sapiens
  misc_feature: Table A; Target 100749; HLA-B*08:01; ZFP42; ENSG00000179059; CTA
DPKQLAEF

SEQ ID NO: 100750 - protein, 9 aa, Homo sapiens
  misc_feature: Table A; Target 100750; HLA-B*54:01; ZFP42; ENSG00000179059; CTA
DPKQLAEFA

SEQ ID NO: 100751 - protein, 10 aa, Homo sapiens
  misc_feature: Table A; Target 100751; HLA-A*33:01; ZFP42; ENSG00000179059; CTA
DPKQLAEFAR

SEQ ID NO: 100752 - protein, 10 aa, Homo sapiens
  misc_feature: Table A; Target 100752; HLA-A*33:03; ZFP42; ENSG00000179059; CTA
DPKQLAEFAR

SEQ ID NO: 100753 - protein, 10 aa, Homo sapiens
  misc_feature: Table A; Target 100753; HLA-A*68:01; ZFP42; ENSG00000179059; CTA
DPKQLAEFAR

SEQ ID NO: 100754 - protein, 9 aa, Homo sapiens
  misc_feature: Table A; Target 100754; HLA-A*01:01; ZFP42; ENSG00000179059; CTA
DSLFESLEY

SEQ ID NO: 100755 - protein, 9 aa, Homo sapiens
  misc_feature: Table A; Target 100755; HLA-A*26:01; ZFP42; ENSG00000179059; CTA
DSLFESLEY

SEQ ID NO: 100756 - protein, 9 aa, Homo sapiens
  misc_feature: Table A; Target 100756; HLA-A*29:02; ZFP42; ENSG00000179059; CTA
DSLFESLEY

SEQ ID NO: 100757 - protein, 9 aa, Homo sapiens
  misc_feature: Table A; Target 100757; HLA-B*18:01; ZFP42; ENSG00000179059; CTA
DSLFESLEY

SEQ ID NO: 100758 - protein, 9 aa, Homo sapiens
  misc_feature: Table A; Target 100758; HLA-B*35:01; ZFP42; ENSG00000179059; CTA
DSLFESLEY

SEQ ID NO: 100759 - protein, 9 aa, Homo sapiens
  misc_feature: Table A; Target 100759; HLA-C*03:03; ZFP42; ENSG00000179059; CTA
DSLFESLEY

SEQ ID NO: 100760 - protein, 9 aa, Homo sapiens
  misc_feature: Table A; Target 100760; HLA-C*07:01; ZFP42; ENSG00000179059; CTA
DSLFESLEY

SEQ ID NO: 100761 - protein, 9 aa, Homo sapiens
  misc_feature: Table A; Target 100761; HLA-C*07:06; ZFP42; ENSG00000179059; CTA
DSLFESLEY

SEQ ID NO: 100762 - protein, 11 aa, Homo sapiens
  misc_feature: Table A; Target 100762; HLA-A*11:01; ZFP42; ENSG00000179059; CTA
DSLFESLEYLK

SEQ ID NO: 100763 - protein, 11 aa, Homo sapiens
  misc_feature: Table A; Target 100763; HLA-B*27:02; ZFP42; ENSG00000179059; CTA
DSLFESLEYLK

SEQ ID NO: 100764 - protein, 9 aa, Homo sapiens
  misc_feature: Table A; Target 100764; HLA-A*68:01; ZFP42; ENSG00000179059; CTA
EASSLECSL

SEQ ID NO: 100765 - protein, 9 aa, Homo sapiens
  misc_feature: Table A; Target 100765; HLA-B*35:01; ZFP42; ENSG00000179059; CTA
EASSLECSL

SEQ ID NO: 100766 - protein, 9 aa, Homo sapiens
  misc_feature: Table A; Target 100766; HLA-B*35:03; ZFP42; ENSG00000179059; CTA
EASSLECSL

SEQ ID NO: 100767 - protein, 9 aa, Homo sapiens
  misc_feature: Table A; Target 100767; HLA-B*38:01; ZFP42; ENSG00000179059; CTA
EASSLECSL

SEQ ID NO: 100768 - protein, 9 aa, Homo sapiens
  misc_feature: Table A; Target 100768; HLA-B*39:01; ZFP42; ENSG00000179059; CTA
EASSLECSL

SEQ ID NO: 100769 - protein, 9 aa, Homo sapiens
  misc_feature: Table A; Target 100769; HLA-C*07:06; ZFP42; ENSG00000179059; CTA
EASSLECSL

SEQ ID NO: 100770 - protein, 11 aa, Homo sapiens
  misc_feature: Table A; Target 100770; HLA-A*26:01; ZFP42; ENSG00000179059; CTA
EASSLECSLEY

SEQ ID NO: 100771 - protein, 11 aa, Homo sapiens
  misc_feature: Table A; Target 100771; HLA-C*07:01; ZFP42; ENSG00000179059; CTA
EASSLECSLEY

SEQ ID NO: 100772 - protein, 8 aa, Homo sapiens
  misc_feature: Table A; Target 100772; HLA-B*37:01; ZFP42; ENSG00000179059; CTA
EDSLFESL

SEQ ID NO: 100773 - protein, 10 aa, Homo sapiens
  misc_feature: Table A; Target 100773; HLA-B*27:02; ZFP42; ENSG00000179059; CTA
EDSLFESLEY

SEQ ID NO: 100774 - protein, 9 aa, Homo sapiens
  misc_feature: Table A; Target 100774; HLA-A*30:01; ZFP42; ENSG00000179059; CTA
EEDSLFESL

SEQ ID NO: 100775 - protein, 9 aa, Homo sapiens
  misc_feature: Table A; Target 100775; HLA-B*18:01; ZFP42; ENSG00000179059; CTA
EEDSLFESL

SEQ ID NO: 100776 - protein, 9 aa, Homo sapiens
  misc_feature: Table A; Target 100776; HLA-B*38:01; ZFP42; ENSG00000179059; CTA
EEDSLFESL

SEQ ID NO: 100777 - protein, 9 aa, Homo sapiens
  misc_feature: Table A; Target 100777; HLA-B*39:01; ZFP42; ENSG00000179059; CTA
EEDSLFESL

SEQ ID NO: 100778 - protein, 9 aa, Homo sapiens
  misc_feature: Table A; Target 100778; HLA-B*40:01; ZFP42; ENSG00000179059; CTA
EEDSLFESL

SEQ ID NO: 100779 - protein, 9 aa, Homo sapiens
  misc_feature: Table A; Target 100779; HLA-B*44:02; ZFP42; ENSG00000179059; CTA
EEDSLFESL

SEQ ID NO: 100780 - protein, 9 aa, Homo sapiens
  misc_feature: Table A; Target 100780; HLA-B*44:03; ZFP42; ENSG00000179059; CTA
EEDSLFESL

SEQ ID NO: 100781 - protein, 9 aa, Homo sapiens
  misc_feature: Table A; Target 100781; HLA-B*49:01; ZFP42; ENSG00000179059; CTA
EEDSLFESL

SEQ ID NO: 100782 - protein, 11 aa, Homo sapiens
  misc_feature: Table A; Target 100782; HLA-B*18:01; ZFP42; ENSG00000179059; CTA
EEDSLFESLEY

SEQ ID NO: 100783 - protein, 11 aa, Homo sapiens
  misc_feature: Table A; Target 100783; HLA-B*44:02; ZFP42; ENSG00000179059; CTA
EEDSLFESLEY

SEQ ID NO: 100784 - protein, 11 aa, Homo sapiens
  misc_feature: Table A; Target 100784; HLA-B*44:03; ZFP42; ENSG00000179059; CTA
EEDSLFESLEY

SEQ ID NO: 100785 - protein, 9 aa, Homo sapiens
  misc_feature: Table A; Target 100785; HLA-B*08:01; ZFP42; ENSG00000179059; CTA
EGCGKRFSL

SEQ ID NO: 100786 - protein, 8 aa, Homo sapiens
  misc_feature: Table A; Target 100786; HLA-C*05:01; ZFP42; ENSG00000179059; CTA
EIEPVSAV

SEQ ID NO: 100787 - protein, 9 aa, Homo sapiens
  misc_feature: Table A; Target 100787; HLA-A*25:01; ZFP42; ENSG00000179059; CTA
EIEPVSAVW

SEQ ID NO: 100788 - protein, 9 aa, Homo sapiens
  misc_feature: Table A; Target 100788; HLA-A*26:01; ZFP42; ENSG00000179059; CTA
EIEPVSAVW

SEQ ID NO: 100789 - protein, 9 aa, Homo sapiens
  misc_feature: Table A; Target 100789; HLA-A*32:01; ZFP42; ENSG00000179059; CTA
EIEPVSAVW

SEQ ID NO: 100790 - protein, 9 aa, Homo sapiens
  misc_feature: Table A; Target 100790; HLA-A*33:03; ZFP42; ENSG00000179059; CTA
EIEPVSAVW

SEQ ID NO: 100791 - protein, 9 aa, Homo sapiens
  misc_feature: Table A; Target 100791; HLA-B*18:01; ZFP42; ENSG00000179059; CTA
EIEPVSAVW

SEQ ID NO: 100792 - protein, 9 aa, Homo sapiens
  misc_feature: Table A; Target 100792; HLA-B*38:01; ZFP42; ENSG00000179059; CTA
EIEPVSAVW

SEQ ID NO: 100793 - protein, 9 aa, Homo sapiens
  misc_feature: Table A; Target 100793; HLA-B*39:01; ZFP42; ENSG00000179059; CTA
EIEPVSAVW

SEQ ID NO: 100794 - protein, 9 aa, Homo sapiens
  misc_feature: Table A; Target 100794; HLA-B*44:02; ZFP42; ENSG00000179059; CTA
EIEPVSAVW

SEQ ID NO: 100795 - protein, 9 aa, Homo sapiens
  misc_feature: Table A; Target 100795; HLA-B*44:03; ZFP42; ENSG00000179059; CTA
EIEPVSAVW

SEQ ID NO: 100796 - protein, 9 aa, Homo sapiens
  misc_feature: Table A; Target 100796; HLA-B*57:01; ZFP42; ENSG00000179059; CTA
EIEPVSAVW

SEQ ID NO: 100797 - protein, 9 aa, Homo sapiens
  misc_feature: Table A; Target 100797; HLA-B*58:01; ZFP42; ENSG00000179059; CTA
EIEPVSAVW

SEQ ID NO: 100798 - protein, 9 aa, Homo sapiens
  misc_feature: Table A; Target 100798; HLA-C*07:04; ZFP42; ENSG00000179059; CTA
EIEPVSAVW

SEQ ID NO: 100799 - protein, 9 aa, Homo sapiens
  misc_feature: Table A; Target 100799; HLA-C*07:06; ZFP42; ENSG00000179059; CTA
EIEPVSAVW

SEQ ID NO: 100800 - protein, 9 aa, Homo sapiens
  misc_feature: Table A; Target 100800; HLA-C*16:04; ZFP42; ENSG00000179059; CTA
EIEPVSAVW

SEQ ID NO: 100801 - protein, 11 aa, Homo sapiens
  misc_feature: Table A; Target 100801; HLA-A*68:02; ZFP42; ENSG00000179059; CTA
EIEPVSAVWAL

SEQ ID NO: 100802 - protein, 9 aa, Homo sapiens
  misc_feature: Table A; Target 100802; HLA-A*01:01; ZFP42; ENSG00000179059; CTA
ENSLEYSEY

SEQ ID NO: 100803 - protein, 9 aa, Homo sapiens
  misc_feature: Table A; Target 100803; HLA-A*25:01; ZFP42; ENSG00000179059; CTA
ENSLEYSEY

SEQ ID NO: 100804 - protein, 9 aa, Homo sapiens
  misc_feature: Table A; Target 100804; HLA-A*26:01; ZFP42; ENSG00000179059; CTA
ENSLEYSEY

SEQ ID NO: 100805 - protein, 9 aa, Homo sapiens
  misc_feature: Table A; Target 100805; HLA-A*26:01; ZFP42; ENSG00000179059; CTA
EPVSAVWAL

SEQ ID NO: 100806 - protein, 9 aa, Homo sapiens
  misc_feature: Table A; Target 100806; HLA-A*33:03; ZFP42; ENSG00000179059; CTA
EPVSAVWAL

SEQ ID NO: 100807 - protein, 9 aa, Homo sapiens
  misc_feature: Table A; Target 100807; HLA-A*68:01; ZFP42; ENSG00000179059; CTA
EPVSAVWAL

SEQ ID NO: 100808 - protein, 9 aa, Homo sapiens
  misc_feature: Table A; Target 100808; HLA-A*68:02; ZFP42; ENSG00000179059; CTA
EPVSAVWAL

SEQ ID NO: 100809 - protein, 9 aa, Homo sapiens
  misc_feature: Table A; Target 100809; HLA-B*07:02; ZFP42; ENSG00000179059; CTA
EPVSAVWAL

SEQ ID NO: 100810 - protein, 9 aa, Homo sapiens
  misc_feature: Table A; Target 100810; HLA-B*35:01; ZFP42; ENSG00000179059; CTA
EPVSAVWAL

SEQ ID NO: 100811 - protein, 9 aa, Homo sapiens
  misc_feature: Table A; Target 100811; HLA-B*54:01; ZFP42; ENSG00000179059; CTA
EPVSAVWAL

SEQ ID NO: 100812 - protein, 9 aa, Homo sapiens
  misc_feature: Table A; Target 100812; HLA-B*55:01; ZFP42; ENSG00000179059; CTA
EPVSAVWAL

SEQ ID NO: 100813 - protein, 9 aa, Homo sapiens
  misc_feature: Table A; Target 100813; HLA-B*56:01; ZFP42; ENSG00000179059; CTA
EPVSAVWAL

SEQ ID NO: 100814 - protein, 9 aa, Homo sapiens
  misc_feature: Table A; Target 100814; HLA-C*07:02; ZFP42; ENSG00000179059; CTA
EPVSAVWAL

SEQ ID NO: 100815 - protein, 9 aa, Homo sapiens
  misc_feature: Table A; Target 100815; HLA-C*07:06; ZFP42; ENSG00000179059; CTA
EPVSAVWAL

SEQ ID NO: 100816 - protein, 8 aa, Homo sapiens
  misc_feature: Table A; Target 100816; HLA-B*13:02; ZFP42; ENSG00000179059; CTA
EQQLSQKV

SEQ ID NO: 100817 - protein, 9 aa, Homo sapiens
  misc_feature: Table A; Target 100817; HLA-B*15:01; ZFP42; ENSG00000179059; CTA
EQQLSQKVF

SEQ ID NO: 100818 - protein, 9 aa, Homo sapiens
  misc_feature: Table A; Target 100818; HLA-B*15:03; ZFP42; ENSG00000179059; CTA
EQQLSQKVF

SEQ ID NO: 100819 - protein, 9 aa, Homo sapiens
  misc_feature: Table A; Target 100819; HLA-B*27:02; ZFP42; ENSG00000179059; CTA
EQQLSQKVF

SEQ ID NO: 100820 - protein, 9 aa, Homo sapiens
  misc_feature: Table A; Target 100820; HLA-B*44:02; ZFP42; ENSG00000179059; CTA
EQQLSQKVF

SEQ ID NO: 100821 - protein, 9 aa, Homo sapiens
  misc_feature: Table A; Target 100821; HLA-B*44:03; ZFP42; ENSG00000179059; CTA
EQQLSQKVF

SEQ ID NO: 100822 - protein, 9 aa, Homo sapiens
  misc_feature: Table A; Target 100822; HLA-C*07:04; ZFP42; ENSG00000179059; CTA
EQQLSQKVF

SEQ ID NO: 100823 - protein, 9 aa, Homo sapiens
  misc_feature: Table A; Target 100823; HLA-C*16:04; ZFP42; ENSG00000179059; CTA
EQQLSQKVF

SEQ ID NO: 100824 - protein, 8 aa, Homo sapiens
  misc_feature: Table A; Target 100824; HLA-C*04:01; ZFP42; ENSG00000179059; CTA
EYDSLSAI

SEQ ID NO: 100825 - protein, 8 aa, Homo sapiens
  misc_feature: Table A; Target 100825; HLA-C*05:01; ZFP42; ENSG00000179059; CTA
EYDSLSAI

SEQ ID NO: 100826 - protein, 11 aa, Homo sapiens
  misc_feature: Table A; Target 100826; HLA-A*23:01; ZFP42; ENSG00000179059; CTA
EYLKKGSEQQL

SEQ ID NO: 100827 - protein, 11 aa, Homo sapiens
  misc_feature: Table A; Target 100827; HLA-A*24:02; ZFP42; ENSG00000179059; CTA
EYLKKGSEQQL

SEQ ID NO: 100828 - protein, 11 aa, Homo sapiens
  misc_feature: Table A; Target 100828; HLA-A*33:01; ZFP42; ENSG00000179059; CTA
EYLKKGSEQQL

SEQ ID NO: 100829 - protein, 11 aa, Homo sapiens
  misc_feature: Table A; Target 100829; HLA-A*33:03; ZFP42; ENSG00000179059; CTA
EYLKKGSEQQL

SEQ ID NO: 100830 - protein, 8 aa, Homo sapiens
  misc_feature: Table A; Target 100830; HLA-C*04:01; ZFP42; ENSG00000179059; CTA
EYMKKGVK

SEQ ID NO: 100831 - protein, 9 aa, Homo sapiens
  misc_feature: Table A; Target 100831; HLA-A*33:01; ZFP42; ENSG00000179059; CTA
EYMKKGVKK

SEQ ID NO: 100832 - protein, 9 aa, Homo sapiens
  misc_feature: Table A; Target 100832; HLA-A*33:03; ZFP42; ENSG00000179059; CTA
EYMKKGVKK

SEQ ID NO: 100833 - protein, 8 aa, Homo sapiens
  misc_feature: Table A; Target 100833; HLA-A*23:01; ZFP42; ENSG00000179059; CTA
EYMTGKKL

SEQ ID NO: 100834 - protein, 8 aa, Homo sapiens
  misc_feature: Table A; Target 100834; HLA-A*24:02; ZFP42; ENSG00000179059; CTA
EYMTGKKL

SEQ ID NO: 100835 - protein, 8 aa, Homo sapiens
  misc_feature: Table A; Target 100835; HLA-B*08:01; ZFP42; ENSG00000179059; CTA
EYMTGKKL

SEQ ID NO: 100836 - protein, 8 aa, Homo sapiens
  misc_feature: Table A; Target 100836; HLA-C*07:01; ZFP42; ENSG00000179059; CTA
EYMTGKKL

SEQ ID NO: 100837 - protein, 8 aa, Homo sapiens
  misc_feature: Table A; Target 100837; HLA-C*14:02; ZFP42; ENSG00000179059; CTA
EYMTGKKL

SEQ ID NO: 100838 - protein, 9 aa, Homo sapiens
  misc_feature: Table A; Target 100838; HLA-A*03:02; ZFP42; ENSG00000179059; CTA
EYSEYMTGK

SEQ ID NO: 100839 - protein, 9 aa, Homo sapiens
  misc_feature: Table A; Target 100839; HLA-A*11:01; ZFP42; ENSG00000179059; CTA
EYSEYMTGK

SEQ ID NO: 100840 - protein, 9 aa, Homo sapiens
  misc_feature: Table A; Target 100840; HLA-A*26:01; ZFP42; ENSG00000179059; CTA
EYSEYMTGK

SEQ ID NO: 100841 - protein, 9 aa, Homo sapiens
  misc_feature: Table A; Target 100841; HLA-A*31:01; ZFP42; ENSG00000179059; CTA
EYSEYMTGK

SEQ ID NO: 100842 - protein, 9 aa, Homo sapiens
  misc_feature: Table A; Target 100842; HLA-A*33:01; ZFP42; ENSG00000179059; CTA
EYSEYMTGK

SEQ ID NO: 100843 - protein, 9 aa, Homo sapiens
  misc_feature: Table A; Target 100843; HLA-A*68:01; ZFP42; ENSG00000179059; CTA
EYSEYMTGK

SEQ ID NO: 100844 - protein, 9 aa, Homo sapiens
  misc_feature: Table A; Target 100844; HLA-B*27:02; ZFP42; ENSG00000179059; CTA
EYSEYMTGK

SEQ ID NO: 100845 - protein, 9 aa, Homo sapiens
  misc_feature: Table A; Target 100845; HLA-B*27:05; ZFP42; ENSG00000179059; CTA
EYSEYMTGK

SEQ ID NO: 100846 - protein, 9 aa, Homo sapiens
  misc_feature: Table A; Target 100846; HLA-C*07:01; ZFP42; ENSG00000179059; CTA
EYSEYMTGK

SEQ ID NO: 100847 - protein, 9 aa, Homo sapiens
  misc_feature: Table A; Target 100847; HLA-C*07:06; ZFP42; ENSG00000179059; CTA
EYSEYMTGK

SEQ ID NO: 100848 - protein, 10 aa, Homo sapiens
  misc_feature: Table A; Target 100848; HLA-C*07:02; ZFP42; ENSG00000179059; CTA
EYSEYMTGKK

SEQ ID NO: 100849 - protein, 11 aa, Homo sapiens
  misc_feature: Table A; Target 100849; HLA-A*24:02; ZFP42; ENSG00000179059; CTA
EYSEYMTGKKL

SEQ ID NO: 100850 - protein, 8 aa, Homo sapiens
  misc_feature: Table A; Target 100850; HLA-A*30:01; ZFP42; ENSG00000179059; CTA
FEASSLEC

SEQ ID NO: 100851 - protein, 8 aa, Homo sapiens
  misc_feature: Table A; Target 100851; HLA-B*49:01; ZFP42; ENSG00000179059; CTA
FEASSLEC

SEQ ID NO: 100852 - protein, 10 aa, Homo sapiens
  misc_feature: Table A; Target 100852; HLA-A*30:01; ZFP42; ENSG00000179059; CTA
FEASSLECSL

SEQ ID NO: 100853 - protein, 10 aa, Homo sapiens
  misc_feature: Table A; Target 100853; HLA-B*18:01; ZFP42; ENSG00000179059; CTA
FEASSLECSL

SEQ ID NO: 100854 - protein, 10 aa, Homo sapiens
  misc_feature: Table A; Target 100854; HLA-B*40:01; ZFP42; ENSG00000179059; CTA
FEASSLECSL

SEQ ID NO: 100855 - protein, 10 aa, Homo sapiens
  misc_feature: Table A; Target 100855; HLA-B*40:02; ZFP42; ENSG00000179059; CTA
FEASSLECSL

SEQ ID NO: 100856 - protein, 10 aa, Homo sapiens
  misc_feature: Table A; Target 100856; HLA-B*49:01; ZFP42; ENSG00000179059; CTA
FEASSLECSL

SEQ ID NO: 100857 - protein, 8 aa, Homo sapiens
  misc_feature: Table A; Target 100857; HLA-B*27:02; ZFP42; ENSG00000179059; CTA
FESLEYLK

SEQ ID NO: 100858 - protein, 8 aa, Homo sapiens
  misc_feature: Table A; Target 100858; HLA-A*03:02; ZFP42; ENSG00000179059; CTA
FIQSNNLK

SEQ ID NO: 100859 - protein, 9 aa, Homo sapiens
  misc_feature: Table A; Target 100859; HLA-A*01:01; ZFP42; ENSG00000179059; CTA
FSDCYIECV

SEQ ID NO: 100860 - protein, 10 aa, Homo sapiens
  misc_feature: Table A; Target 100860; HLA-A*31:01; ZFP42; ENSG00000179059; CTA
FVCPFQGCNR

SEQ ID NO: 100861 - protein, 9 aa, Homo sapiens
  misc_feature: Table A; Target 100861; HLA-A*33:01; ZFP42; ENSG00000179059; CTA
FVESSKLKR

SEQ ID NO: 100862 - protein, 9 aa, Homo sapiens
  misc_feature: Table A; Target 100862; HLA-A*33:03; ZFP42; ENSG00000179059; CTA
FVESSKLKR

SEQ ID NO: 100863 - protein, 9 aa, Homo sapiens
  misc_feature: Table A; Target 100863; HLA-A*68:01; ZFP42; ENSG00000179059; CTA
FVESSKLKR

SEQ ID NO: 100864 - protein, 8 aa, Homo sapiens
  misc_feature: Table A; Target 100864; HLA-A*30:01; ZFP42; ENSG00000179059; CTA
GEFSQPIL

SEQ ID NO: 100865 - protein, 8 aa, Homo sapiens
  misc_feature: Table A; Target 100865; HLA-B*18:01; ZFP42; ENSG00000179059; CTA
GEFSQPIL

SEQ ID NO: 100866 - protein, 8 aa, Homo sapiens
  misc_feature: Table A; Target 100866; HLA-B*27:05; ZFP42; ENSG00000179059; CTA
GEFSQPIL

SEQ ID NO: 100867 - protein, 8 aa, Homo sapiens
  misc_feature: Table A; Target 100867; HLA-B*37:01; ZFP42; ENSG00000179059; CTA
GEFSQPIL

SEQ ID NO: 100868 - protein, 8 aa, Homo sapiens
  misc_feature: Table A; Target 100868; HLA-B*40:01; ZFP42; ENSG00000179059; CTA
GEFSQPIL

SEQ ID NO: 100869 - protein, 8 aa, Homo sapiens
  misc_feature: Table A; Target 100869; HLA-B*40:02; ZFP42; ENSG00000179059; CTA
GEFSQPIL

SEQ ID NO: 100870 - protein, 8 aa, Homo sapiens
  misc_feature: Table A; Target 100870; HLA-B*44:03; ZFP42; ENSG00000179059; CTA
GEFSQPIL

SEQ ID NO: 100871 - protein, 8 aa, Homo sapiens
  misc_feature: Table A; Target 100871; HLA-B*49:01; ZFP42; ENSG00000179059; CTA
GEFSQPIL

SEQ ID NO: 100872 - protein, 8 aa, Homo sapiens
  misc_feature: Table A; Target 100872; HLA-C*16:04; ZFP42; ENSG00000179059; CTA
GEFSQPIL

SEQ ID NO: 100873 - protein, 9 aa, Homo sapiens
  misc_feature: Table A; Target 100873; HLA-B*37:01; ZFP42; ENSG00000179059; CTA
GEKPFRCTF

SEQ ID NO: 100874 - protein, 9 aa, Homo sapiens
  misc_feature: Table A; Target 100874; HLA-B*40:02; ZFP42; ENSG00000179059; CTA
GEKPFRCTF

SEQ ID NO: 100875 - protein, 9 aa, Homo sapiens
  misc_feature: Table A; Target 100875; HLA-B*44:02; ZFP42; ENSG00000179059; CTA
GEKPFRCTF

SEQ ID NO: 100876 - protein, 9 aa, Homo sapiens
  misc_feature: Table A; Target 100876; HLA-B*44:03; ZFP42; ENSG00000179059; CTA
GEKPFRCTF

SEQ ID NO: 100877 - protein, 10 aa, Homo sapiens
  misc_feature: Table A; Target 100877; HLA-A*26:01; ZFP42; ENSG00000179059; CTA
GENSLEYSEY

SEQ ID NO: 100878 - protein, 10 aa, Homo sapiens
  misc_feature: Table A; Target 100878; HLA-A*29:02; ZFP42; ENSG00000179059; CTA
GENSLEYSEY

SEQ ID NO: 100879 - protein, 10 aa, Homo sapiens
  misc_feature: Table A; Target 100879; HLA-A*30:02; ZFP42; ENSG00000179059; CTA
GENSLEYSEY

SEQ ID NO: 100880 - protein, 10 aa, Homo sapiens
  misc_feature: Table A; Target 100880; HLA-B*15:01; ZFP42; ENSG00000179059; CTA
GENSLEYSEY

SEQ ID NO: 100881 - protein, 10 aa, Homo sapiens
  misc_feature: Table A; Target 100881; HLA-B*15:03; ZFP42; ENSG00000179059; CTA
GENSLEYSEY

SEQ ID NO: 100882 - protein, 10 aa, Homo sapiens
  misc_feature: Table A; Target 100882; HLA-B*18:01; ZFP42; ENSG00000179059; CTA
GENSLEYSEY

SEQ ID NO: 100883 - protein, 10 aa, Homo sapiens
  misc_feature: Table A; Target 100883; HLA-B*27:02; ZFP42; ENSG00000179059; CTA
GENSLEYSEY

SEQ ID NO: 100884 - protein, 10 aa, Homo sapiens
  misc_feature: Table A; Target 100884; HLA-B*27:05; ZFP42; ENSG00000179059; CTA
GENSLEYSEY

SEQ ID NO: 100885 - protein, 10 aa, Homo sapiens
  misc_feature: Table A; Target 100885; HLA-B*39:01; ZFP42; ENSG00000179059; CTA
GENSLEYSEY

SEQ ID NO: 100886 - protein, 10 aa, Homo sapiens
  misc_feature: Table A; Target 100886; HLA-B*40:01; ZFP42; ENSG00000179059; CTA
GENSLEYSEY

SEQ ID NO: 100887 - protein, 10 aa, Homo sapiens
  misc_feature: Table A; Target 100887; HLA-B*44:02; ZFP42; ENSG00000179059; CTA
GENSLEYSEY

SEQ ID NO: 100888 - protein, 10 aa, Homo sapiens
  misc_feature: Table A; Target 100888; HLA-B*44:03; ZFP42; ENSG00000179059; CTA
GENSLEYSEY

SEQ ID NO: 100889 - protein, 10 aa, Homo sapiens
  misc_feature: Table A; Target 100889; HLA-B*49:01; ZFP42; ENSG00000179059; CTA
GENSLEYSEY

SEQ ID NO: 100890 - protein, 10 aa, Homo sapiens
  misc_feature: Table A; Target 100890; HLA-C*07:01; ZFP42; ENSG00000179059; CTA
GENSLEYSEY

SEQ ID NO: 100891 - protein, 10 aa, Homo sapiens
  misc_feature: Table A; Target 100891; HLA-C*16:04; ZFP42; ENSG00000179059; CTA
GENSLEYSEY

SEQ ID NO: 100892 - protein, 9 aa, Homo sapiens
  misc_feature: Table A; Target 100892; HLA-A*01:01; ZFP42; ENSG00000179059; CTA
GGDDFSDCY

SEQ ID NO: 100893 - protein, 10 aa, Homo sapiens
  misc_feature: Table A; Target 100893; HLA-C*06:02; ZFP42; ENSG00000179059; CTA
GGRAPSGAKP

SEQ ID NO: 100894 - protein, 11 aa, Homo sapiens
  misc_feature: Table A; Target 100894; HLA-A*31:01; ZFP42; ENSG00000179059; CTA
GGRAPSGAKPR

SEQ ID NO: 100895 - protein, 11 aa, Homo sapiens
  misc_feature: Table A; Target 100895; HLA-A*33:01; ZFP42; ENSG00000179059; CTA
GGRAPSGAKPR

SEQ ID NO: 100896 - protein, 10 aa, Homo sapiens
  misc_feature: Table A; Target 100896; HLA-B*15:03; ZFP42; ENSG00000179059; CTA
GKAFVESSKL

SEQ ID NO: 100897 - protein, 10 aa, Homo sapiens
  misc_feature: Table A; Target 100897; HLA-A*02:03; ZFP42; ENSG00000179059; CTA
GLGGRAPSGA

SEQ ID NO: 100898 - protein, 10 aa, Homo sapiens
  misc_feature: Table A; Target 100898; HLA-B*39:01; ZFP42; ENSG00000179059; CTA
GPQALGGDDF

SEQ ID NO: 100899 - protein, 9 aa, Homo sapiens
  misc_feature: Table A; Target 100899; HLA-B*27:05; ZFP42; ENSG00000179059; CTA
GRAPSGAKP

SEQ ID NO: 100900 - protein, 9 aa, Homo sapiens
  misc_feature: Table A; Target 100900; HLA-C*06:02; ZFP42; ENSG00000179059; CTA
GRAPSGAKP

SEQ ID NO: 100901 - protein, 10 aa, Homo sapiens
  misc_feature: Table A; Target 100901; HLA-B*27:05; ZFP42; ENSG00000179059; CTA
GRAPSGAKPR

SEQ ID NO: 100902 - protein, 10 aa, Homo sapiens
  misc_feature: Table A; Target 100902; HLA-C*06:02; ZFP42; ENSG00000179059; CTA
GRAPSGAKPR

SEQ ID NO: 100903 - protein, 10 aa, Homo sapiens
  misc_feature: Table A; Target 100903; HLA-C*07:02; ZFP42; ENSG00000179059; CTA
GRAPSGAKPR

SEQ ID NO: 100904 - protein, 9 aa, Homo sapiens
  misc_feature: Table A; Target 100904; HLA-A*03:02; ZFP42; ENSG00000179059; CTA
GSEQQLSQK

SEQ ID NO: 100905 - protein, 9 aa, Homo sapiens
  misc_feature: Table A; Target 100905; HLA-A*11:01; ZFP42; ENSG00000179059; CTA
GSEQQLSQK

SEQ ID NO: 100906 - protein, 11 aa, Homo sapiens
  misc_feature: Table A; Target 100906; HLA-B*58:01; ZFP42; ENSG00000179059; CTA
GSEQQLSQKVF

SEQ ID NO: 100907 - protein, 11 aa, Homo sapiens
  misc_feature: Table A; Target 100907; HLA-C*07:01; ZFP42; ENSG00000179059; CTA
GSEQQLSQKVF

SEQ ID NO: 100908 - protein, 9 aa, Homo sapiens
  misc_feature: Table A; Target 100908; HLA-A*03:01; ZFP42; ENSG00000179059; CTA
GVKKELPQK

SEQ ID NO: 100909 - protein, 9 aa, Homo sapiens
  misc_feature: Table A; Target 100909; HLA-A*03:02; ZFP42; ENSG00000179059; CTA
GVKKELPQK

SEQ ID NO: 100910 - protein, 9 aa, Homo sapiens
  misc_feature: Table A; Target 100910; HLA-A*11:01; ZFP42; ENSG00000179059; CTA
GVKKELPQK

SEQ ID NO: 100911 - protein, 10 aa, Homo sapiens
  misc_feature: Table A; Target 100911; HLA-A*03:01; ZFP42; ENSG00000179059; CTA
HILTHANTNK

SEQ ID NO: 100912 - protein, 10 aa, Homo sapiens
  misc_feature: Table A; Target 100912; HLA-A*03:02; ZFP42; ENSG00000179059; CTA
HILTHANTNK

SEQ ID NO: 100913 - protein, 10 aa, Homo sapiens
  misc_feature: Table A; Target 100913; HLA-A*11:01; ZFP42; ENSG00000179059; CTA
HILTHANTNK

SEQ ID NO: 100914 - protein, 9 aa, Homo sapiens
  misc_feature: Table A; Target 100914; HLA-C*04:01; ZFP42; ENSG00000179059; CTA
IACPQSGCT

SEQ ID NO: 100915 - protein, 9 aa, Homo sapiens
  misc_feature: Table A; Target 100915; HLA-C*07:01; ZFP42; ENSG00000179059; CTA
IACPQSGCT

SEQ ID NO: 100916 - protein, 10 aa, Homo sapiens
  misc_feature: Table A; Target 100916; HLA-A*31:01; ZFP42; ENSG00000179059; CTA
IACPQSGCTR

SEQ ID NO: 100917 - protein, 10 aa, Homo sapiens
  misc_feature: Table A; Target 100917; HLA-A*33:01; ZFP42; ENSG00000179059; CTA
IACPQSGCTR

SEQ ID NO: 100918 - protein, 10 aa, Homo sapiens
  misc_feature: Table A; Target 100918; HLA-A*33:03; ZFP42; ENSG00000179059; CTA
IACPQSGCTR

SEQ ID NO: 100919 - protein, 10 aa, Homo sapiens
  misc_feature: Table A; Target 100919; HLA-A*68:01; ZFP42; ENSG00000179059; CTA
IACPQSGCTR

SEQ ID NO: 100920 - protein, 10 aa, Homo sapiens
  misc_feature: Table A; Target 100920; HLA-B*27:05; ZFP42; ENSG00000179059; CTA
IACPQSGCTR

SEQ ID NO: 100921 - protein, 10 aa, Homo sapiens
  misc_feature: Table A; Target 100921; HLA-C*04:01; ZFP42; ENSG00000179059; CTA
IACPQSGCTR

SEQ ID NO: 100922 - protein, 10 aa, Homo sapiens
  misc_feature: Table A; Target 100922; HLA-C*07:01; ZFP42; ENSG00000179059; CTA
IACPQSGCTR

SEQ ID NO: 100923 - protein, 10 aa, Homo sapiens
  misc_feature: Table A; Target 100923; HLA-C*07:06; ZFP42; ENSG00000179059; CTA
IACPQSGCTR

SEQ ID NO: 100924 - protein, 9 aa, Homo sapiens
  misc_feature: Table A; Target 100924; HLA-A*30:01; ZFP42; ENSG00000179059; CTA
IDLSDPKQL

SEQ ID NO: 100925 - protein, 9 aa, Homo sapiens
  misc_feature: Table A; Target 100925; HLA-B*07:02; ZFP42; ENSG00000179059; CTA
IDLSDPKQL

SEQ ID NO: 100926 - protein, 9 aa, Homo sapiens
  misc_feature: Table A; Target 100926; HLA-B*37:01; ZFP42; ENSG00000179059; CTA
IDLSDPKQL

SEQ ID NO: 100927 - protein, 9 aa, Homo sapiens
  misc_feature: Table A; Target 100927; HLA-B*40:01; ZFP42; ENSG00000179059; CTA
IDLSDPKQL

SEQ ID NO: 100928 - protein, 9 aa, Homo sapiens
  misc_feature: Table A; Target 100928; HLA-B*40:02; ZFP42; ENSG00000179059; CTA
IDLSDPKQL

SEQ ID NO: 100929 - protein, 9 aa, Homo sapiens
  misc_feature: Table A; Target 100929; HLA-B*44:03; ZFP42; ENSG00000179059; CTA
IDLSDPKQL

SEQ ID NO: 100930 - protein, 9 aa, Homo sapiens
  misc_feature: Table A; Target 100930; HLA-C*06:02; ZFP42; ENSG00000179059; CTA
IDLSDPKQL

SEQ ID NO: 100931 - protein, 9 aa, Homo sapiens
  misc_feature: Table A; Target 100931; HLA-C*07:01; ZFP42; ENSG00000179059; CTA
IDLSDPKQL

SEQ ID NO: 100932 - protein, 9 aa, Homo sapiens
  misc_feature: Table A; Target 100932; HLA-C*07:04; ZFP42; ENSG00000179059; CTA
IDLSDPKQL

SEQ ID NO: 100933 - protein, 9 aa, Homo sapiens
  misc_feature: Table A; Target 100933; HLA-C*16:02; ZFP42; ENSG00000179059; CTA
IDLSDPKQL

SEQ ID NO: 100934 - protein, 9 aa, Homo sapiens
  misc_feature: Table A; Target 100934; HLA-B*18:01; ZFP42; ENSG00000179059; CTA
IECVIRGEF

SEQ ID NO: 100935 - protein, 9 aa, Homo sapiens
  misc_feature: Table A; Target 100935; HLA-B*37:01; ZFP42; ENSG00000179059; CTA
IECVIRGEF

SEQ ID NO: 100936 - protein, 9 aa, Homo sapiens
  misc_feature: Table A; Target 100936; HLA-B*44:02; ZFP42; ENSG00000179059; CTA
IECVIRGEF

SEQ ID NO: 100937 - protein, 9 aa, Homo sapiens
  misc_feature: Table A; Target 100937; HLA-B*44:03; ZFP42; ENSG00000179059; CTA
IECVIRGEF

SEQ ID NO: 100938 - protein, 8 aa, Homo sapiens
  misc_feature: Table A; Target 100938; HLA-B*18:01; ZFP42; ENSG00000179059; CTA
IEPVSAVW

SEQ ID NO: 100939 - protein, 8 aa, Homo sapiens
  misc_feature: Table A; Target 100939; HLA-B*37:01; ZFP42; ENSG00000179059; CTA
IEPVSAVW

SEQ ID NO: 100940 - protein, 8 aa, Homo sapiens
  misc_feature: Table A; Target 100940; HLA-B*44:02; ZFP42; ENSG00000179059; CTA
IEPVSAVW

SEQ ID NO: 100941 - protein, 8 aa, Homo sapiens
  misc_feature: Table A; Target 100941; HLA-B*44:03; ZFP42; ENSG00000179059; CTA
IEPVSAVW

SEQ ID NO: 100942 - protein, 8 aa, Homo sapiens
  misc_feature: Table A; Target 100942; HLA-B*49:01; ZFP42; ENSG00000179059; CTA
IEPVSAVW

SEQ ID NO: 100943 - protein, 8 aa, Homo sapiens
  misc_feature: Table A; Target 100943; HLA-C*16:04; ZFP42; ENSG00000179059; CTA
IEPVSAVW

SEQ ID NO: 100944 - protein, 10 aa, Homo sapiens
  misc_feature: Table A; Target 100944; HLA-B*40:01; ZFP42; ENSG00000179059; CTA
IEPVSAVWAL

SEQ ID NO: 100945 - protein, 8 aa, Homo sapiens
  misc_feature: Table A; Target 100945; HLA-C*05:01; ZFP42; ENSG00000179059; CTA
ILEEDSLF

SEQ ID NO: 100946 - protein, 11 aa, Homo sapiens
  misc_feature: Table A; Target 100946; HLA-A*02:07; ZFP42; ENSG00000179059; CTA
ILEEDSLFESL

SEQ ID NO: 100947 - protein, 9 aa, Homo sapiens
  misc_feature: Table A; Target 100947; HLA-A*03:01; ZFP42; ENSG00000179059; CTA
ILTHANTNK

SEQ ID NO: 100948 - protein, 9 aa, Homo sapiens
  misc_feature: Table A; Target 100948; HLA-A*03:02; ZFP42; ENSG00000179059; CTA
ILTHANTNK

SEQ ID NO: 100949 - protein, 10 aa, Homo sapiens
  misc_feature: Table A; Target 100949; HLA-B*27:02; ZFP42; ENSG00000179059; CTA
IPGIDLSDPK

SEQ ID NO: 100950 - protein, 9 aa, Homo sapiens
  misc_feature: Table A; Target 100950; HLA-A*01:01; ZFP42; ENSG00000179059; CTA
IVGENSLEY

SEQ ID NO: 100951 - protein, 9 aa, Homo sapiens
  misc_feature: Table A; Target 100951; HLA-A*03:01; ZFP42; ENSG00000179059; CTA
IVGENSLEY

SEQ ID NO: 100952 - protein, 9 aa, Homo sapiens
  misc_feature: Table A; Target 100952; HLA-A*03:02; ZFP42; ENSG00000179059; CTA
IVGENSLEY

SEQ ID NO: 100953 - protein, 9 aa, Homo sapiens
  misc_feature: Table A; Target 100953; HLA-A*25:01; ZFP42; ENSG00000179059; CTA
IVGENSLEY

SEQ ID NO: 100954 - protein, 9 aa, Homo sapiens
  misc_feature: Table A; Target 100954; HLA-A*26:01; ZFP42; ENSG00000179059; CTA
IVGENSLEY

SEQ ID NO: 100955 - protein, 9 aa, Homo sapiens
  misc_feature: Table A; Target 100955; HLA-A*30:02; ZFP42; ENSG00000179059; CTA
IVGENSLEY

SEQ ID NO: 100956 - protein, 9 aa, Homo sapiens
  misc_feature: Table A; Target 100956; HLA-A*32:01; ZFP42; ENSG00000179059; CTA
IVGENSLEY

SEQ ID NO: 100957 - protein, 9 aa, Homo sapiens
  misc_feature: Table A; Target 100957; HLA-B*15:03; ZFP42; ENSG00000179059; CTA
IVGENSLEY

SEQ ID NO: 100958 - protein, 9 aa, Homo sapiens
  misc_feature: Table A; Target 100958; HLA-B*18:01; ZFP42; ENSG00000179059; CTA
IVGENSLEY

SEQ ID NO: 100959 - protein, 9 aa, Homo sapiens
  misc_feature: Table A; Target 100959; HLA-B*27:05; ZFP42; ENSG00000179059; CTA
IVGENSLEY

SEQ ID NO: 100960 - protein, 9 aa, Homo sapiens
  misc_feature: Table A; Target 100960; HLA-B*35:01; ZFP42; ENSG00000179059; CTA
IVGENSLEY

SEQ ID NO: 100961 - protein, 9 aa, Homo sapiens
  misc_feature: Table A; Target 100961; HLA-B*39:01; ZFP42; ENSG00000179059; CTA
IVGENSLEY

SEQ ID NO: 100962 - protein, 9 aa, Homo sapiens
  misc_feature: Table A; Target 100962; HLA-B*46:01; ZFP42; ENSG00000179059; CTA
IVGENSLEY

SEQ ID NO: 100963 - protein, 9 aa, Homo sapiens
  misc_feature: Table A; Target 100963; HLA-B*55:01; ZFP42; ENSG00000179059; CTA
IVGENSLEY

SEQ ID NO: 100964 - protein, 9 aa, Homo sapiens
  misc_feature: Table A; Target 100964; HLA-B*58:01; ZFP42; ENSG00000179059; CTA
IVGENSLEY

SEQ ID NO: 100965 - protein, 9 aa, Homo sapiens
  misc_feature: Table A; Target 100965; HLA-C*01:02; ZFP42; ENSG00000179059; CTA
IVGENSLEY

SEQ ID NO: 100966 - protein, 9 aa, Homo sapiens
  misc_feature: Table A; Target 100966; HLA-C*02:02; ZFP42; ENSG00000179059; CTA
IVGENSLEY

SEQ ID NO: 100967 - protein, 9 aa, Homo sapiens
  misc_feature: Table A; Target 100967; HLA-C*03:03; ZFP42; ENSG00000179059; CTA
IVGENSLEY

SEQ ID NO: 100968 - protein, 9 aa, Homo sapiens
  misc_feature: Table A; Target 100968; HLA-C*07:01; ZFP42; ENSG00000179059; CTA
IVGENSLEY

SEQ ID NO: 100969 - protein, 9 aa, Homo sapiens
  misc_feature: Table A; Target 100969; HLA-C*07:04; ZFP42; ENSG00000179059; CTA
IVGENSLEY

SEQ ID NO: 100970 - protein, 9 aa, Homo sapiens
  misc_feature: Table A; Target 100970; HLA-C*07:06; ZFP42; ENSG00000179059; CTA
IVGENSLEY

SEQ ID NO: 100971 - protein, 9 aa, Homo sapiens
  misc_feature: Table A; Target 100971; HLA-C*12:03; ZFP42; ENSG00000179059; CTA
IVGENSLEY

SEQ ID NO: 100972 - protein, 9 aa, Homo sapiens
  misc_feature: Table A; Target 100972; HLA-C*14:02; ZFP42; ENSG00000179059; CTA
IVGENSLEY

SEQ ID NO: 100973 - protein, 9 aa, Homo sapiens
  misc_feature: Table A; Target 100973; HLA-C*16:01; ZFP42; ENSG00000179059; CTA
IVGENSLEY

SEQ ID NO: 100974 - protein, 9 aa, Homo sapiens
  misc_feature: Table A; Target 100974; HLA-C*16:02; ZFP42; ENSG00000179059; CTA
IVGENSLEY

SEQ ID NO: 100975 - protein, 9 aa, Homo sapiens
  misc_feature: Table A; Target 100975; HLA-C*16:04; ZFP42; ENSG00000179059; CTA
IVGENSLEY

SEQ ID NO: 100976 - protein, 8 aa, Homo sapiens
  misc_feature: Table A; Target 100976; HLA-B*58:01; ZFP42; ENSG00000179059; CTA
KAFVESSK

SEQ ID NO: 100977 - protein, 8 aa, Homo sapiens
  misc_feature: Table A; Target 100977; HLA-C*03:04; ZFP42; ENSG00000179059; CTA
KAFVESSK

SEQ ID NO: 100978 - protein, 9 aa, Homo sapiens
  misc_feature: Table A; Target 100978; HLA-A*02:03; ZFP42; ENSG00000179059; CTA
KAFVESSKL

SEQ ID NO: 100979 - protein, 9 aa, Homo sapiens
  misc_feature: Table A; Target 100979; HLA-A*02:07; ZFP42; ENSG00000179059; CTA
KAFVESSKL

SEQ ID NO: 100980 - protein, 9 aa, Homo sapiens
  misc_feature: Table A; Target 100980; HLA-A*03:01; ZFP42; ENSG00000179059; CTA
KAFVESSKL

SEQ ID NO: 100981 - protein, 9 aa, Homo sapiens
  misc_feature: Table A; Target 100981; HLA-A*03:02; ZFP42; ENSG00000179059; CTA
KAFVESSKL

SEQ ID NO: 100982 - protein, 9 aa, Homo sapiens
  misc_feature: Table A; Target 100982; HLA-A*23:01; ZFP42; ENSG00000179059; CTA
KAFVESSKL

SEQ ID NO: 100983 - protein, 9 aa, Homo sapiens
  misc_feature: Table A; Target 100983; HLA-A*24:02; ZFP42; ENSG00000179059; CTA
KAFVESSKL

SEQ ID NO: 100984 - protein, 9 aa, Homo sapiens
  misc_feature: Table A; Target 100984; HLA-A*30:01; ZFP42; ENSG00000179059; CTA
KAFVESSKL

SEQ ID NO: 100985 - protein, 9 aa, Homo sapiens
  misc_feature: Table A; Target 100985; HLA-A*31:01; ZFP42; ENSG00000179059; CTA
KAFVESSKL

SEQ ID NO: 100986 - protein, 9 aa, Homo sapiens
  misc_feature: Table A; Target 100986; HLA-A*32:01; ZFP42; ENSG00000179059; CTA
KAFVESSKL

SEQ ID NO: 100987 - protein, 9 aa, Homo sapiens
  misc_feature: Table A; Target 100987; HLA-B*07:02; ZFP42; ENSG00000179059; CTA
KAFVESSKL

SEQ ID NO: 100988 - protein, 9 aa, Homo sapiens
  misc_feature: Table A; Target 100988; HLA-B*13:02; ZFP42; ENSG00000179059; CTA
KAFVESSKL

SEQ ID NO: 100989 - protein, 9 aa, Homo sapiens
  misc_feature: Table A; Target 100989; HLA-B*15:01; ZFP42; ENSG00000179059; CTA
KAFVESSKL

SEQ ID NO: 100990 - protein, 9 aa, Homo sapiens
  misc_feature: Table A; Target 100990; HLA-B*15:03; ZFP42; ENSG00000179059; CTA
KAFVESSKL

SEQ ID NO: 100991 - protein, 9 aa, Homo sapiens
  misc_feature: Table A; Target 100991; HLA-B*27:05; ZFP42; ENSG00000179059; CTA
KAFVESSKL

SEQ ID NO: 100992 - protein, 9 aa, Homo sapiens
  misc_feature: Table A; Target 100992; HLA-B*35:03; ZFP42; ENSG00000179059; CTA
KAFVESSKL

SEQ ID NO: 100993 - protein, 9 aa, Homo sapiens
  misc_feature: Table A; Target 100993; HLA-B*37:01; ZFP42; ENSG00000179059; CTA
KAFVESSKL

SEQ ID NO: 100994 - protein, 9 aa, Homo sapiens
  misc_feature: Table A; Target 100994; HLA-B*38:01; ZFP42; ENSG00000179059; CTA
KAFVESSKL

SEQ ID NO: 100995 - protein, 9 aa, Homo sapiens
  misc_feature: Table A; Target 100995; HLA-B*40:01; ZFP42; ENSG00000179059; CTA
KAFVESSKL

SEQ ID NO: 100996 - protein, 9 aa, Homo sapiens
  misc_feature: Table A; Target 100996; HLA-B*40:02; ZFP42; ENSG00000179059; CTA
KAFVESSKL

SEQ ID NO: 100997 - protein, 9 aa, Homo sapiens
  misc_feature: Table A; Target 100997; HLA-B*46:01; ZFP42; ENSG00000179059; CTA
KAFVESSKL

SEQ ID NO: 100998 - protein, 9 aa, Homo sapiens
  misc_feature: Table A; Target 100998; HLA-B*49:01; ZFP42; ENSG00000179059; CTA
KAFVESSKL

SEQ ID NO: 100999 - protein, 9 aa, Homo sapiens
  misc_feature: Table A; Target 100999; HLA-B*55:01; ZFP42; ENSG00000179059; CTA
KAFVESSKL

SEQ ID NO: 101000 - protein, 9 aa, Homo sapiens
  misc_feature: Table A; Target 101000; HLA-B*57:01; ZFP42; ENSG00000179059; CTA
KAFVESSKL

SEQ ID NO: 101001 - protein, 9 aa, Homo sapiens
  misc_feature: Table A; Target 101001; HLA-B*58:01; ZFP42; ENSG00000179059; CTA
KAFVESSKL

SEQ ID NO: 101002 - protein, 9 aa, Homo sapiens
  misc_feature: Table A; Target 101002; HLA-C*01:02; ZFP42; ENSG00000179059; CTA
KAFVESSKL

SEQ ID NO: 101003 - protein, 9 aa, Homo sapiens
  misc_feature: Table A; Target 101003; HLA-C*02:02; ZFP42; ENSG00000179059; CTA
KAFVESSKL

SEQ ID NO: 101004 - protein, 9 aa, Homo sapiens
  misc_feature: Table A; Target 101004; HLA-C*03:03; ZFP42; ENSG00000179059; CTA
KAFVESSKL

SEQ ID NO: 101005 - protein, 9 aa, Homo sapiens
  misc_feature: Table A; Target 101005; HLA-C*03:04; ZFP42; ENSG00000179059; CTA
KAFVESSKL

SEQ ID NO: 101006 - protein, 9 aa, Homo sapiens
  misc_feature: Table A; Target 101006; HLA-C*04:01; ZFP42; ENSG00000179059; CTA
KAFVESSKL

SEQ ID NO: 101007 - protein, 9 aa, Homo sapiens
  misc_feature: Table A; Target 101007; HLA-C*05:01; ZFP42; ENSG00000179059; CTA
KAFVESSKL

SEQ ID NO: 101008 - protein, 9 aa, Homo sapiens
  misc_feature: Table A; Target 101008; HLA-C*06:02; ZFP42; ENSG00000179059; CTA
KAFVESSKL

SEQ ID NO: 101009 - protein, 9 aa, Homo sapiens
  misc_feature: Table A; Target 101009; HLA-C*07:01; ZFP42; ENSG00000179059; CTA
KAFVESSKL

SEQ ID NO: 101010 - protein, 9 aa, Homo sapiens
  misc_feature: Table A; Target 101010; HLA-C*07:02; ZFP42; ENSG00000179059; CTA
KAFVESSKL

SEQ ID NO: 101011 - protein, 9 aa, Homo sapiens
  misc_feature: Table A; Target 101011; HLA-C*07:06; ZFP42; ENSG00000179059; CTA
KAFVESSKL

SEQ ID NO: 101012 - protein, 9 aa, Homo sapiens
  misc_feature: Table A; Target 101012; HLA-C*12:03; ZFP42; ENSG00000179059; CTA
KAFVESSKL

SEQ ID NO: 101013 - protein, 9 aa, Homo sapiens
  misc_feature: Table A; Target 101013; HLA-C*16:02; ZFP42; ENSG00000179059; CTA
KAFVESSKL

SEQ ID NO: 101014 - protein, 9 aa, Homo sapiens
  misc_feature: Table A; Target 101014; HLA-C*16:04; ZFP42; ENSG00000179059; CTA
KAFVESSKL

SEQ ID NO: 101015 - protein, 10 aa, Homo sapiens
  misc_feature: Table A; Target 101015; HLA-A*03:01; ZFP42; ENSG00000179059; CTA
KAFVESSKLK

SEQ ID NO: 101016 - protein, 10 aa, Homo sapiens
  misc_feature: Table A; Target 101016; HLA-A*03:02; ZFP42; ENSG00000179059; CTA
KAFVESSKLK

SEQ ID NO: 101017 - protein, 10 aa, Homo sapiens
  misc_feature: Table A; Target 101017; HLA-A*11:01; ZFP42; ENSG00000179059; CTA
KAFVESSKLK

SEQ ID NO: 101018 - protein, 10 aa, Homo sapiens
  misc_feature: Table A; Target 101018; HLA-A*31:01; ZFP42; ENSG00000179059; CTA
KAFVESSKLK

SEQ ID NO: 101019 - protein, 10 aa, Homo sapiens
  misc_feature: Table A; Target 101019; HLA-B*27:02; ZFP42; ENSG00000179059; CTA
KAFVESSKLK

SEQ ID NO: 101020 - protein, 10 aa, Homo sapiens
  misc_feature: Table A; Target 101020; HLA-B*57:01; ZFP42; ENSG00000179059; CTA
KAFVESSKLK

SEQ ID NO: 101021 - protein, 10 aa, Homo sapiens
  misc_feature: Table A; Target 101021; HLA-C*04:01; ZFP42; ENSG00000179059; CTA
KAFVESSKLK

SEQ ID NO: 101022 - protein, 10 aa, Homo sapiens
  misc_feature: Table A; Target 101022; HLA-C*06:02; ZFP42; ENSG00000179059; CTA
KAFVESSKLK

SEQ ID NO: 101023 - protein, 11 aa, Homo sapiens
  misc_feature: Table A; Target 101023; HLA-A*03:01; ZFP42; ENSG00000179059; CTA
KAFVESSKLKR

SEQ ID NO: 101024 - protein, 11 aa, Homo sapiens
  misc_feature: Table A; Target 101024; HLA-A*31:01; ZFP42; ENSG00000179059; CTA
KAFVESSKLKR

SEQ ID NO: 101025 - protein, 11 aa, Homo sapiens
  misc_feature: Table A; Target 101025; HLA-B*57:01; ZFP42; ENSG00000179059; CTA
KAFVESSKLKR

SEQ ID NO: 101026 - protein, 8 aa, Homo sapiens
  misc_feature: Table A; Target 101026; HLA-B*37:01; ZFP42; ENSG00000179059; CTA
KELPQKIV

SEQ ID NO: 101027 - protein, 9 aa, Homo sapiens
  misc_feature: Table A; Target 101027; HLA-B*40:02; ZFP42; ENSG00000179059; CTA
KELPQKIVG

SEQ ID NO: 101028 - protein, 8 aa, Homo sapiens
  misc_feature: Table A; Target 101028; HLA-B*37:01; ZFP42; ENSG00000179059; CTA
KEYDSLSA

SEQ ID NO: 101029 - protein, 8 aa, Homo sapiens
  misc_feature: Table A; Target 101029; HLA-B*49:01; ZFP42; ENSG00000179059; CTA
KEYDSLSA

SEQ ID NO: 101030 - protein, 9 aa, Homo sapiens
  misc_feature: Table A; Target 101030; HLA-A*30:01; ZFP42; ENSG00000179059; CTA
KEYDSLSAI

SEQ ID NO: 101031 - protein, 9 aa, Homo sapiens
  misc_feature: Table A; Target 101031; HLA-B*18:01; ZFP42; ENSG00000179059; CTA
KEYDSLSAI

SEQ ID NO: 101032 - protein, 9 aa, Homo sapiens
  misc_feature: Table A; Target 101032; HLA-B*37:01; ZFP42; ENSG00000179059; CTA
KEYDSLSAI

SEQ ID NO: 101033 - protein, 9 aa, Homo sapiens
  misc_feature: Table A; Target 101033; HLA-B*40:01; ZFP42; ENSG00000179059; CTA
KEYDSLSAI

SEQ ID NO: 101034 - protein, 9 aa, Homo sapiens
  misc_feature: Table A; Target 101034; HLA-B*40:02; ZFP42; ENSG00000179059; CTA
KEYDSLSAI

SEQ ID NO: 101035 - protein, 9 aa, Homo sapiens
  misc_feature: Table A; Target 101035; HLA-B*44:02; ZFP42; ENSG00000179059; CTA
KEYDSLSAI

SEQ ID NO: 101036 - protein, 9 aa, Homo sapiens
  misc_feature: Table A; Target 101036; HLA-B*44:03; ZFP42; ENSG00000179059; CTA
KEYDSLSAI

SEQ ID NO: 101037 - protein, 10 aa, Homo sapiens
  misc_feature: Table A; Target 101037; HLA-A*30:01; ZFP42; ENSG00000179059; CTA
KEYDSLSAIA

SEQ ID NO: 101038 - protein, 10 aa, Homo sapiens
  misc_feature: Table A; Target 101038; HLA-B*40:02; ZFP42; ENSG00000179059; CTA
KEYDSLSAIA

SEQ ID NO: 101039 - protein, 10 aa, Homo sapiens
  misc_feature: Table A; Target 101039; HLA-B*49:01; ZFP42; ENSG00000179059; CTA
KEYDSLSAIA

SEQ ID NO: 101040 - protein, 11 aa, Homo sapiens
  misc_feature: Table A; Target 101040; HLA-A*30:01; ZFP42; ENSG00000179059; CTA
KEYDSLSAIAC

SEQ ID NO: 101041 - protein, 11 aa, Homo sapiens
  misc_feature: Table A; Target 101041; HLA-B*40:01; ZFP42; ENSG00000179059; CTA
KEYDSLSAIAC

SEQ ID NO: 101042 - protein, 11 aa, Homo sapiens
  misc_feature: Table A; Target 101042; HLA-B*40:02; ZFP42; ENSG00000179059; CTA
KEYDSLSAIAC

SEQ ID NO: 101043 - protein, 11 aa, Homo sapiens
  misc_feature: Table A; Target 101043; HLA-B*49:01; ZFP42; ENSG00000179059; CTA
KEYDSLSAIAC

SEQ ID NO: 101044 - protein, 8 aa, Homo sapiens
  misc_feature: Table A; Target 101044; HLA-C*06:02; ZFP42; ENSG00000179059; CTA
KGLGGRAP

SEQ ID NO: 101045 - protein, 10 aa, Homo sapiens
  misc_feature: Table A; Target 101045; HLA-A*03:01; ZFP42; ENSG00000179059; CTA
KGSEQQLSQK

SEQ ID NO: 101046 - protein, 10 aa, Homo sapiens
  misc_feature: Table A; Target 101046; HLA-A*03:02; ZFP42; ENSG00000179059; CTA
KGSEQQLSQK

SEQ ID NO: 101047 - protein, 10 aa, Homo sapiens
  misc_feature: Table A; Target 101047; HLA-A*11:01; ZFP42; ENSG00000179059; CTA
KGSEQQLSQK

SEQ ID NO: 101048 - protein, 11 aa, Homo sapiens
  misc_feature: Table A; Target 101048; HLA-C*06:02; ZFP42; ENSG00000179059; CTA
KGSEQQLSQKV

SEQ ID NO: 101049 - protein, 9 aa, Homo sapiens
  misc_feature: Table A; Target 101049; HLA-A*31:01; ZFP42; ENSG00000179059; CTA
KHLLIHGPR

SEQ ID NO: 101050 - protein, 10 aa, Homo sapiens
  misc_feature: Table A; Target 101050; HLA-A*25:01; ZFP42; ENSG00000179059; CTA
KIVGENSLEY

SEQ ID NO: 101051 - protein, 10 aa, Homo sapiens
  misc_feature: Table A; Target 101051; HLA-A*26:01; ZFP42; ENSG00000179059; CTA
KIVGENSLEY

SEQ ID NO: 101052 - protein, 10 aa, Homo sapiens
  misc_feature: Table A; Target 101052; HLA-A*29:02; ZFP42; ENSG00000179059; CTA
KIVGENSLEY

SEQ ID NO: 101053 - protein, 10 aa, Homo sapiens
  misc_feature: Table A; Target 101053; HLA-A*30:02; ZFP42; ENSG00000179059; CTA
KIVGENSLEY

SEQ ID NO: 101054 - protein, 10 aa, Homo sapiens
  misc_feature: Table A; Target 101054; HLA-A*32:01; ZFP42; ENSG00000179059; CTA
KIVGENSLEY

SEQ ID NO: 101055 - protein, 10 aa, Homo sapiens
  misc_feature: Table A; Target 101055; HLA-B*15:03; ZFP42; ENSG00000179059; CTA
KIVGENSLEY

SEQ ID NO: 101056 - protein, 10 aa, Homo sapiens
  misc_feature: Table A; Target 101056; HLA-B*46:01; ZFP42; ENSG00000179059; CTA
KIVGENSLEY

SEQ ID NO: 101057 - protein, 10 aa, Homo sapiens
  misc_feature: Table A; Target 101057; HLA-B*57:01; ZFP42; ENSG00000179059; CTA
KIVGENSLEY

SEQ ID NO: 101058 - protein, 10 aa, Homo sapiens
  misc_feature: Table A; Target 101058; HLA-B*58:01; ZFP42; ENSG00000179059; CTA
KIVGENSLEY

SEQ ID NO: 101059 - protein, 10 aa, Homo sapiens
  misc_feature: Table A; Target 101059; HLA-C*16:04; ZFP42; ENSG00000179059; CTA
KIVGENSLEY

SEQ ID NO: 101060 - protein, 9 aa, Homo sapiens
  misc_feature: Table A; Target 101060; HLA-B*15:03; ZFP42; ENSG00000179059; CTA
KKPPINKEY

SEQ ID NO: 101061 - protein, 9 aa, Homo sapiens
  misc_feature: Table A; Target 101061; HLA-C*04:01; ZFP42; ENSG00000179059; CTA
KKPPINKEY

SEQ ID NO: 101062 - protein, 9 aa, Homo sapiens
  misc_feature: Table A; Target 101062; HLA-C*12:03; ZFP42; ENSG00000179059; CTA
KKPPINKEY

SEQ ID NO: 101063 - protein, 10 aa, Homo sapiens
  misc_feature: Table A; Target 101063; HLA-A*02:01; ZFP42; ENSG00000179059; CTA
KLPPGGIPGI

SEQ ID NO: 101064 - protein, 10 aa, Homo sapiens
  misc_feature: Table A; Target 101064; HLA-A*02:03; ZFP42; ENSG00000179059; CTA
KLPPGGIPGI

SEQ ID NO: 101065 - protein, 10 aa, Homo sapiens
  misc_feature: Table A; Target 101065; HLA-A*02:04; ZFP42; ENSG00000179059; CTA
KLPPGGIPGI

SEQ ID NO: 101066 - protein, 10 aa, Homo sapiens
  misc_feature: Table A; Target 101066; HLA-A*02:07; ZFP42; ENSG00000179059; CTA
KLPPGGIPGI

SEQ ID NO: 101067 - protein, 10 aa, Homo sapiens
  misc_feature: Table A; Target 101067; HLA-A*03:01; ZFP42; ENSG00000179059; CTA
KLPPGGIPGI

SEQ ID NO: 101068 - protein, 10 aa, Homo sapiens
  misc_feature: Table A; Target 101068; HLA-A*23:01; ZFP42; ENSG00000179059; CTA
KLPPGGIPGI

SEQ ID NO: 101069 - protein, 10 aa, Homo sapiens
  misc_feature: Table A; Target 101069; HLA-A*24:02; ZFP42; ENSG00000179059; CTA
KLPPGGIPGI

SEQ ID NO: 101070 - protein, 10 aa, Homo sapiens
  misc_feature: Table A; Target 101070; HLA-A*32:01; ZFP42; ENSG00000179059; CTA
KLPPGGIPGI

SEQ ID NO: 101071 - protein, 10 aa, Homo sapiens
  misc_feature: Table A; Target 101071; HLA-B*13:02; ZFP42; ENSG00000179059; CTA
KLPPGGIPGI

SEQ ID NO: 101072 - protein, 10 aa, Homo sapiens
  misc_feature: Table A; Target 101072; HLA-B*55:01; ZFP42; ENSG00000179059; CTA
KLPPGGIPGI

SEQ ID NO: 101073 - protein, 10 aa, Homo sapiens
  misc_feature: Table A; Target 101073; HLA-B*58:01; ZFP42; ENSG00000179059; CTA
KLPPGGIPGI

SEQ ID NO: 101074 - protein, 10 aa, Homo sapiens
  misc_feature: Table A; Target 101074; HLA-C*06:02; ZFP42; ENSG00000179059; CTA
KLPPGGIPGI

SEQ ID NO: 101075 - protein, 11 aa, Homo sapiens
  misc_feature: Table A; Target 101075; HLA-B*07:02; ZFP42; ENSG00000179059; CTA
KPPINKEYDSL

SEQ ID NO: 101076 - protein, 11 aa, Homo sapiens
  misc_feature: Table A; Target 101076; HLA-B*07:02; ZFP42; ENSG00000179059; CTA
KPRQGKSSQDL

SEQ ID NO: 101077 - protein, 11 aa, Homo sapiens
  misc_feature: Table A; Target 101077; HLA-C*07:02; ZFP42; ENSG00000179059; CTA
KPRQGKSSQDL

SEQ ID NO: 101078 - protein, 10 aa, Homo sapiens
  misc_feature: Table A; Target 101078; HLA-B*58:01; ZFP42; ENSG00000179059; CTA
KSSQDLQAEI

SEQ ID NO: 101079 - protein, 11 aa, Homo sapiens
  misc_feature: Table A; Target 101079; HLA-A*31:01; ZFP42; ENSG00000179059; CTA
KTRHQKGLGGR

SEQ ID NO: 101080 - protein, 8 aa, Homo sapiens
  misc_feature: Table A; Target 101080; HLA-A*32:01; ZFP42; ENSG00000179059; CTA
KVFEASSL

SEQ ID NO: 101081 - protein, 8 aa, Homo sapiens
  misc_feature: Table A; Target 101081; HLA-B*07:02; ZFP42; ENSG00000179059; CTA
KVFEASSL

SEQ ID NO: 101082 - protein, 8 aa, Homo sapiens
  misc_feature: Table A; Target 101082; HLA-B*08:01; ZFP42; ENSG00000179059; CTA
KVFEASSL

SEQ ID NO: 101083 - protein, 8 aa, Homo sapiens
  misc_feature: Table A; Target 101083; HLA-B*15:01; ZFP42; ENSG00000179059; CTA
KVFEASSL

SEQ ID NO: 101084 - protein, 8 aa, Homo sapiens
  misc_feature: Table A; Target 101084; HLA-B*15:03; ZFP42; ENSG00000179059; CTA
KVFEASSL

SEQ ID NO: 101085 - protein, 8 aa, Homo sapiens
  misc_feature: Table A; Target 101085; HLA-B*27:05; ZFP42; ENSG00000179059; CTA
KVFEASSL

SEQ ID NO: 101086 - protein, 8 aa, Homo sapiens
  misc_feature: Table A; Target 101086; HLA-B*37:01; ZFP42; ENSG00000179059; CTA
KVFEASSL

SEQ ID NO: 101087 - protein, 8 aa, Homo sapiens
  misc_feature: Table A; Target 101087; HLA-B*40:02; ZFP42; ENSG00000179059; CTA
KVFEASSL

SEQ ID NO: 101088 - protein, 8 aa, Homo sapiens
  misc_feature: Table A; Target 101088; HLA-B*46:01; ZFP42; ENSG00000179059; CTA
KVFEASSL

SEQ ID NO: 101089 - protein, 8 aa, Homo sapiens
  misc_feature: Table A; Target 101089; HLA-B*58:01; ZFP42; ENSG00000179059; CTA
KVFEASSL

SEQ ID NO: 101090 - protein, 8 aa, Homo sapiens
  misc_feature: Table A; Target 101090; HLA-C*01:02; ZFP42; ENSG00000179059; CTA
KVFEASSL

SEQ ID NO: 101091 - protein, 8 aa, Homo sapiens
  misc_feature: Table A; Target 101091; HLA-C*03:03; ZFP42; ENSG00000179059; CTA
KVFEASSL

SEQ ID NO: 101092 - protein, 8 aa, Homo sapiens
  misc_feature: Table A; Target 101092; HLA-C*03:04; ZFP42; ENSG00000179059; CTA
KVFEASSL

SEQ ID NO: 101093 - protein, 8 aa, Homo sapiens
  misc_feature: Table A; Target 101093; HLA-C*05:01; ZFP42; ENSG00000179059; CTA
KVFEASSL

SEQ ID NO: 101094 - protein, 8 aa, Homo sapiens
  misc_feature: Table A; Target 101094; HLA-C*07:02; ZFP42; ENSG00000179059; CTA
KVFEASSL

SEQ ID NO: 101095 - protein, 8 aa, Homo sapiens
  misc_feature: Table A; Target 101095; HLA-C*12:03; ZFP42; ENSG00000179059; CTA
KVFEASSL

SEQ ID NO: 101096 - protein, 8 aa, Homo sapiens
  misc_feature: Table A; Target 101096; HLA-C*14:02; ZFP42; ENSG00000179059; CTA
KVFEASSL

SEQ ID NO: 101097 - protein, 8 aa, Homo sapiens
  misc_feature: Table A; Target 101097; HLA-C*16:02; ZFP42; ENSG00000179059; CTA
KVFEASSL

SEQ ID NO: 101098 - protein, 10 aa, Homo sapiens
  misc_feature: Table A; Target 101098; HLA-A*02:01; ZFP42; ENSG00000179059; CTA
KVFEASSLEC

SEQ ID NO: 101099 - protein, 10 aa, Homo sapiens
  misc_feature: Table A; Target 101099; HLA-B*27:05; ZFP42; ENSG00000179059; CTA
KVFEASSLEC

SEQ ID NO: 101100 - protein, 10 aa, Homo sapiens
  misc_feature: Table A; Target 101100; HLA-B*40:02; ZFP42; ENSG00000179059; CTA
KVFEASSLEC

SEQ ID NO: 101101 - protein, 10 aa, Homo sapiens
  misc_feature: Table A; Target 101101; HLA-B*56:01; ZFP42; ENSG00000179059; CTA
KVFEASSLEC

SEQ ID NO: 101102 - protein, 10 aa, Homo sapiens
  misc_feature: Table A; Target 101102; HLA-C*01:02; ZFP42; ENSG00000179059; CTA
KVFEASSLEC

SEQ ID NO: 101103 - protein, 10 aa, Homo sapiens
  misc_feature: Table A; Target 101103; HLA-A*30:01; ZFP42; ENSG00000179059; CTA
LEEDSLFESL

SEQ ID NO: 101104 - protein, 10 aa, Homo sapiens
  misc_feature: Table A; Target 101104; HLA-B*18:01; ZFP42; ENSG00000179059; CTA
LEEDSLFESL

SEQ ID NO: 101105 - protein, 10 aa, Homo sapiens
  misc_feature: Table A; Target 101105; HLA-B*40:01; ZFP42; ENSG00000179059; CTA
LEEDSLFESL

SEQ ID NO: 101106 - protein, 10 aa, Homo sapiens
  misc_feature: Table A; Target 101106; HLA-B*40:02; ZFP42; ENSG00000179059; CTA
LEEDSLFESL

SEQ ID NO: 101107 - protein, 10 aa, Homo sapiens
  misc_feature: Table A; Target 101107; HLA-B*49:01; ZFP42; ENSG00000179059; CTA
LEEDSLFESL

SEQ ID NO: 101108 - protein, 8 aa, Homo sapiens
  misc_feature: Table A; Target 101108; HLA-B*49:01; ZFP42; ENSG00000179059; CTA
LEYMKKGV

SEQ ID NO: 101109 - protein, 9 aa, Homo sapiens
  misc_feature: Table A; Target 101109; HLA-B*40:02; ZFP42; ENSG00000179059; CTA
LEYSEYMTG

SEQ ID NO: 101110 - protein, 9 aa, Homo sapiens
  misc_feature: Table A; Target 101110; HLA-B*49:01; ZFP42; ENSG00000179059; CTA
LEYSEYMTG

SEQ ID NO: 101111 - protein, 10 aa, Homo sapiens
  misc_feature: Table A; Target 101111; HLA-A*03:01; ZFP42; ENSG00000179059; CTA
LEYSEYMTGK

SEQ ID NO: 101112 - protein, 10 aa, Homo sapiens
  misc_feature: Table A; Target 101112; HLA-A*11:01; ZFP42; ENSG00000179059; CTA
LEYSEYMTGK

SEQ ID NO: 101113 - protein, 10 aa, Homo sapiens
  misc_feature: Table A; Target 101113; HLA-B*27:02; ZFP42; ENSG00000179059; CTA
LEYSEYMTGK

SEQ ID NO: 101114 - protein, 10 aa, Homo sapiens
  misc_feature: Table A; Target 101114; HLA-B*49:01; ZFP42; ENSG00000179059; CTA
LEYSEYMTGK

SEQ ID NO: 101115 - protein, 8 aa, Homo sapiens
  misc_feature: Table A; Target 101115; HLA-C*04:01; ZFP42; ENSG00000179059; CTA
LFESLEYL

SEQ ID NO: 101116 - protein, 9 aa, Homo sapiens
  misc_feature: Table A; Target 101116; HLA-B*27:02; ZFP42; ENSG00000179059; CTA
LFESLEYLK

SEQ ID NO: 101117 - protein, 9 aa, Homo sapiens
  misc_feature: Table A; Target 101117; HLA-B*35:03; ZFP42; ENSG00000179059; CTA
LPPGGIPGI

SEQ ID NO: 101118 - protein, 9 aa, Homo sapiens
  misc_feature: Table A; Target 101118; HLA-B*54:01; ZFP42; ENSG00000179059; CTA
LPPGGIPGI

SEQ ID NO: 101119 - protein, 9 aa, Homo sapiens
  misc_feature: Table A; Target 101119; HLA-B*55:01; ZFP42; ENSG00000179059; CTA
LPPGGIPGI

SEQ ID NO: 101120 - protein, 9 aa, Homo sapiens
  misc_feature: Table A; Target 101120; HLA-B*56:01; ZFP42; ENSG00000179059; CTA
LPPGGIPGI

SEQ ID NO: 101121 - protein, 11 aa, Homo sapiens
  misc_feature: Table A; Target 101121; HLA-B*35:03; ZFP42; ENSG00000179059; CTA
LPPGGIPGIDL

SEQ ID NO: 101122 - protein, 11 aa, Homo sapiens
  misc_feature: Table A; Target 101122; HLA-C*04:01; ZFP42; ENSG00000179059; CTA
LPPGGIPGIDL

SEQ ID NO: 101123 - protein, 11 aa, Homo sapiens
  misc_feature: Table A; Target 101123; HLA-C*07:02; ZFP42; ENSG00000179059; CTA
LPPGGIPGIDL

SEQ ID NO: 101124 - protein, 11 aa, Homo sapiens
  misc_feature: Table A; Target 101124; HLA-B*07:02; ZFP42; ENSG00000179059; CTA
LPQKIVGENSL

SEQ ID NO: 101125 - protein, 11 aa, Homo sapiens
  misc_feature: Table A; Target 101125; HLA-B*35:01; ZFP42; ENSG00000179059; CTA
LPQKIVGENSL

SEQ ID NO: 101126 - protein, 11 aa, Homo sapiens
  misc_feature: Table A; Target 101126; HLA-B*35:03; ZFP42; ENSG00000179059; CTA
LPQKIVGENSL

SEQ ID NO: 101127 - protein, 10 aa, Homo sapiens
  misc_feature: Table A; Target 101127; HLA-A*02:03; ZFP42; ENSG00000179059; CTA
LQAEIEPVSA

SEQ ID NO: 101128 - protein, 10 aa, Homo sapiens
  misc_feature: Table A; Target 101128; HLA-B*27:05; ZFP42; ENSG00000179059; CTA
LQAEIEPVSA

SEQ ID NO: 101129 - protein, 9 aa, Homo sapiens
  misc_feature: Table A; Target 101129; HLA-A*01:01; ZFP42; ENSG00000179059; CTA
LSDPKQLAE

SEQ ID NO: 101130 - protein, 10 aa, Homo sapiens
  misc_feature: Table A; Target 101130; HLA-A*01:01; ZFP42; ENSG00000179059; CTA
LSDPKQLAEF

SEQ ID NO: 101131 - protein, 10 aa, Homo sapiens
  misc_feature: Table A; Target 101131; HLA-A*02:07; ZFP42; ENSG00000179059; CTA
LSDPKQLAEF

SEQ ID NO: 101132 - protein, 10 aa, Homo sapiens
  misc_feature: Table A; Target 101132; HLA-B*57:01; ZFP42; ENSG00000179059; CTA
LSDPKQLAEF

SEQ ID NO: 101133 - protein, 10 aa, Homo sapiens
  misc_feature: Table A; Target 101133; HLA-B*58:01; ZFP42; ENSG00000179059; CTA
LSDPKQLAEF

SEQ ID NO: 101134 - protein, 10 aa, Homo sapiens
  misc_feature: Table A; Target 101134; HLA-C*03:04; ZFP42; ENSG00000179059; CTA
LSDPKQLAEF

SEQ ID NO: 101135 - protein, 10 aa, Homo sapiens
  misc_feature: Table A; Target 101135; HLA-C*04:01; ZFP42; ENSG00000179059; CTA
LSDPKQLAEF

SEQ ID NO: 101136 - protein, 10 aa, Homo sapiens
  misc_feature: Table A; Target 101136; HLA-C*05:01; ZFP42; ENSG00000179059; CTA
LSDPKQLAEF

SEQ ID NO: 101137 - protein, 10 aa, Homo sapiens
  misc_feature: Table A; Target 101137; HLA-C*07:01; ZFP42; ENSG00000179059; CTA
LSDPKQLAEF

SEQ ID NO: 101138 - protein, 9 aa, Homo sapiens
  misc_feature: Table A; Target 101138; HLA-B*57:01; ZFP42; ENSG00000179059; CTA
LVHTGEKPF

SEQ ID NO: 101139 - protein, 9 aa, Homo sapiens
  misc_feature: Table A; Target 101139; HLA-C*16:01; ZFP42; ENSG00000179059; CTA
LVHTGEKPF

SEQ ID NO: 101140 - protein, 9 aa, Homo sapiens
  misc_feature: Table A; Target 101140; HLA-A*02:03; ZFP42; ENSG00000179059; CTA
NLKAHILTH

SEQ ID NO: 101141 - protein, 9 aa, Homo sapiens
  misc_feature: Table A; Target 101141; HLA-A*03:01; ZFP42; ENSG00000179059; CTA
NLKAHILTH

SEQ ID NO: 101142 - protein, 9 aa, Homo sapiens
  misc_feature: Table A; Target 101142; HLA-A*33:01; ZFP42; ENSG00000179059; CTA
NLKAHILTH

SEQ ID NO: 101143 - protein, 9 aa, Homo sapiens
  misc_feature: Table A; Target 101143; HLA-B*08:01; ZFP42; ENSG00000179059; CTA
NLKAHILTH

SEQ ID NO: 101144 - protein, 9 aa, Homo sapiens
  misc_feature: Table A; Target 101144; HLA-C*07:01; ZFP42; ENSG00000179059; CTA
NLKAHILTH

SEQ ID NO: 101145 - protein, 10 aa, Homo sapiens
  misc_feature: Table A; Target 101145; HLA-A*02:03; ZFP42; ENSG00000179059; CTA
NLKAHILTHA

SEQ ID NO: 101146 - protein, 8 aa, Homo sapiens
  misc_feature: Table A; Target 101146; HLA-B*08:01; ZFP42; ENSG00000179059; CTA
NNLKAHIL

SEQ ID NO: 101147 - protein, 8 aa, Homo sapiens
  misc_feature: Table A; Target 101147; HLA-B*18:01; ZFP42; ENSG00000179059; CTA
NSLEYSEY

SEQ ID NO: 101148 - protein, 8 aa, Homo sapiens
  misc_feature: Table A; Target 101148; HLA-B*35:01; ZFP42; ENSG00000179059; CTA
NSLEYSEY

SEQ ID NO: 101149 - protein, 8 aa, Homo sapiens
  misc_feature: Table A; Target 101149; HLA-B*39:01; ZFP42; ENSG00000179059; CTA
NSLEYSEY

SEQ ID NO: 101150 - protein, 8 aa, Homo sapiens
  misc_feature: Table A; Target 101150; HLA-B*46:01; ZFP42; ENSG00000179059; CTA
NSLEYSEY

SEQ ID NO: 101151 - protein, 8 aa, Homo sapiens
  misc_feature: Table A; Target 101151; HLA-C*01:02; ZFP42; ENSG00000179059; CTA
NSLEYSEY

SEQ ID NO: 101152 - protein, 8 aa, Homo sapiens
  misc_feature: Table A; Target 101152; HLA-C*07:01; ZFP42; ENSG00000179059; CTA
NSLEYSEY

SEQ ID NO: 101153 - protein, 8 aa, Homo sapiens
  misc_feature: Table A; Target 101153; HLA-C*14:02; ZFP42; ENSG00000179059; CTA
NSLEYSEY

SEQ ID NO: 101154 - protein, 8 aa, Homo sapiens
  misc_feature: Table A; Target 101154; HLA-C*16:01; ZFP42; ENSG00000179059; CTA
NSLEYSEY

SEQ ID NO: 101155 - protein, 9 aa, Homo sapiens
  misc_feature: Table A; Target 101155; HLA-A*01:01; ZFP42; ENSG00000179059; CTA
NSLEYSEYM

SEQ ID NO: 101156 - protein, 9 aa, Homo sapiens
  misc_feature: Table A; Target 101156; HLA-B*35:01; ZFP42; ENSG00000179059; CTA
NSLEYSEYM

SEQ ID NO: 101157 - protein, 9 aa, Homo sapiens
  misc_feature: Table A; Target 101157; HLA-B*35:03; ZFP42; ENSG00000179059; CTA
NSLEYSEYM

SEQ ID NO: 101158 - protein, 9 aa, Homo sapiens
  misc_feature: Table A; Target 101158; HLA-C*01:02; ZFP42; ENSG00000179059; CTA
NSLEYSEYM

SEQ ID NO: 101159 - protein, 9 aa, Homo sapiens
  misc_feature: Table A; Target 101159; HLA-C*04:01; ZFP42; ENSG00000179059; CTA
NSLEYSEYM

SEQ ID NO: 101160 - protein, 10 aa, Homo sapiens
  misc_feature: Table A; Target 101160; HLA-A*03:02; ZFP42; ENSG00000179059; CTA
NTNKNEQEGK

SEQ ID NO: 101161 - protein, 10 aa, Homo sapiens
  misc_feature: Table A; Target 101161; HLA-A*11:01; ZFP42; ENSG00000179059; CTA
NTNKNEQEGK

SEQ ID NO: 101162 - protein, 10 aa, Homo sapiens
  misc_feature: Table A; Target 101162; HLA-A*68:01; ZFP42; ENSG00000179059; CTA
NTNKNEQEGK

SEQ ID NO: 101163 - protein, 10 aa, Homo sapiens
  misc_feature: Table A; Target 101163; HLA-B*27:02; ZFP42; ENSG00000179059; CTA
NTNKNEQEGK

SEQ ID NO: 101164 - protein, 10 aa, Homo sapiens
  misc_feature: Table A; Target 101164; HLA-C*07:01; ZFP42; ENSG00000179059; CTA
NTNKNEQEGK

SEQ ID NO: 101165 - protein, 10 aa, Homo sapiens
  misc_feature: Table A; Target 101165; HLA-C*07:06; ZFP42; ENSG00000179059; CTA
NTNKNEQEGK

SEQ ID NO: 101166 - protein, 9 aa, Homo sapiens
  misc_feature: Table A; Target 101166; HLA-B*27:02; ZFP42; ENSG00000179059; CTA
PGIDLSDPK

SEQ ID NO: 101167 - protein, 11 aa, Homo sapiens
  misc_feature: Table A; Target 101167; HLA-C*04:01; ZFP42; ENSG00000179059; CTA
PGPQALGGDDF

SEQ ID NO: 101168 - protein, 10 aa, Homo sapiens
  misc_feature: Table A; Target 101168; HLA-B*07:02; ZFP42; ENSG00000179059; CTA
PPINKEYDSL

SEQ ID NO: 101169 - protein, 8 aa, Homo sapiens
  misc_feature: Table A; Target 101169; HLA-C*07:04; ZFP42; ENSG00000179059; CTA
PQKIVGEN

SEQ ID NO: 101170 - protein, 9 aa, Homo sapiens
  misc_feature: Table A; Target 101170; HLA-C*06:02; ZFP42; ENSG00000179059; CTA
PQSGCTRKL

SEQ ID NO: 101171 - protein, 8 aa, Homo sapiens
  misc_feature: Table A; Target 101171; HLA-B*07:02; ZFP42; ENSG00000179059; CTA
PVSAVWAL

SEQ ID NO: 101172 - protein, 9 aa, Homo sapiens
  misc_feature: Table A; Target 101172; HLA-B*54:01; ZFP42; ENSG00000179059; CTA
QAEIEPVSA

SEQ ID NO: 101173 - protein, 9 aa, Homo sapiens
  misc_feature: Table A; Target 101173; HLA-C*05:01; ZFP42; ENSG00000179059; CTA
QAEIEPVSA

SEQ ID NO: 101174 - protein, 11 aa, Homo sapiens
  misc_feature: Table A; Target 101174; HLA-B*57:01; ZFP42; ENSG00000179059; CTA
QAEIEPVSAVW

SEQ ID NO: 101175 - protein, 11 aa, Homo sapiens
  misc_feature: Table A; Target 101175; HLA-B*27:02; ZFP42; ENSG00000179059; CTA
QDLQAEIEPVS

SEQ ID NO: 101176 - protein, 9 aa, Homo sapiens
  misc_feature: Table A; Target 101176; HLA-B*15:03; ZFP42; ENSG00000179059; CTA
QKIVGENSL

SEQ ID NO: 101177 - protein, 9 aa, Homo sapiens
  misc_feature: Table A; Target 101177; HLA-B*38:01; ZFP42; ENSG00000179059; CTA
QKIVGENSL

SEQ ID NO: 101178 - protein, 9 aa, Homo sapiens
  misc_feature: Table A; Target 101178; HLA-B*39:01; ZFP42; ENSG00000179059; CTA
QKIVGENSL

SEQ ID NO: 101179 - protein, 9 aa, Homo sapiens
  misc_feature: Table A; Target 101179; HLA-B*15:03; ZFP42; ENSG00000179059; CTA
QKVFEASSL

SEQ ID NO: 101180 - protein, 9 aa, Homo sapiens
  misc_feature: Table A; Target 101180; HLA-B*38:01; ZFP42; ENSG00000179059; CTA
QKVFEASSL

SEQ ID NO: 101181 - protein, 9 aa, Homo sapiens
  misc_feature: Table A; Target 101181; HLA-B*39:01; ZFP42; ENSG00000179059; CTA
QKVFEASSL

SEQ ID NO: 101182 - protein, 9 aa, Homo sapiens
  misc_feature: Table A; Target 101182; HLA-A*03:01; ZFP42; ENSG00000179059; CTA
QLAEFARKK

SEQ ID NO: 101183 - protein, 9 aa, Homo sapiens
  misc_feature: Table A; Target 101183; HLA-A*03:02; ZFP42; ENSG00000179059; CTA
QLAEFARKK

SEQ ID NO: 101184 - protein, 9 aa, Homo sapiens
  misc_feature: Table A; Target 101184; HLA-A*11:01; ZFP42; ENSG00000179059; CTA
QLAEFARKK

SEQ ID NO: 101185 - protein, 9 aa, Homo sapiens
  misc_feature: Table A; Target 101185; HLA-A*02:01; ZFP42; ENSG00000179059; CTA
QLSQKVFEA

SEQ ID NO: 101186 - protein, 9 aa, Homo sapiens
  misc_feature: Table A; Target 101186; HLA-A*02:03; ZFP42; ENSG00000179059; CTA
QLSQKVFEA

SEQ ID NO: 101187 - protein, 9 aa, Homo sapiens
  misc_feature: Table A; Target 101187; HLA-A*02:04; ZFP42; ENSG00000179059; CTA
QLSQKVFEA

SEQ ID NO: 101188 - protein, 9 aa, Homo sapiens
  misc_feature: Table A; Target 101188; HLA-B*08:01; ZFP42; ENSG00000179059; CTA
QLSQKVFEA

SEQ ID NO: 101189 - protein, 9 aa, Homo sapiens
  misc_feature: Table A; Target 101189; HLA-B*13:02; ZFP42; ENSG00000179059; CTA
QLSQKVFEA

SEQ ID NO: 101190 - protein, 9 aa, Homo sapiens
  misc_feature: Table A; Target 101190; HLA-B*54:01; ZFP42; ENSG00000179059; CTA
QLSQKVFEA

SEQ ID NO: 101191 - protein, 9 aa, Homo sapiens
  misc_feature: Table A; Target 101191; HLA-B*55:01; ZFP42; ENSG00000179059; CTA
QLSQKVFEA

SEQ ID NO: 101192 - protein, 9 aa, Homo sapiens
  misc_feature: Table A; Target 101192; HLA-B*07:02; ZFP42; ENSG00000179059; CTA
QPILEEDSL

SEQ ID NO: 101193 - protein, 9 aa, Homo sapiens
  misc_feature: Table A; Target 101193; HLA-B*35:01; ZFP42; ENSG00000179059; CTA
QPILEEDSL

SEQ ID NO: 101194 - protein, 9 aa, Homo sapiens
  misc_feature: Table A; Target 101194; HLA-B*38:01; ZFP42; ENSG00000179059; CTA
QPILEEDSL

SEQ ID NO: 101195 - protein, 9 aa, Homo sapiens
  misc_feature: Table A; Target 101195; HLA-B*55:01; ZFP42; ENSG00000179059; CTA
QPILEEDSL

SEQ ID NO: 101196 - protein, 9 aa, Homo sapiens
  misc_feature: Table A; Target 101196; HLA-C*03:03; ZFP42; ENSG00000179059; CTA
QPILEEDSL

SEQ ID NO: 101197 - protein, 10 aa, Homo sapiens
  misc_feature: Table A; Target 101197; HLA-B*35:01; ZFP42; ENSG00000179059; CTA
QPILEEDSLF

SEQ ID NO: 101198 - protein, 10 aa, Homo sapiens
  misc_feature: Table A; Target 101198; HLA-B*55:01; ZFP42; ENSG00000179059; CTA
QPILEEDSLF

SEQ ID NO: 101199 - protein, 8 aa, Homo sapiens
  misc_feature: Table A; Target 101199; HLA-B*15:03; ZFP42; ENSG00000179059; CTA
QQLSQKVF

SEQ ID NO: 101200 - protein, 9 aa, Homo sapiens
  misc_feature: Table A; Target 101200; HLA-A*31:01; ZFP42; ENSG00000179059; CTA
RAPSGAKPR

SEQ ID NO: 101201 - protein, 8 aa, Homo sapiens
  misc_feature: Table A; Target 101201; HLA-A*23:01; ZFP42; ENSG00000179059; CTA
RFIQSNNL

SEQ ID NO: 101202 - protein, 9 aa, Homo sapiens
  misc_feature: Table A; Target 101202; HLA-A*31:01; ZFP42; ENSG00000179059; CTA
RFSLDFNLR

SEQ ID NO: 101203 - protein, 10 aa, Homo sapiens
  misc_feature: Table A; Target 101203; HLA-A*30:02; ZFP42; ENSG00000179059; CTA
RKKPPINKEY

SEQ ID NO: 101204 - protein, 9 aa, Homo sapiens
  misc_feature: Table A; Target 101204; HLA-B*27:05; ZFP42; ENSG00000179059; CTA
RRFIQSNNL

SEQ ID NO: 101205 - protein, 9 aa, Homo sapiens
  misc_feature: Table A; Target 101205; HLA-C*06:02; ZFP42; ENSG00000179059; CTA
RRFIQSNNL

SEQ ID NO: 101206 - protein, 10 aa, Homo sapiens
  misc_feature: Table A; Target 101206; HLA-B*27:05; ZFP42; ENSG00000179059; CTA
RRFIQSNNLK

SEQ ID NO: 101207 - protein, 10 aa, Homo sapiens
  misc_feature: Table A; Target 101207; HLA-C*06:02; ZFP42; ENSG00000179059; CTA
RRFIQSNNLK

SEQ ID NO: 101208 - protein, 9 aa, Homo sapiens
  misc_feature: Table A; Target 101208; HLA-A*24:02; ZFP42; ENSG00000179059; CTA
SDPKQLAEF

SEQ ID NO: 101209 - protein, 9 aa, Homo sapiens
  misc_feature: Table A; Target 101209; HLA-B*37:01; ZFP42; ENSG00000179059; CTA
SDPKQLAEF

SEQ ID NO: 101210 - protein, 9 aa, Homo sapiens
  misc_feature: Table A; Target 101210; HLA-B*44:02; ZFP42; ENSG00000179059; CTA
SDPKQLAEF

SEQ ID NO: 101211 - protein, 9 aa, Homo sapiens
  misc_feature: Table A; Target 101211; HLA-A*30:01; ZFP42; ENSG00000179059; CTA
SEQQLSQKV

SEQ ID NO: 101212 - protein, 9 aa, Homo sapiens
  misc_feature: Table A; Target 101212; HLA-B*13:02; ZFP42; ENSG00000179059; CTA
SEQQLSQKV

SEQ ID NO: 101213 - protein, 9 aa, Homo sapiens
  misc_feature: Table A; Target 101213; HLA-B*18:01; ZFP42; ENSG00000179059; CTA
SEQQLSQKV

SEQ ID NO: 101214 - protein, 9 aa, Homo sapiens
  misc_feature: Table A; Target 101214; HLA-B*27:02; ZFP42; ENSG00000179059; CTA
SEQQLSQKV

SEQ ID NO: 101215 - protein, 9 aa, Homo sapiens
  misc_feature: Table A; Target 101215; HLA-B*37:01; ZFP42; ENSG00000179059; CTA
SEQQLSQKV

SEQ ID NO: 101216 - protein, 9 aa, Homo sapiens
  misc_feature: Table A; Target 101216; HLA-B*40:01; ZFP42; ENSG00000179059; CTA
SEQQLSQKV

SEQ ID NO: 101217 - protein, 9 aa, Homo sapiens
  misc_feature: Table A; Target 101217; HLA-B*40:02; ZFP42; ENSG00000179059; CTA
SEQQLSQKV

SEQ ID NO: 101218 - protein, 9 aa, Homo sapiens
  misc_feature: Table A; Target 101218; HLA-B*44:02; ZFP42; ENSG00000179059; CTA
SEQQLSQKV

SEQ ID NO: 101219 - protein, 9 aa, Homo sapiens
  misc_feature: Table A; Target 101219; HLA-B*44:03; ZFP42; ENSG00000179059; CTA
SEQQLSQKV

SEQ ID NO: 101220 - protein, 9 aa, Homo sapiens
  misc_feature: Table A; Target 101220; HLA-B*49:01; ZFP42; ENSG00000179059; CTA
SEQQLSQKV

SEQ ID NO: 101221 - protein, 9 aa, Homo sapiens
  misc_feature: Table A; Target 101221; HLA-C*16:04; ZFP42; ENSG00000179059; CTA
SEQQLSQKV

SEQ ID NO: 101222 - protein, 10 aa, Homo sapiens
  misc_feature: Table A; Target 101222; HLA-A*30:01; ZFP42; ENSG00000179059; CTA
SEQQLSQKVF

SEQ ID NO: 101223 - protein, 10 aa, Homo sapiens
  misc_feature: Table A; Target 101223; HLA-B*18:01; ZFP42; ENSG00000179059; CTA
SEQQLSQKVF

SEQ ID NO: 101224 - protein, 10 aa, Homo sapiens
  misc_feature: Table A; Target 101224; HLA-B*27:02; ZFP42; ENSG00000179059; CTA
SEQQLSQKVF

SEQ ID NO: 101225 - protein, 10 aa, Homo sapiens
  misc_feature: Table A; Target 101225; HLA-B*37:01; ZFP42; ENSG00000179059; CTA
SEQQLSQKVF

SEQ ID NO: 101226 - protein, 10 aa, Homo sapiens
  misc_feature: Table A; Target 101226; HLA-B*40:01; ZFP42; ENSG00000179059; CTA
SEQQLSQKVF

SEQ ID NO: 101227 - protein, 10 aa, Homo sapiens
  misc_feature: Table A; Target 101227; HLA-B*40:02; ZFP42; ENSG00000179059; CTA
SEQQLSQKVF

SEQ ID NO: 101228 - protein, 10 aa, Homo sapiens
  misc_feature: Table A; Target 101228; HLA-C*16:04; ZFP42; ENSG00000179059; CTA
SEQQLSQKVF

SEQ ID NO: 101229 - protein, 9 aa, Homo sapiens
  misc_feature: Table A; Target 101229; HLA-A*30:01; ZFP42; ENSG00000179059; CTA
SEYMTGKKL

SEQ ID NO: 101230 - protein, 9 aa, Homo sapiens
  misc_feature: Table A; Target 101230; HLA-B*18:01; ZFP42; ENSG00000179059; CTA
SEYMTGKKL

SEQ ID NO: 101231 - protein, 9 aa, Homo sapiens
  misc_feature: Table A; Target 101231; HLA-B*27:02; ZFP42; ENSG00000179059; CTA
SEYMTGKKL

SEQ ID NO: 101232 - protein, 9 aa, Homo sapiens
  misc_feature: Table A; Target 101232; HLA-B*37:01; ZFP42; ENSG00000179059; CTA
SEYMTGKKL

SEQ ID NO: 101233 - protein, 9 aa, Homo sapiens
  misc_feature: Table A; Target 101233; HLA-B*40:01; ZFP42; ENSG00000179059; CTA
SEYMTGKKL

SEQ ID NO: 101234 - protein, 9 aa, Homo sapiens
  misc_feature: Table A; Target 101234; HLA-B*40:02; ZFP42; ENSG00000179059; CTA
SEYMTGKKL

SEQ ID NO: 101235 - protein, 9 aa, Homo sapiens
  misc_feature: Table A; Target 101235; HLA-B*44:02; ZFP42; ENSG00000179059; CTA
SEYMTGKKL

SEQ ID NO: 101236 - protein, 9 aa, Homo sapiens
  misc_feature: Table A; Target 101236; HLA-B*49:01; ZFP42; ENSG00000179059; CTA
SEYMTGKKL

SEQ ID NO: 101237 - protein, 9 aa, Homo sapiens
  misc_feature: Table A; Target 101237; HLA-C*02:02; ZFP42; ENSG00000179059; CTA
SEYMTGKKL

SEQ ID NO: 101238 - protein, 9 aa, Homo sapiens
  misc_feature: Table A; Target 101238; HLA-C*16:04; ZFP42; ENSG00000179059; CTA
SEYMTGKKL

SEQ ID NO: 101239 - protein, 10 aa, Homo sapiens
  misc_feature: Table A; Target 101239; HLA-B*40:02; ZFP42; ENSG00000179059; CTA
SEYMTGKKLP

SEQ ID NO: 101240 - protein, 9 aa, Homo sapiens
  misc_feature: Table A; Target 101240; HLA-A*03:01; ZFP42; ENSG00000179059; CTA
SLDFNLRTH

SEQ ID NO: 101241 - protein, 10 aa, Homo sapiens
  misc_feature: Table A; Target 101241; HLA-A*01:01; ZFP42; ENSG00000179059; CTA
SLDFNLRTHV

SEQ ID NO: 101242 - protein, 10 aa, Homo sapiens
  misc_feature: Table A; Target 101242; HLA-A*02:01; ZFP42; ENSG00000179059; CTA
SLDFNLRTHV

SEQ ID NO: 101243 - protein, 10 aa, Homo sapiens
  misc_feature: Table A; Target 101243; HLA-A*02:03; ZFP42; ENSG00000179059; CTA
SLDFNLRTHV

SEQ ID NO: 101244 - protein, 10 aa, Homo sapiens
  misc_feature: Table A; Target 101244; HLA-A*02:07; ZFP42; ENSG00000179059; CTA
SLDFNLRTHV

SEQ ID NO: 101245 - protein, 8 aa, Homo sapiens
  misc_feature: Table A; Target 101245; HLA-A*01:01; ZFP42; ENSG00000179059; CTA
SLECSLEY

SEQ ID NO: 101246 - protein, 9 aa, Homo sapiens
  misc_feature: Table A; Target 101246; HLA-C*06:02; ZFP42; ENSG00000179059; CTA
SLEYMKKGV

SEQ ID NO: 101247 - protein, 11 aa, Homo sapiens
  misc_feature: Table A; Target 101247; HLA-A*03:01; ZFP42; ENSG00000179059; CTA
SLEYSEYMTGK

SEQ ID NO: 101248 - protein, 11 aa, Homo sapiens
  misc_feature: Table A; Target 101248; HLA-A*03:02; ZFP42; ENSG00000179059; CTA
SLEYSEYMTGK

SEQ ID NO: 101249 - protein, 8 aa, Homo sapiens
  misc_feature: Table A; Target 101249; HLA-A*01:01; ZFP42; ENSG00000179059; CTA
SLFESLEY

SEQ ID NO: 101250 - protein, 8 aa, Homo sapiens
  misc_feature: Table A; Target 101250; HLA-A*03:01; ZFP42; ENSG00000179059; CTA
SLFESLEY

SEQ ID NO: 101251 - protein, 8 aa, Homo sapiens
  misc_feature: Table A; Target 101251; HLA-A*26:01; ZFP42; ENSG00000179059; CTA
SLFESLEY

SEQ ID NO: 101252 - protein, 8 aa, Homo sapiens
  misc_feature: Table A; Target 101252; HLA-A*29:02; ZFP42; ENSG00000179059; CTA
SLFESLEY

SEQ ID NO: 101253 - protein, 8 aa, Homo sapiens
  misc_feature: Table A; Target 101253; HLA-A*30:02; ZFP42; ENSG00000179059; CTA
SLFESLEY

SEQ ID NO: 101254 - protein, 8 aa, Homo sapiens
  misc_feature: Table A; Target 101254; HLA-A*32:01; ZFP42; ENSG00000179059; CTA
SLFESLEY

SEQ ID NO: 101255 - protein, 8 aa, Homo sapiens
  misc_feature: Table A; Target 101255; HLA-B*13:02; ZFP42; ENSG00000179059; CTA
SLFESLEY

SEQ ID NO: 101256 - protein, 8 aa, Homo sapiens
  misc_feature: Table A; Target 101256; HLA-B*15:01; ZFP42; ENSG00000179059; CTA
SLFESLEY

SEQ ID NO: 101257 - protein, 8 aa, Homo sapiens
  misc_feature: Table A; Target 101257; HLA-B*15:03; ZFP42; ENSG00000179059; CTA
SLFESLEY

SEQ ID NO: 101258 - protein, 8 aa, Homo sapiens
  misc_feature: Table A; Target 101258; HLA-B*18:01; ZFP42; ENSG00000179059; CTA
SLFESLEY

SEQ ID NO: 101259 - protein, 8 aa, Homo sapiens
  misc_feature: Table A; Target 101259; HLA-B*35:01; ZFP42; ENSG00000179059; CTA
SLFESLEY

SEQ ID NO: 101260 - protein, 8 aa, Homo sapiens
  misc_feature: Table A; Target 101260; HLA-B*39:01; ZFP42; ENSG00000179059; CTA
SLFESLEY

SEQ ID NO: 101261 - protein, 8 aa, Homo sapiens
  misc_feature: Table A; Target 101261; HLA-B*46:01; ZFP42; ENSG00000179059; CTA
SLFESLEY

SEQ ID NO: 101262 - protein, 8 aa, Homo sapiens
  misc_feature: Table A; Target 101262; HLA-C*02:02; ZFP42; ENSG00000179059; CTA
SLFESLEY

SEQ ID NO: 101263 - protein, 8 aa, Homo sapiens
  misc_feature: Table A; Target 101263; HLA-C*03:03; ZFP42; ENSG00000179059; CTA
SLFESLEY

SEQ ID NO: 101264 - protein, 8 aa, Homo sapiens
  misc_feature: Table A; Target 101264; HLA-C*07:01; ZFP42; ENSG00000179059; CTA
SLFESLEY

SEQ ID NO: 101265 - protein, 8 aa, Homo sapiens
  misc_feature: Table A; Target 101265; HLA-C*07:04; ZFP42; ENSG00000179059; CTA
SLFESLEY

SEQ ID NO: 101266 - protein, 8 aa, Homo sapiens
  misc_feature: Table A; Target 101266; HLA-C*14:02; ZFP42; ENSG00000179059; CTA
SLFESLEY

SEQ ID NO: 101267 - protein, 8 aa, Homo sapiens
  misc_feature: Table A; Target 101267; HLA-C*16:01; ZFP42; ENSG00000179059; CTA
SLFESLEY

SEQ ID NO: 101268 - protein, 9 aa, Homo sapiens
  misc_feature: Table A; Target 101268; HLA-A*02:03; ZFP42; ENSG00000179059; CTA
SLFESLEYL

SEQ ID NO: 101269 - protein, 9 aa, Homo sapiens
  misc_feature: Table A; Target 101269; HLA-A*02:04; ZFP42; ENSG00000179059; CTA
SLFESLEYL

SEQ ID NO: 101270 - protein, 9 aa, Homo sapiens
  misc_feature: Table A; Target 101270; HLA-A*02:07; ZFP42; ENSG00000179059; CTA
SLFESLEYL

SEQ ID NO: 101271 - protein, 9 aa, Homo sapiens
  misc_feature: Table A; Target 101271; HLA-A*68:02; ZFP42; ENSG00000179059; CTA
SLFESLEYL

SEQ ID NO: 101272 - protein, 9 aa, Homo sapiens
  misc_feature: Table A; Target 101272; HLA-B*13:02; ZFP42; ENSG00000179059; CTA
SLFESLEYL

SEQ ID NO: 101273 - protein, 9 aa, Homo sapiens
  misc_feature: Table A; Target 101273; HLA-B*40:01; ZFP42; ENSG00000179059; CTA
SLFESLEYL

SEQ ID NO: 101274 - protein, 9 aa, Homo sapiens
  misc_feature: Table A; Target 101274; HLA-B*40:02; ZFP42; ENSG00000179059; CTA
SLFESLEYL

SEQ ID NO: 101275 - protein, 9 aa, Homo sapiens
  misc_feature: Table A; Target 101275; HLA-B*55:01; ZFP42; ENSG00000179059; CTA
SLFESLEYL

SEQ ID NO: 101276 - protein, 9 aa, Homo sapiens
  misc_feature: Table A; Target 101276; HLA-C*01:02; ZFP42; ENSG00000179059; CTA
SLFESLEYL

SEQ ID NO: 101277 - protein, 10 aa, Homo sapiens
  misc_feature: Table A; Target 101277; HLA-A*03:01; ZFP42; ENSG00000179059; CTA
SLFESLEYLK

SEQ ID NO: 101278 - protein, 10 aa, Homo sapiens
  misc_feature: Table A; Target 101278; HLA-A*03:02; ZFP42; ENSG00000179059; CTA
SLFESLEYLK

SEQ ID NO: 101279 - protein, 10 aa, Homo sapiens
  misc_feature: Table A; Target 101279; HLA-A*11:01; ZFP42; ENSG00000179059; CTA
SLFESLEYLK

SEQ ID NO: 101280 - protein, 10 aa, Homo sapiens
  misc_feature: Table A; Target 101280; HLA-B*27:02; ZFP42; ENSG00000179059; CTA
SLFESLEYLK

SEQ ID NO: 101281 - protein, 11 aa, Homo sapiens
  misc_feature: Table A; Target 101281; HLA-A*03:01; ZFP42; ENSG00000179059; CTA
SLFESLEYLKK

SEQ ID NO: 101282 - protein, 11 aa, Homo sapiens
  misc_feature: Table A; Target 101282; HLA-A*11:01; ZFP42; ENSG00000179059; CTA
SLFESLEYLKK

SEQ ID NO: 101283 - protein, 9 aa, Homo sapiens
  misc_feature: Table A; Target 101283; HLA-A*03:02; ZFP42; ENSG00000179059; CTA
SLSAIACPQ

SEQ ID NO: 101284 - protein, 9 aa, Homo sapiens
  misc_feature: Table A; Target 101284; HLA-C*06:02; ZFP42; ENSG00000179059; CTA
SLSAIACPQ

SEQ ID NO: 101285 - protein, 9 aa, Homo sapiens
  misc_feature: Table A; Target 101285; HLA-B*08:01; ZFP42; ENSG00000179059; CTA
SNNLKAHIL

SEQ ID NO: 101286 - protein, 8 aa, Homo sapiens
  misc_feature: Table A; Target 101286; HLA-B*13:02; ZFP42; ENSG00000179059; CTA
SQDLQAEI

SEQ ID NO: 101287 - protein, 8 aa, Homo sapiens
  misc_feature: Table A; Target 101287; HLA-B*38:01; ZFP42; ENSG00000179059; CTA
SQDLQAEI

SEQ ID NO: 101288 - protein, 8 aa, Homo sapiens
  misc_feature: Table A; Target 101288; HLA-C*05:01; ZFP42; ENSG00000179059; CTA
SQDLQAEI

SEQ ID NO: 101289 - protein, 10 aa, Homo sapiens
  misc_feature: Table A; Target 101289; HLA-B*15:01; ZFP42; ENSG00000179059; CTA
SQKVFEASSL

SEQ ID NO: 101290 - protein, 10 aa, Homo sapiens
  misc_feature: Table A; Target 101290; HLA-B*40:02; ZFP42; ENSG00000179059; CTA
SQKVFEASSL

SEQ ID NO: 101291 - protein, 9 aa, Homo sapiens
  misc_feature: Table A; Target 101291; HLA-A*01:01; ZFP42; ENSG00000179059; CTA
SSLECSLEY

SEQ ID NO: 101292 - protein, 9 aa, Homo sapiens
  misc_feature: Table A; Target 101292; HLA-A*03:01; ZFP42; ENSG00000179059; CTA
SSLECSLEY

SEQ ID NO: 101293 - protein, 9 aa, Homo sapiens
  misc_feature: Table A; Target 101293; HLA-A*11:01; ZFP42; ENSG00000179059; CTA
SSLECSLEY

SEQ ID NO: 101294 - protein, 9 aa, Homo sapiens
  misc_feature: Table A; Target 101294; HLA-A*26:01; ZFP42; ENSG00000179059; CTA
SSLECSLEY

SEQ ID NO: 101295 - protein, 9 aa, Homo sapiens
  misc_feature: Table A; Target 101295; HLA-A*30:02; ZFP42; ENSG00000179059; CTA
SSLECSLEY

SEQ ID NO: 101296 - protein, 9 aa, Homo sapiens
  misc_feature: Table A; Target 101296; HLA-B*35:01; ZFP42; ENSG00000179059; CTA
SSLECSLEY

SEQ ID NO: 101297 - protein, 9 aa, Homo sapiens
  misc_feature: Table A; Target 101297; HLA-B*46:01; ZFP42; ENSG00000179059; CTA
SSLECSLEY

SEQ ID NO: 101298 - protein, 9 aa, Homo sapiens
  misc_feature: Table A; Target 101298; HLA-B*57:01; ZFP42; ENSG00000179059; CTA
SSLECSLEY

SEQ ID NO: 101299 - protein, 9 aa, Homo sapiens
  misc_feature: Table A; Target 101299; HLA-B*58:01; ZFP42; ENSG00000179059; CTA
SSLECSLEY

SEQ ID NO: 101300 - protein, 9 aa, Homo sapiens
  misc_feature: Table A; Target 101300; HLA-C*01:02; ZFP42; ENSG00000179059; CTA
SSLECSLEY

SEQ ID NO: 101301 - protein, 9 aa, Homo sapiens
  misc_feature: Table A; Target 101301; HLA-C*03:03; ZFP42; ENSG00000179059; CTA
SSLECSLEY

SEQ ID NO: 101302 - protein, 9 aa, Homo sapiens
  misc_feature: Table A; Target 101302; HLA-C*07:01; ZFP42; ENSG00000179059; CTA
SSLECSLEY

SEQ ID NO: 101303 - protein, 9 aa, Homo sapiens
  misc_feature: Table A; Target 101303; HLA-C*07:06; ZFP42; ENSG00000179059; CTA
SSLECSLEY

SEQ ID NO: 101304 - protein, 9 aa, Homo sapiens
  misc_feature: Table A; Target 101304; HLA-C*16:01; ZFP42; ENSG00000179059; CTA
SSLECSLEY

SEQ ID NO: 101305 - protein, 9 aa, Homo sapiens
  misc_feature: Table A; Target 101305; HLA-C*16:02; ZFP42; ENSG00000179059; CTA
SSLECSLEY

SEQ ID NO: 101306 - protein, 9 aa, Homo sapiens
  misc_feature: Table A; Target 101306; HLA-C*16:04; ZFP42; ENSG00000179059; CTA
SSLECSLEY

SEQ ID NO: 101307 - protein, 9 aa, Homo sapiens
  misc_feature: Table A; Target 101307; HLA-B*13:02; ZFP42; ENSG00000179059; CTA
SSQDLQAEI

SEQ ID NO: 101308 - protein, 9 aa, Homo sapiens
  misc_feature: Table A; Target 101308; HLA-A*33:01; ZFP42; ENSG00000179059; CTA
TNKNEQEGK

SEQ ID NO: 101309 - protein, 9 aa, Homo sapiens
  misc_feature: Table A; Target 101309; HLA-A*33:03; ZFP42; ENSG00000179059; CTA
TNKNEQEGK

SEQ ID NO: 101310 - protein, 9 aa, Homo sapiens
  misc_feature: Table A; Target 101310; HLA-C*16:01; ZFP42; ENSG00000179059; CTA
VCAECGKAF

SEQ ID NO: 101311 - protein, 9 aa, Homo sapiens
  misc_feature: Table A; Target 101311; HLA-B*54:01; ZFP42; ENSG00000179059; CTA
VCYEPGPQA

SEQ ID NO: 101312 - protein, 9 aa, Homo sapiens
  misc_feature: Table A; Target 101312; HLA-B*55:01; ZFP42; ENSG00000179059; CTA
VCYEPGPQA

SEQ ID NO: 101313 - protein, 9 aa, Homo sapiens
  misc_feature: Table A; Target 101313; HLA-B*56:01; ZFP42; ENSG00000179059; CTA
VCYEPGPQA

SEQ ID NO: 101314 - protein, 9 aa, Homo sapiens
  misc_feature: Table A; Target 101314; HLA-C*03:03; ZFP42; ENSG00000179059; CTA
VCYEPGPQA

SEQ ID NO: 101315 - protein, 9 aa, Homo sapiens
  misc_feature: Table A; Target 101315; HLA-C*03:04; ZFP42; ENSG00000179059; CTA
VCYEPGPQA

SEQ ID NO: 101316 - protein, 9 aa, Homo sapiens
  misc_feature: Table A; Target 101316; HLA-C*12:03; ZFP42; ENSG00000179059; CTA
VCYEPGPQA

SEQ ID NO: 101317 - protein, 10 aa, Homo sapiens
  misc_feature: Table A; Target 101317; HLA-A*02:01; ZFP42; ENSG00000179059; CTA
VCYEPGPQAL

SEQ ID NO: 101318 - protein, 10 aa, Homo sapiens
  misc_feature: Table A; Target 101318; HLA-A*02:03; ZFP42; ENSG00000179059; CTA
VCYEPGPQAL

SEQ ID NO: 101319 - protein, 10 aa, Homo sapiens
  misc_feature: Table A; Target 101319; HLA-A*03:01; ZFP42; ENSG00000179059; CTA
VCYEPGPQAL

SEQ ID NO: 101320 - protein, 10 aa, Homo sapiens
  misc_feature: Table A; Target 101320; HLA-A*23:01; ZFP42; ENSG00000179059; CTA
VCYEPGPQAL

SEQ ID NO: 101321 - protein, 10 aa, Homo sapiens
  misc_feature: Table A; Target 101321; HLA-A*24:02; ZFP42; ENSG00000179059; CTA
VCYEPGPQAL

SEQ ID NO: 101322 - protein, 10 aa, Homo sapiens
  misc_feature: Table A; Target 101322; HLA-A*30:01; ZFP42; ENSG00000179059; CTA
VCYEPGPQAL

SEQ ID NO: 101323 - protein, 10 aa, Homo sapiens
  misc_feature: Table A; Target 101323; HLA-A*31:01; ZFP42; ENSG00000179059; CTA
VCYEPGPQAL

SEQ ID NO: 101324 - protein, 10 aa, Homo sapiens
  misc_feature: Table A; Target 101324; HLA-A*32:01; ZFP42; ENSG00000179059; CTA
VCYEPGPQAL

SEQ ID NO: 101325 - protein, 10 aa, Homo sapiens
  misc_feature: Table A; Target 101325; HLA-B*07:02; ZFP42; ENSG00000179059; CTA
VCYEPGPQAL

SEQ ID NO: 101326 - protein, 10 aa, Homo sapiens
  misc_feature: Table A; Target 101326; HLA-B*13:02; ZFP42; ENSG00000179059; CTA
VCYEPGPQAL

SEQ ID NO: 101327 - protein, 10 aa, Homo sapiens
  misc_feature: Table A; Target 101327; HLA-B*15:01; ZFP42; ENSG00000179059; CTA
VCYEPGPQAL

SEQ ID NO: 101328 - protein, 10 aa, Homo sapiens
  misc_feature: Table A; Target 101328; HLA-B*15:03; ZFP42; ENSG00000179059; CTA
VCYEPGPQAL

SEQ ID NO: 101329 - protein, 10 aa, Homo sapiens
  misc_feature: Table A; Target 101329; HLA-B*27:05; ZFP42; ENSG00000179059; CTA
VCYEPGPQAL

SEQ ID NO: 101330 - protein, 10 aa, Homo sapiens
  misc_feature: Table A; Target 101330; HLA-B*35:03; ZFP42; ENSG00000179059; CTA
VCYEPGPQAL

SEQ ID NO: 101331 - protein, 10 aa, Homo sapiens
  misc_feature: Table A; Target 101331; HLA-B*38:01; ZFP42; ENSG00000179059; CTA
VCYEPGPQAL

SEQ ID NO: 101332 - protein, 10 aa, Homo sapiens
  misc_feature: Table A; Target 101332; HLA-B*39:01; ZFP42; ENSG00000179059; CTA
VCYEPGPQAL

SEQ ID NO: 101333 - protein, 10 aa, Homo sapiens
  misc_feature: Table A; Target 101333; HLA-B*40:01; ZFP42; ENSG00000179059; CTA
VCYEPGPQAL

SEQ ID NO: 101334 - protein, 10 aa, Homo sapiens
  misc_feature: Table A; Target 101334; HLA-B*40:02; ZFP42; ENSG00000179059; CTA
VCYEPGPQAL

SEQ ID NO: 101335 - protein, 10 aa, Homo sapiens
  misc_feature: Table A; Target 101335; HLA-B*46:01; ZFP42; ENSG00000179059; CTA
VCYEPGPQAL

SEQ ID NO: 101336 - protein, 10 aa, Homo sapiens
  misc_feature: Table A; Target 101336; HLA-B*51:01; ZFP42; ENSG00000179059; CTA
VCYEPGPQAL

SEQ ID NO: 101337 - protein, 10 aa, Homo sapiens
  misc_feature: Table A; Target 101337; HLA-B*55:01; ZFP42; ENSG00000179059; CTA
VCYEPGPQAL

SEQ ID NO: 101338 - protein, 10 aa, Homo sapiens
  misc_feature: Table A; Target 101338; HLA-B*58:01; ZFP42; ENSG00000179059; CTA
VCYEPGPQAL

SEQ ID NO: 101339 - protein, 10 aa, Homo sapiens
  misc_feature: Table A; Target 101339; HLA-C*01:02; ZFP42; ENSG00000179059; CTA
VCYEPGPQAL

SEQ ID NO: 101340 - protein, 10 aa, Homo sapiens
  misc_feature: Table A; Target 101340; HLA-C*02:02; ZFP42; ENSG00000179059; CTA
VCYEPGPQAL

SEQ ID NO: 101341 - protein, 10 aa, Homo sapiens
  misc_feature: Table A; Target 101341; HLA-C*03:03; ZFP42; ENSG00000179059; CTA
VCYEPGPQAL

SEQ ID NO: 101342 - protein, 10 aa, Homo sapiens
  misc_feature: Table A; Target 101342; HLA-C*04:01; ZFP42; ENSG00000179059; CTA
VCYEPGPQAL

SEQ ID NO: 101343 - protein, 10 aa, Homo sapiens
  misc_feature: Table A; Target 101343; HLA-C*05:01; ZFP42; ENSG00000179059; CTA
VCYEPGPQAL

SEQ ID NO: 101344 - protein, 10 aa, Homo sapiens
  misc_feature: Table A; Target 101344; HLA-C*06:02; ZFP42; ENSG00000179059; CTA
VCYEPGPQAL

SEQ ID NO: 101345 - protein, 10 aa, Homo sapiens
  misc_feature: Table A; Target 101345; HLA-C*07:01; ZFP42; ENSG00000179059; CTA
VCYEPGPQAL

SEQ ID NO: 101346 - protein, 10 aa, Homo sapiens
  misc_feature: Table A; Target 101346; HLA-C*07:02; ZFP42; ENSG00000179059; CTA
VCYEPGPQAL

SEQ ID NO: 101347 - protein, 10 aa, Homo sapiens
  misc_feature: Table A; Target 101347; HLA-C*07:04; ZFP42; ENSG00000179059; CTA
VCYEPGPQAL

SEQ ID NO: 101348 - protein, 10 aa, Homo sapiens
  misc_feature: Table A; Target 101348; HLA-C*07:06; ZFP42; ENSG00000179059; CTA
VCYEPGPQAL

SEQ ID NO: 101349 - protein, 10 aa, Homo sapiens
  misc_feature: Table A; Target 101349; HLA-C*12:03; ZFP42; ENSG00000179059; CTA
VCYEPGPQAL

SEQ ID NO: 101350 - protein, 10 aa, Homo sapiens
  misc_feature: Table A; Target 101350; HLA-C*14:02; ZFP42; ENSG00000179059; CTA
VCYEPGPQAL

SEQ ID NO: 101351 - protein, 10 aa, Homo sapiens
  misc_feature: Table A; Target 101351; HLA-C*16:01; ZFP42; ENSG00000179059; CTA
VCYEPGPQAL

SEQ ID NO: 101352 - protein, 10 aa, Homo sapiens
  misc_feature: Table A; Target 101352; HLA-C*16:02; ZFP42; ENSG00000179059; CTA
VCYEPGPQAL

SEQ ID NO: 101353 - protein, 10 aa, Homo sapiens
  misc_feature: Table A; Target 101353; HLA-C*16:04; ZFP42; ENSG00000179059; CTA
VCYEPGPQAL

SEQ ID NO: 101354 - protein, 9 aa, Homo sapiens
  misc_feature: Table A; Target 101354; HLA-C*07:01; ZFP42; ENSG00000179059; CTA
VFEASSLEC

SEQ ID NO: 101355 - protein, 8 aa, Homo sapiens
  misc_feature: Table A; Target 101355; HLA-A*01:01; ZFP42; ENSG00000179059; CTA
VGENSLEY

SEQ ID NO: 101356 - protein, 8 aa, Homo sapiens
  misc_feature: Table A; Target 101356; HLA-B*39:01; ZFP42; ENSG00000179059; CTA
VGENSLEY

SEQ ID NO: 101357 - protein, 8 aa, Homo sapiens
  misc_feature: Table A; Target 101357; HLA-B*46:01; ZFP42; ENSG00000179059; CTA
VGENSLEY

SEQ ID NO: 101358 - protein, 8 aa, Homo sapiens
  misc_feature: Table A; Target 101358; HLA-C*05:01; ZFP42; ENSG00000179059; CTA
VGENSLEY

SEQ ID NO: 101359 - protein, 8 aa, Homo sapiens
  misc_feature: Table A; Target 101359; HLA-C*07:01; ZFP42; ENSG00000179059; CTA
VGENSLEY

SEQ ID NO: 101360 - protein, 11 aa, Homo sapiens
  misc_feature: Table A; Target 101360; HLA-A*01:01; ZFP42; ENSG00000179059; CTA
VGENSLEYSEY

SEQ ID NO: 101361 - protein, 8 aa, Homo sapiens
  misc_feature: Table A; Target 101361; HLA-B*27:05; ZFP42; ENSG00000179059; CTA
VRIHTGEK

SEQ ID NO: 101362 - protein, 9 aa, Homo sapiens
  misc_feature: Table A; Target 101362; HLA-B*27:05; ZFP42; ENSG00000179059; CTA
VRIHTGEKR

SEQ ID NO: 101363 - protein, 9 aa, Homo sapiens
  misc_feature: Table A; Target 101363; HLA-B*37:01; ZFP42; ENSG00000179059; CTA
YDSLSAIAC

SEQ ID NO: 101364 - protein, 9 aa, Homo sapiens
  misc_feature: Table A; Target 101364; HLA-B*40:02; ZFP42; ENSG00000179059; CTA
YDSLSAIAC

SEQ ID NO: 101365 - protein, 8 aa, Homo sapiens
  misc_feature: Table A; Target 101365; HLA-A*30:01; ZFP42; ENSG00000179059; CTA
YEPGPQAL

SEQ ID NO: 101366 - protein, 8 aa, Homo sapiens
  misc_feature: Table A; Target 101366; HLA-B*07:02; ZFP42; ENSG00000179059; CTA
YEPGPQAL

SEQ ID NO: 101367 - protein, 8 aa, Homo sapiens
  misc_feature: Table A; Target 101367; HLA-B*08:01; ZFP42; ENSG00000179059; CTA
YEPGPQAL

SEQ ID NO: 101368 - protein, 8 aa, Homo sapiens
  misc_feature: Table A; Target 101368; HLA-B*18:01; ZFP42; ENSG00000179059; CTA
YEPGPQAL

SEQ ID NO: 101369 - protein, 8 aa, Homo sapiens
  misc_feature: Table A; Target 101369; HLA-B*37:01; ZFP42; ENSG00000179059; CTA
YEPGPQAL

SEQ ID NO: 101370 - protein, 8 aa, Homo sapiens
  misc_feature: Table A; Target 101370; HLA-B*39:01; ZFP42; ENSG00000179059; CTA
YEPGPQAL

SEQ ID NO: 101371 - protein, 8 aa, Homo sapiens
  misc_feature: Table A; Target 101371; HLA-B*40:01; ZFP42; ENSG00000179059; CTA
YEPGPQAL

SEQ ID NO: 101372 - protein, 8 aa, Homo sapiens
  misc_feature: Table A; Target 101372; HLA-B*40:02; ZFP42; ENSG00000179059; CTA
YEPGPQAL

SEQ ID NO: 101373 - protein, 8 aa, Homo sapiens
  misc_feature: Table A; Target 101373; HLA-B*44:02; ZFP42; ENSG00000179059; CTA
YEPGPQAL

SEQ ID NO: 101374 - protein, 8 aa, Homo sapiens
  misc_feature: Table A; Target 101374; HLA-B*44:03; ZFP42; ENSG00000179059; CTA
YEPGPQAL

SEQ ID NO: 101375 - protein, 8 aa, Homo sapiens
  misc_feature: Table A; Target 101375; HLA-B*49:01; ZFP42; ENSG00000179059; CTA
YEPGPQAL

SEQ ID NO: 101376 - protein, 8 aa, Homo sapiens
  misc_feature: Table A; Target 101376; HLA-C*01:02; ZFP42; ENSG00000179059; CTA
YEPGPQAL

SEQ ID NO: 101377 - protein, 8 aa, Homo sapiens
  misc_feature: Table A; Target 101377; HLA-C*02:02; ZFP42; ENSG00000179059; CTA
YEPGPQAL

SEQ ID NO: 101378 - protein, 8 aa, Homo sapiens
  misc_feature: Table A; Target 101378; HLA-C*03:03; ZFP42; ENSG00000179059; CTA
YEPGPQAL

SEQ ID NO: 101379 - protein, 8 aa, Homo sapiens
  misc_feature: Table A; Target 101379; HLA-C*03:04; ZFP42; ENSG00000179059; CTA
YEPGPQAL

SEQ ID NO: 101380 - protein, 8 aa, Homo sapiens
  misc_feature: Table A; Target 101380; HLA-C*04:01; ZFP42; ENSG00000179059; CTA
YEPGPQAL

SEQ ID NO: 101381 - protein, 8 aa, Homo sapiens
  misc_feature: Table A; Target 101381; HLA-C*05:01; ZFP42; ENSG00000179059; CTA
YEPGPQAL

SEQ ID NO: 101382 - protein, 8 aa, Homo sapiens
  misc_feature: Table A; Target 101382; HLA-C*06:02; ZFP42; ENSG00000179059; CTA
YEPGPQAL

SEQ ID NO: 101383 - protein, 8 aa, Homo sapiens
  misc_feature: Table A; Target 101383; HLA-C*07:01; ZFP42; ENSG00000179059; CTA
YEPGPQAL

SEQ ID NO: 101384 - protein, 8 aa, Homo sapiens
  misc_feature: Table A; Target 101384; HLA-C*07:02; ZFP42; ENSG00000179059; CTA
YEPGPQAL

SEQ ID NO: 101385 - protein, 8 aa, Homo sapiens
  misc_feature: Table A; Target 101385; HLA-C*07:04; ZFP42; ENSG00000179059; CTA
YEPGPQAL

SEQ ID NO: 101386 - protein, 8 aa, Homo sapiens
  misc_feature: Table A; Target 101386; HLA-C*12:03; ZFP42; ENSG00000179059; CTA
YEPGPQAL

SEQ ID NO: 101387 - protein, 8 aa, Homo sapiens
  misc_feature: Table A; Target 101387; HLA-C*16:01; ZFP42; ENSG00000179059; CTA
YEPGPQAL

SEQ ID NO: 101388 - protein, 8 aa, Homo sapiens
  misc_feature: Table A; Target 101388; HLA-C*16:02; ZFP42; ENSG00000179059; CTA
YEPGPQAL

SEQ ID NO: 101389 - protein, 8 aa, Homo sapiens
  misc_feature: Table A; Target 101389; HLA-C*16:04; ZFP42; ENSG00000179059; CTA
YEPGPQAL

SEQ ID NO: 101390 - protein, 9 aa, Homo sapiens
  misc_feature: Table A; Target 101390; HLA-B*49:01; ZFP42; ENSG00000179059; CTA
YEPGPQALG

SEQ ID NO: 101391 - protein, 10 aa, Homo sapiens
  misc_feature: Table A; Target 101391; HLA-A*02:03; ZFP42; ENSG00000179059; CTA
YLKKGSEQQL

SEQ ID NO: 101392 - protein, 10 aa, Homo sapiens
  misc_feature: Table A; Target 101392; HLA-B*08:01; ZFP42; ENSG00000179059; CTA
YLKKGSEQQL

SEQ ID NO: 101393 - protein, 10 aa, Homo sapiens
  misc_feature: Table A; Target 101393; HLA-B*40:02; ZFP42; ENSG00000179059; CTA
YLKKGSEQQL

SEQ ID NO: 101394 - protein, 8 aa, Homo sapiens
  misc_feature: Table A; Target 101394; HLA-B*27:02; ZFP42; ENSG00000179059; CTA
YSEYMTGK

SEQ ID NO: 101395 - protein, 9 aa, Homo sapiens
  misc_feature: Table A; Target 101395; HLA-A*01:01; ZFP42; ENSG00000179059; CTA
YSEYMTGKK

SEQ ID NO: 101396 - protein, 10 aa, Homo sapiens
  misc_feature: Table A; Target 101396; HLA-B*54:01; ZFP42; ENSG00000179059; CTA
YVCYEPGPQA

SEQ ID NO: 101397 - protein, 9 aa, Homo sapiens
  misc_feature: Table A; Target 101397; HLA-B*40:02; ZNF560; ENSG00000198028; CTA
AEKTSECNA

SEQ ID NO: 101398 - protein, 9 aa, Homo sapiens
  misc_feature: Table A; Target 101398; HLA-A*24:02; ZNF560; ENSG00000198028; CTA
AFASFSARI

SEQ ID NO: 101399 - protein, 8 aa, Homo sapiens
  misc_feature: Table A; Target 101399; HLA-C*14:02; ZNF560; ENSG00000198028; CTA
AFGTSAGL

SEQ ID NO: 101400 - protein, 8 aa, Homo sapiens
  misc_feature: Table A; Target 101400; HLA-A*23:01; ZNF560; ENSG00000198028; CTA
AFISYPSL

SEQ ID NO: 101401 - protein, 8 aa, Homo sapiens
  misc_feature: Table A; Target 101401; HLA-C*14:02; ZNF560; ENSG00000198028; CTA
AFISYPSL

SEQ ID NO: 101402 - protein, 9 aa, Homo sapiens
  misc_feature: Table A; Target 101402; HLA-A*23:01; ZNF560; ENSG00000198028; CTA
AFISYPSLF

SEQ ID NO: 101403 - protein, 9 aa, Homo sapiens
  misc_feature: Table A; Target 101403; HLA-A*24:02; ZNF560; ENSG00000198028; CTA
AFISYPSLF

SEQ ID NO: 101404 - protein, 9 aa, Homo sapiens
  misc_feature: Table A; Target 101404; HLA-A*29:02; ZNF560; ENSG00000198028; CTA
AFISYPSLF

SEQ ID NO: 101405 - protein, 9 aa, Homo sapiens
  misc_feature: Table A; Target 101405; HLA-C*14:02; ZNF560; ENSG00000198028; CTA
AFISYPSLF

SEQ ID NO: 101406 - protein, 8 aa, Homo sapiens
  misc_feature: Table A; Target 101406; HLA-C*16:01; ZNF560; ENSG00000198028; CTA
AFTERSDL

SEQ ID NO: 101407 - protein, 8 aa, Homo sapiens
  misc_feature: Table A; Target 101407; HLA-C*01:02; ZNF560; ENSG00000198028; CTA
AFVVSSSL

SEQ ID NO: 101408 - protein, 8 aa, Homo sapiens
  misc_feature: Table A; Target 101408; HLA-C*14:02; ZNF560; ENSG00000198028; CTA
AFVVSSSL

SEQ ID NO: 101409 - protein, 8 aa, Homo sapiens
  misc_feature: Table A; Target 101409; HLA-B*08:01; ZNF560; ENSG00000198028; CTA
AIKHQTSV

SEQ ID NO: 101410 - protein, 8 aa, Homo sapiens
  misc_feature: Table A; Target 101410; HLA-B*15:03; ZNF560; ENSG00000198028; CTA
AKDLLSLY

SEQ ID NO: 101411 - protein, 8 aa, Homo sapiens
  misc_feature: Table A; Target 101411; HLA-B*15:03; ZNF560; ENSG00000198028; CTA
AKVGFQLF

SEQ ID NO: 101412 - protein, 9 aa, Homo sapiens
  misc_feature: Table A; Target 101412; HLA-A*02:01; ZNF560; ENSG00000198028; CTA
ALQQEFWKI

SEQ ID NO: 101413 - protein, 9 aa, Homo sapiens
  misc_feature: Table A; Target 101413; HLA-A*02:04; ZNF560; ENSG00000198028; CTA
ALQQEFWKI

SEQ ID NO: 101414 - protein, 9 aa, Homo sapiens
  misc_feature: Table A; Target 101414; HLA-A*02:07; ZNF560; ENSG00000198028; CTA
ALQQEFWKI

SEQ ID NO: 101415 - protein, 9 aa, Homo sapiens
  misc_feature: Table A; Target 101415; HLA-A*02:01; ZNF560; ENSG00000198028; CTA
ALWQDNFCL

SEQ ID NO: 101416 - protein, 9 aa, Homo sapiens
  misc_feature: Table A; Target 101416; HLA-A*02:04; ZNF560; ENSG00000198028; CTA
ALWQDNFCL

SEQ ID NO: 101417 - protein, 10 aa, Homo sapiens
  misc_feature: Table A; Target 101417; HLA-A*03:01; ZNF560; ENSG00000198028; CTA
ALWQDNFCLK

SEQ ID NO: 101418 - protein, 9 aa, Homo sapiens
  misc_feature: Table A; Target 101418; HLA-B*27:05; ZNF560; ENSG00000198028; CTA
ARIAHLKTH

SEQ ID NO: 101419 - protein, 9 aa, Homo sapiens
  misc_feature: Table A; Target 101419; HLA-B*27:02; ZNF560; ENSG00000198028; CTA
ARNQNGEEL

SEQ ID NO: 101420 - protein, 9 aa, Homo sapiens
  misc_feature: Table A; Target 101420; HLA-B*27:05; ZNF560; ENSG00000198028; CTA
ARNQNGEEL

SEQ ID NO: 101421 - protein, 9 aa, Homo sapiens
  misc_feature: Table A; Target 101421; HLA-B*38:01; ZNF560; ENSG00000198028; CTA
ARNQNGEEL

SEQ ID NO: 101422 - protein, 9 aa, Homo sapiens
  misc_feature: Table A; Target 101422; HLA-B*39:01; ZNF560; ENSG00000198028; CTA
ARNQNGEEL

SEQ ID NO: 101423 - protein, 9 aa, Homo sapiens
  misc_feature: Table A; Target 101423; HLA-C*16:04; ZNF560; ENSG00000198028; CTA
ARNQNGEEL

SEQ ID NO: 101424 - protein, 10 aa, Homo sapiens
  misc_feature: Table A; Target 101424; HLA-B*27:02; ZNF560; ENSG00000198028; CTA
ARNQNGEELY

SEQ ID NO: 101425 - protein, 10 aa, Homo sapiens
  misc_feature: Table A; Target 101425; HLA-B*27:05; ZNF560; ENSG00000198028; CTA
ARNQNGEELY

SEQ ID NO: 101426 - protein, 10 aa, Homo sapiens
  misc_feature: Table A; Target 101426; HLA-C*16:04; ZNF560; ENSG00000198028; CTA
ARNQNGEELY

SEQ ID NO: 101427 - protein, 9 aa, Homo sapiens
  misc_feature: Table A; Target 101427; HLA-A*32:01; ZNF560; ENSG00000198028; CTA
ASFSARIAH

SEQ ID NO: 101428 - protein, 9 aa, Homo sapiens
  misc_feature: Table A; Target 101428; HLA-C*16:01; ZNF560; ENSG00000198028; CTA
ASFSARIAH

SEQ ID NO: 101429 - protein, 11 aa, Homo sapiens
  misc_feature: Table A; Target 101429; HLA-A*03:01; ZNF560; ENSG00000198028; CTA
ASFSARIAHLK

SEQ ID NO: 101430 - protein, 9 aa, Homo sapiens
  misc_feature: Table A; Target 101430; HLA-A*01:01; ZNF560; ENSG00000198028; CTA
AVDFTQEEW

SEQ ID NO: 101431 - protein, 9 aa, Homo sapiens
  misc_feature: Table A; Target 101431; HLA-B*58:01; ZNF560; ENSG00000198028; CTA
AVDFTQEEW

SEQ ID NO: 101432 - protein, 9 aa, Homo sapiens
  misc_feature: Table A; Target 101432; HLA-B*58:01; ZNF560; ENSG00000198028; CTA
AVEFTQEEW

SEQ ID NO: 101433 - protein, 9 aa, Homo sapiens
  misc_feature: Table A; Target 101433; HLA-A*24:02; ZNF560; ENSG00000198028; CTA
AVNVETHII

SEQ ID NO: 101434 - protein, 9 aa, Homo sapiens
  misc_feature: Table A; Target 101434; HLA-A*25:01; ZNF560; ENSG00000198028; CTA
AVNVETHII

SEQ ID NO: 101435 - protein, 9 aa, Homo sapiens
  misc_feature: Table A; Target 101435; HLA-A*32:01; ZNF560; ENSG00000198028; CTA
AVNVETHII

SEQ ID NO: 101436 - protein, 9 aa, Homo sapiens
  misc_feature: Table A; Target 101436; HLA-B*13:02; ZNF560; ENSG00000198028; CTA
AVNVETHII

SEQ ID NO: 101437 - protein, 9 aa, Homo sapiens
  misc_feature: Table A; Target 101437; HLA-B*37:01; ZNF560; ENSG00000198028; CTA
AVNVETHII

SEQ ID NO: 101438 - protein, 9 aa, Homo sapiens
  misc_feature: Table A; Target 101438; HLA-B*38:01; ZNF560; ENSG00000198028; CTA
AVNVETHII

SEQ ID NO: 101439 - protein, 9 aa, Homo sapiens
  misc_feature: Table A; Target 101439; HLA-B*58:01; ZNF560; ENSG00000198028; CTA
AVNVETHII

SEQ ID NO: 101440 - protein, 9 aa, Homo sapiens
  misc_feature: Table A; Target 101440; HLA-C*01:02; ZNF560; ENSG00000198028; CTA
AVNVETHII

SEQ ID NO: 101441 - protein, 9 aa, Homo sapiens
  misc_feature: Table A; Target 101441; HLA-C*12:03; ZNF560; ENSG00000198028; CTA
AVNVETHII

SEQ ID NO: 101442 - protein, 10 aa, Homo sapiens
  misc_feature: Table A; Target 101442; HLA-A*03:01; ZNF560; ENSG00000198028; CTA
AVNVETHIIK

SEQ ID NO: 101443 - protein, 10 aa, Homo sapiens
  misc_feature: Table A; Target 101443; HLA-A*03:02; ZNF560; ENSG00000198028; CTA
AVNVETHIIK

SEQ ID NO: 101444 - protein, 10 aa, Homo sapiens
  misc_feature: Table A; Target 101444; HLA-A*11:01; ZNF560; ENSG00000198028; CTA
AVNVETHIIK

SEQ ID NO: 101445 - protein, 10 aa, Homo sapiens
  misc_feature: Table A; Target 101445; HLA-C*07:01; ZNF560; ENSG00000198028; CTA
AYCLTNCYQY

SEQ ID NO: 101446 - protein, 9 aa, Homo sapiens
  misc_feature: Table A; Target 101446; HLA-C*16:01; ZNF560; ENSG00000198028; CTA
CGNSFRNSM

SEQ ID NO: 101447 - protein, 9 aa, Homo sapiens
  misc_feature: Table A; Target 101447; HLA-B*38:01; ZNF560; ENSG00000198028; CTA
CHSDLTNHV

SEQ ID NO: 101448 - protein, 9 aa, Homo sapiens
  misc_feature: Table A; Target 101448; HLA-B*39:01; ZNF560; ENSG00000198028; CTA
CHSDLTNHV

SEQ ID NO: 101449 - protein, 9 aa, Homo sapiens
  misc_feature: Table A; Target 101449; HLA-B*08:01; ZNF560; ENSG00000198028; CTA
CLKTKGPAL

SEQ ID NO: 101450 - protein, 9 aa, Homo sapiens
  misc_feature: Table A; Target 101450; HLA-A*31:01; ZNF560; ENSG00000198028; CTA
CSYLTKHLR

SEQ ID NO: 101451 - protein, 8 aa, Homo sapiens
  misc_feature: Table A; Target 101451; HLA-A*23:01; ZNF560; ENSG00000198028; CTA
CYQYSVTF

SEQ ID NO: 101452 - protein, 8 aa, Homo sapiens
  misc_feature: Table A; Target 101452; HLA-A*24:02; ZNF560; ENSG00000198028; CTA
CYQYSVTF

SEQ ID NO: 101453 - protein, 8 aa, Homo sapiens
  misc_feature: Table A; Target 101453; HLA-C*14:02; ZNF560; ENSG00000198028; CTA
CYQYSVTF

SEQ ID NO: 101454 - protein, 8 aa, Homo sapiens
  misc_feature: Table A; Target 101454; HLA-B*51:01; ZNF560; ENSG00000198028; CTA
DCGKAFVV

SEQ ID NO: 101455 - protein, 8 aa, Homo sapiens
  misc_feature: Table A; Target 101455; HLA-A*33:01; ZNF560; ENSG00000198028; CTA
DFRYPTHL

SEQ ID NO: 101456 - protein, 8 aa, Homo sapiens
  misc_feature: Table A; Target 101456; HLA-B*08:01; ZNF560; ENSG00000198028; CTA
DFRYPTHL

SEQ ID NO: 101457 - protein, 11 aa, Homo sapiens
  misc_feature: Table A; Target 101457; HLA-A*33:01; ZNF560; ENSG00000198028; CTA
DFRYPTHLNNH

SEQ ID NO: 101458 - protein, 9 aa, Homo sapiens
  misc_feature: Table A; Target 101458; HLA-B*15:03; ZNF560; ENSG00000198028; CTA
DKSFEGTDY

SEQ ID NO: 101459 - protein, 8 aa, Homo sapiens
  misc_feature: Table A; Target 101459; HLA-A*33:01; ZNF560; ENSG00000198028; CTA
DLLSLYNK

SEQ ID NO: 101460 - protein, 8 aa, Homo sapiens
  misc_feature: Table A; Target 101460; HLA-B*08:01; ZNF560; ENSG00000198028; CTA
DLTNHVRI

SEQ ID NO: 101461 - protein, 8 aa, Homo sapiens
  misc_feature: Table A; Target 101461; HLA-B*08:01; ZNF560; ENSG00000198028; CTA
DLVTFDSV

SEQ ID NO: 101462 - protein, 8 aa, Homo sapiens
  misc_feature: Table A; Target 101462; HLA-B*18:01; ZNF560; ENSG00000198028; CTA
DLVTFDSV

SEQ ID NO: 101463 - protein, 8 aa, Homo sapiens
  misc_feature: Table A; Target 101463; HLA-B*51:01; ZNF560; ENSG00000198028; CTA
DLVTFDSV

SEQ ID NO: 101464 - protein, 8 aa, Homo sapiens
  misc_feature: Table A; Target 101464; HLA-B*08:01; ZNF560; ENSG00000198028; CTA
DPAQRNLY

SEQ ID NO: 101465 - protein, 8 aa, Homo sapiens
  misc_feature: Table A; Target 101465; HLA-B*35:01; ZNF560; ENSG00000198028; CTA
DPAQRNLY

SEQ ID NO: 101466 - protein, 8 aa, Homo sapiens
  misc_feature: Table A; Target 101466; HLA-B*08:01; ZNF560; ENSG00000198028; CTA
DPVQRNLY

SEQ ID NO: 101467 - protein, 8 aa, Homo sapiens
  misc_feature: Table A; Target 101467; HLA-B*35:01; ZNF560; ENSG00000198028; CTA
DPVQRNLY

SEQ ID NO: 101468 - protein, 10 aa, Homo sapiens
  misc_feature: Table A; Target 101468; HLA-A*25:01; ZNF560; ENSG00000198028; CTA
DQCGKAFASF

SEQ ID NO: 101469 - protein, 10 aa, Homo sapiens
  misc_feature: Table A; Target 101469; HLA-A*26:01; ZNF560; ENSG00000198028; CTA
DQCGKAFASF

SEQ ID NO: 101470 - protein, 10 aa, Homo sapiens
  misc_feature: Table A; Target 101470; HLA-A*25:01; ZNF560; ENSG00000198028; CTA
DQCGKVFVSF

SEQ ID NO: 101471 - protein, 11 aa, Homo sapiens
  misc_feature: Table A; Target 101471; HLA-A*25:01; ZNF560; ENSG00000198028; CTA
DTAVDFTQEEW

SEQ ID NO: 101472 - protein, 10 aa, Homo sapiens
  misc_feature: Table A; Target 101472; HLA-A*25:01; ZNF560; ENSG00000198028; CTA
DVMLENYENV

SEQ ID NO: 101473 - protein, 10 aa, Homo sapiens
  misc_feature: Table A; Target 101473; HLA-A*25:01; ZNF560; ENSG00000198028; CTA
DVMLENYKNL

SEQ ID NO: 101474 - protein, 9 aa, Homo sapiens
  misc_feature: Table A; Target 101474; HLA-A*25:01; ZNF560; ENSG00000198028; CTA
EAFTHSTSH

SEQ ID NO: 101475 - protein, 9 aa, Homo sapiens
  misc_feature: Table A; Target 101475; HLA-A*26:01; ZNF560; ENSG00000198028; CTA
EAFTHSTSH

SEQ ID NO: 101476 - protein, 9 aa, Homo sapiens
  misc_feature: Table A; Target 101476; HLA-A*33:01; ZNF560; ENSG00000198028; CTA
EAFTHSTSH

SEQ ID NO: 101477 - protein, 9 aa, Homo sapiens
  misc_feature: Table A; Target 101477; HLA-A*33:03; ZNF560; ENSG00000198028; CTA
EAFTHSTSH

SEQ ID NO: 101478 - protein, 9 aa, Homo sapiens
  misc_feature: Table A; Target 101478; HLA-A*68:01; ZNF560; ENSG00000198028; CTA
EAFTHSTSH

SEQ ID NO: 101479 - protein, 9 aa, Homo sapiens
  misc_feature: Table A; Target 101479; HLA-B*18:01; ZNF560; ENSG00000198028; CTA
EAFTHSTSH

SEQ ID NO: 101480 - protein, 9 aa, Homo sapiens
  misc_feature: Table A; Target 101480; HLA-B*35:01; ZNF560; ENSG00000198028; CTA
EAFTHSTSH

SEQ ID NO: 101481 - protein, 9 aa, Homo sapiens
  misc_feature: Table A; Target 101481; HLA-B*35:03; ZNF560; ENSG00000198028; CTA
EAFTHSTSH

SEQ ID NO: 101482 - protein, 9 aa, Homo sapiens
  misc_feature: Table A; Target 101482; HLA-B*46:01; ZNF560; ENSG00000198028; CTA
EAFTHSTSH

SEQ ID NO: 101483 - protein, 9 aa, Homo sapiens
  misc_feature: Table A; Target 101483; HLA-B*51:01; ZNF560; ENSG00000198028; CTA
EAFTHSTSH

SEQ ID NO: 101484 - protein, 9 aa, Homo sapiens
  misc_feature: Table A; Target 101484; HLA-C*02:02; ZNF560; ENSG00000198028; CTA
EAFTHSTSH

SEQ ID NO: 101485 - protein, 9 aa, Homo sapiens
  misc_feature: Table A; Target 101485; HLA-C*07:06; ZNF560; ENSG00000198028; CTA
EAFTHSTSH

SEQ ID NO: 101486 - protein, 9 aa, Homo sapiens
  misc_feature: Table A; Target 101486; HLA-C*12:03; ZNF560; ENSG00000198028; CTA
EAFTHSTSH

SEQ ID NO: 101487 - protein, 9 aa, Homo sapiens
  misc_feature: Table A; Target 101487; HLA-C*16:04; ZNF560; ENSG00000198028; CTA
EAFTHSTSH

SEQ ID NO: 101488 - protein, 11 aa, Homo sapiens
  misc_feature: Table A; Target 101488; HLA-A*68:02; ZNF560; ENSG00000198028; CTA
EAFTHSTSHAV

SEQ ID NO: 101489 - protein, 9 aa, Homo sapiens
  misc_feature: Table A; Target 101489; HLA-B*40:01; ZNF560; ENSG00000198028; CTA
EEEEELSTL

SEQ ID NO: 101490 - protein, 11 aa, Homo sapiens
  misc_feature: Table A; Target 101490; HLA-B*27:02; ZNF560; ENSG00000198028; CTA
EEEEELSTLPR

SEQ ID NO: 101491 - protein, 8 aa, Homo sapiens
  misc_feature: Table A; Target 101491; HLA-B*18:01; ZNF560; ENSG00000198028; CTA
EEEELRTL

SEQ ID NO: 101492 - protein, 8 aa, Homo sapiens
  misc_feature: Table A; Target 101492; HLA-B*44:02; ZNF560; ENSG00000198028; CTA
EEEELRTL

SEQ ID NO: 101493 - protein, 11 aa, Homo sapiens
  misc_feature: Table A; Target 101493; HLA-A*30:01; ZNF560; ENSG00000198028; CTA
EEELSTLPRVL

SEQ ID NO: 101494 - protein, 11 aa, Homo sapiens
  misc_feature: Table A; Target 101494; HLA-B*18:01; ZNF560; ENSG00000198028; CTA
EEELSTLPRVL

SEQ ID NO: 101495 - protein, 11 aa, Homo sapiens
  misc_feature: Table A; Target 101495; HLA-B*40:01; ZNF560; ENSG00000198028; CTA
EEELSTLPRVL

SEQ ID NO: 101496 - protein, 11 aa, Homo sapiens
  misc_feature: Table A; Target 101496; HLA-B*40:02; ZNF560; ENSG00000198028; CTA
EEELSTLPRVL

SEQ ID NO: 101497 - protein, 11 aa, Homo sapiens
  misc_feature: Table A; Target 101497; HLA-B*44:02; ZNF560; ENSG00000198028; CTA
EEELSTLPRVL

SEQ ID NO: 101498 - protein, 11 aa, Homo sapiens
  misc_feature: Table A; Target 101498; HLA-B*44:03; ZNF560; ENSG00000198028; CTA
EEELSTLPRVL

SEQ ID NO: 101499 - protein, 10 aa, Homo sapiens
  misc_feature: Table A; Target 101499; HLA-B*44:02; ZNF560; ENSG00000198028; CTA
EELRTLQQGV

SEQ ID NO: 101500 - protein, 11 aa, Homo sapiens
  misc_feature: Table A; Target 101500; HLA-B*40:01; ZNF560; ENSG00000198028; CTA
EELRTLQQGVL

SEQ ID NO: 101501 - protein, 9 aa, Homo sapiens
  misc_feature: Table A; Target 101501; HLA-B*18:01; ZNF560; ENSG00000198028; CTA
EELSTLPRV

SEQ ID NO: 101502 - protein, 9 aa, Homo sapiens
  misc_feature: Table A; Target 101502; HLA-B*44:03; ZNF560; ENSG00000198028; CTA
EELSTLPRV

SEQ ID NO: 101503 - protein, 9 aa, Homo sapiens
  misc_feature: Table A; Target 101503; HLA-B*49:01; ZNF560; ENSG00000198028; CTA
EELSTLPRV

SEQ ID NO: 101504 - protein, 10 aa, Homo sapiens
  misc_feature: Table A; Target 101504; HLA-A*30:01; ZNF560; ENSG00000198028; CTA
EELSTLPRVL

SEQ ID NO: 101505 - protein, 10 aa, Homo sapiens
  misc_feature: Table A; Target 101505; HLA-B*18:01; ZNF560; ENSG00000198028; CTA
EELSTLPRVL

SEQ ID NO: 101506 - protein, 10 aa, Homo sapiens
  misc_feature: Table A; Target 101506; HLA-B*40:01; ZNF560; ENSG00000198028; CTA
EELSTLPRVL

SEQ ID NO: 101507 - protein, 10 aa, Homo sapiens
  misc_feature: Table A; Target 101507; HLA-B*40:02; ZNF560; ENSG00000198028; CTA
EELSTLPRVL

SEQ ID NO: 101508 - protein, 10 aa, Homo sapiens
  misc_feature: Table A; Target 101508; HLA-B*44:02; ZNF560; ENSG00000198028; CTA
EELSTLPRVL

SEQ ID NO: 101509 - protein, 10 aa, Homo sapiens
  misc_feature: Table A; Target 101509; HLA-B*44:03; ZNF560; ENSG00000198028; CTA
EELSTLPRVL

SEQ ID NO: 101510 - protein, 9 aa, Homo sapiens
  misc_feature: Table A; Target 101510; HLA-B*18:01; ZNF560; ENSG00000198028; CTA
EEWILLDPV

SEQ ID NO: 101511 - protein, 9 aa, Homo sapiens
  misc_feature: Table A; Target 101511; HLA-B*18:01; ZNF560; ENSG00000198028; CTA
EEWTLLDPA

SEQ ID NO: 101512 - protein, 9 aa, Homo sapiens
  misc_feature: Table A; Target 101512; HLA-A*25:01; ZNF560; ENSG00000198028; CTA
EGTDYGKAF

SEQ ID NO: 101513 - protein, 9 aa, Homo sapiens
  misc_feature: Table A; Target 101513; HLA-C*16:01; ZNF560; ENSG00000198028; CTA
EGTDYGKAF

SEQ ID NO: 101514 - protein, 9 aa, Homo sapiens
  misc_feature: Table A; Target 101514; HLA-B*08:01; ZNF560; ENSG00000198028; CTA
ELSTLPRVL

SEQ ID NO: 101515 - protein, 8 aa, Homo sapiens
  misc_feature: Table A; Target 101515; HLA-B*08:01; ZNF560; ENSG00000198028; CTA
ENVAKVGF

SEQ ID NO: 101516 - protein, 8 aa, Homo sapiens
  misc_feature: Table A; Target 101516; HLA-A*33:01; ZNF560; ENSG00000198028; CTA
ENYENVAK

SEQ ID NO: 101517 - protein, 8 aa, Homo sapiens
  misc_feature: Table A; Target 101517; HLA-A*33:03; ZNF560; ENSG00000198028; CTA
ENYENVAK

SEQ ID NO: 101518 - protein, 9 aa, Homo sapiens
  misc_feature: Table A; Target 101518; HLA-A*26:01; ZNF560; ENSG00000198028; CTA
ENYENVAKV

SEQ ID NO: 101519 - protein, 9 aa, Homo sapiens
  misc_feature: Table A; Target 101519; HLA-A*33:03; ZNF560; ENSG00000198028; CTA
ENYENVAKV

SEQ ID NO: 101520 - protein, 9 aa, Homo sapiens
  misc_feature: Table A; Target 101520; HLA-A*68:02; ZNF560; ENSG00000198028; CTA
ENYENVAKV

SEQ ID NO: 101521 - protein, 9 aa, Homo sapiens
  misc_feature: Table A; Target 101521; HLA-B*51:01; ZNF560; ENSG00000198028; CTA
ENYENVAKV

SEQ ID NO: 101522 - protein, 11 aa, Homo sapiens
  misc_feature: Table A; Target 101522; HLA-A*26:01; ZNF560; ENSG00000198028; CTA
ENYENVAKVGF

SEQ ID NO: 101523 - protein, 11 aa, Homo sapiens
  misc_feature: Table A; Target 101523; HLA-A*33:03; ZNF560; ENSG00000198028; CTA
ENYENVAKVGF

SEQ ID NO: 101524 - protein, 9 aa, Homo sapiens
  misc_feature: Table A; Target 101524; HLA-A*33:01; ZNF560; ENSG00000198028; CTA
ENYKNLSSV

SEQ ID NO: 101525 - protein, 9 aa, Homo sapiens
  misc_feature: Table A; Target 101525; HLA-B*51:01; ZNF560; ENSG00000198028; CTA
ENYKNLSSV

SEQ ID NO: 101526 - protein, 11 aa, Homo sapiens
  misc_feature: Table A; Target 101526; HLA-A*25:01; ZNF560; ENSG00000198028; CTA
ENYKNLSSVGY

SEQ ID NO: 101527 - protein, 11 aa, Homo sapiens
  misc_feature: Table A; Target 101527; HLA-A*26:01; ZNF560; ENSG00000198028; CTA
ENYKNLSSVGY

SEQ ID NO: 101528 - protein, 11 aa, Homo sapiens
  misc_feature: Table A; Target 101528; HLA-C*07:01; ZNF560; ENSG00000198028; CTA
ENYKNLSSVGY

SEQ ID NO: 101529 - protein, 9 aa, Homo sapiens
  misc_feature: Table A; Target 101529; HLA-B*27:05; ZNF560; ENSG00000198028; CTA
ERSDLTKHL

SEQ ID NO: 101530 - protein, 9 aa, Homo sapiens
  misc_feature: Table A; Target 101530; HLA-C*06:02; ZNF560; ENSG00000198028; CTA
ERSDLTKHL

SEQ ID NO: 101531 - protein, 9 aa, Homo sapiens
  misc_feature: Table A; Target 101531; HLA-A*01:01; ZNF560; ENSG00000198028; CTA
ETHIIKNPY

SEQ ID NO: 101532 - protein, 9 aa, Homo sapiens
  misc_feature: Table A; Target 101532; HLA-A*26:01; ZNF560; ENSG00000198028; CTA
ETHIIKNPY

SEQ ID NO: 101533 - protein, 9 aa, Homo sapiens
  misc_feature: Table A; Target 101533; HLA-A*33:03; ZNF560; ENSG00000198028; CTA
ETHIIKNPY

SEQ ID NO: 101534 - protein, 9 aa, Homo sapiens
  misc_feature: Table A; Target 101534; HLA-B*54:01; ZNF560; ENSG00000198028; CTA
FASFSARIA

SEQ ID NO: 101535 - protein, 9 aa, Homo sapiens
  misc_feature: Table A; Target 101535; HLA-C*02:02; ZNF560; ENSG00000198028; CTA
FASFSARIA

SEQ ID NO: 101536 - protein, 9 aa, Homo sapiens
  misc_feature: Table A; Target 101536; HLA-C*16:01; ZNF560; ENSG00000198028; CTA
FASFSARIA

SEQ ID NO: 101537 - protein, 8 aa, Homo sapiens
  misc_feature: Table A; Target 101537; HLA-A*30:01; ZNF560; ENSG00000198028; CTA
FDSVAVEF

SEQ ID NO: 101538 - protein, 8 aa, Homo sapiens
  misc_feature: Table A; Target 101538; HLA-B*18:01; ZNF560; ENSG00000198028; CTA
FDSVAVEF

SEQ ID NO: 101539 - protein, 8 aa, Homo sapiens
  misc_feature: Table A; Target 101539; HLA-B*37:01; ZNF560; ENSG00000198028; CTA
FDSVAVEF

SEQ ID NO: 101540 - protein, 8 aa, Homo sapiens
  misc_feature: Table A; Target 101540; HLA-B*40:02; ZNF560; ENSG00000198028; CTA
FDSVAVEF

SEQ ID NO: 101541 - protein, 8 aa, Homo sapiens
  misc_feature: Table A; Target 101541; HLA-C*07:04; ZNF560; ENSG00000198028; CTA
FDSVAVEF

SEQ ID NO: 101542 - protein, 8 aa, Homo sapiens
  misc_feature: Table A; Target 101542; HLA-B*18:01; ZNF560; ENSG00000198028; CTA
FEDTAVDF

SEQ ID NO: 101543 - protein, 8 aa, Homo sapiens
  misc_feature: Table A; Target 101543; HLA-B*37:01; ZNF560; ENSG00000198028; CTA
FEDTAVDF

SEQ ID NO: 101544 - protein, 8 aa, Homo sapiens
  misc_feature: Table A; Target 101544; HLA-B*40:01; ZNF560; ENSG00000198028; CTA
FEDTAVDF

SEQ ID NO: 101545 - protein, 8 aa, Homo sapiens
  misc_feature: Table A; Target 101545; HLA-C*03:03; ZNF560; ENSG00000198028; CTA
FEDTAVDF

SEQ ID NO: 101546 - protein, 8 aa, Homo sapiens
  misc_feature: Table A; Target 101546; HLA-C*04:01; ZNF560; ENSG00000198028; CTA
FEDTAVDF

SEQ ID NO: 101547 - protein, 8 aa, Homo sapiens
  misc_feature: Table A; Target 101547; HLA-C*05:01; ZNF560; ENSG00000198028; CTA
FEDTAVDF

SEQ ID NO: 101548 - protein, 8 aa, Homo sapiens
  misc_feature: Table A; Target 101548; HLA-B*27:02; ZNF560; ENSG00000198028; CTA
FEGTDYGK

SEQ ID NO: 101549 - protein, 10 aa, Homo sapiens
  misc_feature: Table A; Target 101549; HLA-B*07:02; ZNF560; ENSG00000198028; CTA
FEGTDYGKAF

SEQ ID NO: 101550 - protein, 10 aa, Homo sapiens
  misc_feature: Table A; Target 101550; HLA-B*44:02; ZNF560; ENSG00000198028; CTA
FEGTDYGKAF

SEQ ID NO: 101551 - protein, 10 aa, Homo sapiens
  misc_feature: Table A; Target 101551; HLA-B*44:03; ZNF560; ENSG00000198028; CTA
FEGTDYGKAF

SEQ ID NO: 101552 - protein, 10 aa, Homo sapiens
  misc_feature: Table A; Target 101552; HLA-C*04:01; ZNF560; ENSG00000198028; CTA
FEGTDYGKAF

SEQ ID NO: 101553 - protein, 10 aa, Homo sapiens
  misc_feature: Table A; Target 101553; HLA-C*07:01; ZNF560; ENSG00000198028; CTA
FEGTDYGKAF

SEQ ID NO: 101554 - protein, 10 aa, Homo sapiens
  misc_feature: Table A; Target 101554; HLA-C*16:04; ZNF560; ENSG00000198028; CTA
FEGTDYGKAF

SEQ ID NO: 101555 - protein, 11 aa, Homo sapiens
  misc_feature: Table A; Target 101555; HLA-A*68:01; ZNF560; ENSG00000198028; CTA
FGTSSGVIEDR

SEQ ID NO: 101556 - protein, 11 aa, Homo sapiens
  misc_feature: Table A; Target 101556; HLA-B*27:02; ZNF560; ENSG00000198028; CTA
FGTSSGVIEDR

SEQ ID NO: 101557 - protein, 11 aa, Homo sapiens
  misc_feature: Table A; Target 101557; HLA-C*07:06; ZNF560; ENSG00000198028; CTA
FGTSSGVIEDR

SEQ ID NO: 101558 - protein, 9 aa, Homo sapiens
  misc_feature: Table A; Target 101558; HLA-A*02:03; ZNF560; ENSG00000198028; CTA
FIYQSYLEA

SEQ ID NO: 101559 - protein, 9 aa, Homo sapiens
  misc_feature: Table A; Target 101559; HLA-B*54:01; ZNF560; ENSG00000198028; CTA
FIYQSYLEA

SEQ ID NO: 101560 - protein, 9 aa, Homo sapiens
  misc_feature: Table A; Target 101560; HLA-A*30:01; ZNF560; ENSG00000198028; CTA
FQLFKPSVI

SEQ ID NO: 101561 - protein, 8 aa, Homo sapiens
  misc_feature: Table A; Target 101561; HLA-C*03:04; ZNF560; ENSG00000198028; CTA
FSARIAHL

SEQ ID NO: 101562 - protein, 8 aa, Homo sapiens
  misc_feature: Table A; Target 101562; HLA-C*07:04; ZNF560; ENSG00000198028; CTA
FSARIAHL

SEQ ID NO: 101563 - protein, 8 aa, Homo sapiens
  misc_feature: Table A; Target 101563; HLA-C*16:01; ZNF560; ENSG00000198028; CTA
FSARIAHL

SEQ ID NO: 101564 - protein, 9 aa, Homo sapiens
  misc_feature: Table A; Target 101564; HLA-A*31:01; ZNF560; ENSG00000198028; CTA
FSSLFAHLR

SEQ ID NO: 101565 - protein, 9 aa, Homo sapiens
  misc_feature: Table A; Target 101565; HLA-A*01:01; ZNF560; ENSG00000198028; CTA
FTERSDLTK

SEQ ID NO: 101566 - protein, 9 aa, Homo sapiens
  misc_feature: Table A; Target 101566; HLA-A*01:01; ZNF560; ENSG00000198028; CTA
FTERSYLTK

SEQ ID NO: 101567 - protein, 9 aa, Homo sapiens
  misc_feature: Table A; Target 101567; HLA-A*26:01; ZNF560; ENSG00000198028; CTA
FTHSTSHAV

SEQ ID NO: 101568 - protein, 9 aa, Homo sapiens
  misc_feature: Table A; Target 101568; HLA-A*32:01; ZNF560; ENSG00000198028; CTA
FTHSTSHAV

SEQ ID NO: 101569 - protein, 9 aa, Homo sapiens
  misc_feature: Table A; Target 101569; HLA-A*68:02; ZNF560; ENSG00000198028; CTA
FTHSTSHAV

SEQ ID NO: 101570 - protein, 9 aa, Homo sapiens
  misc_feature: Table A; Target 101570; HLA-B*13:02; ZNF560; ENSG00000198028; CTA
FTHSTSHAV

SEQ ID NO: 101571 - protein, 9 aa, Homo sapiens
  misc_feature: Table A; Target 101571; HLA-B*40:02; ZNF560; ENSG00000198028; CTA
FTHSTSHAV

SEQ ID NO: 101572 - protein, 9 aa, Homo sapiens
  misc_feature: Table A; Target 101572; HLA-B*46:01; ZNF560; ENSG00000198028; CTA
FTHSTSHAV

SEQ ID NO: 101573 - protein, 9 aa, Homo sapiens
  misc_feature: Table A; Target 101573; HLA-C*02:02; ZNF560; ENSG00000198028; CTA
FTHSTSHAV

SEQ ID NO: 101574 - protein, 9 aa, Homo sapiens
  misc_feature: Table A; Target 101574; HLA-C*03:03; ZNF560; ENSG00000198028; CTA
FTHSTSHAV

SEQ ID NO: 101575 - protein, 9 aa, Homo sapiens
  misc_feature: Table A; Target 101575; HLA-C*03:04; ZNF560; ENSG00000198028; CTA
FTHSTSHAV

SEQ ID NO: 101576 - protein, 9 aa, Homo sapiens
  misc_feature: Table A; Target 101576; HLA-B*13:02; ZNF560; ENSG00000198028; CTA
FTSSACLRI

SEQ ID NO: 101577 - protein, 8 aa, Homo sapiens
  misc_feature: Table A; Target 101577; HLA-C*03:04; ZNF560; ENSG00000198028; CTA
FTVPSGFL

SEQ ID NO: 101578 - protein, 11 aa, Homo sapiens
  misc_feature: Table A; Target 101578; HLA-A*02:07; ZNF560; ENSG00000198028; CTA
FVVSSSLVDHL

SEQ ID NO: 101579 - protein, 11 aa, Homo sapiens
  misc_feature: Table A; Target 101579; HLA-A*23:01; ZNF560; ENSG00000198028; CTA
FVVSSSLVDHL

SEQ ID NO: 101580 - protein, 11 aa, Homo sapiens
  misc_feature: Table A; Target 101580; HLA-A*68:02; ZNF560; ENSG00000198028; CTA
FVVSSSLVDHL

SEQ ID NO: 101581 - protein, 11 aa, Homo sapiens
  misc_feature: Table A; Target 101581; HLA-B*27:05; ZNF560; ENSG00000198028; CTA
FVVSSSLVDHL

SEQ ID NO: 101582 - protein, 11 aa, Homo sapiens
  misc_feature: Table A; Target 101582; HLA-B*38:01; ZNF560; ENSG00000198028; CTA
FVVSSSLVDHL

SEQ ID NO: 101583 - protein, 9 aa, Homo sapiens
  misc_feature: Table A; Target 101583; HLA-B*49:01; ZNF560; ENSG00000198028; CTA
GEAFTHSTS

SEQ ID NO: 101584 - protein, 9 aa, Homo sapiens
  misc_feature: Table A; Target 101584; HLA-C*07:04; ZNF560; ENSG00000198028; CTA
GEAFTHSTS

SEQ ID NO: 101585 - protein, 8 aa, Homo sapiens
  misc_feature: Table A; Target 101585; HLA-B*18:01; ZNF560; ENSG00000198028; CTA
GEKPFKCY

SEQ ID NO: 101586 - protein, 10 aa, Homo sapiens
  misc_feature: Table A; Target 101586; HLA-B*44:02; ZNF560; ENSG00000198028; CTA
GEKPYEHKEY

SEQ ID NO: 101587 - protein, 10 aa, Homo sapiens
  misc_feature: Table A; Target 101587; HLA-B*44:03; ZNF560; ENSG00000198028; CTA
GEKPYEHKEY

SEQ ID NO: 101588 - protein, 9 aa, Homo sapiens
  misc_feature: Table A; Target 101588; HLA-B*15:01; ZNF560; ENSG00000198028; CTA
GIQMDLVTF

SEQ ID NO: 101589 - protein, 9 aa, Homo sapiens
  misc_feature: Table A; Target 101589; HLA-B*15:03; ZNF560; ENSG00000198028; CTA
GKAFASFSA

SEQ ID NO: 101590 - protein, 8 aa, Homo sapiens
  misc_feature: Table A; Target 101590; HLA-B*15:03; ZNF560; ENSG00000198028; CTA
GKAFGTSA

SEQ ID NO: 101591 - protein, 10 aa, Homo sapiens
  misc_feature: Table A; Target 101591; HLA-B*15:03; ZNF560; ENSG00000198028; CTA
GKAFGTSAGL

SEQ ID NO: 101592 - protein, 9 aa, Homo sapiens
  misc_feature: Table A; Target 101592; HLA-A*29:02; ZNF560; ENSG00000198028; CTA
GKAFIYQSY

SEQ ID NO: 101593 - protein, 9 aa, Homo sapiens
  misc_feature: Table A; Target 101593; HLA-B*15:03; ZNF560; ENSG00000198028; CTA
GKAFIYQSY

SEQ ID NO: 101594 - protein, 9 aa, Homo sapiens
  misc_feature: Table A; Target 101594; HLA-B*15:03; ZNF560; ENSG00000198028; CTA
GKAFTERSY

SEQ ID NO: 101595 - protein, 9 aa, Homo sapiens
  misc_feature: Table A; Target 101595; HLA-B*15:03; ZNF560; ENSG00000198028; CTA
GKAFTKCSY

SEQ ID NO: 101596 - protein, 10 aa, Homo sapiens
  misc_feature: Table A; Target 101596; HLA-B*15:03; ZNF560; ENSG00000198028; CTA
GKAFVVSSSL

SEQ ID NO: 101597 - protein, 9 aa, Homo sapiens
  misc_feature: Table A; Target 101597; HLA-B*15:03; ZNF560; ENSG00000198028; CTA
GKTFTVPSG

SEQ ID NO: 101598 - protein, 10 aa, Homo sapiens
  misc_feature: Table A; Target 101598; HLA-B*15:03; ZNF560; ENSG00000198028; CTA
GKTFTVPSGF

SEQ ID NO: 101599 - protein, 9 aa, Homo sapiens
  misc_feature: Table A; Target 101599; HLA-A*29:02; ZNF560; ENSG00000198028; CTA
GNTSECIQY

SEQ ID NO: 101600 - protein, 9 aa, Homo sapiens
  misc_feature: Table A; Target 101600; HLA-A*30:02; ZNF560; ENSG00000198028; CTA
GNTSECIQY

SEQ ID NO: 101601 - protein, 9 aa, Homo sapiens
  misc_feature: Table A; Target 101601; HLA-B*15:03; ZNF560; ENSG00000198028; CTA
GNTSECIQY

SEQ ID NO: 101602 - protein, 9 aa, Homo sapiens
  misc_feature: Table A; Target 101602; HLA-B*39:01; ZNF560; ENSG00000198028; CTA
GNTSECIQY

SEQ ID NO: 101603 - protein, 9 aa, Homo sapiens
  misc_feature: Table A; Target 101603; HLA-C*07:01; ZNF560; ENSG00000198028; CTA
GNTSECIQY

SEQ ID NO: 101604 - protein, 9 aa, Homo sapiens
  misc_feature: Table A; Target 101604; HLA-A*01:01; ZNF560; ENSG00000198028; CTA
GTDYGKAFI

SEQ ID NO: 101605 - protein, 10 aa, Homo sapiens
  misc_feature: Table A; Target 101605; HLA-A*01:01; ZNF560; ENSG00000198028; CTA
GTDYGKAFIY

SEQ ID NO: 101606 - protein, 10 aa, Homo sapiens
  misc_feature: Table A; Target 101606; HLA-A*11:01; ZNF560; ENSG00000198028; CTA
GTDYGKAFIY

SEQ ID NO: 101607 - protein, 10 aa, Homo sapiens
  misc_feature: Table A; Target 101607; HLA-A*29:02; ZNF560; ENSG00000198028; CTA
GTDYGKAFIY

SEQ ID NO: 101608 - protein, 10 aa, Homo sapiens
  misc_feature: Table A; Target 101608; HLA-A*30:02; ZNF560; ENSG00000198028; CTA
GTDYGKAFIY

SEQ ID NO: 101609 - protein, 10 aa, Homo sapiens
  misc_feature: Table A; Target 101609; HLA-C*07:01; ZNF560; ENSG00000198028; CTA
GTDYGKAFIY

SEQ ID NO: 101610 - protein, 9 aa, Homo sapiens
  misc_feature: Table A; Target 101610; HLA-A*03:01; ZNF560; ENSG00000198028; CTA
GTSAGLIEH

SEQ ID NO: 101611 - protein, 9 aa, Homo sapiens
  misc_feature: Table A; Target 101611; HLA-A*03:02; ZNF560; ENSG00000198028; CTA
GTSAGLIEH

SEQ ID NO: 101612 - protein, 9 aa, Homo sapiens
  misc_feature: Table A; Target 101612; HLA-A*11:01; ZNF560; ENSG00000198028; CTA
GTSAGLIEH

SEQ ID NO: 101613 - protein, 10 aa, Homo sapiens
  misc_feature: Table A; Target 101613; HLA-A*68:02; ZNF560; ENSG00000198028; CTA
GTSAGLIEHI

SEQ ID NO: 101614 - protein, 10 aa, Homo sapiens
  misc_feature: Table A; Target 101614; HLA-B*58:01; ZNF560; ENSG00000198028; CTA
GTSAGLIEHI

SEQ ID NO: 101615 - protein, 10 aa, Homo sapiens
  misc_feature: Table A; Target 101615; HLA-A*03:02; ZNF560; ENSG00000198028; CTA
GTSSGVIEDR

SEQ ID NO: 101616 - protein, 10 aa, Homo sapiens
  misc_feature: Table A; Target 101616; HLA-A*11:01; ZNF560; ENSG00000198028; CTA
GTSSGVIEDR

SEQ ID NO: 101617 - protein, 10 aa, Homo sapiens
  misc_feature: Table A; Target 101617; HLA-A*31:01; ZNF560; ENSG00000198028; CTA
GTSSGVIEDR

SEQ ID NO: 101618 - protein, 10 aa, Homo sapiens
  misc_feature: Table A; Target 101618; HLA-A*68:01; ZNF560; ENSG00000198028; CTA
GTSSGVIEDR

SEQ ID NO: 101619 - protein, 10 aa, Homo sapiens
  misc_feature: Table A; Target 101619; HLA-B*27:02; ZNF560; ENSG00000198028; CTA
GTSSGVIEDR

SEQ ID NO: 101620 - protein, 10 aa, Homo sapiens
  misc_feature: Table A; Target 101620; HLA-C*07:06; ZNF560; ENSG00000198028; CTA
GTSSGVIEDR

SEQ ID NO: 101621 - protein, 11 aa, Homo sapiens
  misc_feature: Table A; Target 101621; HLA-C*07:06; ZNF560; ENSG00000198028; CTA
GTSSGVIEDRR

SEQ ID NO: 101622 - protein, 9 aa, Homo sapiens
  misc_feature: Table A; Target 101622; HLA-B*35:03; ZNF560; ENSG00000198028; CTA
HAAEKTSEC

SEQ ID NO: 101623 - protein, 9 aa, Homo sapiens
  misc_feature: Table A; Target 101623; HLA-B*54:01; ZNF560; ENSG00000198028; CTA
HAAEKTSEC

SEQ ID NO: 101624 - protein, 9 aa, Homo sapiens
  misc_feature: Table A; Target 101624; HLA-B*55:01; ZNF560; ENSG00000198028; CTA
HAAEKTSEC

SEQ ID NO: 101625 - protein, 9 aa, Homo sapiens
  misc_feature: Table A; Target 101625; HLA-C*03:03; ZNF560; ENSG00000198028; CTA
HAAEKTSEC

SEQ ID NO: 101626 - protein, 9 aa, Homo sapiens
  misc_feature: Table A; Target 101626; HLA-C*03:04; ZNF560; ENSG00000198028; CTA
HAAEKTSEC

SEQ ID NO: 101627 - protein, 9 aa, Homo sapiens
  misc_feature: Table A; Target 101627; HLA-C*12:03; ZNF560; ENSG00000198028; CTA
HAAEKTSEC

SEQ ID NO: 101628 - protein, 9 aa, Homo sapiens
  misc_feature: Table A; Target 101628; HLA-C*16:02; ZNF560; ENSG00000198028; CTA
HAAEKTSEC

SEQ ID NO: 101629 - protein, 9 aa, Homo sapiens
  misc_feature: Table A; Target 101629; HLA-B*54:01; ZNF560; ENSG00000198028; CTA
HAGEKPYEC

SEQ ID NO: 101630 - protein, 8 aa, Homo sapiens
  misc_feature: Table A; Target 101630; HLA-B*35:01; ZNF560; ENSG00000198028; CTA
HAVNVETH

SEQ ID NO: 101631 - protein, 9 aa, Homo sapiens
  misc_feature: Table A; Target 101631; HLA-A*23:01; ZNF560; ENSG00000198028; CTA
HAVNVETHI

SEQ ID NO: 101632 - protein, 9 aa, Homo sapiens
  misc_feature: Table A; Target 101632; HLA-A*68:02; ZNF560; ENSG00000198028; CTA
HAVNVETHI

SEQ ID NO: 101633 - protein, 9 aa, Homo sapiens
  misc_feature: Table A; Target 101633; HLA-B*13:02; ZNF560; ENSG00000198028; CTA
HAVNVETHI

SEQ ID NO: 101634 - protein, 9 aa, Homo sapiens
  misc_feature: Table A; Target 101634; HLA-B*35:03; ZNF560; ENSG00000198028; CTA
HAVNVETHI

SEQ ID NO: 101635 - protein, 9 aa, Homo sapiens
  misc_feature: Table A; Target 101635; HLA-B*38:01; ZNF560; ENSG00000198028; CTA
HAVNVETHI

SEQ ID NO: 101636 - protein, 9 aa, Homo sapiens
  misc_feature: Table A; Target 101636; HLA-B*39:01; ZNF560; ENSG00000198028; CTA
HAVNVETHI

SEQ ID NO: 101637 - protein, 9 aa, Homo sapiens
  misc_feature: Table A; Target 101637; HLA-B*51:01; ZNF560; ENSG00000198028; CTA
HAVNVETHI

SEQ ID NO: 101638 - protein, 9 aa, Homo sapiens
  misc_feature: Table A; Target 101638; HLA-B*58:01; ZNF560; ENSG00000198028; CTA
HAVNVETHI

SEQ ID NO: 101639 - protein, 9 aa, Homo sapiens
  misc_feature: Table A; Target 101639; HLA-C*02:02; ZNF560; ENSG00000198028; CTA
HAVNVETHI

SEQ ID NO: 101640 - protein, 9 aa, Homo sapiens
  misc_feature: Table A; Target 101640; HLA-C*03:03; ZNF560; ENSG00000198028; CTA
HAVNVETHI

SEQ ID NO: 101641 - protein, 9 aa, Homo sapiens
  misc_feature: Table A; Target 101641; HLA-C*16:02; ZNF560; ENSG00000198028; CTA
HAVNVETHI

SEQ ID NO: 101642 - protein, 9 aa, Homo sapiens
  misc_feature: Table A; Target 101642; HLA-C*16:04; ZNF560; ENSG00000198028; CTA
HAVNVETHI

SEQ ID NO: 101643 - protein, 10 aa, Homo sapiens
  misc_feature: Table A; Target 101643; HLA-B*38:01; ZNF560; ENSG00000198028; CTA
HAVNVETHII

SEQ ID NO: 101644 - protein, 11 aa, Homo sapiens
  misc_feature: Table A; Target 101644; HLA-A*68:01; ZNF560; ENSG00000198028; CTA
HAVNVETHIIK

SEQ ID NO: 101645 - protein, 9 aa, Homo sapiens
  misc_feature: Table A; Target 101645; HLA-A*03:01; ZNF560; ENSG00000198028; CTA
HLKTHAAEK

SEQ ID NO: 101646 - protein, 9 aa, Homo sapiens
  misc_feature: Table A; Target 101646; HLA-A*33:01; ZNF560; ENSG00000198028; CTA
HLKTHAAEK

SEQ ID NO: 101647 - protein, 8 aa, Homo sapiens
  misc_feature: Table A; Target 101647; HLA-B*08:01; ZNF560; ENSG00000198028; CTA
HMQTHIGI

SEQ ID NO: 101648 - protein, 9 aa, Homo sapiens
  misc_feature: Table A; Target 101648; HLA-A*03:01; ZNF560; ENSG00000198028; CTA
HMQTHIGIK

SEQ ID NO: 101649 - protein, 9 aa, Homo sapiens
  misc_feature: Table A; Target 101649; HLA-A*03:02; ZNF560; ENSG00000198028; CTA
HMQTHIGIK

SEQ ID NO: 101650 - protein, 9 aa, Homo sapiens
  misc_feature: Table A; Target 101650; HLA-A*33:01; ZNF560; ENSG00000198028; CTA
HMRTHTEER

SEQ ID NO: 101651 - protein, 8 aa, Homo sapiens
  misc_feature: Table A; Target 101651; HLA-B*08:01; ZNF560; ENSG00000198028; CTA
HPCLKTNM

SEQ ID NO: 101652 - protein, 8 aa, Homo sapiens
  misc_feature: Table A; Target 101652; HLA-A*30:01; ZNF560; ENSG00000198028; CTA
HQTSVSAL

SEQ ID NO: 101653 - protein, 8 aa, Homo sapiens
  misc_feature: Table A; Target 101653; HLA-B*13:02; ZNF560; ENSG00000198028; CTA
HQTSVSAL

SEQ ID NO: 101654 - protein, 8 aa, Homo sapiens
  misc_feature: Table A; Target 101654; HLA-B*15:01; ZNF560; ENSG00000198028; CTA
HQTSVSAL

SEQ ID NO: 101655 - protein, 8 aa, Homo sapiens
  misc_feature: Table A; Target 101655; HLA-B*15:03; ZNF560; ENSG00000198028; CTA
HQTSVSAL

SEQ ID NO: 101656 - protein, 8 aa, Homo sapiens
  misc_feature: Table A; Target 101656; HLA-B*37:01; ZNF560; ENSG00000198028; CTA
HQTSVSAL

SEQ ID NO: 101657 - protein, 8 aa, Homo sapiens
  misc_feature: Table A; Target 101657; HLA-B*39:01; ZNF560; ENSG00000198028; CTA
HQTSVSAL

SEQ ID NO: 101658 - protein, 8 aa, Homo sapiens
  misc_feature: Table A; Target 101658; HLA-B*40:01; ZNF560; ENSG00000198028; CTA
HQTSVSAL

SEQ ID NO: 101659 - protein, 8 aa, Homo sapiens
  misc_feature: Table A; Target 101659; HLA-C*07:04; ZNF560; ENSG00000198028; CTA
HQTSVSAL

SEQ ID NO: 101660 - protein, 8 aa, Homo sapiens
  misc_feature: Table A; Target 101660; HLA-A*01:01; ZNF560; ENSG00000198028; CTA
HSDLTNHV

SEQ ID NO: 101661 - protein, 8 aa, Homo sapiens
  misc_feature: Table A; Target 101661; HLA-C*05:01; ZNF560; ENSG00000198028; CTA
HSDLTNHV

SEQ ID NO: 101662 - protein, 8 aa, Homo sapiens
  misc_feature: Table A; Target 101662; HLA-C*16:02; ZNF560; ENSG00000198028; CTA
HSDLTNHV

SEQ ID NO: 101663 - protein, 9 aa, Homo sapiens
  misc_feature: Table A; Target 101663; HLA-A*01:01; ZNF560; ENSG00000198028; CTA
HSDLTNHVR

SEQ ID NO: 101664 - protein, 9 aa, Homo sapiens
  misc_feature: Table A; Target 101664; HLA-A*33:01; ZNF560; ENSG00000198028; CTA
HSDLTNHVR

SEQ ID NO: 101665 - protein, 9 aa, Homo sapiens
  misc_feature: Table A; Target 101665; HLA-A*33:03; ZNF560; ENSG00000198028; CTA
HSDLTNHVR

SEQ ID NO: 101666 - protein, 9 aa, Homo sapiens
  misc_feature: Table A; Target 101666; HLA-A*68:01; ZNF560; ENSG00000198028; CTA
HSDLTNHVR

SEQ ID NO: 101667 - protein, 9 aa, Homo sapiens
  misc_feature: Table A; Target 101667; HLA-C*07:06; ZNF560; ENSG00000198028; CTA
HSDLTNHVR

SEQ ID NO: 101668 - protein, 9 aa, Homo sapiens
  misc_feature: Table A; Target 101668; HLA-A*68:01; ZNF560; ENSG00000198028; CTA
HSTSHAVNV

SEQ ID NO: 101669 - protein, 9 aa, Homo sapiens
  misc_feature: Table A; Target 101669; HLA-A*68:02; ZNF560; ENSG00000198028; CTA
HSTSHAVNV

SEQ ID NO: 101670 - protein, 9 aa, Homo sapiens
  misc_feature: Table A; Target 101670; HLA-B*13:02; ZNF560; ENSG00000198028; CTA
HSTSHAVNV

SEQ ID NO: 101671 - protein, 9 aa, Homo sapiens
  misc_feature: Table A; Target 101671; HLA-C*02:02; ZNF560; ENSG00000198028; CTA
HSTSHAVNV

SEQ ID NO: 101672 - protein, 9 aa, Homo sapiens
  misc_feature: Table A; Target 101672; HLA-C*16:02; ZNF560; ENSG00000198028; CTA
HSTSHAVNV

SEQ ID NO: 101673 - protein, 9 aa, Homo sapiens
  misc_feature: Table A; Target 101673; HLA-A*01:01; ZNF560; ENSG00000198028; CTA
HTGDKPYEY

SEQ ID NO: 101674 - protein, 9 aa, Homo sapiens
  misc_feature: Table A; Target 101674; HLA-A*11:01; ZNF560; ENSG00000198028; CTA
HTGDKPYEY

SEQ ID NO: 101675 - protein, 9 aa, Homo sapiens
  misc_feature: Table A; Target 101675; HLA-A*25:01; ZNF560; ENSG00000198028; CTA
HTGDKPYEY

SEQ ID NO: 101676 - protein, 9 aa, Homo sapiens
  misc_feature: Table A; Target 101676; HLA-A*26:01; ZNF560; ENSG00000198028; CTA
HTGDKPYEY

SEQ ID NO: 101677 - protein, 9 aa, Homo sapiens
  misc_feature: Table A; Target 101677; HLA-A*29:02; ZNF560; ENSG00000198028; CTA
HTGDKPYEY

SEQ ID NO: 101678 - protein, 9 aa, Homo sapiens
  misc_feature: Table A; Target 101678; HLA-A*30:02; ZNF560; ENSG00000198028; CTA
HTGDKPYEY

SEQ ID NO: 101679 - protein, 9 aa, Homo sapiens
  misc_feature: Table A; Target 101679; HLA-A*32:01; ZNF560; ENSG00000198028; CTA
HTGDKPYEY

SEQ ID NO: 101680 - protein, 9 aa, Homo sapiens
  misc_feature: Table A; Target 101680; HLA-A*33:01; ZNF560; ENSG00000198028; CTA
HTGDKPYEY

SEQ ID NO: 101681 - protein, 9 aa, Homo sapiens
  misc_feature: Table A; Target 101681; HLA-A*33:03; ZNF560; ENSG00000198028; CTA
HTGDKPYEY

SEQ ID NO: 101682 - protein, 9 aa, Homo sapiens
  misc_feature: Table A; Target 101682; HLA-A*68:01; ZNF560; ENSG00000198028; CTA
HTGDKPYEY

SEQ ID NO: 101683 - protein, 9 aa, Homo sapiens
  misc_feature: Table A; Target 101683; HLA-B*35:01; ZNF560; ENSG00000198028; CTA
HTGDKPYEY

SEQ ID NO: 101684 - protein, 9 aa, Homo sapiens
  misc_feature: Table A; Target 101684; HLA-B*46:01; ZNF560; ENSG00000198028; CTA
HTGDKPYEY

SEQ ID NO: 101685 - protein, 9 aa, Homo sapiens
  misc_feature: Table A; Target 101685; HLA-B*57:01; ZNF560; ENSG00000198028; CTA
HTGDKPYEY

SEQ ID NO: 101686 - protein, 9 aa, Homo sapiens
  misc_feature: Table A; Target 101686; HLA-B*58:01; ZNF560; ENSG00000198028; CTA
HTGDKPYEY

SEQ ID NO: 101687 - protein, 9 aa, Homo sapiens
  misc_feature: Table A; Target 101687; HLA-C*02:02; ZNF560; ENSG00000198028; CTA
HTGDKPYEY

SEQ ID NO: 101688 - protein, 9 aa, Homo sapiens
  misc_feature: Table A; Target 101688; HLA-C*07:01; ZNF560; ENSG00000198028; CTA
HTGDKPYEY

SEQ ID NO: 101689 - protein, 9 aa, Homo sapiens
  misc_feature: Table A; Target 101689; HLA-C*07:04; ZNF560; ENSG00000198028; CTA
HTGDKPYEY

SEQ ID NO: 101690 - protein, 9 aa, Homo sapiens
  misc_feature: Table A; Target 101690; HLA-C*07:06; ZNF560; ENSG00000198028; CTA
HTGDKPYEY

SEQ ID NO: 101691 - protein, 9 aa, Homo sapiens
  misc_feature: Table A; Target 101691; HLA-C*12:03; ZNF560; ENSG00000198028; CTA
HTGDKPYEY

SEQ ID NO: 101692 - protein, 9 aa, Homo sapiens
  misc_feature: Table A; Target 101692; HLA-C*16:01; ZNF560; ENSG00000198028; CTA
HTGDKPYEY

SEQ ID NO: 101693 - protein, 9 aa, Homo sapiens
  misc_feature: Table A; Target 101693; HLA-C*16:02; ZNF560; ENSG00000198028; CTA
HTGDKPYEY

SEQ ID NO: 101694 - protein, 9 aa, Homo sapiens
  misc_feature: Table A; Target 101694; HLA-C*16:04; ZNF560; ENSG00000198028; CTA
HTGDKPYEY

SEQ ID NO: 101695 - protein, 10 aa, Homo sapiens
  misc_feature: Table A; Target 101695; HLA-A*03:01; ZNF560; ENSG00000198028; CTA
HTGDKPYEYK

SEQ ID NO: 101696 - protein, 10 aa, Homo sapiens
  misc_feature: Table A; Target 101696; HLA-A*03:02; ZNF560; ENSG00000198028; CTA
HTGDKPYEYK

SEQ ID NO: 101697 - protein, 10 aa, Homo sapiens
  misc_feature: Table A; Target 101697; HLA-A*11:01; ZNF560; ENSG00000198028; CTA
HTGDKPYEYK

SEQ ID NO: 101698 - protein, 10 aa, Homo sapiens
  misc_feature: Table A; Target 101698; HLA-A*33:01; ZNF560; ENSG00000198028; CTA
HTGDKPYEYK

SEQ ID NO: 101699 - protein, 9 aa, Homo sapiens
  misc_feature: Table A; Target 101699; HLA-A*03:01; ZNF560; ENSG00000198028; CTA
IIKNPYECK

SEQ ID NO: 101700 - protein, 8 aa, Homo sapiens
  misc_feature: Table A; Target 101700; HLA-A*31:01; ZNF560; ENSG00000198028; CTA
ILLDPVQR

SEQ ID NO: 101701 - protein, 8 aa, Homo sapiens
  misc_feature: Table A; Target 101701; HLA-A*33:03; ZNF560; ENSG00000198028; CTA
ILLDPVQR

SEQ ID NO: 101702 - protein, 8 aa, Homo sapiens
  misc_feature: Table A; Target 101702; HLA-C*07:06; ZNF560; ENSG00000198028; CTA
ILLDPVQR

SEQ ID NO: 101703 - protein, 10 aa, Homo sapiens
  misc_feature: Table A; Target 101703; HLA-A*02:01; ZNF560; ENSG00000198028; CTA
ILLDPVQRNL

SEQ ID NO: 101704 - protein, 10 aa, Homo sapiens
  misc_feature: Table A; Target 101704; HLA-A*02:03; ZNF560; ENSG00000198028; CTA
ILLDPVQRNL

SEQ ID NO: 101705 - protein, 10 aa, Homo sapiens
  misc_feature: Table A; Target 101705; HLA-A*02:04; ZNF560; ENSG00000198028; CTA
ILLDPVQRNL

SEQ ID NO: 101706 - protein, 10 aa, Homo sapiens
  misc_feature: Table A; Target 101706; HLA-A*02:07; ZNF560; ENSG00000198028; CTA
ILLDPVQRNL

SEQ ID NO: 101707 - protein, 10 aa, Homo sapiens
  misc_feature: Table A; Target 101707; HLA-A*03:01; ZNF560; ENSG00000198028; CTA
ILLDPVQRNL

SEQ ID NO: 101708 - protein, 11 aa, Homo sapiens
  misc_feature: Table A; Target 101708; HLA-A*01:01; ZNF560; ENSG00000198028; CTA
ILLDPVQRNLY

SEQ ID NO: 101709 - protein, 11 aa, Homo sapiens
  misc_feature: Table A; Target 101709; HLA-A*03:01; ZNF560; ENSG00000198028; CTA
ILLDPVQRNLY

SEQ ID NO: 101710 - protein, 11 aa, Homo sapiens
  misc_feature: Table A; Target 101710; HLA-A*23:01; ZNF560; ENSG00000198028; CTA
ILLDPVQRNLY

SEQ ID NO: 101711 - protein, 11 aa, Homo sapiens
  misc_feature: Table A; Target 101711; HLA-A*29:02; ZNF560; ENSG00000198028; CTA
ILLDPVQRNLY

SEQ ID NO: 101712 - protein, 11 aa, Homo sapiens
  misc_feature: Table A; Target 101712; HLA-A*30:02; ZNF560; ENSG00000198028; CTA
ILLDPVQRNLY

SEQ ID NO: 101713 - protein, 11 aa, Homo sapiens
  misc_feature: Table A; Target 101713; HLA-A*32:01; ZNF560; ENSG00000198028; CTA
ILLDPVQRNLY

SEQ ID NO: 101714 - protein, 11 aa, Homo sapiens
  misc_feature: Table A; Target 101714; HLA-B*57:01; ZNF560; ENSG00000198028; CTA
ILLDPVQRNLY

SEQ ID NO: 101715 - protein, 11 aa, Homo sapiens
  misc_feature: Table A; Target 101715; HLA-C*02:02; ZNF560; ENSG00000198028; CTA
ILLDPVQRNLY

SEQ ID NO: 101716 - protein, 11 aa, Homo sapiens
  misc_feature: Table A; Target 101716; HLA-C*16:01; ZNF560; ENSG00000198028; CTA
ILLDPVQRNLY

SEQ ID NO: 101717 - protein, 8 aa, Homo sapiens
  misc_feature: Table A; Target 101717; HLA-A*31:01; ZNF560; ENSG00000198028; CTA
ILNVQVQR

SEQ ID NO: 101718 - protein, 8 aa, Homo sapiens
  misc_feature: Table A; Target 101718; HLA-A*33:01; ZNF560; ENSG00000198028; CTA
ILNVQVQR

SEQ ID NO: 101719 - protein, 8 aa, Homo sapiens
  misc_feature: Table A; Target 101719; HLA-A*33:03; ZNF560; ENSG00000198028; CTA
ILNVQVQR

SEQ ID NO: 101720 - protein, 9 aa, Homo sapiens
  misc_feature: Table A; Target 101720; HLA-A*03:01; ZNF560; ENSG00000198028; CTA
ILNVQVQRK

SEQ ID NO: 101721 - protein, 9 aa, Homo sapiens
  misc_feature: Table A; Target 101721; HLA-A*03:02; ZNF560; ENSG00000198028; CTA
ILNVQVQRK

SEQ ID NO: 101722 - protein, 9 aa, Homo sapiens
  misc_feature: Table A; Target 101722; HLA-A*11:01; ZNF560; ENSG00000198028; CTA
ILNVQVQRK

SEQ ID NO: 101723 - protein, 8 aa, Homo sapiens
  misc_feature: Table A; Target 101723; HLA-A*23:01; ZNF560; ENSG00000198028; CTA
IQMDLVTF

SEQ ID NO: 101724 - protein, 8 aa, Homo sapiens
  misc_feature: Table A; Target 101724; HLA-B*15:01; ZNF560; ENSG00000198028; CTA
IQMDLVTF

SEQ ID NO: 101725 - protein, 8 aa, Homo sapiens
  misc_feature: Table A; Target 101725; HLA-B*15:03; ZNF560; ENSG00000198028; CTA
IQMDLVTF

SEQ ID NO: 101726 - protein, 8 aa, Homo sapiens
  misc_feature: Table A; Target 101726; HLA-B*37:01; ZNF560; ENSG00000198028; CTA
IQMDLVTF

SEQ ID NO: 101727 - protein, 11 aa, Homo sapiens
  misc_feature: Table A; Target 101727; HLA-A*02:01; ZNF560; ENSG00000198028; CTA
IQMDLVTFDSV

SEQ ID NO: 101728 - protein, 11 aa, Homo sapiens
  misc_feature: Table A; Target 101728; HLA-A*02:07; ZNF560; ENSG00000198028; CTA
IQMDLVTFDSV

SEQ ID NO: 101729 - protein, 11 aa, Homo sapiens
  misc_feature: Table A; Target 101729; HLA-B*13:02; ZNF560; ENSG00000198028; CTA
IQMDLVTFDSV

SEQ ID NO: 101730 - protein, 11 aa, Homo sapiens
  misc_feature: Table A; Target 101730; HLA-C*16:04; ZNF560; ENSG00000198028; CTA
IQMDLVTFDSV

SEQ ID NO: 101731 - protein, 9 aa, Homo sapiens
  misc_feature: Table A; Target 101731; HLA-B*13:02; ZNF560; ENSG00000198028; CTA
IQTSNGIQM

SEQ ID NO: 101732 - protein, 9 aa, Homo sapiens
  misc_feature: Table A; Target 101732; HLA-B*15:01; ZNF560; ENSG00000198028; CTA
IQTSNGIQM

SEQ ID NO: 101733 - protein, 9 aa, Homo sapiens
  misc_feature: Table A; Target 101733; HLA-B*15:03; ZNF560; ENSG00000198028; CTA
IQTSNGIQM

SEQ ID NO: 101734 - protein, 9 aa, Homo sapiens
  misc_feature: Table A; Target 101734; HLA-B*27:05; ZNF560; ENSG00000198028; CTA
IQTSNGIQM

SEQ ID NO: 101735 - protein, 9 aa, Homo sapiens
  misc_feature: Table A; Target 101735; HLA-B*39:01; ZNF560; ENSG00000198028; CTA
IQTSNGIQM

SEQ ID NO: 101736 - protein, 9 aa, Homo sapiens
  misc_feature: Table A; Target 101736; HLA-C*02:02; ZNF560; ENSG00000198028; CTA
IQTSNGIQM

SEQ ID NO: 101737 - protein, 9 aa, Homo sapiens
  misc_feature: Table A; Target 101737; HLA-C*07:04; ZNF560; ENSG00000198028; CTA
IQTSNGIQM

SEQ ID NO: 101738 - protein, 8 aa, Homo sapiens
  misc_feature: Table A; Target 101738; HLA-B*08:01; ZNF560; ENSG00000198028; CTA
IQYAKDLL

SEQ ID NO: 101739 - protein, 8 aa, Homo sapiens
  misc_feature: Table A; Target 101739; HLA-B*13:02; ZNF560; ENSG00000198028; CTA
IQYAKDLL

SEQ ID NO: 101740 - protein, 8 aa, Homo sapiens
  misc_feature: Table A; Target 101740; HLA-B*15:03; ZNF560; ENSG00000198028; CTA
IQYAKDLL

SEQ ID NO: 101741 - protein, 11 aa, Homo sapiens
  misc_feature: Table A; Target 101741; HLA-A*30:02; ZNF560; ENSG00000198028; CTA
IQYAKDLLSLY

SEQ ID NO: 101742 - protein, 11 aa, Homo sapiens
  misc_feature: Table A; Target 101742; HLA-B*15:01; ZNF560; ENSG00000198028; CTA
IQYAKDLLSLY

SEQ ID NO: 101743 - protein, 10 aa, Homo sapiens
  misc_feature: Table A; Target 101743; HLA-B*57:01; ZNF560; ENSG00000198028; CTA
ISYPSLFGHL

SEQ ID NO: 101744 - protein, 11 aa, Homo sapiens
  misc_feature: Table A; Target 101744; HLA-A*31:01; ZNF560; ENSG00000198028; CTA
ISYPSLFGHLR

SEQ ID NO: 101745 - protein, 11 aa, Homo sapiens
  misc_feature: Table A; Target 101745; HLA-B*57:01; ZNF560; ENSG00000198028; CTA
ISYPSLFGHLR

SEQ ID NO: 101746 - protein, 8 aa, Homo sapiens
  misc_feature: Table A; Target 101746; HLA-C*14:02; ZNF560; ENSG00000198028; CTA
IYQSYLEA

SEQ ID NO: 101747 - protein, 9 aa, Homo sapiens
  misc_feature: Table A; Target 101747; HLA-C*14:02; ZNF560; ENSG00000198028; CTA
IYQSYLEAH

SEQ ID NO: 101748 - protein, 10 aa, Homo sapiens
  misc_feature: Table A; Target 101748; HLA-A*31:01; ZNF560; ENSG00000198028; CTA
IYQSYLEAHR

SEQ ID NO: 101749 - protein, 10 aa, Homo sapiens
  misc_feature: Table A; Target 101749; HLA-A*33:01; ZNF560; ENSG00000198028; CTA
IYQSYLEAHR

SEQ ID NO: 101750 - protein, 10 aa, Homo sapiens
  misc_feature: Table A; Target 101750; HLA-A*33:03; ZNF560; ENSG00000198028; CTA
IYQSYLEAHR

SEQ ID NO: 101751 - protein, 8 aa, Homo sapiens
  misc_feature: Table A; Target 101751; HLA-A*32:01; ZNF560; ENSG00000198028; CTA
KAFASFSA

SEQ ID NO: 101752 - protein, 8 aa, Homo sapiens
  misc_feature: Table A; Target 101752; HLA-B*54:01; ZNF560; ENSG00000198028; CTA
KAFASFSA

SEQ ID NO: 101753 - protein, 8 aa, Homo sapiens
  misc_feature: Table A; Target 101753; HLA-B*56:01; ZNF560; ENSG00000198028; CTA
KAFASFSA

SEQ ID NO: 101754 - protein, 8 aa, Homo sapiens
  misc_feature: Table A; Target 101754; HLA-C*16:04; ZNF560; ENSG00000198028; CTA
KAFASFSA

SEQ ID NO: 101755 - protein, 9 aa, Homo sapiens
  misc_feature: Table A; Target 101755; HLA-A*03:01; ZNF560; ENSG00000198028; CTA
KAFASFSAR

SEQ ID NO: 101756 - protein, 9 aa, Homo sapiens
  misc_feature: Table A; Target 101756; HLA-A*30:02; ZNF560; ENSG00000198028; CTA
KAFASFSAR

SEQ ID NO: 101757 - protein, 9 aa, Homo sapiens
  misc_feature: Table A; Target 101757; HLA-A*31:01; ZNF560; ENSG00000198028; CTA
KAFASFSAR

SEQ ID NO: 101758 - protein, 9 aa, Homo sapiens
  misc_feature: Table A; Target 101758; HLA-A*33:01; ZNF560; ENSG00000198028; CTA
KAFASFSAR

SEQ ID NO: 101759 - protein, 9 aa, Homo sapiens
  misc_feature: Table A; Target 101759; HLA-A*33:03; ZNF560; ENSG00000198028; CTA
KAFASFSAR

SEQ ID NO: 101760 - protein, 9 aa, Homo sapiens
  misc_feature: Table A; Target 101760; HLA-B*46:01; ZNF560; ENSG00000198028; CTA
KAFASFSAR

SEQ ID NO: 101761 - protein, 9 aa, Homo sapiens
  misc_feature: Table A; Target 101761; HLA-B*57:01; ZNF560; ENSG00000198028; CTA
KAFASFSAR

SEQ ID NO: 101762 - protein, 9 aa, Homo sapiens
  misc_feature: Table A; Target 101762; HLA-C*02:02; ZNF560; ENSG00000198028; CTA
KAFASFSAR

SEQ ID NO: 101763 - protein, 9 aa, Homo sapiens
  misc_feature: Table A; Target 101763; HLA-C*07:06; ZNF560; ENSG00000198028; CTA
KAFASFSAR

SEQ ID NO: 101764 - protein, 9 aa, Homo sapiens
  misc_feature: Table A; Target 101764; HLA-C*16:04; ZNF560; ENSG00000198028; CTA
KAFASFSAR

SEQ ID NO: 101765 - protein, 9 aa, Homo sapiens
  misc_feature: Table A; Target 101765; HLA-B*07:02; ZNF560; ENSG00000198028; CTA
KAFGTSAGL

SEQ ID NO: 101766 - protein, 9 aa, Homo sapiens
  misc_feature: Table A; Target 101766; HLA-B*15:03; ZNF560; ENSG00000198028; CTA
KAFGTSAGL

SEQ ID NO: 101767 - protein, 9 aa, Homo sapiens
  misc_feature: Table A; Target 101767; HLA-B*40:01; ZNF560; ENSG00000198028; CTA
KAFGTSAGL

SEQ ID NO: 101768 - protein, 9 aa, Homo sapiens
  misc_feature: Table A; Target 101768; HLA-B*46:01; ZNF560; ENSG00000198028; CTA
KAFGTSAGL

SEQ ID NO: 101769 - protein, 9 aa, Homo sapiens
  misc_feature: Table A; Target 101769; HLA-B*58:01; ZNF560; ENSG00000198028; CTA
KAFGTSAGL

SEQ ID NO: 101770 - protein, 9 aa, Homo sapiens
  misc_feature: Table A; Target 101770; HLA-C*01:02; ZNF560; ENSG00000198028; CTA
KAFGTSAGL

SEQ ID NO: 101771 - protein, 9 aa, Homo sapiens
  misc_feature: Table A; Target 101771; HLA-C*02:02; ZNF560; ENSG00000198028; CTA
KAFGTSAGL

SEQ ID NO: 101772 - protein, 9 aa, Homo sapiens
  misc_feature: Table A; Target 101772; HLA-C*03:03; ZNF560; ENSG00000198028; CTA
KAFGTSAGL

SEQ ID NO: 101773 - protein, 9 aa, Homo sapiens
  misc_feature: Table A; Target 101773; HLA-C*03:04; ZNF560; ENSG00000198028; CTA
KAFGTSAGL

SEQ ID NO: 101774 - protein, 9 aa, Homo sapiens
  misc_feature: Table A; Target 101774; HLA-C*16:04; ZNF560; ENSG00000198028; CTA
KAFGTSAGL

SEQ ID NO: 101775 - protein, 9 aa, Homo sapiens
  misc_feature: Table A; Target 101775; HLA-A*02:03; ZNF560; ENSG00000198028; CTA
KAFGTSSGV

SEQ ID NO: 101776 - protein, 9 aa, Homo sapiens
  misc_feature: Table A; Target 101776; HLA-A*32:01; ZNF560; ENSG00000198028; CTA
KAFGTSSGV

SEQ ID NO: 101777 - protein, 9 aa, Homo sapiens
  misc_feature: Table A; Target 101777; HLA-B*13:02; ZNF560; ENSG00000198028; CTA
KAFGTSSGV

SEQ ID NO: 101778 - protein, 9 aa, Homo sapiens
  misc_feature: Table A; Target 101778; HLA-C*02:02; ZNF560; ENSG00000198028; CTA
KAFGTSSGV

SEQ ID NO: 101779 - protein, 9 aa, Homo sapiens
  misc_feature: Table A; Target 101779; HLA-C*12:03; ZNF560; ENSG00000198028; CTA
KAFGTSSGV

SEQ ID NO: 101780 - protein, 9 aa, Homo sapiens
  misc_feature: Table A; Target 101780; HLA-C*16:02; ZNF560; ENSG00000198028; CTA
KAFGTSSGV

SEQ ID NO: 101781 - protein, 9 aa, Homo sapiens
  misc_feature: Table A; Target 101781; HLA-C*16:04; ZNF560; ENSG00000198028; CTA
KAFGTSSGV

SEQ ID NO: 101782 - protein, 9 aa, Homo sapiens
  misc_feature: Table A; Target 101782; HLA-A*23:01; ZNF560; ENSG00000198028; CTA
KAFISYPSL

SEQ ID NO: 101783 - protein, 9 aa, Homo sapiens
  misc_feature: Table A; Target 101783; HLA-A*32:01; ZNF560; ENSG00000198028; CTA
KAFISYPSL

SEQ ID NO: 101784 - protein, 9 aa, Homo sapiens
  misc_feature: Table A; Target 101784; HLA-B*07:02; ZNF560; ENSG00000198028; CTA
KAFISYPSL

SEQ ID NO: 101785 - protein, 9 aa, Homo sapiens
  misc_feature: Table A; Target 101785; HLA-B*15:03; ZNF560; ENSG00000198028; CTA
KAFISYPSL

SEQ ID NO: 101786 - protein, 9 aa, Homo sapiens
  misc_feature: Table A; Target 101786; HLA-B*40:02; ZNF560; ENSG00000198028; CTA
KAFISYPSL

SEQ ID NO: 101787 - protein, 9 aa, Homo sapiens
  misc_feature: Table A; Target 101787; HLA-B*46:01; ZNF560; ENSG00000198028; CTA
KAFISYPSL

SEQ ID NO: 101788 - protein, 9 aa, Homo sapiens
  misc_feature: Table A; Target 101788; HLA-B*57:01; ZNF560; ENSG00000198028; CTA
KAFISYPSL

SEQ ID NO: 101789 - protein, 9 aa, Homo sapiens
  misc_feature: Table A; Target 101789; HLA-B*58:01; ZNF560; ENSG00000198028; CTA
KAFISYPSL

SEQ ID NO: 101790 - protein, 9 aa, Homo sapiens
  misc_feature: Table A; Target 101790; HLA-C*01:02; ZNF560; ENSG00000198028; CTA
KAFISYPSL

SEQ ID NO: 101791 - protein, 9 aa, Homo sapiens
  misc_feature: Table A; Target 101791; HLA-C*02:02; ZNF560; ENSG00000198028; CTA
KAFISYPSL

SEQ ID NO: 101792 - protein, 9 aa, Homo sapiens
  misc_feature: Table A; Target 101792; HLA-C*03:03; ZNF560; ENSG00000198028; CTA
KAFISYPSL

SEQ ID NO: 101793 - protein, 9 aa, Homo sapiens
  misc_feature: Table A; Target 101793; HLA-C*03:04; ZNF560; ENSG00000198028; CTA
KAFISYPSL

SEQ ID NO: 101794 - protein, 9 aa, Homo sapiens
  misc_feature: Table A; Target 101794; HLA-C*06:02; ZNF560; ENSG00000198028; CTA
KAFISYPSL

SEQ ID NO: 101795 - protein, 9 aa, Homo sapiens
  misc_feature: Table A; Target 101795; HLA-C*16:01; ZNF560; ENSG00000198028; CTA
KAFISYPSL

SEQ ID NO: 101796 - protein, 9 aa, Homo sapiens
  misc_feature: Table A; Target 101796; HLA-C*16:04; ZNF560; ENSG00000198028; CTA
KAFISYPSL

SEQ ID NO: 101797 - protein, 10 aa, Homo sapiens
  misc_feature: Table A; Target 101797; HLA-B*57:01; ZNF560; ENSG00000198028; CTA
KAFISYPSLF

SEQ ID NO: 101798 - protein, 8 aa, Homo sapiens
  misc_feature: Table A; Target 101798; HLA-A*30:02; ZNF560; ENSG00000198028; CTA
KAFIYQSY

SEQ ID NO: 101799 - protein, 8 aa, Homo sapiens
  misc_feature: Table A; Target 101799; HLA-A*32:01; ZNF560; ENSG00000198028; CTA
KAFIYQSY

SEQ ID NO: 101800 - protein, 8 aa, Homo sapiens
  misc_feature: Table A; Target 101800; HLA-B*15:01; ZNF560; ENSG00000198028; CTA
KAFIYQSY

SEQ ID NO: 101801 - protein, 8 aa, Homo sapiens
  misc_feature: Table A; Target 101801; HLA-B*15:03; ZNF560; ENSG00000198028; CTA
KAFIYQSY

SEQ ID NO: 101802 - protein, 8 aa, Homo sapiens
  misc_feature: Table A; Target 101802; HLA-B*46:01; ZNF560; ENSG00000198028; CTA
KAFIYQSY

SEQ ID NO: 101803 - protein, 8 aa, Homo sapiens
  misc_feature: Table A; Target 101803; HLA-B*57:01; ZNF560; ENSG00000198028; CTA
KAFIYQSY

SEQ ID NO: 101804 - protein, 8 aa, Homo sapiens
  misc_feature: Table A; Target 101804; HLA-C*02:02; ZNF560; ENSG00000198028; CTA
KAFIYQSY

SEQ ID NO: 101805 - protein, 8 aa, Homo sapiens
  misc_feature: Table A; Target 101805; HLA-C*16:01; ZNF560; ENSG00000198028; CTA
KAFIYQSY

SEQ ID NO: 101806 - protein, 8 aa, Homo sapiens
  misc_feature: Table A; Target 101806; HLA-C*16:04; ZNF560; ENSG00000198028; CTA
KAFIYQSY

SEQ ID NO: 101807 - protein, 9 aa, Homo sapiens
  misc_feature: Table A; Target 101807; HLA-A*02:04; ZNF560; ENSG00000198028; CTA
KAFIYQSYL

SEQ ID NO: 101808 - protein, 9 aa, Homo sapiens
  misc_feature: Table A; Target 101808; HLA-A*31:01; ZNF560; ENSG00000198028; CTA
KAFIYQSYL

SEQ ID NO: 101809 - protein, 9 aa, Homo sapiens
  misc_feature: Table A; Target 101809; HLA-B*57:01; ZNF560; ENSG00000198028; CTA
KAFIYQSYL

SEQ ID NO: 101810 - protein, 9 aa, Homo sapiens
  misc_feature: Table A; Target 101810; HLA-C*02:02; ZNF560; ENSG00000198028; CTA
KAFIYQSYL

SEQ ID NO: 101811 - protein, 9 aa, Homo sapiens
  misc_feature: Table A; Target 101811; HLA-A*31:01; ZNF560; ENSG00000198028; CTA
KAFRTSSGR

SEQ ID NO: 101812 - protein, 11 aa, Homo sapiens
  misc_feature: Table A; Target 101812; HLA-A*03:01; ZNF560; ENSG00000198028; CTA
KAFTERSDLTK

SEQ ID NO: 101813 - protein, 11 aa, Homo sapiens
  misc_feature: Table A; Target 101813; HLA-A*03:02; ZNF560; ENSG00000198028; CTA
KAFTERSDLTK

SEQ ID NO: 101814 - protein, 11 aa, Homo sapiens
  misc_feature: Table A; Target 101814; HLA-B*27:02; ZNF560; ENSG00000198028; CTA
KAFTERSDLTK

SEQ ID NO: 101815 - protein, 11 aa, Homo sapiens
  misc_feature: Table A; Target 101815; HLA-B*57:01; ZNF560; ENSG00000198028; CTA
KAFTERSDLTK

SEQ ID NO: 101816 - protein, 11 aa, Homo sapiens
  misc_feature: Table A; Target 101816; HLA-C*06:02; ZNF560; ENSG00000198028; CTA
KAFTERSDLTK

SEQ ID NO: 101817 - protein, 8 aa, Homo sapiens
  misc_feature: Table A; Target 101817; HLA-A*30:02; ZNF560; ENSG00000198028; CTA
KAFTERSY

SEQ ID NO: 101818 - protein, 8 aa, Homo sapiens
  misc_feature: Table A; Target 101818; HLA-A*32:01; ZNF560; ENSG00000198028; CTA
KAFTERSY

SEQ ID NO: 101819 - protein, 8 aa, Homo sapiens
  misc_feature: Table A; Target 101819; HLA-B*15:01; ZNF560; ENSG00000198028; CTA
KAFTERSY

SEQ ID NO: 101820 - protein, 8 aa, Homo sapiens
  misc_feature: Table A; Target 101820; HLA-B*57:01; ZNF560; ENSG00000198028; CTA
KAFTERSY

SEQ ID NO: 101821 - protein, 8 aa, Homo sapiens
  misc_feature: Table A; Target 101821; HLA-C*16:01; ZNF560; ENSG00000198028; CTA
KAFTERSY

SEQ ID NO: 101822 - protein, 8 aa, Homo sapiens
  misc_feature: Table A; Target 101822; HLA-C*16:02; ZNF560; ENSG00000198028; CTA
KAFTERSY

SEQ ID NO: 101823 - protein, 9 aa, Homo sapiens
  misc_feature: Table A; Target 101823; HLA-A*31:01; ZNF560; ENSG00000198028; CTA
KAFTERSYL

SEQ ID NO: 101824 - protein, 9 aa, Homo sapiens
  misc_feature: Table A; Target 101824; HLA-B*57:01; ZNF560; ENSG00000198028; CTA
KAFTERSYL

SEQ ID NO: 101825 - protein, 11 aa, Homo sapiens
  misc_feature: Table A; Target 101825; HLA-A*03:01; ZNF560; ENSG00000198028; CTA
KAFTERSYLTK

SEQ ID NO: 101826 - protein, 11 aa, Homo sapiens
  misc_feature: Table A; Target 101826; HLA-A*11:01; ZNF560; ENSG00000198028; CTA
KAFTERSYLTK

SEQ ID NO: 101827 - protein, 11 aa, Homo sapiens
  misc_feature: Table A; Target 101827; HLA-A*31:01; ZNF560; ENSG00000198028; CTA
KAFTERSYLTK

SEQ ID NO: 101828 - protein, 11 aa, Homo sapiens
  misc_feature: Table A; Target 101828; HLA-B*57:01; ZNF560; ENSG00000198028; CTA
KAFTERSYLTK

SEQ ID NO: 101829 - protein, 8 aa, Homo sapiens
  misc_feature: Table A; Target 101829; HLA-B*08:01; ZNF560; ENSG00000198028; CTA
KAFTKCSY

SEQ ID NO: 101830 - protein, 8 aa, Homo sapiens
  misc_feature: Table A; Target 101830; HLA-C*16:01; ZNF560; ENSG00000198028; CTA
KAFTKCSY

SEQ ID NO: 101831 - protein, 9 aa, Homo sapiens
  misc_feature: Table A; Target 101831; HLA-A*23:01; ZNF560; ENSG00000198028; CTA
KAFVVSSSL

SEQ ID NO: 101832 - protein, 9 aa, Homo sapiens
  misc_feature: Table A; Target 101832; HLA-A*30:01; ZNF560; ENSG00000198028; CTA
KAFVVSSSL

SEQ ID NO: 101833 - protein, 9 aa, Homo sapiens
  misc_feature: Table A; Target 101833; HLA-A*31:01; ZNF560; ENSG00000198028; CTA
KAFVVSSSL

SEQ ID NO: 101834 - protein, 9 aa, Homo sapiens
  misc_feature: Table A; Target 101834; HLA-A*32:01; ZNF560; ENSG00000198028; CTA
KAFVVSSSL

SEQ ID NO: 101835 - protein, 9 aa, Homo sapiens
  misc_feature: Table A; Target 101835; HLA-B*07:02; ZNF560; ENSG00000198028; CTA
KAFVVSSSL

SEQ ID NO: 101836 - protein, 9 aa, Homo sapiens
  misc_feature: Table A; Target 101836; HLA-B*08:01; ZNF560; ENSG00000198028; CTA
KAFVVSSSL

SEQ ID NO: 101837 - protein, 9 aa, Homo sapiens
  misc_feature: Table A; Target 101837; HLA-B*15:01; ZNF560; ENSG00000198028; CTA
KAFVVSSSL

SEQ ID NO: 101838 - protein, 9 aa, Homo sapiens
  misc_feature: Table A; Target 101838; HLA-B*15:03; ZNF560; ENSG00000198028; CTA
KAFVVSSSL

SEQ ID NO: 101839 - protein, 9 aa, Homo sapiens
  misc_feature: Table A; Target 101839; HLA-B*37:01; ZNF560; ENSG00000198028; CTA
KAFVVSSSL

SEQ ID NO: 101840 - protein, 9 aa, Homo sapiens
  misc_feature: Table A; Target 101840; HLA-B*40:01; ZNF560; ENSG00000198028; CTA
KAFVVSSSL

SEQ ID NO: 101841 - protein, 9 aa, Homo sapiens
  misc_feature: Table A; Target 101841; HLA-B*40:02; ZNF560; ENSG00000198028; CTA
KAFVVSSSL

SEQ ID NO: 101842 - protein, 9 aa, Homo sapiens
  misc_feature: Table A; Target 101842; HLA-B*46:01; ZNF560; ENSG00000198028; CTA
KAFVVSSSL

SEQ ID NO: 101843 - protein, 9 aa, Homo sapiens
  misc_feature: Table A; Target 101843; HLA-B*51:01; ZNF560; ENSG00000198028; CTA
KAFVVSSSL

SEQ ID NO: 101844 - protein, 9 aa, Homo sapiens
  misc_feature: Table A; Target 101844; HLA-B*58:01; ZNF560; ENSG00000198028; CTA
KAFVVSSSL

SEQ ID NO: 101845 - protein, 9 aa, Homo sapiens
  misc_feature: Table A; Target 101845; HLA-C*01:02; ZNF560; ENSG00000198028; CTA
KAFVVSSSL

SEQ ID NO: 101846 - protein, 9 aa, Homo sapiens
  misc_feature: Table A; Target 101846; HLA-C*02:02; ZNF560; ENSG00000198028; CTA
KAFVVSSSL

SEQ ID NO: 101847 - protein, 9 aa, Homo sapiens
  misc_feature: Table A; Target 101847; HLA-C*03:03; ZNF560; ENSG00000198028; CTA
KAFVVSSSL

SEQ ID NO: 101848 - protein, 9 aa, Homo sapiens
  misc_feature: Table A; Target 101848; HLA-C*03:04; ZNF560; ENSG00000198028; CTA
KAFVVSSSL

SEQ ID NO: 101849 - protein, 9 aa, Homo sapiens
  misc_feature: Table A; Target 101849; HLA-C*05:01; ZNF560; ENSG00000198028; CTA
KAFVVSSSL

SEQ ID NO: 101850 - protein, 9 aa, Homo sapiens
  misc_feature: Table A; Target 101850; HLA-C*07:02; ZNF560; ENSG00000198028; CTA
KAFVVSSSL

SEQ ID NO: 101851 - protein, 9 aa, Homo sapiens
  misc_feature: Table A; Target 101851; HLA-C*12:03; ZNF560; ENSG00000198028; CTA
KAFVVSSSL

SEQ ID NO: 101852 - protein, 9 aa, Homo sapiens
  misc_feature: Table A; Target 101852; HLA-C*14:02; ZNF560; ENSG00000198028; CTA
KAFVVSSSL

SEQ ID NO: 101853 - protein, 9 aa, Homo sapiens
  misc_feature: Table A; Target 101853; HLA-C*16:01; ZNF560; ENSG00000198028; CTA
KAFVVSSSL

SEQ ID NO: 101854 - protein, 9 aa, Homo sapiens
  misc_feature: Table A; Target 101854; HLA-C*16:02; ZNF560; ENSG00000198028; CTA
KAFVVSSSL

SEQ ID NO: 101855 - protein, 9 aa, Homo sapiens
  misc_feature: Table A; Target 101855; HLA-C*16:04; ZNF560; ENSG00000198028; CTA
KAFVVSSSL

SEQ ID NO: 101856 - protein, 9 aa, Homo sapiens
  misc_feature: Table A; Target 101856; HLA-B*08:01; ZNF560; ENSG00000198028; CTA
KAYSRSCVL

SEQ ID NO: 101857 - protein, 9 aa, Homo sapiens
  misc_feature: Table A; Target 101857; HLA-B*37:01; ZNF560; ENSG00000198028; CTA
KAYSRSCVL

SEQ ID NO: 101858 - protein, 9 aa, Homo sapiens
  misc_feature: Table A; Target 101858; HLA-C*03:03; ZNF560; ENSG00000198028; CTA
KAYSRSCVL

SEQ ID NO: 101859 - protein, 9 aa, Homo sapiens
  misc_feature: Table A; Target 101859; HLA-C*03:04; ZNF560; ENSG00000198028; CTA
KAYSRSCVL

SEQ ID NO: 101860 - protein, 9 aa, Homo sapiens
  misc_feature: Table A; Target 101860; HLA-C*12:03; ZNF560; ENSG00000198028; CTA
KAYSRSCVL

SEQ ID NO: 101861 - protein, 9 aa, Homo sapiens
  misc_feature: Table A; Target 101861; HLA-C*16:01; ZNF560; ENSG00000198028; CTA
KAYSRSCVL

SEQ ID NO: 101862 - protein, 8 aa, Homo sapiens
  misc_feature: Table A; Target 101862; HLA-A*03:02; ZNF560; ENSG00000198028; CTA
KCGKAFTK

SEQ ID NO: 101863 - protein, 9 aa, Homo sapiens
  misc_feature: Table A; Target 101863; HLA-B*37:01; ZNF560; ENSG00000198028; CTA
KEYGKAFGT

SEQ ID NO: 101864 - protein, 10 aa, Homo sapiens
  misc_feature: Table A; Target 101864; HLA-B*40:02; ZNF560; ENSG00000198028; CTA
KEYGKAFGTS

SEQ ID NO: 101865 - protein, 10 aa, Homo sapiens
  misc_feature: Table A; Target 101865; HLA-C*06:02; ZNF560; ENSG00000198028; CTA
KEYGKAFGTS

SEQ ID NO: 101866 - protein, 11 aa, Homo sapiens
  misc_feature: Table A; Target 101866; HLA-B*40:02; ZNF560; ENSG00000198028; CTA
KEYGKAFGTSS

SEQ ID NO: 101867 - protein, 9 aa, Homo sapiens
  misc_feature: Table A; Target 101867; HLA-B*38:01; ZNF560; ENSG00000198028; CTA
KHQTSVSAL

SEQ ID NO: 101868 - protein, 9 aa, Homo sapiens
  misc_feature: Table A; Target 101868; HLA-B*39:01; ZNF560; ENSG00000198028; CTA
KHQTSVSAL

SEQ ID NO: 101869 - protein, 8 aa, Homo sapiens
  misc_feature: Table A; Target 101869; HLA-A*30:02; ZNF560; ENSG00000198028; CTA
KNLSSVGY

SEQ ID NO: 101870 - protein, 8 aa, Homo sapiens
  misc_feature: Table A; Target 101870; HLA-B*15:03; ZNF560; ENSG00000198028; CTA
KNLSSVGY

SEQ ID NO: 101871 - protein, 10 aa, Homo sapiens
  misc_feature: Table A; Target 101871; HLA-A*23:01; ZNF560; ENSG00000198028; CTA
KNLSSVGYQL

SEQ ID NO: 101872 - protein, 10 aa, Homo sapiens
  misc_feature: Table A; Target 101872; HLA-C*07:02; ZNF560; ENSG00000198028; CTA
KNLSSVGYQL

SEQ ID NO: 101873 - protein, 8 aa, Homo sapiens
  misc_feature: Table A; Target 101873; HLA-B*55:01; ZNF560; ENSG00000198028; CTA
KPFTSSAC

SEQ ID NO: 101874 - protein, 8 aa, Homo sapiens
  misc_feature: Table A; Target 101874; HLA-B*56:01; ZNF560; ENSG00000198028; CTA
KPFTSSAC

SEQ ID NO: 101875 - protein, 9 aa, Homo sapiens
  misc_feature: Table A; Target 101875; HLA-B*07:02; ZNF560; ENSG00000198028; CTA
KPFTSSACL

SEQ ID NO: 101876 - protein, 9 aa, Homo sapiens
  misc_feature: Table A; Target 101876; HLA-B*35:03; ZNF560; ENSG00000198028; CTA
KPFTSSACL

SEQ ID NO: 101877 - protein, 9 aa, Homo sapiens
  misc_feature: Table A; Target 101877; HLA-B*56:01; ZNF560; ENSG00000198028; CTA
KPFTSSACL

SEQ ID NO: 101878 - protein, 9 aa, Homo sapiens
  misc_feature: Table A; Target 101878; HLA-C*07:02; ZNF560; ENSG00000198028; CTA
KPFTSSACL

SEQ ID NO: 101879 - protein, 8 aa, Homo sapiens
  misc_feature: Table A; Target 101879; HLA-B*08:01; ZNF560; ENSG00000198028; CTA
KPYEHKEY

SEQ ID NO: 101880 - protein, 8 aa, Homo sapiens
  misc_feature: Table A; Target 101880; HLA-C*07:01; ZNF560; ENSG00000198028; CTA
KPYEHKEY

SEQ ID NO: 101881 - protein, 9 aa, Homo sapiens
  misc_feature: Table A; Target 101881; HLA-A*03:02; ZNF560; ENSG00000198028; CTA
KQCEDVFCK

SEQ ID NO: 101882 - protein, 8 aa, Homo sapiens
  misc_feature: Table A; Target 101882; HLA-A*30:02; ZNF560; ENSG00000198028; CTA
KSFEGTDY

SEQ ID NO: 101883 - protein, 8 aa, Homo sapiens
  misc_feature: Table A; Target 101883; HLA-A*32:01; ZNF560; ENSG00000198028; CTA
KSFEGTDY

SEQ ID NO: 101884 - protein, 8 aa, Homo sapiens
  misc_feature: Table A; Target 101884; HLA-B*15:01; ZNF560; ENSG00000198028; CTA
KSFEGTDY

SEQ ID NO: 101885 - protein, 8 aa, Homo sapiens
  misc_feature: Table A; Target 101885; HLA-B*15:03; ZNF560; ENSG00000198028; CTA
KSFEGTDY

SEQ ID NO: 101886 - protein, 8 aa, Homo sapiens
  misc_feature: Table A; Target 101886; HLA-B*39:01; ZNF560; ENSG00000198028; CTA
KSFEGTDY

SEQ ID NO: 101887 - protein, 8 aa, Homo sapiens
  misc_feature: Table A; Target 101887; HLA-B*46:01; ZNF560; ENSG00000198028; CTA
KSFEGTDY

SEQ ID NO: 101888 - protein, 8 aa, Homo sapiens
  misc_feature: Table A; Target 101888; HLA-B*58:01; ZNF560; ENSG00000198028; CTA
KSFEGTDY

SEQ ID NO: 101889 - protein, 8 aa, Homo sapiens
  misc_feature: Table A; Target 101889; HLA-C*01:02; ZNF560; ENSG00000198028; CTA
KSFEGTDY

SEQ ID NO: 101890 - protein, 8 aa, Homo sapiens
  misc_feature: Table A; Target 101890; HLA-C*05:01; ZNF560; ENSG00000198028; CTA
KSFEGTDY

SEQ ID NO: 101891 - protein, 8 aa, Homo sapiens
  misc_feature: Table A; Target 101891; HLA-C*12:03; ZNF560; ENSG00000198028; CTA
KSFEGTDY

SEQ ID NO: 101892 - protein, 8 aa, Homo sapiens
  misc_feature: Table A; Target 101892; HLA-C*14:02; ZNF560; ENSG00000198028; CTA
KSFEGTDY

SEQ ID NO: 101893 - protein, 8 aa, Homo sapiens
  misc_feature: Table A; Target 101893; HLA-C*16:01; ZNF560; ENSG00000198028; CTA
KSFEGTDY

SEQ ID NO: 101894 - protein, 8 aa, Homo sapiens
  misc_feature: Table A; Target 101894; HLA-C*16:02; ZNF560; ENSG00000198028; CTA
KSFEGTDY

SEQ ID NO: 101895 - protein, 10 aa, Homo sapiens
  misc_feature: Table A; Target 101895; HLA-A*03:01; ZNF560; ENSG00000198028; CTA
KSFEGTDYGK

SEQ ID NO: 101896 - protein, 10 aa, Homo sapiens
  misc_feature: Table A; Target 101896; HLA-A*03:02; ZNF560; ENSG00000198028; CTA
KSFEGTDYGK

SEQ ID NO: 101897 - protein, 10 aa, Homo sapiens
  misc_feature: Table A; Target 101897; HLA-A*11:01; ZNF560; ENSG00000198028; CTA
KSFEGTDYGK

SEQ ID NO: 101898 - protein, 10 aa, Homo sapiens
  misc_feature: Table A; Target 101898; HLA-A*31:01; ZNF560; ENSG00000198028; CTA
KSFEGTDYGK

SEQ ID NO: 101899 - protein, 10 aa, Homo sapiens
  misc_feature: Table A; Target 101899; HLA-B*27:02; ZNF560; ENSG00000198028; CTA
KSFEGTDYGK

SEQ ID NO: 101900 - protein, 10 aa, Homo sapiens
  misc_feature: Table A; Target 101900; HLA-B*27:05; ZNF560; ENSG00000198028; CTA
KSFEGTDYGK

SEQ ID NO: 101901 - protein, 10 aa, Homo sapiens
  misc_feature: Table A; Target 101901; HLA-B*57:01; ZNF560; ENSG00000198028; CTA
KSFEGTDYGK

SEQ ID NO: 101902 - protein, 10 aa, Homo sapiens
  misc_feature: Table A; Target 101902; HLA-B*58:01; ZNF560; ENSG00000198028; CTA
KSFEGTDYGK

SEQ ID NO: 101903 - protein, 11 aa, Homo sapiens
  misc_feature: Table A; Target 101903; HLA-B*58:01; ZNF560; ENSG00000198028; CTA
KSFEGTDYGKA

SEQ ID NO: 101904 - protein, 9 aa, Homo sapiens
  misc_feature: Table A; Target 101904; HLA-A*02:04; ZNF560; ENSG00000198028; CTA
KSFRLILNV

SEQ ID NO: 101905 - protein, 9 aa, Homo sapiens
  misc_feature: Table A; Target 101905; HLA-A*68:02; ZNF560; ENSG00000198028; CTA
KSFRLILNV

SEQ ID NO: 101906 - protein, 9 aa, Homo sapiens
  misc_feature: Table A; Target 101906; HLA-B*57:01; ZNF560; ENSG00000198028; CTA
KSFRLILNV

SEQ ID NO: 101907 - protein, 9 aa, Homo sapiens
  misc_feature: Table A; Target 101907; HLA-A*03:02; ZNF560; ENSG00000198028; CTA
KTFTVPSGF

SEQ ID NO: 101908 - protein, 9 aa, Homo sapiens
  misc_feature: Table A; Target 101908; HLA-A*23:01; ZNF560; ENSG00000198028; CTA
KTFTVPSGF

SEQ ID NO: 101909 - protein, 9 aa, Homo sapiens
  misc_feature: Table A; Target 101909; HLA-A*25:01; ZNF560; ENSG00000198028; CTA
KTFTVPSGF

SEQ ID NO: 101910 - protein, 9 aa, Homo sapiens
  misc_feature: Table A; Target 101910; HLA-A*26:01; ZNF560; ENSG00000198028; CTA
KTFTVPSGF

SEQ ID NO: 101911 - protein, 9 aa, Homo sapiens
  misc_feature: Table A; Target 101911; HLA-A*30:02; ZNF560; ENSG00000198028; CTA
KTFTVPSGF

SEQ ID NO: 101912 - protein, 9 aa, Homo sapiens
  misc_feature: Table A; Target 101912; HLA-A*31:01; ZNF560; ENSG00000198028; CTA
KTFTVPSGF

SEQ ID NO: 101913 - protein, 9 aa, Homo sapiens
  misc_feature: Table A; Target 101913; HLA-A*32:01; ZNF560; ENSG00000198028; CTA
KTFTVPSGF

SEQ ID NO: 101914 - protein, 9 aa, Homo sapiens
  misc_feature: Table A; Target 101914; HLA-B*15:01; ZNF560; ENSG00000198028; CTA
KTFTVPSGF

SEQ ID NO: 101915 - protein, 9 aa, Homo sapiens
  misc_feature: Table A; Target 101915; HLA-B*46:01; ZNF560; ENSG00000198028; CTA
KTFTVPSGF

SEQ ID NO: 101916 - protein, 9 aa, Homo sapiens
  misc_feature: Table A; Target 101916; HLA-B*57:01; ZNF560; ENSG00000198028; CTA
KTFTVPSGF

SEQ ID NO: 101917 - protein, 9 aa, Homo sapiens
  misc_feature: Table A; Target 101917; HLA-B*58:01; ZNF560; ENSG00000198028; CTA
KTFTVPSGF

SEQ ID NO: 101918 - protein, 9 aa, Homo sapiens
  misc_feature: Table A; Target 101918; HLA-C*02:02; ZNF560; ENSG00000198028; CTA
KTFTVPSGF

SEQ ID NO: 101919 - protein, 9 aa, Homo sapiens
  misc_feature: Table A; Target 101919; HLA-C*16:04; ZNF560; ENSG00000198028; CTA
KTFTVPSGF

SEQ ID NO: 101920 - protein, 10 aa, Homo sapiens
  misc_feature: Table A; Target 101920; HLA-A*03:01; ZNF560; ENSG00000198028; CTA
KTFTVPSGFL

SEQ ID NO: 101921 - protein, 8 aa, Homo sapiens
  misc_feature: Table A; Target 101921; HLA-B*57:01; ZNF560; ENSG00000198028; CTA
KTKGPALW

SEQ ID NO: 101922 - protein, 8 aa, Homo sapiens
  misc_feature: Table A; Target 101922; HLA-A*23:01; ZNF560; ENSG00000198028; CTA
KTLNGIQL

SEQ ID NO: 101923 - protein, 8 aa, Homo sapiens
  misc_feature: Table A; Target 101923; HLA-C*03:04; ZNF560; ENSG00000198028; CTA
KTLNGIQL

SEQ ID NO: 101924 - protein, 10 aa, Homo sapiens
  misc_feature: Table A; Target 101924; HLA-A*03:01; ZNF560; ENSG00000198028; CTA
KTLNGIQLAR

SEQ ID NO: 101925 - protein, 10 aa, Homo sapiens
  misc_feature: Table A; Target 101925; HLA-A*03:02; ZNF560; ENSG00000198028; CTA
KTLNGIQLAR

SEQ ID NO: 101926 - protein, 10 aa, Homo sapiens
  misc_feature: Table A; Target 101926; HLA-A*11:01; ZNF560; ENSG00000198028; CTA
KTLNGIQLAR

SEQ ID NO: 101927 - protein, 10 aa, Homo sapiens
  misc_feature: Table A; Target 101927; HLA-A*31:01; ZNF560; ENSG00000198028; CTA
KTLNGIQLAR

SEQ ID NO: 101928 - protein, 10 aa, Homo sapiens
  misc_feature: Table A; Target 101928; HLA-A*33:03; ZNF560; ENSG00000198028; CTA
KTLNGIQLAR

SEQ ID NO: 101929 - protein, 10 aa, Homo sapiens
  misc_feature: Table A; Target 101929; HLA-B*57:01; ZNF560; ENSG00000198028; CTA
KTLNGIQLAR

SEQ ID NO: 101930 - protein, 10 aa, Homo sapiens
  misc_feature: Table A; Target 101930; HLA-C*07:06; ZNF560; ENSG00000198028; CTA
KTLNGIQLAR

SEQ ID NO: 101931 - protein, 9 aa, Homo sapiens
  misc_feature: Table A; Target 101931; HLA-A*03:01; ZNF560; ENSG00000198028; CTA
KTLTKIKPY

SEQ ID NO: 101932 - protein, 9 aa, Homo sapiens
  misc_feature: Table A; Target 101932; HLA-A*30:02; ZNF560; ENSG00000198028; CTA
KTLTKIKPY

SEQ ID NO: 101933 - protein, 9 aa, Homo sapiens
  misc_feature: Table A; Target 101933; HLA-A*31:01; ZNF560; ENSG00000198028; CTA
KTLTKIKPY

SEQ ID NO: 101934 - protein, 9 aa, Homo sapiens
  misc_feature: Table A; Target 101934; HLA-B*57:01; ZNF560; ENSG00000198028; CTA
KTLTKIKPY

SEQ ID NO: 101935 - protein, 9 aa, Homo sapiens
  misc_feature: Table A; Target 101935; HLA-C*06:02; ZNF560; ENSG00000198028; CTA
KTLTKIKPY

SEQ ID NO: 101936 - protein, 9 aa, Homo sapiens
  misc_feature: Table A; Target 101936; HLA-A*03:01; ZNF560; ENSG00000198028; CTA
KTNMSTQNR

SEQ ID NO: 101937 - protein, 9 aa, Homo sapiens
  misc_feature: Table A; Target 101937; HLA-A*03:02; ZNF560; ENSG00000198028; CTA
KTNMSTQNR

SEQ ID NO: 101938 - protein, 9 aa, Homo sapiens
  misc_feature: Table A; Target 101938; HLA-A*11:01; ZNF560; ENSG00000198028; CTA
KTNMSTQNR

SEQ ID NO: 101939 - protein, 9 aa, Homo sapiens
  misc_feature: Table A; Target 101939; HLA-A*31:01; ZNF560; ENSG00000198028; CTA
KTNMSTQNR

SEQ ID NO: 101940 - protein, 9 aa, Homo sapiens
  misc_feature: Table A; Target 101940; HLA-A*32:01; ZNF560; ENSG00000198028; CTA
KTNMSTQNR

SEQ ID NO: 101941 - protein, 9 aa, Homo sapiens
  misc_feature: Table A; Target 101941; HLA-A*33:01; ZNF560; ENSG00000198028; CTA
KTNMSTQNR

SEQ ID NO: 101942 - protein, 9 aa, Homo sapiens
  misc_feature: Table A; Target 101942; HLA-A*33:03; ZNF560; ENSG00000198028; CTA
KTNMSTQNR

SEQ ID NO: 101943 - protein, 9 aa, Homo sapiens
  misc_feature: Table A; Target 101943; HLA-A*68:01; ZNF560; ENSG00000198028; CTA
KTNMSTQNR

SEQ ID NO: 101944 - protein, 9 aa, Homo sapiens
  misc_feature: Table A; Target 101944; HLA-C*07:06; ZNF560; ENSG00000198028; CTA
KTNMSTQNR

SEQ ID NO: 101945 - protein, 11 aa, Homo sapiens
  misc_feature: Table A; Target 101945; HLA-A*25:01; ZNF560; ENSG00000198028; CTA
KTQSGEKLNEW

SEQ ID NO: 101946 - protein, 11 aa, Homo sapiens
  misc_feature: Table A; Target 101946; HLA-A*31:01; ZNF560; ENSG00000198028; CTA
KTQSGEKLNEW

SEQ ID NO: 101947 - protein, 11 aa, Homo sapiens
  misc_feature: Table A; Target 101947; HLA-A*32:01; ZNF560; ENSG00000198028; CTA
KTQSGEKLNEW

SEQ ID NO: 101948 - protein, 11 aa, Homo sapiens
  misc_feature: Table A; Target 101948; HLA-A*33:01; ZNF560; ENSG00000198028; CTA
KTQSGEKLNEW

SEQ ID NO: 101949 - protein, 11 aa, Homo sapiens
  misc_feature: Table A; Target 101949; HLA-B*57:01; ZNF560; ENSG00000198028; CTA
KTQSGEKLNEW

SEQ ID NO: 101950 - protein, 11 aa, Homo sapiens
  misc_feature: Table A; Target 101950; HLA-B*58:01; ZNF560; ENSG00000198028; CTA
KTQSGEKLNEW

SEQ ID NO: 101951 - protein, 8 aa, Homo sapiens
  misc_feature: Table A; Target 101951; HLA-C*06:02; ZNF560; ENSG00000198028; CTA
KTSTIRKV

SEQ ID NO: 101952 - protein, 8 aa, Homo sapiens
  misc_feature: Table A; Target 101952; HLA-C*12:03; ZNF560; ENSG00000198028; CTA
KTSTIRKV

SEQ ID NO: 101953 - protein, 8 aa, Homo sapiens
  misc_feature: Table A; Target 101953; HLA-C*16:01; ZNF560; ENSG00000198028; CTA
KTSTIRKV

SEQ ID NO: 101954 - protein, 8 aa, Homo sapiens
  misc_feature: Table A; Target 101954; HLA-C*16:02; ZNF560; ENSG00000198028; CTA
KTSTIRKV

SEQ ID NO: 101955 - protein, 9 aa, Homo sapiens
  misc_feature: Table A; Target 101955; HLA-C*06:02; ZNF560; ENSG00000198028; CTA
KTSTIRKVS

SEQ ID NO: 101956 - protein, 11 aa, Homo sapiens
  misc_feature: Table A; Target 101956; HLA-B*57:01; ZNF560; ENSG00000198028; CTA
KTSTIRKVSVF

SEQ ID NO: 101957 - protein, 9 aa, Homo sapiens
  misc_feature: Table A; Target 101957; HLA-A*02:07; ZNF560; ENSG00000198028; CTA
KVFVSFSSL

SEQ ID NO: 101958 - protein, 9 aa, Homo sapiens
  misc_feature: Table A; Target 101958; HLA-A*25:01; ZNF560; ENSG00000198028; CTA
KVFVSFSSL

SEQ ID NO: 101959 - protein, 9 aa, Homo sapiens
  misc_feature: Table A; Target 101959; HLA-A*32:01; ZNF560; ENSG00000198028; CTA
KVFVSFSSL

SEQ ID NO: 101960 - protein, 9 aa, Homo sapiens
  misc_feature: Table A; Target 101960; HLA-B*07:02; ZNF560; ENSG00000198028; CTA
KVFVSFSSL

SEQ ID NO: 101961 - protein, 9 aa, Homo sapiens
  misc_feature: Table A; Target 101961; HLA-B*15:01; ZNF560; ENSG00000198028; CTA
KVFVSFSSL

SEQ ID NO: 101962 - protein, 9 aa, Homo sapiens
  misc_feature: Table A; Target 101962; HLA-B*15:03; ZNF560; ENSG00000198028; CTA
KVFVSFSSL

SEQ ID NO: 101963 - protein, 9 aa, Homo sapiens
  misc_feature: Table A; Target 101963; HLA-B*46:01; ZNF560; ENSG00000198028; CTA
KVFVSFSSL

SEQ ID NO: 101964 - protein, 9 aa, Homo sapiens
  misc_feature: Table A; Target 101964; HLA-B*58:01; ZNF560; ENSG00000198028; CTA
KVFVSFSSL

SEQ ID NO: 101965 - protein, 9 aa, Homo sapiens
  misc_feature: Table A; Target 101965; HLA-C*01:02; ZNF560; ENSG00000198028; CTA
KVFVSFSSL

SEQ ID NO: 101966 - protein, 9 aa, Homo sapiens
  misc_feature: Table A; Target 101966; HLA-C*03:03; ZNF560; ENSG00000198028; CTA
KVFVSFSSL

SEQ ID NO: 101967 - protein, 9 aa, Homo sapiens
  misc_feature: Table A; Target 101967; HLA-C*03:04; ZNF560; ENSG00000198028; CTA
KVFVSFSSL

SEQ ID NO: 101968 - protein, 10 aa, Homo sapiens
  misc_feature: Table A; Target 101968; HLA-A*03:01; ZNF560; ENSG00000198028; CTA
KVSVFSKHGK

SEQ ID NO: 101969 - protein, 10 aa, Homo sapiens
  misc_feature: Table A; Target 101969; HLA-C*03:04; ZNF560; ENSG00000198028; CTA
LARNQNGEEL

SEQ ID NO: 101970 - protein, 11 aa, Homo sapiens
  misc_feature: Table A; Target 101970; HLA-A*30:02; ZNF560; ENSG00000198028; CTA
LARNQNGEELY

SEQ ID NO: 101971 - protein, 10 aa, Homo sapiens
  misc_feature: Table A; Target 101971; HLA-B*40:01; ZNF560; ENSG00000198028; CTA
LEEEEELSTL

SEQ ID NO: 101972 - protein, 9 aa, Homo sapiens
  misc_feature: Table A; Target 101972; HLA-A*30:01; ZNF560; ENSG00000198028; CTA
LEEEELRTL

SEQ ID NO: 101973 - protein, 9 aa, Homo sapiens
  misc_feature: Table A; Target 101973; HLA-B*18:01; ZNF560; ENSG00000198028; CTA
LEEEELRTL

SEQ ID NO: 101974 - protein, 9 aa, Homo sapiens
  misc_feature: Table A; Target 101974; HLA-B*40:01; ZNF560; ENSG00000198028; CTA
LEEEELRTL

SEQ ID NO: 101975 - protein, 9 aa, Homo sapiens
  misc_feature: Table A; Target 101975; HLA-B*40:02; ZNF560; ENSG00000198028; CTA
LEEEELRTL

SEQ ID NO: 101976 - protein, 9 aa, Homo sapiens
  misc_feature: Table A; Target 101976; HLA-B*44:02; ZNF560; ENSG00000198028; CTA
LEEEELRTL

SEQ ID NO: 101977 - protein, 9 aa, Homo sapiens
  misc_feature: Table A; Target 101977; HLA-B*49:01; ZNF560; ENSG00000198028; CTA
LEEEELRTL

SEQ ID NO: 101978 - protein, 10 aa, Homo sapiens
  misc_feature: Table A; Target 101978; HLA-B*49:01; ZNF560; ENSG00000198028; CTA
LENYENVAKV

SEQ ID NO: 101979 - protein, 9 aa, Homo sapiens
  misc_feature: Table A; Target 101979; HLA-A*23:01; ZNF560; ENSG00000198028; CTA
LFKPSLISW

SEQ ID NO: 101980 - protein, 9 aa, Homo sapiens
  misc_feature: Table A; Target 101980; HLA-A*24:02; ZNF560; ENSG00000198028; CTA
LFKPSLISW

SEQ ID NO: 101981 - protein, 9 aa, Homo sapiens
  misc_feature: Table A; Target 101981; HLA-B*57:01; ZNF560; ENSG00000198028; CTA
LFKPSLISW

SEQ ID NO: 101982 - protein, 9 aa, Homo sapiens
  misc_feature: Table A; Target 101982; HLA-A*23:01; ZNF560; ENSG00000198028; CTA
LFKPSVISW

SEQ ID NO: 101983 - protein, 9 aa, Homo sapiens
  misc_feature: Table A; Target 101983; HLA-A*24:02; ZNF560; ENSG00000198028; CTA
LFKPSVISW

SEQ ID NO: 101984 - protein, 9 aa, Homo sapiens
  misc_feature: Table A; Target 101984; HLA-B*57:01; ZNF560; ENSG00000198028; CTA
LFKPSVISW

SEQ ID NO: 101985 - protein, 9 aa, Homo sapiens
  misc_feature: Table A; Target 101985; HLA-A*11:01; ZNF560; ENSG00000198028; CTA
LILNVQVQR

SEQ ID NO: 101986 - protein, 9 aa, Homo sapiens
  misc_feature: Table A; Target 101986; HLA-A*31:01; ZNF560; ENSG00000198028; CTA
LILNVQVQR

SEQ ID NO: 101987 - protein, 9 aa, Homo sapiens
  misc_feature: Table A; Target 101987; HLA-A*33:01; ZNF560; ENSG00000198028; CTA
LILNVQVQR

SEQ ID NO: 101988 - protein, 9 aa, Homo sapiens
  misc_feature: Table A; Target 101988; HLA-A*33:03; ZNF560; ENSG00000198028; CTA
LILNVQVQR

SEQ ID NO: 101989 - protein, 9 aa, Homo sapiens
  misc_feature: Table A; Target 101989; HLA-A*68:01; ZNF560; ENSG00000198028; CTA
LILNVQVQR

SEQ ID NO: 101990 - protein, 9 aa, Homo sapiens
  misc_feature: Table A; Target 101990; HLA-C*07:06; ZNF560; ENSG00000198028; CTA
LILNVQVQR

SEQ ID NO: 101991 - protein, 9 aa, Homo sapiens
  misc_feature: Table A; Target 101991; HLA-A*02:01; ZNF560; ENSG00000198028; CTA
LLDPAQRNL

SEQ ID NO: 101992 - protein, 9 aa, Homo sapiens
  misc_feature: Table A; Target 101992; HLA-A*02:04; ZNF560; ENSG00000198028; CTA
LLDPAQRNL

SEQ ID NO: 101993 - protein, 9 aa, Homo sapiens
  misc_feature: Table A; Target 101993; HLA-A*02:07; ZNF560; ENSG00000198028; CTA
LLDPAQRNL

SEQ ID NO: 101994 - protein, 9 aa, Homo sapiens
  misc_feature: Table A; Target 101994; HLA-A*03:01; ZNF560; ENSG00000198028; CTA
LLDPAQRNL

SEQ ID NO: 101995 - protein, 9 aa, Homo sapiens
  misc_feature: Table A; Target 101995; HLA-B*55:01; ZNF560; ENSG00000198028; CTA
LLDPAQRNL

SEQ ID NO: 101996 - protein, 9 aa, Homo sapiens
  misc_feature: Table A; Target 101996; HLA-C*03:03; ZNF560; ENSG00000198028; CTA
LLDPAQRNL

SEQ ID NO: 101997 - protein, 9 aa, Homo sapiens
  misc_feature: Table A; Target 101997; HLA-C*03:04; ZNF560; ENSG00000198028; CTA
LLDPAQRNL

SEQ ID NO: 101998 - protein, 9 aa, Homo sapiens
  misc_feature: Table A; Target 101998; HLA-C*05:01; ZNF560; ENSG00000198028; CTA
LLDPAQRNL

SEQ ID NO: 101999 - protein, 10 aa, Homo sapiens
  misc_feature: Table A; Target 101999; HLA-A*02:07; ZNF560; ENSG00000198028; CTA
LLDPAQRNLY

SEQ ID NO: 102000 - protein, 10 aa, Homo sapiens
  misc_feature: Table A; Target 102000; HLA-A*29:02; ZNF560; ENSG00000198028; CTA
LLDPAQRNLY

SEQ ID NO: 102001 - protein, 10 aa, Homo sapiens
  misc_feature: Table A; Target 102001; HLA-A*30:02; ZNF560; ENSG00000198028; CTA
LLDPAQRNLY

SEQ ID NO: 102002 - protein, 10 aa, Homo sapiens
  misc_feature: Table A; Target 102002; HLA-A*32:01; ZNF560; ENSG00000198028; CTA
LLDPAQRNLY

SEQ ID NO: 102003 - protein, 10 aa, Homo sapiens
  misc_feature: Table A; Target 102003; HLA-B*15:01; ZNF560; ENSG00000198028; CTA
LLDPAQRNLY

SEQ ID NO: 102004 - protein, 10 aa, Homo sapiens
  misc_feature: Table A; Target 102004; HLA-B*58:01; ZNF560; ENSG00000198028; CTA
LLDPAQRNLY

SEQ ID NO: 102005 - protein, 10 aa, Homo sapiens
  misc_feature: Table A; Target 102005; HLA-C*02:02; ZNF560; ENSG00000198028; CTA
LLDPAQRNLY

SEQ ID NO: 102006 - protein, 10 aa, Homo sapiens
  misc_feature: Table A; Target 102006; HLA-C*07:04; ZNF560; ENSG00000198028; CTA
LLDPAQRNLY

SEQ ID NO: 102007 - protein, 10 aa, Homo sapiens
  misc_feature: Table A; Target 102007; HLA-C*16:02; ZNF560; ENSG00000198028; CTA
LLDPAQRNLY

SEQ ID NO: 102008 - protein, 9 aa, Homo sapiens
  misc_feature: Table A; Target 102008; HLA-A*01:01; ZNF560; ENSG00000198028; CTA
LLDPVQRNL

SEQ ID NO: 102009 - protein, 9 aa, Homo sapiens
  misc_feature: Table A; Target 102009; HLA-A*02:01; ZNF560; ENSG00000198028; CTA
LLDPVQRNL

SEQ ID NO: 102010 - protein, 9 aa, Homo sapiens
  misc_feature: Table A; Target 102010; HLA-A*02:03; ZNF560; ENSG00000198028; CTA
LLDPVQRNL

SEQ ID NO: 102011 - protein, 9 aa, Homo sapiens
  misc_feature: Table A; Target 102011; HLA-A*02:04; ZNF560; ENSG00000198028; CTA
LLDPVQRNL

SEQ ID NO: 102012 - protein, 9 aa, Homo sapiens
  misc_feature: Table A; Target 102012; HLA-A*02:07; ZNF560; ENSG00000198028; CTA
LLDPVQRNL

SEQ ID NO: 102013 - protein, 9 aa, Homo sapiens
  misc_feature: Table A; Target 102013; HLA-A*03:01; ZNF560; ENSG00000198028; CTA
LLDPVQRNL

SEQ ID NO: 102014 - protein, 9 aa, Homo sapiens
  misc_feature: Table A; Target 102014; HLA-A*03:02; ZNF560; ENSG00000198028; CTA
LLDPVQRNL

SEQ ID NO: 102015 - protein, 9 aa, Homo sapiens
  misc_feature: Table A; Target 102015; HLA-A*68:02; ZNF560; ENSG00000198028; CTA
LLDPVQRNL

SEQ ID NO: 102016 - protein, 9 aa, Homo sapiens
  misc_feature: Table A; Target 102016; HLA-B*13:02; ZNF560; ENSG00000198028; CTA
LLDPVQRNL

SEQ ID NO: 102017 - protein, 9 aa, Homo sapiens
  misc_feature: Table A; Target 102017; HLA-B*38:01; ZNF560; ENSG00000198028; CTA
LLDPVQRNL

SEQ ID NO: 102018 - protein, 9 aa, Homo sapiens
  misc_feature: Table A; Target 102018; HLA-B*55:01; ZNF560; ENSG00000198028; CTA
LLDPVQRNL

SEQ ID NO: 102019 - protein, 9 aa, Homo sapiens
  misc_feature: Table A; Target 102019; HLA-C*03:03; ZNF560; ENSG00000198028; CTA
LLDPVQRNL

SEQ ID NO: 102020 - protein, 9 aa, Homo sapiens
  misc_feature: Table A; Target 102020; HLA-C*03:04; ZNF560; ENSG00000198028; CTA
LLDPVQRNL

SEQ ID NO: 102021 - protein, 9 aa, Homo sapiens
  misc_feature: Table A; Target 102021; HLA-C*05:01; ZNF560; ENSG00000198028; CTA
LLDPVQRNL

SEQ ID NO: 102022 - protein, 9 aa, Homo sapiens
  misc_feature: Table A; Target 102022; HLA-C*16:01; ZNF560; ENSG00000198028; CTA
LLDPVQRNL

SEQ ID NO: 102023 - protein, 9 aa, Homo sapiens
  misc_feature: Table A; Target 102023; HLA-C*16:02; ZNF560; ENSG00000198028; CTA
LLDPVQRNL

SEQ ID NO: 102024 - protein, 10 aa, Homo sapiens
  misc_feature: Table A; Target 102024; HLA-A*02:07; ZNF560; ENSG00000198028; CTA
LLDPVQRNLY

SEQ ID NO: 102025 - protein, 10 aa, Homo sapiens
  misc_feature: Table A; Target 102025; HLA-A*03:01; ZNF560; ENSG00000198028; CTA
LLDPVQRNLY

SEQ ID NO: 102026 - protein, 10 aa, Homo sapiens
  misc_feature: Table A; Target 102026; HLA-A*29:02; ZNF560; ENSG00000198028; CTA
LLDPVQRNLY

SEQ ID NO: 102027 - protein, 10 aa, Homo sapiens
  misc_feature: Table A; Target 102027; HLA-A*30:02; ZNF560; ENSG00000198028; CTA
LLDPVQRNLY

SEQ ID NO: 102028 - protein, 10 aa, Homo sapiens
  misc_feature: Table A; Target 102028; HLA-A*32:01; ZNF560; ENSG00000198028; CTA
LLDPVQRNLY

SEQ ID NO: 102029 - protein, 10 aa, Homo sapiens
  misc_feature: Table A; Target 102029; HLA-B*15:01; ZNF560; ENSG00000198028; CTA
LLDPVQRNLY

SEQ ID NO: 102030 - protein, 10 aa, Homo sapiens
  misc_feature: Table A; Target 102030; HLA-C*07:04; ZNF560; ENSG00000198028; CTA
LLDPVQRNLY

SEQ ID NO: 102031 - protein, 9 aa, Homo sapiens
  misc_feature: Table A; Target 102031; HLA-A*32:01; ZNF560; ENSG00000198028; CTA
LQQGVLQDW

SEQ ID NO: 102032 - protein, 9 aa, Homo sapiens
  misc_feature: Table A; Target 102032; HLA-B*44:02; ZNF560; ENSG00000198028; CTA
LQQGVLQDW

SEQ ID NO: 102033 - protein, 9 aa, Homo sapiens
  misc_feature: Table A; Target 102033; HLA-C*16:04; ZNF560; ENSG00000198028; CTA
LQQGVLQDW

SEQ ID NO: 102034 - protein, 8 aa, Homo sapiens
  misc_feature: Table A; Target 102034; HLA-C*03:03; ZNF560; ENSG00000198028; CTA
LSSVGYQL

SEQ ID NO: 102035 - protein, 8 aa, Homo sapiens
  misc_feature: Table A; Target 102035; HLA-C*03:04; ZNF560; ENSG00000198028; CTA
LSSVGYQL

SEQ ID NO: 102036 - protein, 8 aa, Homo sapiens
  misc_feature: Table A; Target 102036; HLA-C*16:01; ZNF560; ENSG00000198028; CTA
LSSVGYQL

SEQ ID NO: 102037 - protein, 9 aa, Homo sapiens
  misc_feature: Table A; Target 102037; HLA-B*57:01; ZNF560; ENSG00000198028; CTA
LSSVGYQLF

SEQ ID NO: 102038 - protein, 8 aa, Homo sapiens
  misc_feature: Table A; Target 102038; HLA-C*16:01; ZNF560; ENSG00000198028; CTA
LSTLPRVL

SEQ ID NO: 102039 - protein, 11 aa, Homo sapiens
  misc_feature: Table A; Target 102039; HLA-B*57:01; ZNF560; ENSG00000198028; CTA
LSTLPRVLQEW

SEQ ID NO: 102040 - protein, 11 aa, Homo sapiens
  misc_feature: Table A; Target 102040; HLA-A*01:01; ZNF560; ENSG00000198028; CTA
LVDHLRTHTGY

SEQ ID NO: 102041 - protein, 8 aa, Homo sapiens
  misc_feature: Table A; Target 102041; HLA-A*23:01; ZNF560; ENSG00000198028; CTA
LYNKTSTI

SEQ ID NO: 102042 - protein, 8 aa, Homo sapiens
  misc_feature: Table A; Target 102042; HLA-A*24:02; ZNF560; ENSG00000198028; CTA
LYNKTSTI

SEQ ID NO: 102043 - protein, 8 aa, Homo sapiens
  misc_feature: Table A; Target 102043; HLA-B*51:01; ZNF560; ENSG00000198028; CTA
LYNKTSTI

SEQ ID NO: 102044 - protein, 8 aa, Homo sapiens
  misc_feature: Table A; Target 102044; HLA-C*14:02; ZNF560; ENSG00000198028; CTA
LYNKTSTI

SEQ ID NO: 102045 - protein, 9 aa, Homo sapiens
  misc_feature: Table A; Target 102045; HLA-A*31:01; ZNF560; ENSG00000198028; CTA
LYNKTSTIR

SEQ ID NO: 102046 - protein, 9 aa, Homo sapiens
  misc_feature: Table A; Target 102046; HLA-A*33:01; ZNF560; ENSG00000198028; CTA
LYNKTSTIR

SEQ ID NO: 102047 - protein, 9 aa, Homo sapiens
  misc_feature: Table A; Target 102047; HLA-A*33:03; ZNF560; ENSG00000198028; CTA
LYNKTSTIR

SEQ ID NO: 102048 - protein, 10 aa, Homo sapiens
  misc_feature: Table A; Target 102048; HLA-A*29:02; ZNF560; ENSG00000198028; CTA
LYRDVMLENY

SEQ ID NO: 102049 - protein, 10 aa, Homo sapiens
  misc_feature: Table A; Target 102049; HLA-A*23:01; ZNF560; ENSG00000198028; CTA
LYSDVMLENY

SEQ ID NO: 102050 - protein, 10 aa, Homo sapiens
  misc_feature: Table A; Target 102050; HLA-A*24:02; ZNF560; ENSG00000198028; CTA
LYSDVMLENY

SEQ ID NO: 102051 - protein, 10 aa, Homo sapiens
  misc_feature: Table A; Target 102051; HLA-A*29:02; ZNF560; ENSG00000198028; CTA
LYSDVMLENY

SEQ ID NO: 102052 - protein, 10 aa, Homo sapiens
  misc_feature: Table A; Target 102052; HLA-A*30:02; ZNF560; ENSG00000198028; CTA
LYSDVMLENY

SEQ ID NO: 102053 - protein, 10 aa, Homo sapiens
  misc_feature: Table A; Target 102053; HLA-C*14:02; ZNF560; ENSG00000198028; CTA
LYSDVMLENY

SEQ ID NO: 102054 - protein, 10 aa, Homo sapiens
  misc_feature: Table A; Target 102054; HLA-A*03:02; ZNF560; ENSG00000198028; CTA
MLENYENVAK

SEQ ID NO: 102055 - protein, 10 aa, Homo sapiens
  misc_feature: Table A; Target 102055; HLA-B*27:02; ZNF560; ENSG00000198028; CTA
MLENYENVAK

SEQ ID NO: 102056 - protein, 10 aa, Homo sapiens
  misc_feature: Table A; Target 102056; HLA-C*07:01; ZNF560; ENSG00000198028; CTA
MQTHIGIKPY

SEQ ID NO: 102057 - protein, 9 aa, Homo sapiens
  misc_feature: Table A; Target 102057; HLA-A*33:01; ZNF560; ENSG00000198028; CTA
NACEKAYSR

SEQ ID NO: 102058 - protein, 9 aa, Homo sapiens
  misc_feature: Table A; Target 102058; HLA-A*33:03; ZNF560; ENSG00000198028; CTA
NACEKAYSR

SEQ ID NO: 102059 - protein, 9 aa, Homo sapiens
  misc_feature: Table A; Target 102059; HLA-A*68:01; ZNF560; ENSG00000198028; CTA
NACEKAYSR

SEQ ID NO: 102060 - protein, 9 aa, Homo sapiens
  misc_feature: Table A; Target 102060; HLA-C*07:06; ZNF560; ENSG00000198028; CTA
NACEKAYSR

SEQ ID NO: 102061 - protein, 9 aa, Homo sapiens
  misc_feature: Table A; Target 102061; HLA-B*18:01; ZNF560; ENSG00000198028; CTA
NCYQYSVTF

SEQ ID NO: 102062 - protein, 9 aa, Homo sapiens
  misc_feature: Table A; Target 102062; HLA-B*35:01; ZNF560; ENSG00000198028; CTA
NCYQYSVTF

SEQ ID NO: 102063 - protein, 9 aa, Homo sapiens
  misc_feature: Table A; Target 102063; HLA-C*16:04; ZNF560; ENSG00000198028; CTA
NCYQYSVTF

SEQ ID NO: 102064 - protein, 10 aa, Homo sapiens
  misc_feature: Table A; Target 102064; HLA-A*23:01; ZNF560; ENSG00000198028; CTA
NGIQMDLVTF

SEQ ID NO: 102065 - protein, 9 aa, Homo sapiens
  misc_feature: Table A; Target 102065; HLA-B*38:01; ZNF560; ENSG00000198028; CTA
NHMQTHIGI

SEQ ID NO: 102066 - protein, 9 aa, Homo sapiens
  misc_feature: Table A; Target 102066; HLA-A*02:01; ZNF560; ENSG00000198028; CTA
NLSSVGYQL

SEQ ID NO: 102067 - protein, 9 aa, Homo sapiens
  misc_feature: Table A; Target 102067; HLA-A*02:03; ZNF560; ENSG00000198028; CTA
NLSSVGYQL

SEQ ID NO: 102068 - protein, 9 aa, Homo sapiens
  misc_feature: Table A; Target 102068; HLA-A*02:04; ZNF560; ENSG00000198028; CTA
NLSSVGYQL

SEQ ID NO: 102069 - protein, 9 aa, Homo sapiens
  misc_feature: Table A; Target 102069; HLA-A*02:07; ZNF560; ENSG00000198028; CTA
NLSSVGYQL

SEQ ID NO: 102070 - protein, 9 aa, Homo sapiens
  misc_feature: Table A; Target 102070; HLA-A*23:01; ZNF560; ENSG00000198028; CTA
NLSSVGYQL

SEQ ID NO: 102071 - protein, 9 aa, Homo sapiens
  misc_feature: Table A; Target 102071; HLA-A*68:02; ZNF560; ENSG00000198028; CTA
NLSSVGYQL

SEQ ID NO: 102072 - protein, 9 aa, Homo sapiens
  misc_feature: Table A; Target 102072; HLA-B*13:02; ZNF560; ENSG00000198028; CTA
NLSSVGYQL

SEQ ID NO: 102073 - protein, 9 aa, Homo sapiens
  misc_feature: Table A; Target 102073; HLA-B*27:05; ZNF560; ENSG00000198028; CTA
NLSSVGYQL

SEQ ID NO: 102074 - protein, 9 aa, Homo sapiens
  misc_feature: Table A; Target 102074; HLA-B*35:03; ZNF560; ENSG00000198028; CTA
NLSSVGYQL

SEQ ID NO: 102075 - protein, 9 aa, Homo sapiens
  misc_feature: Table A; Target 102075; HLA-B*38:01; ZNF560; ENSG00000198028; CTA
NLSSVGYQL

SEQ ID NO: 102076 - protein, 9 aa, Homo sapiens
  misc_feature: Table A; Target 102076; HLA-B*39:01; ZNF560; ENSG00000198028; CTA
NLSSVGYQL

SEQ ID NO: 102077 - protein, 9 aa, Homo sapiens
  misc_feature: Table A; Target 102077; HLA-B*55:01; ZNF560; ENSG00000198028; CTA
NLSSVGYQL

SEQ ID NO: 102078 - protein, 9 aa, Homo sapiens
  misc_feature: Table A; Target 102078; HLA-C*01:02; ZNF560; ENSG00000198028; CTA
NLSSVGYQL

SEQ ID NO: 102079 - protein, 9 aa, Homo sapiens
  misc_feature: Table A; Target 102079; HLA-C*07:04; ZNF560; ENSG00000198028; CTA
NLSSVGYQL

SEQ ID NO: 102080 - protein, 9 aa, Homo sapiens
  misc_feature: Table A; Target 102080; HLA-C*14:02; ZNF560; ENSG00000198028; CTA
NLSSVGYQL

SEQ ID NO: 102081 - protein, 11 aa, Homo sapiens
  misc_feature: Table A; Target 102081; HLA-A*29:02; ZNF560; ENSG00000198028; CTA
NLYSDVMLENY

SEQ ID NO: 102082 - protein, 11 aa, Homo sapiens
  misc_feature: Table A; Target 102082; HLA-A*30:02; ZNF560; ENSG00000198028; CTA
NLYSDVMLENY

SEQ ID NO: 102083 - protein, 8 aa, Homo sapiens
  misc_feature: Table A; Target 102083; HLA-A*01:01; ZNF560; ENSG00000198028; CTA
NTSECIQY

SEQ ID NO: 102084 - protein, 8 aa, Homo sapiens
  misc_feature: Table A; Target 102084; HLA-C*16:01; ZNF560; ENSG00000198028; CTA
NTSECIQY

SEQ ID NO: 102085 - protein, 8 aa, Homo sapiens
  misc_feature: Table A; Target 102085; HLA-C*16:02; ZNF560; ENSG00000198028; CTA
NTSECIQY

SEQ ID NO: 102086 - protein, 9 aa, Homo sapiens
  misc_feature: Table A; Target 102086; HLA-A*02:04; ZNF560; ENSG00000198028; CTA
NVAKVGFQL

SEQ ID NO: 102087 - protein, 9 aa, Homo sapiens
  misc_feature: Table A; Target 102087; HLA-A*68:01; ZNF560; ENSG00000198028; CTA
NVAKVGFQL

SEQ ID NO: 102088 - protein, 9 aa, Homo sapiens
  misc_feature: Table A; Target 102088; HLA-B*07:02; ZNF560; ENSG00000198028; CTA
NVAKVGFQL

SEQ ID NO: 102089 - protein, 9 aa, Homo sapiens
  misc_feature: Table A; Target 102089; HLA-B*35:01; ZNF560; ENSG00000198028; CTA
NVAKVGFQL

SEQ ID NO: 102090 - protein, 9 aa, Homo sapiens
  misc_feature: Table A; Target 102090; HLA-B*35:03; ZNF560; ENSG00000198028; CTA
NVAKVGFQL

SEQ ID NO: 102091 - protein, 9 aa, Homo sapiens
  misc_feature: Table A; Target 102091; HLA-C*07:06; ZNF560; ENSG00000198028; CTA
NVAKVGFQL

SEQ ID NO: 102092 - protein, 10 aa, Homo sapiens
  misc_feature: Table A; Target 102092; HLA-A*24:02; ZNF560; ENSG00000198028; CTA
NVAKVGFQLF

SEQ ID NO: 102093 - protein, 10 aa, Homo sapiens
  misc_feature: Table A; Target 102093; HLA-A*25:01; ZNF560; ENSG00000198028; CTA
NVAKVGFQLF

SEQ ID NO: 102094 - protein, 8 aa, Homo sapiens
  misc_feature: Table A; Target 102094; HLA-C*14:02; ZNF560; ENSG00000198028; CTA
NYENVAKV

SEQ ID NO: 102095 - protein, 10 aa, Homo sapiens
  misc_feature: Table A; Target 102095; HLA-A*23:01; ZNF560; ENSG00000198028; CTA
NYENVAKVGF

SEQ ID NO: 102096 - protein, 10 aa, Homo sapiens
  misc_feature: Table A; Target 102096; HLA-A*24:02; ZNF560; ENSG00000198028; CTA
NYENVAKVGF

SEQ ID NO: 102097 - protein, 10 aa, Homo sapiens
  misc_feature: Table A; Target 102097; HLA-C*04:01; ZNF560; ENSG00000198028; CTA
NYENVAKVGF

SEQ ID NO: 102098 - protein, 10 aa, Homo sapiens
  misc_feature: Table A; Target 102098; HLA-C*07:04; ZNF560; ENSG00000198028; CTA
NYENVAKVGF

SEQ ID NO: 102099 - protein, 10 aa, Homo sapiens
  misc_feature: Table A; Target 102099; HLA-C*14:02; ZNF560; ENSG00000198028; CTA
NYENVAKVGF

SEQ ID NO: 102100 - protein, 8 aa, Homo sapiens
  misc_feature: Table A; Target 102100; HLA-C*14:02; ZNF560; ENSG00000198028; CTA
NYKNLSSV

SEQ ID NO: 102101 - protein, 10 aa, Homo sapiens
  misc_feature: Table A; Target 102101; HLA-A*29:02; ZNF560; ENSG00000198028; CTA
NYKNLSSVGY

SEQ ID NO: 102102 - protein, 10 aa, Homo sapiens
  misc_feature: Table A; Target 102102; HLA-A*30:02; ZNF560; ENSG00000198028; CTA
NYKNLSSVGY

SEQ ID NO: 102103 - protein, 10 aa, Homo sapiens
  misc_feature: Table A; Target 102103; HLA-A*33:03; ZNF560; ENSG00000198028; CTA
NYKNLSSVGY

SEQ ID NO: 102104 - protein, 10 aa, Homo sapiens
  misc_feature: Table A; Target 102104; HLA-C*01:02; ZNF560; ENSG00000198028; CTA
NYKNLSSVGY

SEQ ID NO: 102105 - protein, 10 aa, Homo sapiens
  misc_feature: Table A; Target 102105; HLA-C*14:02; ZNF560; ENSG00000198028; CTA
NYKNLSSVGY

SEQ ID NO: 102106 - protein, 9 aa, Homo sapiens
  misc_feature: Table A; Target 102106; HLA-A*23:01; ZNF560; ENSG00000198028; CTA
QCGKVFVSF

SEQ ID NO: 102107 - protein, 9 aa, Homo sapiens
  misc_feature: Table A; Target 102107; HLA-A*24:02; ZNF560; ENSG00000198028; CTA
QCGKVFVSF

SEQ ID NO: 102108 - protein, 9 aa, Homo sapiens
  misc_feature: Table A; Target 102108; HLA-A*32:01; ZNF560; ENSG00000198028; CTA
QCGKVFVSF

SEQ ID NO: 102109 - protein, 9 aa, Homo sapiens
  misc_feature: Table A; Target 102109; HLA-B*57:01; ZNF560; ENSG00000198028; CTA
QCGKVFVSF

SEQ ID NO: 102110 - protein, 10 aa, Homo sapiens
  misc_feature: Table A; Target 102110; HLA-A*30:02; ZNF560; ENSG00000198028; CTA
QDKSFEGTDY

SEQ ID NO: 102111 - protein, 10 aa, Homo sapiens
  misc_feature: Table A; Target 102111; HLA-B*15:01; ZNF560; ENSG00000198028; CTA
QDKSFEGTDY

SEQ ID NO: 102112 - protein, 10 aa, Homo sapiens
  misc_feature: Table A; Target 102112; HLA-B*15:03; ZNF560; ENSG00000198028; CTA
QDKSFEGTDY

SEQ ID NO: 102113 - protein, 10 aa, Homo sapiens
  misc_feature: Table A; Target 102113; HLA-C*04:01; ZNF560; ENSG00000198028; CTA
QDKSFEGTDY

SEQ ID NO: 102114 - protein, 10 aa, Homo sapiens
  misc_feature: Table A; Target 102114; HLA-C*07:01; ZNF560; ENSG00000198028; CTA
QDKSFEGTDY

SEQ ID NO: 102115 - protein, 10 aa, Homo sapiens
  misc_feature: Table A; Target 102115; HLA-B*44:02; ZNF560; ENSG00000198028; CTA
QLFKPSLISW

SEQ ID NO: 102116 - protein, 10 aa, Homo sapiens
  misc_feature: Table A; Target 102116; HLA-B*57:01; ZNF560; ENSG00000198028; CTA
QLFKPSLISW

SEQ ID NO: 102117 - protein, 10 aa, Homo sapiens
  misc_feature: Table A; Target 102117; HLA-A*25:01; ZNF560; ENSG00000198028; CTA
QLFKPSVISW

SEQ ID NO: 102118 - protein, 10 aa, Homo sapiens
  misc_feature: Table A; Target 102118; HLA-B*44:02; ZNF560; ENSG00000198028; CTA
QLFKPSVISW

SEQ ID NO: 102119 - protein, 10 aa, Homo sapiens
  misc_feature: Table A; Target 102119; HLA-B*44:03; ZNF560; ENSG00000198028; CTA
QLFKPSVISW

SEQ ID NO: 102120 - protein, 10 aa, Homo sapiens
  misc_feature: Table A; Target 102120; HLA-B*57:01; ZNF560; ENSG00000198028; CTA
QLFKPSVISW

SEQ ID NO: 102121 - protein, 10 aa, Homo sapiens
  misc_feature: Table A; Target 102121; HLA-A*02:07; ZNF560; ENSG00000198028; CTA
QMDLVTFDSV

SEQ ID NO: 102122 - protein, 9 aa, Homo sapiens
  misc_feature: Table A; Target 102122; HLA-A*25:01; ZNF560; ENSG00000198028; CTA
QSGEKLNEW

SEQ ID NO: 102123 - protein, 9 aa, Homo sapiens
  misc_feature: Table A; Target 102123; HLA-B*57:01; ZNF560; ENSG00000198028; CTA
QSGEKLNEW

SEQ ID NO: 102124 - protein, 9 aa, Homo sapiens
  misc_feature: Table A; Target 102124; HLA-B*58:01; ZNF560; ENSG00000198028; CTA
QSGEKLNEW

SEQ ID NO: 102125 - protein, 9 aa, Homo sapiens
  misc_feature: Table A; Target 102125; HLA-A*03:01; ZNF560; ENSG00000198028; CTA
QSYLEAHRK

SEQ ID NO: 102126 - protein, 9 aa, Homo sapiens
  misc_feature: Table A; Target 102126; HLA-A*03:02; ZNF560; ENSG00000198028; CTA
QSYLEAHRK

SEQ ID NO: 102127 - protein, 9 aa, Homo sapiens
  misc_feature: Table A; Target 102127; HLA-A*11:01; ZNF560; ENSG00000198028; CTA
QSYLEAHRK

SEQ ID NO: 102128 - protein, 9 aa, Homo sapiens
  misc_feature: Table A; Target 102128; HLA-A*01:01; ZNF560; ENSG00000198028; CTA
QTHIGIKPY

SEQ ID NO: 102129 - protein, 9 aa, Homo sapiens
  misc_feature: Table A; Target 102129; HLA-A*30:02; ZNF560; ENSG00000198028; CTA
QTHIGIKPY

SEQ ID NO: 102130 - protein, 9 aa, Homo sapiens
  misc_feature: Table A; Target 102130; HLA-C*07:01; ZNF560; ENSG00000198028; CTA
QTHIGIKPY

SEQ ID NO: 102131 - protein, 9 aa, Homo sapiens
  misc_feature: Table A; Target 102131; HLA-C*16:02; ZNF560; ENSG00000198028; CTA
QTHIGIKPY

SEQ ID NO: 102132 - protein, 9 aa, Homo sapiens
  misc_feature: Table A; Target 102132; HLA-A*23:01; ZNF560; ENSG00000198028; CTA
QYAKDLLSL

SEQ ID NO: 102133 - protein, 9 aa, Homo sapiens
  misc_feature: Table A; Target 102133; HLA-A*24:02; ZNF560; ENSG00000198028; CTA
QYAKDLLSL

SEQ ID NO: 102134 - protein, 9 aa, Homo sapiens
  misc_feature: Table A; Target 102134; HLA-C*14:02; ZNF560; ENSG00000198028; CTA
QYAKDLLSL

SEQ ID NO: 102135 - protein, 10 aa, Homo sapiens
  misc_feature: Table A; Target 102135; HLA-A*29:02; ZNF560; ENSG00000198028; CTA
QYAKDLLSLY

SEQ ID NO: 102136 - protein, 10 aa, Homo sapiens
  misc_feature: Table A; Target 102136; HLA-A*30:02; ZNF560; ENSG00000198028; CTA
QYAKDLLSLY

SEQ ID NO: 102137 - protein, 10 aa, Homo sapiens
  misc_feature: Table A; Target 102137; HLA-A*30:02; ZNF560; ENSG00000198028; CTA
RGNTSECIQY

SEQ ID NO: 102138 - protein, 10 aa, Homo sapiens
  misc_feature: Table A; Target 102138; HLA-A*03:01; ZNF560; ENSG00000198028; CTA
RIHTGEKPYK

SEQ ID NO: 102139 - protein, 10 aa, Homo sapiens
  misc_feature: Table A; Target 102139; HLA-A*03:02; ZNF560; ENSG00000198028; CTA
RIHTGEKPYK

SEQ ID NO: 102140 - protein, 10 aa, Homo sapiens
  misc_feature: Table A; Target 102140; HLA-A*03:01; ZNF560; ENSG00000198028; CTA
RLILNVQVQR

SEQ ID NO: 102141 - protein, 10 aa, Homo sapiens
  misc_feature: Table A; Target 102141; HLA-A*31:01; ZNF560; ENSG00000198028; CTA
RLILNVQVQR

SEQ ID NO: 102142 - protein, 11 aa, Homo sapiens
  misc_feature: Table A; Target 102142; HLA-A*03:01; ZNF560; ENSG00000198028; CTA
RLILNVQVQRK

SEQ ID NO: 102143 - protein, 11 aa, Homo sapiens
  misc_feature: Table A; Target 102143; HLA-A*03:02; ZNF560; ENSG00000198028; CTA
RLILNVQVQRK

SEQ ID NO: 102144 - protein, 9 aa, Homo sapiens
  misc_feature: Table A; Target 102144; HLA-A*03:01; ZNF560; ENSG00000198028; CTA
RLKTLTKIK

SEQ ID NO: 102145 - protein, 9 aa, Homo sapiens
  misc_feature: Table A; Target 102145; HLA-A*30:02; ZNF560; ENSG00000198028; CTA
RNQNGEELY

SEQ ID NO: 102146 - protein, 9 aa, Homo sapiens
  misc_feature: Table A; Target 102146; HLA-B*58:01; ZNF560; ENSG00000198028; CTA
RSCVLTQHL

SEQ ID NO: 102147 - protein, 9 aa, Homo sapiens
  misc_feature: Table A; Target 102147; HLA-A*31:01; ZNF560; ENSG00000198028; CTA
RSDLTKHLR

SEQ ID NO: 102148 - protein, 9 aa, Homo sapiens
  misc_feature: Table A; Target 102148; HLA-A*32:01; ZNF560; ENSG00000198028; CTA
RSNTGQKRF

SEQ ID NO: 102149 - protein, 9 aa, Homo sapiens
  misc_feature: Table A; Target 102149; HLA-B*57:01; ZNF560; ENSG00000198028; CTA
RSNTGQKRF

SEQ ID NO: 102150 - protein, 9 aa, Homo sapiens
  misc_feature: Table A; Target 102150; HLA-B*58:01; ZNF560; ENSG00000198028; CTA
RSNTGQKRF

SEQ ID NO: 102151 - protein, 9 aa, Homo sapiens
  misc_feature: Table A; Target 102151; HLA-A*03:01; ZNF560; ENSG00000198028; CTA
RSYLTKHLR

SEQ ID NO: 102152 - protein, 9 aa, Homo sapiens
  misc_feature: Table A; Target 102152; HLA-A*31:01; ZNF560; ENSG00000198028; CTA
RSYLTKHLR

SEQ ID NO: 102153 - protein, 9 aa, Homo sapiens
  misc_feature: Table A; Target 102153; HLA-B*57:01; ZNF560; ENSG00000198028; CTA
RSYLTKHLR

SEQ ID NO: 102154 - protein, 9 aa, Homo sapiens
  misc_feature: Table A; Target 102154; HLA-A*30:02; ZNF560; ENSG00000198028; CTA
RTHTEERLY

SEQ ID NO: 102155 - protein, 9 aa, Homo sapiens
  misc_feature: Table A; Target 102155; HLA-B*57:01; ZNF560; ENSG00000198028; CTA
RTHTEERLY

SEQ ID NO: 102156 - protein, 9 aa, Homo sapiens
  misc_feature: Table A; Target 102156; HLA-B*57:01; ZNF560; ENSG00000198028; CTA
RTHTGEKPF

SEQ ID NO: 102157 - protein, 10 aa, Homo sapiens
  misc_feature: Table A; Target 102157; HLA-A*03:02; ZNF560; ENSG00000198028; CTA
RTHTGEKPFK

SEQ ID NO: 102158 - protein, 9 aa, Homo sapiens
  misc_feature: Table A; Target 102158; HLA-B*57:01; ZNF560; ENSG00000198028; CTA
RTHTGYKPY

SEQ ID NO: 102159 - protein, 10 aa, Homo sapiens
  misc_feature: Table A; Target 102159; HLA-A*03:01; ZNF560; ENSG00000198028; CTA
RTHTGYKPYK

SEQ ID NO: 102160 - protein, 11 aa, Homo sapiens
  misc_feature: Table A; Target 102160; HLA-A*31:01; ZNF560; ENSG00000198028; CTA
RTLQQGVLQDW

SEQ ID NO: 102161 - protein, 11 aa, Homo sapiens
  misc_feature: Table A; Target 102161; HLA-B*58:01; ZNF560; ENSG00000198028; CTA
RTLQQGVLQDW

SEQ ID NO: 102162 - protein, 9 aa, Homo sapiens
  misc_feature: Table A; Target 102162; HLA-A*30:02; ZNF560; ENSG00000198028; CTA
RVHNGEKPY

SEQ ID NO: 102163 - protein, 10 aa, Homo sapiens
  misc_feature: Table A; Target 102163; HLA-A*24:02; ZNF560; ENSG00000198028; CTA
RYPTHLNNHM

SEQ ID NO: 102164 - protein, 9 aa, Homo sapiens
  misc_feature: Table A; Target 102164; HLA-A*33:03; ZNF560; ENSG00000198028; CTA
SAGLIEHIR

SEQ ID NO: 102165 - protein, 9 aa, Homo sapiens
  misc_feature: Table A; Target 102165; HLA-A*68:01; ZNF560; ENSG00000198028; CTA
SAGLIEHIR

SEQ ID NO: 102166 - protein, 9 aa, Homo sapiens
  misc_feature: Table A; Target 102166; HLA-B*57:01; ZNF560; ENSG00000198028; CTA
SAGLIEHIR

SEQ ID NO: 102167 - protein, 9 aa, Homo sapiens
  misc_feature: Table A; Target 102167; HLA-C*07:06; ZNF560; ENSG00000198028; CTA
SAGLIEHIR

SEQ ID NO: 102168 - protein, 8 aa, Homo sapiens
  misc_feature: Table A; Target 102168; HLA-B*57:01; ZNF560; ENSG00000198028; CTA
SALQQEFW

SEQ ID NO: 102169 - protein, 8 aa, Homo sapiens
  misc_feature: Table A; Target 102169; HLA-B*58:01; ZNF560; ENSG00000198028; CTA
SALQQEFW

SEQ ID NO: 102170 - protein, 9 aa, Homo sapiens
  misc_feature: Table A; Target 102170; HLA-A*11:01; ZNF560; ENSG00000198028; CTA
SCVLTQHLK

SEQ ID NO: 102171 - protein, 9 aa, Homo sapiens
  misc_feature: Table A; Target 102171; HLA-B*37:01; ZNF560; ENSG00000198028; CTA
SDLTNHVRI

SEQ ID NO: 102172 - protein, 8 aa, Homo sapiens
  misc_feature: Table A; Target 102172; HLA-B*18:01; ZNF560; ENSG00000198028; CTA
SDVMLENY

SEQ ID NO: 102173 - protein, 8 aa, Homo sapiens
  misc_feature: Table A; Target 102173; HLA-B*37:01; ZNF560; ENSG00000198028; CTA
SDVMLENY

SEQ ID NO: 102174 - protein, 8 aa, Homo sapiens
  misc_feature: Table A; Target 102174; HLA-C*04:01; ZNF560; ENSG00000198028; CTA
SDVMLENY

SEQ ID NO: 102175 - protein, 8 aa, Homo sapiens
  misc_feature: Table A; Target 102175; HLA-C*07:01; ZNF560; ENSG00000198028; CTA
SDVMLENY

SEQ ID NO: 102176 - protein, 10 aa, Homo sapiens
  misc_feature: Table A; Target 102176; HLA-B*44:03; ZNF560; ENSG00000198028; CTA
SECNACGNSF

SEQ ID NO: 102177 - protein, 10 aa, Homo sapiens
  misc_feature: Table A; Target 102177; HLA-C*16:04; ZNF560; ENSG00000198028; CTA
SECNACGNSF

SEQ ID NO: 102178 - protein, 9 aa, Homo sapiens
  misc_feature: Table A; Target 102178; HLA-B*08:01; ZNF560; ENSG00000198028; CTA
SFSARIAHL

SEQ ID NO: 102179 - protein, 9 aa, Homo sapiens
  misc_feature: Table A; Target 102179; HLA-B*37:01; ZNF560; ENSG00000198028; CTA
SFSARIAHL

SEQ ID NO: 102180 - protein, 9 aa, Homo sapiens
  misc_feature: Table A; Target 102180; HLA-C*16:01; ZNF560; ENSG00000198028; CTA
SFSARIAHL

SEQ ID NO: 102181 - protein, 9 aa, Homo sapiens
  misc_feature: Table A; Target 102181; HLA-A*23:01; ZNF560; ENSG00000198028; CTA
SFSSLFAHL

SEQ ID NO: 102182 - protein, 9 aa, Homo sapiens
  misc_feature: Table A; Target 102182; HLA-A*24:02; ZNF560; ENSG00000198028; CTA
SFSSLFAHL

SEQ ID NO: 102183 - protein, 9 aa, Homo sapiens
  misc_feature: Table A; Target 102183; HLA-A*29:02; ZNF560; ENSG00000198028; CTA
SFSSLFAHL

SEQ ID NO: 102184 - protein, 9 aa, Homo sapiens
  misc_feature: Table A; Target 102184; HLA-B*38:01; ZNF560; ENSG00000198028; CTA
SHAVNVETH

SEQ ID NO: 102185 - protein, 9 aa, Homo sapiens
  misc_feature: Table A; Target 102185; HLA-B*39:01; ZNF560; ENSG00000198028; CTA
SHAVNVETH

SEQ ID NO: 102186 - protein, 10 aa, Homo sapiens
  misc_feature: Table A; Target 102186; HLA-B*38:01; ZNF560; ENSG00000198028; CTA
SHAVNVETHI

SEQ ID NO: 102187 - protein, 11 aa, Homo sapiens
  misc_feature: Table A; Target 102187; HLA-B*38:01; ZNF560; ENSG00000198028; CTA
SHAVNVETHII

SEQ ID NO: 102188 - protein, 9 aa, Homo sapiens
  misc_feature: Table A; Target 102188; HLA-A*02:03; ZNF560; ENSG00000198028; CTA
SLFAHLRTH

SEQ ID NO: 102189 - protein, 9 aa, Homo sapiens
  misc_feature: Table A; Target 102189; HLA-A*03:01; ZNF560; ENSG00000198028; CTA
SLFAHLRTH

SEQ ID NO: 102190 - protein, 8 aa, Homo sapiens
  misc_feature: Table A; Target 102190; HLA-B*08:01; ZNF560; ENSG00000198028; CTA
SLYNKTST

SEQ ID NO: 102191 - protein, 9 aa, Homo sapiens
  misc_feature: Table A; Target 102191; HLA-A*02:01; ZNF560; ENSG00000198028; CTA
SLYNKTSTI

SEQ ID NO: 102192 - protein, 9 aa, Homo sapiens
  misc_feature: Table A; Target 102192; HLA-A*02:03; ZNF560; ENSG00000198028; CTA
SLYNKTSTI

SEQ ID NO: 102193 - protein, 9 aa, Homo sapiens
  misc_feature: Table A; Target 102193; HLA-A*02:04; ZNF560; ENSG00000198028; CTA
SLYNKTSTI

SEQ ID NO: 102194 - protein, 9 aa, Homo sapiens
  misc_feature: Table A; Target 102194; HLA-A*02:07; ZNF560; ENSG00000198028; CTA
SLYNKTSTI

SEQ ID NO: 102195 - protein, 9 aa, Homo sapiens
  misc_feature: Table A; Target 102195; HLA-A*03:01; ZNF560; ENSG00000198028; CTA
SLYNKTSTI

SEQ ID NO: 102196 - protein, 9 aa, Homo sapiens
  misc_feature: Table A; Target 102196; HLA-A*23:01; ZNF560; ENSG00000198028; CTA
SLYNKTSTI

SEQ ID NO: 102197 - protein, 9 aa, Homo sapiens
  misc_feature: Table A; Target 102197; HLA-A*25:01; ZNF560; ENSG00000198028; CTA
SLYNKTSTI

SEQ ID NO: 102198 - protein, 9 aa, Homo sapiens
  misc_feature: Table A; Target 102198; HLA-A*30:01; ZNF560; ENSG00000198028; CTA
SLYNKTSTI

SEQ ID NO: 102199 - protein, 9 aa, Homo sapiens
  misc_feature: Table A; Target 102199; HLA-A*32:01; ZNF560; ENSG00000198028; CTA
SLYNKTSTI

SEQ ID NO: 102200 - protein, 9 aa, Homo sapiens
  misc_feature: Table A; Target 102200; HLA-B*08:01; ZNF560; ENSG00000198028; CTA
SLYNKTSTI

SEQ ID NO: 102201 - protein, 9 aa, Homo sapiens
  misc_feature: Table A; Target 102201; HLA-B*13:02; ZNF560; ENSG00000198028; CTA
SLYNKTSTI

SEQ ID NO: 102202 - protein, 9 aa, Homo sapiens
  misc_feature: Table A; Target 102202; HLA-B*15:01; ZNF560; ENSG00000198028; CTA
SLYNKTSTI

SEQ ID NO: 102203 - protein, 9 aa, Homo sapiens
  misc_feature: Table A; Target 102203; HLA-B*15:03; ZNF560; ENSG00000198028; CTA
SLYNKTSTI

SEQ ID NO: 102204 - protein, 9 aa, Homo sapiens
  misc_feature: Table A; Target 102204; HLA-B*46:01; ZNF560; ENSG00000198028; CTA
SLYNKTSTI

SEQ ID NO: 102205 - protein, 9 aa, Homo sapiens
  misc_feature: Table A; Target 102205; HLA-B*49:01; ZNF560; ENSG00000198028; CTA
SLYNKTSTI

SEQ ID NO: 102206 - protein, 9 aa, Homo sapiens
  misc_feature: Table A; Target 102206; HLA-B*51:01; ZNF560; ENSG00000198028; CTA
SLYNKTSTI

SEQ ID NO: 102207 - protein, 9 aa, Homo sapiens
  misc_feature: Table A; Target 102207; HLA-B*55:01; ZNF560; ENSG00000198028; CTA
SLYNKTSTI

SEQ ID NO: 102208 - protein, 9 aa, Homo sapiens
  misc_feature: Table A; Target 102208; HLA-C*01:02; ZNF560; ENSG00000198028; CTA
SLYNKTSTI

SEQ ID NO: 102209 - protein, 9 aa, Homo sapiens
  misc_feature: Table A; Target 102209; HLA-C*02:02; ZNF560; ENSG00000198028; CTA
SLYNKTSTI

SEQ ID NO: 102210 - protein, 9 aa, Homo sapiens
  misc_feature: Table A; Target 102210; HLA-C*05:01; ZNF560; ENSG00000198028; CTA
SLYNKTSTI

SEQ ID NO: 102211 - protein, 9 aa, Homo sapiens
  misc_feature: Table A; Target 102211; HLA-C*12:03; ZNF560; ENSG00000198028; CTA
SLYNKTSTI

SEQ ID NO: 102212 - protein, 9 aa, Homo sapiens
  misc_feature: Table A; Target 102212; HLA-C*14:02; ZNF560; ENSG00000198028; CTA
SLYNKTSTI

SEQ ID NO: 102213 - protein, 10 aa, Homo sapiens
  misc_feature: Table A; Target 102213; HLA-A*03:01; ZNF560; ENSG00000198028; CTA
SLYNKTSTIR

SEQ ID NO: 102214 - protein, 11 aa, Homo sapiens
  misc_feature: Table A; Target 102214; HLA-A*03:01; ZNF560; ENSG00000198028; CTA
SLYNKTSTIRK

SEQ ID NO: 102215 - protein, 11 aa, Homo sapiens
  misc_feature: Table A; Target 102215; HLA-A*03:02; ZNF560; ENSG00000198028; CTA
SLYNKTSTIRK

SEQ ID NO: 102216 - protein, 11 aa, Homo sapiens
  misc_feature: Table A; Target 102216; HLA-A*11:01; ZNF560; ENSG00000198028; CTA
SLYNKTSTIRK

SEQ ID NO: 102217 - protein, 9 aa, Homo sapiens
  misc_feature: Table A; Target 102217; HLA-C*07:06; ZNF560; ENSG00000198028; CTA
SSGVIEDRR

SEQ ID NO: 102218 - protein, 8 aa, Homo sapiens
  misc_feature: Table A; Target 102218; HLA-A*31:01; ZNF560; ENSG00000198028; CTA
SSLFAHLR

SEQ ID NO: 102219 - protein, 9 aa, Homo sapiens
  misc_feature: Table A; Target 102219; HLA-A*31:01; ZNF560; ENSG00000198028; CTA
SSSLVDHLR

SEQ ID NO: 102220 - protein, 9 aa, Homo sapiens
  misc_feature: Table A; Target 102220; HLA-A*68:01; ZNF560; ENSG00000198028; CTA
SSSLVDHLR

SEQ ID NO: 102221 - protein, 9 aa, Homo sapiens
  misc_feature: Table A; Target 102221; HLA-C*07:06; ZNF560; ENSG00000198028; CTA
SSSLVDHLR

SEQ ID NO: 102222 - protein, 9 aa, Homo sapiens
  misc_feature: Table A; Target 102222; HLA-A*03:01; ZNF560; ENSG00000198028; CTA
SSVGYQLFK

SEQ ID NO: 102223 - protein, 9 aa, Homo sapiens
  misc_feature: Table A; Target 102223; HLA-A*03:02; ZNF560; ENSG00000198028; CTA
SSVGYQLFK

SEQ ID NO: 102224 - protein, 9 aa, Homo sapiens
  misc_feature: Table A; Target 102224; HLA-C*07:06; ZNF560; ENSG00000198028; CTA
SSVGYQLFK

SEQ ID NO: 102225 - protein, 8 aa, Homo sapiens
  misc_feature: Table A; Target 102225; HLA-B*08:01; ZNF560; ENSG00000198028; CTA
STIRKVSV

SEQ ID NO: 102226 - protein, 9 aa, Homo sapiens
  misc_feature: Table A; Target 102226; HLA-A*24:02; ZNF560; ENSG00000198028; CTA
STIRKVSVF

SEQ ID NO: 102227 - protein, 9 aa, Homo sapiens
  misc_feature: Table A; Target 102227; HLA-A*25:01; ZNF560; ENSG00000198028; CTA
STIRKVSVF

SEQ ID NO: 102228 - protein, 9 aa, Homo sapiens
  misc_feature: Table A; Target 102228; HLA-A*26:01; ZNF560; ENSG00000198028; CTA
STIRKVSVF

SEQ ID NO: 102229 - protein, 9 aa, Homo sapiens
  misc_feature: Table A; Target 102229; HLA-A*32:01; ZNF560; ENSG00000198028; CTA
STIRKVSVF

SEQ ID NO: 102230 - protein, 9 aa, Homo sapiens
  misc_feature: Table A; Target 102230; HLA-B*08:01; ZNF560; ENSG00000198028; CTA
STIRKVSVF

SEQ ID NO: 102231 - protein, 9 aa, Homo sapiens
  misc_feature: Table A; Target 102231; HLA-B*15:01; ZNF560; ENSG00000198028; CTA
STIRKVSVF

SEQ ID NO: 102232 - protein, 9 aa, Homo sapiens
  misc_feature: Table A; Target 102232; HLA-B*44:02; ZNF560; ENSG00000198028; CTA
STIRKVSVF

SEQ ID NO: 102233 - protein, 9 aa, Homo sapiens
  misc_feature: Table A; Target 102233; HLA-B*44:03; ZNF560; ENSG00000198028; CTA
STIRKVSVF

SEQ ID NO: 102234 - protein, 9 aa, Homo sapiens
  misc_feature: Table A; Target 102234; HLA-B*46:01; ZNF560; ENSG00000198028; CTA
STIRKVSVF

SEQ ID NO: 102235 - protein, 9 aa, Homo sapiens
  misc_feature: Table A; Target 102235; HLA-B*57:01; ZNF560; ENSG00000198028; CTA
STIRKVSVF

SEQ ID NO: 102236 - protein, 9 aa, Homo sapiens
  misc_feature: Table A; Target 102236; HLA-B*58:01; ZNF560; ENSG00000198028; CTA
STIRKVSVF

SEQ ID NO: 102237 - protein, 9 aa, Homo sapiens
  misc_feature: Table A; Target 102237; HLA-C*02:02; ZNF560; ENSG00000198028; CTA
STIRKVSVF

SEQ ID NO: 102238 - protein, 9 aa, Homo sapiens
  misc_feature: Table A; Target 102238; HLA-C*12:03; ZNF560; ENSG00000198028; CTA
STIRKVSVF

SEQ ID NO: 102239 - protein, 9 aa, Homo sapiens
  misc_feature: Table A; Target 102239; HLA-C*16:01; ZNF560; ENSG00000198028; CTA
STIRKVSVF

SEQ ID NO: 102240 - protein, 11 aa, Homo sapiens
  misc_feature: Table A; Target 102240; HLA-A*11:01; ZNF560; ENSG00000198028; CTA
STIRKVSVFSK

SEQ ID NO: 102241 - protein, 10 aa, Homo sapiens
  misc_feature: Table A; Target 102241; HLA-A*24:02; ZNF560; ENSG00000198028; CTA
STLPRVLQEW

SEQ ID NO: 102242 - protein, 10 aa, Homo sapiens
  misc_feature: Table A; Target 102242; HLA-A*25:01; ZNF560; ENSG00000198028; CTA
STLPRVLQEW

SEQ ID NO: 102243 - protein, 10 aa, Homo sapiens
  misc_feature: Table A; Target 102243; HLA-A*31:01; ZNF560; ENSG00000198028; CTA
STLPRVLQEW

SEQ ID NO: 102244 - protein, 10 aa, Homo sapiens
  misc_feature: Table A; Target 102244; HLA-A*32:01; ZNF560; ENSG00000198028; CTA
STLPRVLQEW

SEQ ID NO: 102245 - protein, 10 aa, Homo sapiens
  misc_feature: Table A; Target 102245; HLA-B*44:02; ZNF560; ENSG00000198028; CTA
STLPRVLQEW

SEQ ID NO: 102246 - protein, 10 aa, Homo sapiens
  misc_feature: Table A; Target 102246; HLA-B*58:01; ZNF560; ENSG00000198028; CTA
STLPRVLQEW

SEQ ID NO: 102247 - protein, 11 aa, Homo sapiens
  misc_feature: Table A; Target 102247; HLA-A*25:01; ZNF560; ENSG00000198028; CTA
SVAVEFTQEEW

SEQ ID NO: 102248 - protein, 11 aa, Homo sapiens
  misc_feature: Table A; Target 102248; HLA-B*57:01; ZNF560; ENSG00000198028; CTA
SVAVEFTQEEW

SEQ ID NO: 102249 - protein, 8 aa, Homo sapiens
  misc_feature: Table A; Target 102249; HLA-A*03:01; ZNF560; ENSG00000198028; CTA
SVGYQLFK

SEQ ID NO: 102250 - protein, 8 aa, Homo sapiens
  misc_feature: Table A; Target 102250; HLA-A*11:01; ZNF560; ENSG00000198028; CTA
SVGYQLFK

SEQ ID NO: 102251 - protein, 9 aa, Homo sapiens
  misc_feature: Table A; Target 102251; HLA-A*26:01; ZNF560; ENSG00000198028; CTA
SVSALQQEF

SEQ ID NO: 102252 - protein, 9 aa, Homo sapiens
  misc_feature: Table A; Target 102252; HLA-A*29:02; ZNF560; ENSG00000198028; CTA
SVSALQQEF

SEQ ID NO: 102253 - protein, 9 aa, Homo sapiens
  misc_feature: Table A; Target 102253; HLA-A*30:02; ZNF560; ENSG00000198028; CTA
SVSALQQEF

SEQ ID NO: 102254 - protein, 9 aa, Homo sapiens
  misc_feature: Table A; Target 102254; HLA-A*32:01; ZNF560; ENSG00000198028; CTA
SVSALQQEF

SEQ ID NO: 102255 - protein, 9 aa, Homo sapiens
  misc_feature: Table A; Target 102255; HLA-B*15:01; ZNF560; ENSG00000198028; CTA
SVSALQQEF

SEQ ID NO: 102256 - protein, 9 aa, Homo sapiens
  misc_feature: Table A; Target 102256; HLA-B*15:03; ZNF560; ENSG00000198028; CTA
SVSALQQEF

SEQ ID NO: 102257 - protein, 9 aa, Homo sapiens
  misc_feature: Table A; Target 102257; HLA-B*35:01; ZNF560; ENSG00000198028; CTA
SVSALQQEF

SEQ ID NO: 102258 - protein, 9 aa, Homo sapiens
  misc_feature: Table A; Target 102258; HLA-B*58:01; ZNF560; ENSG00000198028; CTA
SVSALQQEF

SEQ ID NO: 102259 - protein, 9 aa, Homo sapiens
  misc_feature: Table A; Target 102259; HLA-C*02:02; ZNF560; ENSG00000198028; CTA
SVSALQQEF

SEQ ID NO: 102260 - protein, 9 aa, Homo sapiens
  misc_feature: Table A; Target 102260; HLA-C*07:04; ZNF560; ENSG00000198028; CTA
SVSALQQEF

SEQ ID NO: 102261 - protein, 9 aa, Homo sapiens
  misc_feature: Table A; Target 102261; HLA-C*07:06; ZNF560; ENSG00000198028; CTA
SVSALQQEF

SEQ ID NO: 102262 - protein, 9 aa, Homo sapiens
  misc_feature: Table A; Target 102262; HLA-C*16:01; ZNF560; ENSG00000198028; CTA
SVSALQQEF

SEQ ID NO: 102263 - protein, 9 aa, Homo sapiens
  misc_feature: Table A; Target 102263; HLA-C*16:04; ZNF560; ENSG00000198028; CTA
SVSALQQEF

SEQ ID NO: 102264 - protein, 10 aa, Homo sapiens
  misc_feature: Table A; Target 102264; HLA-A*25:01; ZNF560; ENSG00000198028; CTA
SVSALQQEFW

SEQ ID NO: 102265 - protein, 10 aa, Homo sapiens
  misc_feature: Table A; Target 102265; HLA-B*57:01; ZNF560; ENSG00000198028; CTA
SVSALQQEFW

SEQ ID NO: 102266 - protein, 10 aa, Homo sapiens
  misc_feature: Table A; Target 102266; HLA-B*58:01; ZNF560; ENSG00000198028; CTA
SVSALQQEFW

SEQ ID NO: 102267 - protein, 9 aa, Homo sapiens
  misc_feature: Table A; Target 102267; HLA-B*35:03; ZNF560; ENSG00000198028; CTA
SVTFEDTAV

SEQ ID NO: 102268 - protein, 9 aa, Homo sapiens
  misc_feature: Table A; Target 102268; HLA-B*55:01; ZNF560; ENSG00000198028; CTA
SVTFEDTAV

SEQ ID NO: 102269 - protein, 9 aa, Homo sapiens
  misc_feature: Table A; Target 102269; HLA-A*31:01; ZNF560; ENSG00000198028; CTA
SYLTKHLRR

SEQ ID NO: 102270 - protein, 9 aa, Homo sapiens
  misc_feature: Table A; Target 102270; HLA-A*23:01; ZNF560; ENSG00000198028; CTA
SYPSLFGHL

SEQ ID NO: 102271 - protein, 9 aa, Homo sapiens
  misc_feature: Table A; Target 102271; HLA-A*24:02; ZNF560; ENSG00000198028; CTA
SYPSLFGHL

SEQ ID NO: 102272 - protein, 9 aa, Homo sapiens
  misc_feature: Table A; Target 102272; HLA-A*29:02; ZNF560; ENSG00000198028; CTA
SYPSLFGHL

SEQ ID NO: 102273 - protein, 10 aa, Homo sapiens
  misc_feature: Table A; Target 102273; HLA-A*29:02; ZNF560; ENSG00000198028; CTA
SYPSLFGHLR

SEQ ID NO: 102274 - protein, 10 aa, Homo sapiens
  misc_feature: Table A; Target 102274; HLA-A*31:01; ZNF560; ENSG00000198028; CTA
SYPSLFGHLR

SEQ ID NO: 102275 - protein, 10 aa, Homo sapiens
  misc_feature: Table A; Target 102275; HLA-A*25:01; ZNF560; ENSG00000198028; CTA
TAVDFTQEEW

SEQ ID NO: 102276 - protein, 10 aa, Homo sapiens
  misc_feature: Table A; Target 102276; HLA-A*26:01; ZNF560; ENSG00000198028; CTA
TAVDFTQEEW

SEQ ID NO: 102277 - protein, 10 aa, Homo sapiens
  misc_feature: Table A; Target 102277; HLA-A*68:01; ZNF560; ENSG00000198028; CTA
TAVDFTQEEW

SEQ ID NO: 102278 - protein, 10 aa, Homo sapiens
  misc_feature: Table A; Target 102278; HLA-B*27:02; ZNF560; ENSG00000198028; CTA
TAVDFTQEEW

SEQ ID NO: 102279 - protein, 10 aa, Homo sapiens
  misc_feature: Table A; Target 102279; HLA-B*35:01; ZNF560; ENSG00000198028; CTA
TAVDFTQEEW

SEQ ID NO: 102280 - protein, 10 aa, Homo sapiens
  misc_feature: Table A; Target 102280; HLA-B*44:03; ZNF560; ENSG00000198028; CTA
TAVDFTQEEW

SEQ ID NO: 102281 - protein, 10 aa, Homo sapiens
  misc_feature: Table A; Target 102281; HLA-B*57:01; ZNF560; ENSG00000198028; CTA
TAVDFTQEEW

SEQ ID NO: 102282 - protein, 10 aa, Homo sapiens
  misc_feature: Table A; Target 102282; HLA-B*58:01; ZNF560; ENSG00000198028; CTA
TAVDFTQEEW

SEQ ID NO: 102283 - protein, 10 aa, Homo sapiens
  misc_feature: Table A; Target 102283; HLA-C*07:06; ZNF560; ENSG00000198028; CTA
TAVDFTQEEW

SEQ ID NO: 102284 - protein, 10 aa, Homo sapiens
  misc_feature: Table A; Target 102284; HLA-C*16:04; ZNF560; ENSG00000198028; CTA
TAVDFTQEEW

SEQ ID NO: 102285 - protein, 9 aa, Homo sapiens
  misc_feature: Table A; Target 102285; HLA-A*29:02; ZNF560; ENSG00000198028; CTA
TDYGKAFIY

SEQ ID NO: 102286 - protein, 9 aa, Homo sapiens
  misc_feature: Table A; Target 102286; HLA-B*18:01; ZNF560; ENSG00000198028; CTA
TDYGKAFIY

SEQ ID NO: 102287 - protein, 9 aa, Homo sapiens
  misc_feature: Table A; Target 102287; HLA-B*35:01; ZNF560; ENSG00000198028; CTA
TDYGKAFIY

SEQ ID NO: 102288 - protein, 9 aa, Homo sapiens
  misc_feature: Table A; Target 102288; HLA-B*37:01; ZNF560; ENSG00000198028; CTA
TDYGKAFIY

SEQ ID NO: 102289 - protein, 9 aa, Homo sapiens
  misc_feature: Table A; Target 102289; HLA-B*44:02; ZNF560; ENSG00000198028; CTA
TDYGKAFIY

SEQ ID NO: 102290 - protein, 9 aa, Homo sapiens
  misc_feature: Table A; Target 102290; HLA-B*44:03; ZNF560; ENSG00000198028; CTA
TDYGKAFIY

SEQ ID NO: 102291 - protein, 9 aa, Homo sapiens
  misc_feature: Table A; Target 102291; HLA-C*07:01; ZNF560; ENSG00000198028; CTA
TDYGKAFIY

SEQ ID NO: 102292 - protein, 9 aa, Homo sapiens
  misc_feature: Table A; Target 102292; HLA-A*02:07; ZNF560; ENSG00000198028; CTA
TFDSVAVEF

SEQ ID NO: 102293 - protein, 9 aa, Homo sapiens
  misc_feature: Table A; Target 102293; HLA-A*23:01; ZNF560; ENSG00000198028; CTA
TFDSVAVEF

SEQ ID NO: 102294 - protein, 9 aa, Homo sapiens
  misc_feature: Table A; Target 102294; HLA-A*24:02; ZNF560; ENSG00000198028; CTA
TFDSVAVEF

SEQ ID NO: 102295 - protein, 9 aa, Homo sapiens
  misc_feature: Table A; Target 102295; HLA-A*29:02; ZNF560; ENSG00000198028; CTA
TFDSVAVEF

SEQ ID NO: 102296 - protein, 9 aa, Homo sapiens
  misc_feature: Table A; Target 102296; HLA-A*32:01; ZNF560; ENSG00000198028; CTA
TFDSVAVEF

SEQ ID NO: 102297 - protein, 9 aa, Homo sapiens
  misc_feature: Table A; Target 102297; HLA-A*33:03; ZNF560; ENSG00000198028; CTA
TFDSVAVEF

SEQ ID NO: 102298 - protein, 9 aa, Homo sapiens
  misc_feature: Table A; Target 102298; HLA-B*18:01; ZNF560; ENSG00000198028; CTA
TFDSVAVEF

SEQ ID NO: 102299 - protein, 9 aa, Homo sapiens
  misc_feature: Table A; Target 102299; HLA-B*35:03; ZNF560; ENSG00000198028; CTA
TFDSVAVEF

SEQ ID NO: 102300 - protein, 9 aa, Homo sapiens
  misc_feature: Table A; Target 102300; HLA-B*38:01; ZNF560; ENSG00000198028; CTA
TFDSVAVEF

SEQ ID NO: 102301 - protein, 9 aa, Homo sapiens
  misc_feature: Table A; Target 102301; HLA-C*01:02; ZNF560; ENSG00000198028; CTA
TFDSVAVEF

SEQ ID NO: 102302 - protein, 9 aa, Homo sapiens
  misc_feature: Table A; Target 102302; HLA-C*05:01; ZNF560; ENSG00000198028; CTA
TFDSVAVEF

SEQ ID NO: 102303 - protein, 9 aa, Homo sapiens
  misc_feature: Table A; Target 102303; HLA-C*07:04; ZNF560; ENSG00000198028; CTA
TFDSVAVEF

SEQ ID NO: 102304 - protein, 9 aa, Homo sapiens
  misc_feature: Table A; Target 102304; HLA-C*14:02; ZNF560; ENSG00000198028; CTA
TFDSVAVEF

SEQ ID NO: 102305 - protein, 9 aa, Homo sapiens
  misc_feature: Table A; Target 102305; HLA-A*23:01; ZNF560; ENSG00000198028; CTA
TFEDTAVDF

SEQ ID NO: 102306 - protein, 9 aa, Homo sapiens
  misc_feature: Table A; Target 102306; HLA-B*35:01; ZNF560; ENSG00000198028; CTA
TFEDTAVDF

SEQ ID NO: 102307 - protein, 9 aa, Homo sapiens
  misc_feature: Table A; Target 102307; HLA-B*35:03; ZNF560; ENSG00000198028; CTA
TFEDTAVDF

SEQ ID NO: 102308 - protein, 9 aa, Homo sapiens
  misc_feature: Table A; Target 102308; HLA-C*01:02; ZNF560; ENSG00000198028; CTA
TFEDTAVDF

SEQ ID NO: 102309 - protein, 9 aa, Homo sapiens
  misc_feature: Table A; Target 102309; HLA-C*04:01; ZNF560; ENSG00000198028; CTA
TFEDTAVDF

SEQ ID NO: 102310 - protein, 9 aa, Homo sapiens
  misc_feature: Table A; Target 102310; HLA-C*07:04; ZNF560; ENSG00000198028; CTA
TFEDTAVDF

SEQ ID NO: 102311 - protein, 9 aa, Homo sapiens
  misc_feature: Table A; Target 102311; HLA-C*14:02; ZNF560; ENSG00000198028; CTA
TFEDTAVDF

SEQ ID NO: 102312 - protein, 8 aa, Homo sapiens
  misc_feature: Table A; Target 102312; HLA-C*14:02; ZNF560; ENSG00000198028; CTA
TFTVPSGF

SEQ ID NO: 102313 - protein, 8 aa, Homo sapiens
  misc_feature: Table A; Target 102313; HLA-A*01:01; ZNF560; ENSG00000198028; CTA
TGDKPYEY

SEQ ID NO: 102314 - protein, 8 aa, Homo sapiens
  misc_feature: Table A; Target 102314; HLA-B*18:01; ZNF560; ENSG00000198028; CTA
TGDKPYEY

SEQ ID NO: 102315 - protein, 8 aa, Homo sapiens
  misc_feature: Table A; Target 102315; HLA-B*35:01; ZNF560; ENSG00000198028; CTA
TGDKPYEY

SEQ ID NO: 102316 - protein, 8 aa, Homo sapiens
  misc_feature: Table A; Target 102316; HLA-C*03:03; ZNF560; ENSG00000198028; CTA
TGDKPYEY

SEQ ID NO: 102317 - protein, 8 aa, Homo sapiens
  misc_feature: Table A; Target 102317; HLA-C*05:01; ZNF560; ENSG00000198028; CTA
TGDKPYEY

SEQ ID NO: 102318 - protein, 9 aa, Homo sapiens
  misc_feature: Table A; Target 102318; HLA-A*03:02; ZNF560; ENSG00000198028; CTA
TGDKPYEYK

SEQ ID NO: 102319 - protein, 9 aa, Homo sapiens
  misc_feature: Table A; Target 102319; HLA-A*11:01; ZNF560; ENSG00000198028; CTA
TGDKPYEYK

SEQ ID NO: 102320 - protein, 9 aa, Homo sapiens
  misc_feature: Table A; Target 102320; HLA-C*07:01; ZNF560; ENSG00000198028; CTA
TGEKPFKCY

SEQ ID NO: 102321 - protein, 10 aa, Homo sapiens
  misc_feature: Table A; Target 102321; HLA-B*38:01; ZNF560; ENSG00000198028; CTA
THSTSHAVNV

SEQ ID NO: 102322 - protein, 8 aa, Homo sapiens
  misc_feature: Table A; Target 102322; HLA-B*08:01; ZNF560; ENSG00000198028; CTA
TIRKVSVF

SEQ ID NO: 102323 - protein, 10 aa, Homo sapiens
  misc_feature: Table A; Target 102323; HLA-A*02:01; ZNF560; ENSG00000198028; CTA
TLLDPAQRNL

SEQ ID NO: 102324 - protein, 10 aa, Homo sapiens
  misc_feature: Table A; Target 102324; HLA-A*02:03; ZNF560; ENSG00000198028; CTA
TLLDPAQRNL

SEQ ID NO: 102325 - protein, 10 aa, Homo sapiens
  misc_feature: Table A; Target 102325; HLA-A*02:04; ZNF560; ENSG00000198028; CTA
TLLDPAQRNL

SEQ ID NO: 102326 - protein, 10 aa, Homo sapiens
  misc_feature: Table A; Target 102326; HLA-A*03:01; ZNF560; ENSG00000198028; CTA
TLLDPAQRNL

SEQ ID NO: 102327 - protein, 11 aa, Homo sapiens
  misc_feature: Table A; Target 102327; HLA-A*01:01; ZNF560; ENSG00000198028; CTA
TLLDPAQRNLY

SEQ ID NO: 102328 - protein, 11 aa, Homo sapiens
  misc_feature: Table A; Target 102328; HLA-A*03:01; ZNF560; ENSG00000198028; CTA
TLLDPAQRNLY

SEQ ID NO: 102329 - protein, 11 aa, Homo sapiens
  misc_feature: Table A; Target 102329; HLA-A*23:01; ZNF560; ENSG00000198028; CTA
TLLDPAQRNLY

SEQ ID NO: 102330 - protein, 11 aa, Homo sapiens
  misc_feature: Table A; Target 102330; HLA-A*24:02; ZNF560; ENSG00000198028; CTA
TLLDPAQRNLY

SEQ ID NO: 102331 - protein, 11 aa, Homo sapiens
  misc_feature: Table A; Target 102331; HLA-A*29:02; ZNF560; ENSG00000198028; CTA
TLLDPAQRNLY

SEQ ID NO: 102332 - protein, 11 aa, Homo sapiens
  misc_feature: Table A; Target 102332; HLA-A*30:02; ZNF560; ENSG00000198028; CTA
TLLDPAQRNLY

SEQ ID NO: 102333 - protein, 11 aa, Homo sapiens
  misc_feature: Table A; Target 102333; HLA-A*31:01; ZNF560; ENSG00000198028; CTA
TLLDPAQRNLY

SEQ ID NO: 102334 - protein, 11 aa, Homo sapiens
  misc_feature: Table A; Target 102334; HLA-A*32:01; ZNF560; ENSG00000198028; CTA
TLLDPAQRNLY

SEQ ID NO: 102335 - protein, 11 aa, Homo sapiens
  misc_feature: Table A; Target 102335; HLA-B*15:01; ZNF560; ENSG00000198028; CTA
TLLDPAQRNLY

SEQ ID NO: 102336 - protein, 11 aa, Homo sapiens
  misc_feature: Table A; Target 102336; HLA-B*15:03; ZNF560; ENSG00000198028; CTA
TLLDPAQRNLY

SEQ ID NO: 102337 - protein, 11 aa, Homo sapiens
  misc_feature: Table A; Target 102337; HLA-C*07:04; ZNF560; ENSG00000198028; CTA
TLLDPAQRNLY

SEQ ID NO: 102338 - protein, 11 aa, Homo sapiens
  misc_feature: Table A; Target 102338; HLA-C*16:01; ZNF560; ENSG00000198028; CTA
TLLDPAQRNLY

SEQ ID NO: 102339 - protein, 9 aa, Homo sapiens
  misc_feature: Table A; Target 102339; HLA-A*03:01; ZNF560; ENSG00000198028; CTA
TLNGIQLAR

SEQ ID NO: 102340 - protein, 9 aa, Homo sapiens
  misc_feature: Table A; Target 102340; HLA-A*03:02; ZNF560; ENSG00000198028; CTA
TLNGIQLAR

SEQ ID NO: 102341 - protein, 9 aa, Homo sapiens
  misc_feature: Table A; Target 102341; HLA-A*11:01; ZNF560; ENSG00000198028; CTA
TLNGIQLAR

SEQ ID NO: 102342 - protein, 9 aa, Homo sapiens
  misc_feature: Table A; Target 102342; HLA-A*29:02; ZNF560; ENSG00000198028; CTA
TLNGIQLAR

SEQ ID NO: 102343 - protein, 9 aa, Homo sapiens
  misc_feature: Table A; Target 102343; HLA-A*31:01; ZNF560; ENSG00000198028; CTA
TLNGIQLAR

SEQ ID NO: 102344 - protein, 9 aa, Homo sapiens
  misc_feature: Table A; Target 102344; HLA-A*33:01; ZNF560; ENSG00000198028; CTA
TLNGIQLAR

SEQ ID NO: 102345 - protein, 9 aa, Homo sapiens
  misc_feature: Table A; Target 102345; HLA-A*33:03; ZNF560; ENSG00000198028; CTA
TLNGIQLAR

SEQ ID NO: 102346 - protein, 9 aa, Homo sapiens
  misc_feature: Table A; Target 102346; HLA-A*68:01; ZNF560; ENSG00000198028; CTA
TLNGIQLAR

SEQ ID NO: 102347 - protein, 9 aa, Homo sapiens
  misc_feature: Table A; Target 102347; HLA-C*07:06; ZNF560; ENSG00000198028; CTA
TLNGIQLAR

SEQ ID NO: 102348 - protein, 9 aa, Homo sapiens
  misc_feature: Table A; Target 102348; HLA-A*02:07; ZNF560; ENSG00000198028; CTA
TLPRVLQEW

SEQ ID NO: 102349 - protein, 9 aa, Homo sapiens
  misc_feature: Table A; Target 102349; HLA-A*24:02; ZNF560; ENSG00000198028; CTA
TLPRVLQEW

SEQ ID NO: 102350 - protein, 9 aa, Homo sapiens
  misc_feature: Table A; Target 102350; HLA-A*25:01; ZNF560; ENSG00000198028; CTA
TLPRVLQEW

SEQ ID NO: 102351 - protein, 9 aa, Homo sapiens
  misc_feature: Table A; Target 102351; HLA-B*57:01; ZNF560; ENSG00000198028; CTA
TLPRVLQEW

SEQ ID NO: 102352 - protein, 10 aa, Homo sapiens
  misc_feature: Table A; Target 102352; HLA-A*25:01; ZNF560; ENSG00000198028; CTA
TLQQGVLQDW

SEQ ID NO: 102353 - protein, 8 aa, Homo sapiens
  misc_feature: Table A; Target 102353; HLA-A*33:01; ZNF560; ENSG00000198028; CTA
TNMSTQNR

SEQ ID NO: 102354 - protein, 8 aa, Homo sapiens
  misc_feature: Table A; Target 102354; HLA-A*33:03; ZNF560; ENSG00000198028; CTA
TNMSTQNR

SEQ ID NO: 102355 - protein, 10 aa, Homo sapiens
  misc_feature: Table A; Target 102355; HLA-C*04:01; ZNF560; ENSG00000198028; CTA
TNMSTQNRGN

SEQ ID NO: 102356 - protein, 9 aa, Homo sapiens
  misc_feature: Table A; Target 102356; HLA-B*08:01; ZNF560; ENSG00000198028; CTA
TQHLKTHAA

SEQ ID NO: 102357 - protein, 10 aa, Homo sapiens
  misc_feature: Table A; Target 102357; HLA-A*25:01; ZNF560; ENSG00000198028; CTA
TQSGEKLNEW

SEQ ID NO: 102358 - protein, 10 aa, Homo sapiens
  misc_feature: Table A; Target 102358; HLA-B*38:01; ZNF560; ENSG00000198028; CTA
TQSGEKLNEW

SEQ ID NO: 102359 - protein, 9 aa, Homo sapiens
  misc_feature: Table A; Target 102359; HLA-A*68:01; ZNF560; ENSG00000198028; CTA
TSAGLIEHI

SEQ ID NO: 102360 - protein, 9 aa, Homo sapiens
  misc_feature: Table A; Target 102360; HLA-A*68:02; ZNF560; ENSG00000198028; CTA
TSAGLIEHI

SEQ ID NO: 102361 - protein, 9 aa, Homo sapiens
  misc_feature: Table A; Target 102361; HLA-B*13:02; ZNF560; ENSG00000198028; CTA
TSAGLIEHI

SEQ ID NO: 102362 - protein, 9 aa, Homo sapiens
  misc_feature: Table A; Target 102362; HLA-B*38:01; ZNF560; ENSG00000198028; CTA
TSAGLIEHI

SEQ ID NO: 102363 - protein, 9 aa, Homo sapiens
  misc_feature: Table A; Target 102363; HLA-B*58:01; ZNF560; ENSG00000198028; CTA
TSAGLIEHI

SEQ ID NO: 102364 - protein, 9 aa, Homo sapiens
  misc_feature: Table A; Target 102364; HLA-C*06:02; ZNF560; ENSG00000198028; CTA
TSAGLIEHI

SEQ ID NO: 102365 - protein, 9 aa, Homo sapiens
  misc_feature: Table A; Target 102365; HLA-C*16:02; ZNF560; ENSG00000198028; CTA
TSAGLIEHI

SEQ ID NO: 102366 - protein, 10 aa, Homo sapiens
  misc_feature: Table A; Target 102366; HLA-A*33:03; ZNF560; ENSG00000198028; CTA
TSAGLIEHIR

SEQ ID NO: 102367 - protein, 10 aa, Homo sapiens
  misc_feature: Table A; Target 102367; HLA-A*68:01; ZNF560; ENSG00000198028; CTA
TSAGLIEHIR

SEQ ID NO: 102368 - protein, 10 aa, Homo sapiens
  misc_feature: Table A; Target 102368; HLA-A*68:02; ZNF560; ENSG00000198028; CTA
TSAGLIEHIR

SEQ ID NO: 102369 - protein, 10 aa, Homo sapiens
  misc_feature: Table A; Target 102369; HLA-C*07:06; ZNF560; ENSG00000198028; CTA
TSAGLIEHIR

SEQ ID NO: 102370 - protein, 9 aa, Homo sapiens
  misc_feature: Table A; Target 102370; HLA-A*03:02; ZNF560; ENSG00000198028; CTA
TSECIQYAK

SEQ ID NO: 102371 - protein, 9 aa, Homo sapiens
  misc_feature: Table A; Target 102371; HLA-A*11:01; ZNF560; ENSG00000198028; CTA
TSECIQYAK

SEQ ID NO: 102372 - protein, 9 aa, Homo sapiens
  misc_feature: Table A; Target 102372; HLA-B*58:01; ZNF560; ENSG00000198028; CTA
TSHAVNVET

SEQ ID NO: 102373 - protein, 9 aa, Homo sapiens
  misc_feature: Table A; Target 102373; HLA-B*58:01; ZNF560; ENSG00000198028; CTA
TSNGIQMDL

SEQ ID NO: 102374 - protein, 9 aa, Homo sapiens
  misc_feature: Table A; Target 102374; HLA-C*01:02; ZNF560; ENSG00000198028; CTA
TSNGIQMDL

SEQ ID NO: 102375 - protein, 9 aa, Homo sapiens
  misc_feature: Table A; Target 102375; HLA-C*02:02; ZNF560; ENSG00000198028; CTA
TSNGIQMDL

SEQ ID NO: 102376 - protein, 9 aa, Homo sapiens
  misc_feature: Table A; Target 102376; HLA-C*12:03; ZNF560; ENSG00000198028; CTA
TSSGRIQHL

SEQ ID NO: 102377 - protein, 9 aa, Homo sapiens
  misc_feature: Table A; Target 102377; HLA-C*16:01; ZNF560; ENSG00000198028; CTA
TSSGRIQHL

SEQ ID NO: 102378 - protein, 9 aa, Homo sapiens
  misc_feature: Table A; Target 102378; HLA-C*16:02; ZNF560; ENSG00000198028; CTA
TSSGRIQHL

SEQ ID NO: 102379 - protein, 9 aa, Homo sapiens
  misc_feature: Table A; Target 102379; HLA-A*31:01; ZNF560; ENSG00000198028; CTA
TSSGVIEDR

SEQ ID NO: 102380 - protein, 9 aa, Homo sapiens
  misc_feature: Table A; Target 102380; HLA-A*33:03; ZNF560; ENSG00000198028; CTA
TSSGVIEDR

SEQ ID NO: 102381 - protein, 9 aa, Homo sapiens
  misc_feature: Table A; Target 102381; HLA-A*68:01; ZNF560; ENSG00000198028; CTA
TSSGVIEDR

SEQ ID NO: 102382 - protein, 9 aa, Homo sapiens
  misc_feature: Table A; Target 102382; HLA-B*27:02; ZNF560; ENSG00000198028; CTA
TSSGVIEDR

SEQ ID NO: 102383 - protein, 9 aa, Homo sapiens
  misc_feature: Table A; Target 102383; HLA-C*07:06; ZNF560; ENSG00000198028; CTA
TSSGVIEDR

SEQ ID NO: 102384 - protein, 10 aa, Homo sapiens
  misc_feature: Table A; Target 102384; HLA-A*68:01; ZNF560; ENSG00000198028; CTA
TSSGVIEDRR

SEQ ID NO: 102385 - protein, 10 aa, Homo sapiens
  misc_feature: Table A; Target 102385; HLA-B*27:05; ZNF560; ENSG00000198028; CTA
TSSGVIEDRR

SEQ ID NO: 102386 - protein, 10 aa, Homo sapiens
  misc_feature: Table A; Target 102386; HLA-C*07:06; ZNF560; ENSG00000198028; CTA
TSSGVIEDRR

SEQ ID NO: 102387 - protein, 9 aa, Homo sapiens
  misc_feature: Table A; Target 102387; HLA-B*08:01; ZNF560; ENSG00000198028; CTA
TSTIRKVSV

SEQ ID NO: 102388 - protein, 9 aa, Homo sapiens
  misc_feature: Table A; Target 102388; HLA-C*16:01; ZNF560; ENSG00000198028; CTA
TSTIRKVSV

SEQ ID NO: 102389 - protein, 9 aa, Homo sapiens
  misc_feature: Table A; Target 102389; HLA-C*16:02; ZNF560; ENSG00000198028; CTA
TSTIRKVSV

SEQ ID NO: 102390 - protein, 10 aa, Homo sapiens
  misc_feature: Table A; Target 102390; HLA-B*57:01; ZNF560; ENSG00000198028; CTA
TSVSALQQEF

SEQ ID NO: 102391 - protein, 10 aa, Homo sapiens
  misc_feature: Table A; Target 102391; HLA-B*58:01; ZNF560; ENSG00000198028; CTA
TSVSALQQEF

SEQ ID NO: 102392 - protein, 11 aa, Homo sapiens
  misc_feature: Table A; Target 102392; HLA-B*57:01; ZNF560; ENSG00000198028; CTA
TSVSALQQEFW

SEQ ID NO: 102393 - protein, 11 aa, Homo sapiens
  misc_feature: Table A; Target 102393; HLA-B*58:01; ZNF560; ENSG00000198028; CTA
TSVSALQQEFW

SEQ ID NO: 102394 - protein, 9 aa, Homo sapiens
  misc_feature: Table A; Target 102394; HLA-A*03:01; ZNF560; ENSG00000198028; CTA
TVPSGFLEH

SEQ ID NO: 102395 - protein, 9 aa, Homo sapiens
  misc_feature: Table A; Target 102395; HLA-A*26:01; ZNF560; ENSG00000198028; CTA
TVPSGFLEH

SEQ ID NO: 102396 - protein, 9 aa, Homo sapiens
  misc_feature: Table A; Target 102396; HLA-A*29:02; ZNF560; ENSG00000198028; CTA
TVPSGFLEH

SEQ ID NO: 102397 - protein, 9 aa, Homo sapiens
  misc_feature: Table A; Target 102397; HLA-C*01:02; ZNF560; ENSG00000198028; CTA
TVPSGFLEH

SEQ ID NO: 102398 - protein, 10 aa, Homo sapiens
  misc_feature: Table A; Target 102398; HLA-A*02:07; ZNF560; ENSG00000198028; CTA
TVPSGFLEHV

SEQ ID NO: 102399 - protein, 8 aa, Homo sapiens
  misc_feature: Table A; Target 102399; HLA-A*23:01; ZNF560; ENSG00000198028; CTA
VAKVGFQL

SEQ ID NO: 102400 - protein, 8 aa, Homo sapiens
  misc_feature: Table A; Target 102400; HLA-A*32:01; ZNF560; ENSG00000198028; CTA
VAKVGFQL

SEQ ID NO: 102401 - protein, 8 aa, Homo sapiens
  misc_feature: Table A; Target 102401; HLA-B*08:01; ZNF560; ENSG00000198028; CTA
VAKVGFQL

SEQ ID NO: 102402 - protein, 8 aa, Homo sapiens
  misc_feature: Table A; Target 102402; HLA-B*40:02; ZNF560; ENSG00000198028; CTA
VAKVGFQL

SEQ ID NO: 102403 - protein, 8 aa, Homo sapiens
  misc_feature: Table A; Target 102403; HLA-B*46:01; ZNF560; ENSG00000198028; CTA
VAKVGFQL

SEQ ID NO: 102404 - protein, 8 aa, Homo sapiens
  misc_feature: Table A; Target 102404; HLA-B*58:01; ZNF560; ENSG00000198028; CTA
VAKVGFQL

SEQ ID NO: 102405 - protein, 8 aa, Homo sapiens
  misc_feature: Table A; Target 102405; HLA-C*01:02; ZNF560; ENSG00000198028; CTA
VAKVGFQL

SEQ ID NO: 102406 - protein, 8 aa, Homo sapiens
  misc_feature: Table A; Target 102406; HLA-C*02:02; ZNF560; ENSG00000198028; CTA
VAKVGFQL

SEQ ID NO: 102407 - protein, 8 aa, Homo sapiens
  misc_feature: Table A; Target 102407; HLA-C*03:03; ZNF560; ENSG00000198028; CTA
VAKVGFQL

SEQ ID NO: 102408 - protein, 8 aa, Homo sapiens
  misc_feature: Table A; Target 102408; HLA-C*03:04; ZNF560; ENSG00000198028; CTA
VAKVGFQL

SEQ ID NO: 102409 - protein, 8 aa, Homo sapiens
  misc_feature: Table A; Target 102409; HLA-C*14:02; ZNF560; ENSG00000198028; CTA
VAKVGFQL

SEQ ID NO: 102410 - protein, 8 aa, Homo sapiens
  misc_feature: Table A; Target 102410; HLA-C*16:01; ZNF560; ENSG00000198028; CTA
VAKVGFQL

SEQ ID NO: 102411 - protein, 8 aa, Homo sapiens
  misc_feature: Table A; Target 102411; HLA-C*16:02; ZNF560; ENSG00000198028; CTA
VAKVGFQL

SEQ ID NO: 102412 - protein, 8 aa, Homo sapiens
  misc_feature: Table A; Target 102412; HLA-C*16:04; ZNF560; ENSG00000198028; CTA
VAKVGFQL

SEQ ID NO: 102413 - protein, 9 aa, Homo sapiens
  misc_feature: Table A; Target 102413; HLA-A*23:01; ZNF560; ENSG00000198028; CTA
VAKVGFQLF

SEQ ID NO: 102414 - protein, 9 aa, Homo sapiens
  misc_feature: Table A; Target 102414; HLA-A*24:02; ZNF560; ENSG00000198028; CTA
VAKVGFQLF

SEQ ID NO: 102415 - protein, 9 aa, Homo sapiens
  misc_feature: Table A; Target 102415; HLA-B*46:01; ZNF560; ENSG00000198028; CTA
VAKVGFQLF

SEQ ID NO: 102416 - protein, 9 aa, Homo sapiens
  misc_feature: Table A; Target 102416; HLA-B*57:01; ZNF560; ENSG00000198028; CTA
VAKVGFQLF

SEQ ID NO: 102417 - protein, 9 aa, Homo sapiens
  misc_feature: Table A; Target 102417; HLA-C*02:02; ZNF560; ENSG00000198028; CTA
VAKVGFQLF

SEQ ID NO: 102418 - protein, 10 aa, Homo sapiens
  misc_feature: Table A; Target 102418; HLA-A*25:01; ZNF560; ENSG00000198028; CTA
VAVEFTQEEW

SEQ ID NO: 102419 - protein, 10 aa, Homo sapiens
  misc_feature: Table A; Target 102419; HLA-B*27:02; ZNF560; ENSG00000198028; CTA
VAVEFTQEEW

SEQ ID NO: 102420 - protein, 10 aa, Homo sapiens
  misc_feature: Table A; Target 102420; HLA-B*46:01; ZNF560; ENSG00000198028; CTA
VAVEFTQEEW

SEQ ID NO: 102421 - protein, 10 aa, Homo sapiens
  misc_feature: Table A; Target 102421; HLA-B*57:01; ZNF560; ENSG00000198028; CTA
VAVEFTQEEW

SEQ ID NO: 102422 - protein, 10 aa, Homo sapiens
  misc_feature: Table A; Target 102422; HLA-B*58:01; ZNF560; ENSG00000198028; CTA
VAVEFTQEEW

SEQ ID NO: 102423 - protein, 10 aa, Homo sapiens
  misc_feature: Table A; Target 102423; HLA-C*16:04; ZNF560; ENSG00000198028; CTA
VAVEFTQEEW

SEQ ID NO: 102424 - protein, 8 aa, Homo sapiens
  misc_feature: Table A; Target 102424; HLA-A*30:01; ZNF560; ENSG00000198028; CTA
VEFTQEEW

SEQ ID NO: 102425 - protein, 8 aa, Homo sapiens
  misc_feature: Table A; Target 102425; HLA-B*18:01; ZNF560; ENSG00000198028; CTA
VEFTQEEW

SEQ ID NO: 102426 - protein, 8 aa, Homo sapiens
  misc_feature: Table A; Target 102426; HLA-B*27:02; ZNF560; ENSG00000198028; CTA
VEFTQEEW

SEQ ID NO: 102427 - protein, 8 aa, Homo sapiens
  misc_feature: Table A; Target 102427; HLA-B*44:02; ZNF560; ENSG00000198028; CTA
VEFTQEEW

SEQ ID NO: 102428 - protein, 8 aa, Homo sapiens
  misc_feature: Table A; Target 102428; HLA-B*44:03; ZNF560; ENSG00000198028; CTA
VEFTQEEW

SEQ ID NO: 102429 - protein, 8 aa, Homo sapiens
  misc_feature: Table A; Target 102429; HLA-B*49:01; ZNF560; ENSG00000198028; CTA
VEFTQEEW

SEQ ID NO: 102430 - protein, 8 aa, Homo sapiens
  misc_feature: Table A; Target 102430; HLA-B*57:01; ZNF560; ENSG00000198028; CTA
VEFTQEEW

SEQ ID NO: 102431 - protein, 8 aa, Homo sapiens
  misc_feature: Table A; Target 102431; HLA-C*16:04; ZNF560; ENSG00000198028; CTA
VEFTQEEW

SEQ ID NO: 102432 - protein, 10 aa, Homo sapiens
  misc_feature: Table A; Target 102432; HLA-A*30:01; ZNF560; ENSG00000198028; CTA
VEFTQEEWTL

SEQ ID NO: 102433 - protein, 10 aa, Homo sapiens
  misc_feature: Table A; Target 102433; HLA-B*40:01; ZNF560; ENSG00000198028; CTA
VEFTQEEWTL

SEQ ID NO: 102434 - protein, 10 aa, Homo sapiens
  misc_feature: Table A; Target 102434; HLA-B*18:01; ZNF560; ENSG00000198028; CTA
VETHIIKNPY

SEQ ID NO: 102435 - protein, 10 aa, Homo sapiens
  misc_feature: Table A; Target 102435; HLA-B*44:02; ZNF560; ENSG00000198028; CTA
VETHIIKNPY

SEQ ID NO: 102436 - protein, 10 aa, Homo sapiens
  misc_feature: Table A; Target 102436; HLA-B*44:03; ZNF560; ENSG00000198028; CTA
VETHIIKNPY

SEQ ID NO: 102437 - protein, 9 aa, Homo sapiens
  misc_feature: Table A; Target 102437; HLA-A*24:02; ZNF560; ENSG00000198028; CTA
VFSKHGKSF

SEQ ID NO: 102438 - protein, 8 aa, Homo sapiens
  misc_feature: Table A; Target 102438; HLA-A*23:01; ZNF560; ENSG00000198028; CTA
VFVSFSSL

SEQ ID NO: 102439 - protein, 8 aa, Homo sapiens
  misc_feature: Table A; Target 102439; HLA-C*01:02; ZNF560; ENSG00000198028; CTA
VFVSFSSL

SEQ ID NO: 102440 - protein, 8 aa, Homo sapiens
  misc_feature: Table A; Target 102440; HLA-C*14:02; ZNF560; ENSG00000198028; CTA
VFVSFSSL

SEQ ID NO: 102441 - protein, 9 aa, Homo sapiens
  misc_feature: Table A; Target 102441; HLA-A*23:01; ZNF560; ENSG00000198028; CTA
VFVSFSSLF

SEQ ID NO: 102442 - protein, 9 aa, Homo sapiens
  misc_feature: Table A; Target 102442; HLA-A*24:02; ZNF560; ENSG00000198028; CTA
VFVSFSSLF

SEQ ID NO: 102443 - protein, 9 aa, Homo sapiens
  misc_feature: Table A; Target 102443; HLA-A*29:02; ZNF560; ENSG00000198028; CTA
VFVSFSSLF

SEQ ID NO: 102444 - protein, 9 aa, Homo sapiens
  misc_feature: Table A; Target 102444; HLA-B*15:03; ZNF560; ENSG00000198028; CTA
VFVSFSSLF

SEQ ID NO: 102445 - protein, 9 aa, Homo sapiens
  misc_feature: Table A; Target 102445; HLA-C*14:02; ZNF560; ENSG00000198028; CTA
VFVSFSSLF

SEQ ID NO: 102446 - protein, 9 aa, Homo sapiens
  misc_feature: Table A; Target 102446; HLA-A*02:04; ZNF560; ENSG00000198028; CTA
VLQDWAIKH

SEQ ID NO: 102447 - protein, 9 aa, Homo sapiens
  misc_feature: Table A; Target 102447; HLA-A*03:01; ZNF560; ENSG00000198028; CTA
VLQDWAIKH

SEQ ID NO: 102448 - protein, 9 aa, Homo sapiens
  misc_feature: Table A; Target 102448; HLA-A*03:02; ZNF560; ENSG00000198028; CTA
VLQDWAIKH

SEQ ID NO: 102449 - protein, 9 aa, Homo sapiens
  misc_feature: Table A; Target 102449; HLA-A*02:04; ZNF560; ENSG00000198028; CTA
VLQEWKMCL

SEQ ID NO: 102450 - protein, 9 aa, Homo sapiens
  misc_feature: Table A; Target 102450; HLA-A*02:03; ZNF560; ENSG00000198028; CTA
VMLENYENV

SEQ ID NO: 102451 - protein, 9 aa, Homo sapiens
  misc_feature: Table A; Target 102451; HLA-A*02:04; ZNF560; ENSG00000198028; CTA
VMLENYENV

SEQ ID NO: 102452 - protein, 9 aa, Homo sapiens
  misc_feature: Table A; Target 102452; HLA-A*02:07; ZNF560; ENSG00000198028; CTA
VMLENYENV

SEQ ID NO: 102453 - protein, 9 aa, Homo sapiens
  misc_feature: Table A; Target 102453; HLA-B*13:02; ZNF560; ENSG00000198028; CTA
VMLENYENV

SEQ ID NO: 102454 - protein, 9 aa, Homo sapiens
  misc_feature: Table A; Target 102454; HLA-B*55:01; ZNF560; ENSG00000198028; CTA
VMLENYENV

SEQ ID NO: 102455 - protein, 11 aa, Homo sapiens
  misc_feature: Table A; Target 102455; HLA-A*03:02; ZNF560; ENSG00000198028; CTA
VMLENYENVAK

SEQ ID NO: 102456 - protein, 11 aa, Homo sapiens
  misc_feature: Table A; Target 102456; HLA-A*11:01; ZNF560; ENSG00000198028; CTA
VMLENYENVAK

SEQ ID NO: 102457 - protein, 11 aa, Homo sapiens
  misc_feature: Table A; Target 102457; HLA-B*27:02; ZNF560; ENSG00000198028; CTA
VMLENYENVAK

SEQ ID NO: 102458 - protein, 9 aa, Homo sapiens
  misc_feature: Table A; Target 102458; HLA-A*02:01; ZNF560; ENSG00000198028; CTA
VMLENYKNL

SEQ ID NO: 102459 - protein, 9 aa, Homo sapiens
  misc_feature: Table A; Target 102459; HLA-A*02:03; ZNF560; ENSG00000198028; CTA
VMLENYKNL

SEQ ID NO: 102460 - protein, 9 aa, Homo sapiens
  misc_feature: Table A; Target 102460; HLA-A*02:04; ZNF560; ENSG00000198028; CTA
VMLENYKNL

SEQ ID NO: 102461 - protein, 9 aa, Homo sapiens
  misc_feature: Table A; Target 102461; HLA-A*02:07; ZNF560; ENSG00000198028; CTA
VMLENYKNL

SEQ ID NO: 102462 - protein, 9 aa, Homo sapiens
  misc_feature: Table A; Target 102462; HLA-A*24:02; ZNF560; ENSG00000198028; CTA
VMLENYKNL

SEQ ID NO: 102463 - protein, 9 aa, Homo sapiens
  misc_feature: Table A; Target 102463; HLA-A*68:02; ZNF560; ENSG00000198028; CTA
VPSGFLEHV

SEQ ID NO: 102464 - protein, 9 aa, Homo sapiens
  misc_feature: Table A; Target 102464; HLA-B*07:02; ZNF560; ENSG00000198028; CTA
VPSGFLEHV

SEQ ID NO: 102465 - protein, 9 aa, Homo sapiens
  misc_feature: Table A; Target 102465; HLA-B*51:01; ZNF560; ENSG00000198028; CTA
VPSGFLEHV

SEQ ID NO: 102466 - protein, 9 aa, Homo sapiens
  misc_feature: Table A; Target 102466; HLA-B*54:01; ZNF560; ENSG00000198028; CTA
VPSGFLEHV

SEQ ID NO: 102467 - protein, 9 aa, Homo sapiens
  misc_feature: Table A; Target 102467; HLA-B*55:01; ZNF560; ENSG00000198028; CTA
VPSGFLEHV

SEQ ID NO: 102468 - protein, 9 aa, Homo sapiens
  misc_feature: Table A; Target 102468; HLA-B*56:01; ZNF560; ENSG00000198028; CTA
VPSGFLEHV

SEQ ID NO: 102469 - protein, 9 aa, Homo sapiens
  misc_feature: Table A; Target 102469; HLA-C*16:02; ZNF560; ENSG00000198028; CTA
VPSGFLEHV

SEQ ID NO: 102470 - protein, 10 aa, Homo sapiens
  misc_feature: Table A; Target 102470; HLA-A*33:01; ZNF560; ENSG00000198028; CTA
VPSGFLEHVR

SEQ ID NO: 102471 - protein, 10 aa, Homo sapiens
  misc_feature: Table A; Target 102471; HLA-A*33:03; ZNF560; ENSG00000198028; CTA
VPSGFLEHVR

SEQ ID NO: 102472 - protein, 10 aa, Homo sapiens
  misc_feature: Table A; Target 102472; HLA-A*68:01; ZNF560; ENSG00000198028; CTA
VPSGFLEHVR

SEQ ID NO: 102473 - protein, 10 aa, Homo sapiens
  misc_feature: Table A; Target 102473; HLA-C*07:06; ZNF560; ENSG00000198028; CTA
VPSGFLEHVR

SEQ ID NO: 102474 - protein, 8 aa, Homo sapiens
  misc_feature: Table A; Target 102474; HLA-B*58:01; ZNF560; ENSG00000198028; CTA
VSALQQEF

SEQ ID NO: 102475 - protein, 8 aa, Homo sapiens
  misc_feature: Table A; Target 102475; HLA-C*16:01; ZNF560; ENSG00000198028; CTA
VSALQQEF

SEQ ID NO: 102476 - protein, 9 aa, Homo sapiens
  misc_feature: Table A; Target 102476; HLA-B*57:01; ZNF560; ENSG00000198028; CTA
VSALQQEFW

SEQ ID NO: 102477 - protein, 9 aa, Homo sapiens
  misc_feature: Table A; Target 102477; HLA-B*58:01; ZNF560; ENSG00000198028; CTA
VSALQQEFW

SEQ ID NO: 102478 - protein, 10 aa, Homo sapiens
  misc_feature: Table A; Target 102478; HLA-A*68:02; ZNF560; ENSG00000198028; CTA
VSFSSLFAHL

SEQ ID NO: 102479 - protein, 9 aa, Homo sapiens
  misc_feature: Table A; Target 102479; HLA-A*68:02; ZNF560; ENSG00000198028; CTA
VSSSLVDHL

SEQ ID NO: 102480 - protein, 9 aa, Homo sapiens
  misc_feature: Table A; Target 102480; HLA-B*27:05; ZNF560; ENSG00000198028; CTA
VSSSLVDHL

SEQ ID NO: 102481 - protein, 9 aa, Homo sapiens
  misc_feature: Table A; Target 102481; HLA-C*12:03; ZNF560; ENSG00000198028; CTA
VSSSLVDHL

SEQ ID NO: 102482 - protein, 9 aa, Homo sapiens
  misc_feature: Table A; Target 102482; HLA-C*16:02; ZNF560; ENSG00000198028; CTA
VSSSLVDHL

SEQ ID NO: 102483 - protein, 10 aa, Homo sapiens
  misc_feature: Table A; Target 102483; HLA-A*01:01; ZNF560; ENSG00000198028; CTA
VTFDSVAVEF

SEQ ID NO: 102484 - protein, 10 aa, Homo sapiens
  misc_feature: Table A; Target 102484; HLA-A*03:02; ZNF560; ENSG00000198028; CTA
VTFDSVAVEF

SEQ ID NO: 102485 - protein, 10 aa, Homo sapiens
  misc_feature: Table A; Target 102485; HLA-A*11:01; ZNF560; ENSG00000198028; CTA
VTFDSVAVEF

SEQ ID NO: 102486 - protein, 10 aa, Homo sapiens
  misc_feature: Table A; Target 102486; HLA-A*23:01; ZNF560; ENSG00000198028; CTA
VTFDSVAVEF

SEQ ID NO: 102487 - protein, 10 aa, Homo sapiens
  misc_feature: Table A; Target 102487; HLA-A*24:02; ZNF560; ENSG00000198028; CTA
VTFDSVAVEF

SEQ ID NO: 102488 - protein, 10 aa, Homo sapiens
  misc_feature: Table A; Target 102488; HLA-A*25:01; ZNF560; ENSG00000198028; CTA
VTFDSVAVEF

SEQ ID NO: 102489 - protein, 10 aa, Homo sapiens
  misc_feature: Table A; Target 102489; HLA-A*26:01; ZNF560; ENSG00000198028; CTA
VTFDSVAVEF

SEQ ID NO: 102490 - protein, 10 aa, Homo sapiens
  misc_feature: Table A; Target 102490; HLA-A*29:02; ZNF560; ENSG00000198028; CTA
VTFDSVAVEF

SEQ ID NO: 102491 - protein, 10 aa, Homo sapiens
  misc_feature: Table A; Target 102491; HLA-A*30:02; ZNF560; ENSG00000198028; CTA
VTFDSVAVEF

SEQ ID NO: 102492 - protein, 10 aa, Homo sapiens
  misc_feature: Table A; Target 102492; HLA-A*32:01; ZNF560; ENSG00000198028; CTA
VTFDSVAVEF

SEQ ID NO: 102493 - protein, 10 aa, Homo sapiens
  misc_feature: Table A; Target 102493; HLA-A*68:01; ZNF560; ENSG00000198028; CTA
VTFDSVAVEF

SEQ ID NO: 102494 - protein, 10 aa, Homo sapiens
  misc_feature: Table A; Target 102494; HLA-A*68:02; ZNF560; ENSG00000198028; CTA
VTFDSVAVEF

SEQ ID NO: 102495 - protein, 10 aa, Homo sapiens
  misc_feature: Table A; Target 102495; HLA-B*15:01; ZNF560; ENSG00000198028; CTA
VTFDSVAVEF

SEQ ID NO: 102496 - protein, 10 aa, Homo sapiens
  misc_feature: Table A; Target 102496; HLA-B*15:03; ZNF560; ENSG00000198028; CTA
VTFDSVAVEF

SEQ ID NO: 102497 - protein, 10 aa, Homo sapiens
  misc_feature: Table A; Target 102497; HLA-B*27:02; ZNF560; ENSG00000198028; CTA
VTFDSVAVEF

SEQ ID NO: 102498 - protein, 10 aa, Homo sapiens
  misc_feature: Table A; Target 102498; HLA-B*35:01; ZNF560; ENSG00000198028; CTA
VTFDSVAVEF

SEQ ID NO: 102499 - protein, 10 aa, Homo sapiens
  misc_feature: Table A; Target 102499; HLA-B*46:01; ZNF560; ENSG00000198028; CTA
VTFDSVAVEF

SEQ ID NO: 102500 - protein, 10 aa, Homo sapiens
  misc_feature: Table A; Target 102500; HLA-B*57:01; ZNF560; ENSG00000198028; CTA
VTFDSVAVEF

SEQ ID NO: 102501 - protein, 10 aa, Homo sapiens
  misc_feature: Table A; Target 102501; HLA-B*58:01; ZNF560; ENSG00000198028; CTA
VTFDSVAVEF

SEQ ID NO: 102502 - protein, 10 aa, Homo sapiens
  misc_feature: Table A; Target 102502; HLA-C*02:02; ZNF560; ENSG00000198028; CTA
VTFDSVAVEF

SEQ ID NO: 102503 - protein, 10 aa, Homo sapiens
  misc_feature: Table A; Target 102503; HLA-C*03:03; ZNF560; ENSG00000198028; CTA
VTFDSVAVEF

SEQ ID NO: 102504 - protein, 10 aa, Homo sapiens
  misc_feature: Table A; Target 102504; HLA-C*07:04; ZNF560; ENSG00000198028; CTA
VTFDSVAVEF

SEQ ID NO: 102505 - protein, 10 aa, Homo sapiens
  misc_feature: Table A; Target 102505; HLA-C*07:06; ZNF560; ENSG00000198028; CTA
VTFDSVAVEF

SEQ ID NO: 102506 - protein, 10 aa, Homo sapiens
  misc_feature: Table A; Target 102506; HLA-C*12:03; ZNF560; ENSG00000198028; CTA
VTFDSVAVEF

SEQ ID NO: 102507 - protein, 10 aa, Homo sapiens
  misc_feature: Table A; Target 102507; HLA-C*16:04; ZNF560; ENSG00000198028; CTA
VTFDSVAVEF

SEQ ID NO: 102508 - protein, 10 aa, Homo sapiens
  misc_feature: Table A; Target 102508; HLA-A*11:01; ZNF560; ENSG00000198028; CTA
VTFEDTAVDF

SEQ ID NO: 102509 - protein, 10 aa, Homo sapiens
  misc_feature: Table A; Target 102509; HLA-B*27:02; ZNF560; ENSG00000198028; CTA
VTFEDTAVDF

SEQ ID NO: 102510 - protein, 10 aa, Homo sapiens
  misc_feature: Table A; Target 102510; HLA-B*35:01; ZNF560; ENSG00000198028; CTA
VTFEDTAVDF

SEQ ID NO: 102511 - protein, 10 aa, Homo sapiens
  misc_feature: Table A; Target 102511; HLA-B*46:01; ZNF560; ENSG00000198028; CTA
VTFEDTAVDF

SEQ ID NO: 102512 - protein, 10 aa, Homo sapiens
  misc_feature: Table A; Target 102512; HLA-B*57:01; ZNF560; ENSG00000198028; CTA
VTFEDTAVDF

SEQ ID NO: 102513 - protein, 10 aa, Homo sapiens
  misc_feature: Table A; Target 102513; HLA-B*58:01; ZNF560; ENSG00000198028; CTA
VTFEDTAVDF

SEQ ID NO: 102514 - protein, 10 aa, Homo sapiens
  misc_feature: Table A; Target 102514; HLA-C*02:02; ZNF560; ENSG00000198028; CTA
VTFEDTAVDF

SEQ ID NO: 102515 - protein, 10 aa, Homo sapiens
  misc_feature: Table A; Target 102515; HLA-C*12:03; ZNF560; ENSG00000198028; CTA
VTFEDTAVDF

SEQ ID NO: 102516 - protein, 9 aa, Homo sapiens
  misc_feature: Table A; Target 102516; HLA-A*03:02; ZNF560; ENSG00000198028; CTA
VVSSSLVDH

SEQ ID NO: 102517 - protein, 9 aa, Homo sapiens
  misc_feature: Table A; Target 102517; HLA-A*11:01; ZNF560; ENSG00000198028; CTA
VVSSSLVDH

SEQ ID NO: 102518 - protein, 10 aa, Homo sapiens
  misc_feature: Table A; Target 102518; HLA-B*27:05; ZNF560; ENSG00000198028; CTA
VVSSSLVDHL

SEQ ID NO: 102519 - protein, 9 aa, Homo sapiens
  misc_feature: Table A; Target 102519; HLA-B*08:01; ZNF560; ENSG00000198028; CTA
WAIKHQTSV

SEQ ID NO: 102520 - protein, 9 aa, Homo sapiens
  misc_feature: Table A; Target 102520; HLA-B*13:02; ZNF560; ENSG00000198028; CTA
WAIKHQTSV

SEQ ID NO: 102521 - protein, 9 aa, Homo sapiens
  misc_feature: Table A; Target 102521; HLA-B*46:01; ZNF560; ENSG00000198028; CTA
WAIKHQTSV

SEQ ID NO: 102522 - protein, 9 aa, Homo sapiens
  misc_feature: Table A; Target 102522; HLA-B*51:01; ZNF560; ENSG00000198028; CTA
WAIKHQTSV

SEQ ID NO: 102523 - protein, 9 aa, Homo sapiens
  misc_feature: Table A; Target 102523; HLA-B*54:01; ZNF560; ENSG00000198028; CTA
WAIKHQTSV

SEQ ID NO: 102524 - protein, 9 aa, Homo sapiens
  misc_feature: Table A; Target 102524; HLA-C*02:02; ZNF560; ENSG00000198028; CTA
WAIKHQTSV

SEQ ID NO: 102525 - protein, 9 aa, Homo sapiens
  misc_feature: Table A; Target 102525; HLA-A*33:03; ZNF560; ENSG00000198028; CTA
WTLLDPAQR

SEQ ID NO: 102526 - protein, 8 aa, Homo sapiens
  misc_feature: Table A; Target 102526; HLA-B*08:01; ZNF560; ENSG00000198028; CTA
YAKDLLSL

SEQ ID NO: 102527 - protein, 8 aa, Homo sapiens
  misc_feature: Table A; Target 102527; HLA-B*46:01; ZNF560; ENSG00000198028; CTA
YAKDLLSL

SEQ ID NO: 102528 - protein, 8 aa, Homo sapiens
  misc_feature: Table A; Target 102528; HLA-C*03:04; ZNF560; ENSG00000198028; CTA
YAKDLLSL

SEQ ID NO: 102529 - protein, 9 aa, Homo sapiens
  misc_feature: Table A; Target 102529; HLA-A*01:01; ZNF560; ENSG00000198028; CTA
YAKDLLSLY

SEQ ID NO: 102530 - protein, 9 aa, Homo sapiens
  misc_feature: Table A; Target 102530; HLA-A*25:01; ZNF560; ENSG00000198028; CTA
YAKDLLSLY

SEQ ID NO: 102531 - protein, 9 aa, Homo sapiens
  misc_feature: Table A; Target 102531; HLA-A*26:01; ZNF560; ENSG00000198028; CTA
YAKDLLSLY

SEQ ID NO: 102532 - protein, 9 aa, Homo sapiens
  misc_feature: Table A; Target 102532; HLA-A*29:02; ZNF560; ENSG00000198028; CTA
YAKDLLSLY

SEQ ID NO: 102533 - protein, 9 aa, Homo sapiens
  misc_feature: Table A; Target 102533; HLA-A*30:02; ZNF560; ENSG00000198028; CTA
YAKDLLSLY

SEQ ID NO: 102534 - protein, 9 aa, Homo sapiens
  misc_feature: Table A; Target 102534; HLA-B*15:01; ZNF560; ENSG00000198028; CTA
YAKDLLSLY

SEQ ID NO: 102535 - protein, 9 aa, Homo sapiens
  misc_feature: Table A; Target 102535; HLA-B*15:03; ZNF560; ENSG00000198028; CTA
YAKDLLSLY

SEQ ID NO: 102536 - protein, 9 aa, Homo sapiens
  misc_feature: Table A; Target 102536; HLA-B*35:01; ZNF560; ENSG00000198028; CTA
YAKDLLSLY

SEQ ID NO: 102537 - protein, 9 aa, Homo sapiens
  misc_feature: Table A; Target 102537; HLA-B*46:01; ZNF560; ENSG00000198028; CTA
YAKDLLSLY

SEQ ID NO: 102538 - protein, 9 aa, Homo sapiens
  misc_feature: Table A; Target 102538; HLA-B*57:01; ZNF560; ENSG00000198028; CTA
YAKDLLSLY

SEQ ID NO: 102539 - protein, 9 aa, Homo sapiens
  misc_feature: Table A; Target 102539; HLA-C*02:02; ZNF560; ENSG00000198028; CTA
YAKDLLSLY

SEQ ID NO: 102540 - protein, 9 aa, Homo sapiens
  misc_feature: Table A; Target 102540; HLA-C*07:01; ZNF560; ENSG00000198028; CTA
YAKDLLSLY

SEQ ID NO: 102541 - protein, 9 aa, Homo sapiens
  misc_feature: Table A; Target 102541; HLA-C*12:03; ZNF560; ENSG00000198028; CTA
YAKDLLSLY

SEQ ID NO: 102542 - protein, 9 aa, Homo sapiens
  misc_feature: Table A; Target 102542; HLA-C*16:04; ZNF560; ENSG00000198028; CTA
YAKDLLSLY

SEQ ID NO: 102543 - protein, 11 aa, Homo sapiens
  misc_feature: Table A; Target 102543; HLA-A*33:01; ZNF560; ENSG00000198028; CTA
YAKDLLSLYNK

SEQ ID NO: 102544 - protein, 9 aa, Homo sapiens
  misc_feature: Table A; Target 102544; HLA-A*29:02; ZNF560; ENSG00000198028; CTA
YCLTNCYQY

SEQ ID NO: 102545 - protein, 9 aa, Homo sapiens
  misc_feature: Table A; Target 102545; HLA-C*07:01; ZNF560; ENSG00000198028; CTA
YCLTNCYQY

SEQ ID NO: 102546 - protein, 10 aa, Homo sapiens
  misc_feature: Table A; Target 102546; HLA-B*44:02; ZNF560; ENSG00000198028; CTA
YEHKEYGKAF

SEQ ID NO: 102547 - protein, 10 aa, Homo sapiens
  misc_feature: Table A; Target 102547; HLA-B*44:03; ZNF560; ENSG00000198028; CTA
YEHKEYGKAF

SEQ ID NO: 102548 - protein, 9 aa, Homo sapiens
  misc_feature: Table A; Target 102548; HLA-A*23:01; ZNF560; ENSG00000198028; CTA
YENVAKVGF

SEQ ID NO: 102549 - protein, 9 aa, Homo sapiens
  misc_feature: Table A; Target 102549; HLA-A*24:02; ZNF560; ENSG00000198028; CTA
YENVAKVGF

SEQ ID NO: 102550 - protein, 9 aa, Homo sapiens
  misc_feature: Table A; Target 102550; HLA-A*30:01; ZNF560; ENSG00000198028; CTA
YENVAKVGF

SEQ ID NO: 102551 - protein, 9 aa, Homo sapiens
  misc_feature: Table A; Target 102551; HLA-A*32:01; ZNF560; ENSG00000198028; CTA
YENVAKVGF

SEQ ID NO: 102552 - protein, 9 aa, Homo sapiens
  misc_feature: Table A; Target 102552; HLA-B*08:01; ZNF560; ENSG00000198028; CTA
YENVAKVGF

SEQ ID NO: 102553 - protein, 9 aa, Homo sapiens
  misc_feature: Table A; Target 102553; HLA-B*15:01; ZNF560; ENSG00000198028; CTA
YENVAKVGF

SEQ ID NO: 102554 - protein, 9 aa, Homo sapiens
  misc_feature: Table A; Target 102554; HLA-B*15:03; ZNF560; ENSG00000198028; CTA
YENVAKVGF

SEQ ID NO: 102555 - protein, 9 aa, Homo sapiens
  misc_feature: Table A; Target 102555; HLA-B*27:02; ZNF560; ENSG00000198028; CTA
YENVAKVGF

SEQ ID NO: 102556 - protein, 9 aa, Homo sapiens
  misc_feature: Table A; Target 102556; HLA-B*38:01; ZNF560; ENSG00000198028; CTA
YENVAKVGF

SEQ ID NO: 102557 - protein, 9 aa, Homo sapiens
  misc_feature: Table A; Target 102557; HLA-B*40:01; ZNF560; ENSG00000198028; CTA
YENVAKVGF

SEQ ID NO: 102558 - protein, 9 aa, Homo sapiens
  misc_feature: Table A; Target 102558; HLA-B*40:02; ZNF560; ENSG00000198028; CTA
YENVAKVGF

SEQ ID NO: 102559 - protein, 9 aa, Homo sapiens
  misc_feature: Table A; Target 102559; HLA-B*49:01; ZNF560; ENSG00000198028; CTA
YENVAKVGF

SEQ ID NO: 102560 - protein, 9 aa, Homo sapiens
  misc_feature: Table A; Target 102560; HLA-B*58:01; ZNF560; ENSG00000198028; CTA
YENVAKVGF

SEQ ID NO: 102561 - protein, 9 aa, Homo sapiens
  misc_feature: Table A; Target 102561; HLA-C*02:02; ZNF560; ENSG00000198028; CTA
YENVAKVGF

SEQ ID NO: 102562 - protein, 9 aa, Homo sapiens
  misc_feature: Table A; Target 102562; HLA-C*04:01; ZNF560; ENSG00000198028; CTA
YENVAKVGF

SEQ ID NO: 102563 - protein, 9 aa, Homo sapiens
  misc_feature: Table A; Target 102563; HLA-C*07:04; ZNF560; ENSG00000198028; CTA
YENVAKVGF

SEQ ID NO: 102564 - protein, 9 aa, Homo sapiens
  misc_feature: Table A; Target 102564; HLA-C*14:02; ZNF560; ENSG00000198028; CTA
YENVAKVGF

SEQ ID NO: 102565 - protein, 9 aa, Homo sapiens
  misc_feature: Table A; Target 102565; HLA-C*16:01; ZNF560; ENSG00000198028; CTA
YENVAKVGF

SEQ ID NO: 102566 - protein, 9 aa, Homo sapiens
  misc_feature: Table A; Target 102566; HLA-C*16:04; ZNF560; ENSG00000198028; CTA
YENVAKVGF

SEQ ID NO: 102567 - protein, 11 aa, Homo sapiens
  misc_feature: Table A; Target 102567; HLA-A*30:01; ZNF560; ENSG00000198028; CTA
YENVAKVGFQL

SEQ ID NO: 102568 - protein, 10 aa, Homo sapiens
  misc_feature: Table A; Target 102568; HLA-A*29:02; ZNF560; ENSG00000198028; CTA
YGKAFIYQSY

SEQ ID NO: 102569 - protein, 10 aa, Homo sapiens
  misc_feature: Table A; Target 102569; HLA-A*30:02; ZNF560; ENSG00000198028; CTA
YGKAFIYQSY

SEQ ID NO: 102570 - protein, 10 aa, Homo sapiens
  misc_feature: Table A; Target 102570; HLA-B*46:01; ZNF560; ENSG00000198028; CTA
YGKAFIYQSY

SEQ ID NO: 102571 - protein, 10 aa, Homo sapiens
  misc_feature: Table A; Target 102571; HLA-C*02:02; ZNF560; ENSG00000198028; CTA
YGKAFIYQSY

SEQ ID NO: 102572 - protein, 9 aa, Homo sapiens
  misc_feature: Table A; Target 102572; HLA-B*15:01; ZNF560; ENSG00000198028; CTA
YKNLSSVGY

SEQ ID NO: 102573 - protein, 9 aa, Homo sapiens
  misc_feature: Table A; Target 102573; HLA-B*39:01; ZNF560; ENSG00000198028; CTA
YKNLSSVGY

SEQ ID NO: 102574 - protein, 9 aa, Homo sapiens
  misc_feature: Table A; Target 102574; HLA-C*07:01; ZNF560; ENSG00000198028; CTA
YKNLSSVGY

SEQ ID NO: 102575 - protein, 9 aa, Homo sapiens
  misc_feature: Table A; Target 102575; HLA-C*07:04; ZNF560; ENSG00000198028; CTA
YKNLSSVGY

SEQ ID NO: 102576 - protein, 9 aa, Homo sapiens
  misc_feature: Table A; Target 102576; HLA-C*16:04; ZNF560; ENSG00000198028; CTA
YKNLSSVGY

SEQ ID NO: 102577 - protein, 8 aa, Homo sapiens
  misc_feature: Table A; Target 102577; HLA-B*07:02; ZNF560; ENSG00000198028; CTA
YPSLFGHL

SEQ ID NO: 102578 - protein, 8 aa, Homo sapiens
  misc_feature: Table A; Target 102578; HLA-B*08:01; ZNF560; ENSG00000198028; CTA
YPSLFGHL

SEQ ID NO: 102579 - protein, 8 aa, Homo sapiens
  misc_feature: Table A; Target 102579; HLA-B*51:01; ZNF560; ENSG00000198028; CTA
YPSLFGHL

SEQ ID NO: 102580 - protein, 8 aa, Homo sapiens
  misc_feature: Table A; Target 102580; HLA-B*54:01; ZNF560; ENSG00000198028; CTA
YPSLFGHL

SEQ ID NO: 102581 - protein, 8 aa, Homo sapiens
  misc_feature: Table A; Target 102581; HLA-B*56:01; ZNF560; ENSG00000198028; CTA
YPSLFGHL

SEQ ID NO: 102582 - protein, 9 aa, Homo sapiens
  misc_feature: Table A; Target 102582; HLA-A*33:01; ZNF560; ENSG00000198028; CTA
YPSLFGHLR

SEQ ID NO: 102583 - protein, 10 aa, Homo sapiens
  misc_feature: Table A; Target 102583; HLA-B*51:01; ZNF560; ENSG00000198028; CTA
YPSLFGHLRV

SEQ ID NO: 102584 - protein, 10 aa, Homo sapiens
  misc_feature: Table A; Target 102584; HLA-B*54:01; ZNF560; ENSG00000198028; CTA
YPSLFGHLRV

SEQ ID NO: 102585 - protein, 9 aa, Homo sapiens
  misc_feature: Table A; Target 102585; HLA-B*35:01; ZNF560; ENSG00000198028; CTA
YPTHLNNHM

SEQ ID NO: 102586 - protein, 9 aa, Homo sapiens
  misc_feature: Table A; Target 102586; HLA-B*35:03; ZNF560; ENSG00000198028; CTA
YPTHLNNHM

SEQ ID NO: 102587 - protein, 9 aa, Homo sapiens
  misc_feature: Table A; Target 102587; HLA-B*54:01; ZNF560; ENSG00000198028; CTA
YPTHLNNHM

SEQ ID NO: 102588 - protein, 8 aa, Homo sapiens
  misc_feature: Table A; Target 102588; HLA-B*08:01; ZNF560; ENSG00000198028; CTA
YQLFKPSL

SEQ ID NO: 102589 - protein, 9 aa, Homo sapiens
  misc_feature: Table A; Target 102589; HLA-A*02:01; ZNF560; ENSG00000198028; CTA
YQLFKPSLI

SEQ ID NO: 102590 - protein, 9 aa, Homo sapiens
  misc_feature: Table A; Target 102590; HLA-A*02:03; ZNF560; ENSG00000198028; CTA
YQLFKPSLI

SEQ ID NO: 102591 - protein, 9 aa, Homo sapiens
  misc_feature: Table A; Target 102591; HLA-A*02:04; ZNF560; ENSG00000198028; CTA
YQLFKPSLI

SEQ ID NO: 102592 - protein, 9 aa, Homo sapiens
  misc_feature: Table A; Target 102592; HLA-A*30:01; ZNF560; ENSG00000198028; CTA
YQLFKPSLI

SEQ ID NO: 102593 - protein, 9 aa, Homo sapiens
  misc_feature: Table A; Target 102593; HLA-A*29:02; ZNF560; ENSG00000198028; CTA
YSDVMLENY

SEQ ID NO: 102594 - protein, 9 aa, Homo sapiens
  misc_feature: Table A; Target 102594; HLA-A*30:02; ZNF560; ENSG00000198028; CTA
YSDVMLENY

SEQ ID NO: 102595 - protein, 9 aa, Homo sapiens
  misc_feature: Table A; Target 102595; HLA-B*18:01; ZNF560; ENSG00000198028; CTA
YSDVMLENY

SEQ ID NO: 102596 - protein, 9 aa, Homo sapiens
  misc_feature: Table A; Target 102596; HLA-B*35:01; ZNF560; ENSG00000198028; CTA
YSDVMLENY

SEQ ID NO: 102597 - protein, 9 aa, Homo sapiens
  misc_feature: Table A; Target 102597; HLA-B*46:01; ZNF560; ENSG00000198028; CTA
YSDVMLENY

SEQ ID NO: 102598 - protein, 9 aa, Homo sapiens
  misc_feature: Table A; Target 102598; HLA-B*55:01; ZNF560; ENSG00000198028; CTA
YSDVMLENY

SEQ ID NO: 102599 - protein, 9 aa, Homo sapiens
  misc_feature: Table A; Target 102599; HLA-B*58:01; ZNF560; ENSG00000198028; CTA
YSDVMLENY

SEQ ID NO: 102600 - protein, 9 aa, Homo sapiens
  misc_feature: Table A; Target 102600; HLA-C*04:01; ZNF560; ENSG00000198028; CTA
YSDVMLENY

SEQ ID NO: 102601 - protein, 9 aa, Homo sapiens
  misc_feature: Table A; Target 102601; HLA-C*05:01; ZNF560; ENSG00000198028; CTA
YSDVMLENY

SEQ ID NO: 102602 - protein, 9 aa, Homo sapiens
  misc_feature: Table A; Target 102602; HLA-C*16:02; ZNF560; ENSG00000198028; CTA
YSDVMLENY

SEQ ID NO: 102603 - protein, 9 aa, Homo sapiens
  misc_feature: Table A; Target 102603; HLA-C*16:04; ZNF560; ENSG00000198028; CTA
YSDVMLENY

SEQ ID NO: 102604 - protein, 10 aa, Homo sapiens
  misc_feature: Table A; Target 102604; HLA-A*01:01; ZNF560; ENSG00000198028; CTA
YSDVMLENYK

SEQ ID NO: 102605 - protein, 10 aa, Homo sapiens
  misc_feature: Table A; Target 102605; HLA-B*27:02; ZNF560; ENSG00000198028; CTA
YSDVMLENYK

SEQ ID NO: 102606 - protein, 9 aa, Homo sapiens
  misc_feature: Table A; Target 102606; HLA-A*01:01; ZNF560,ZNF716; ENSG00000198028,ENSG00000182111; CTA,TAA
YRDVMLENY

SEQ ID NO: 102607 - protein, 8 aa, Homo sapiens
  misc_feature: Table A; Target 102607; HLA-C*14:02; ZNF716; ENSG00000182111; TAA
AFNCSSTL

SEQ ID NO: 102608 - protein, 8 aa, Homo sapiens
  misc_feature: Table A; Target 102608; HLA-C*14:02; ZNF716; ENSG00000182111; TAA
AFSLPSTF

SEQ ID NO: 102609 - protein, 10 aa, Homo sapiens
  misc_feature: Table A; Target 102609; HLA-A*29:02; ZNF716; ENSG00000182111; TAA
AFSLPSTFTY

SEQ ID NO: 102610 - protein, 10 aa, Homo sapiens
  misc_feature: Table A; Target 102610; HLA-A*30:02; ZNF716; ENSG00000182111; TAA
AFSLPSTFTY

SEQ ID NO: 102611 - protein, 8 aa, Homo sapiens
  misc_feature: Table A; Target 102611; HLA-C*14:02; ZNF716; ENSG00000182111; TAA
AFSLSSTL

SEQ ID NO: 102612 - protein, 11 aa, Homo sapiens
  misc_feature: Table A; Target 102612; HLA-A*03:02; ZNF716; ENSG00000182111; TAA
ATQNKTFQTHK

SEQ ID NO: 102613 - protein, 11 aa, Homo sapiens
  misc_feature: Table A; Target 102613; HLA-A*11:01; ZNF716; ENSG00000182111; TAA
ATQNKTFQTHK

SEQ ID NO: 102614 - protein, 10 aa, Homo sapiens
  misc_feature: Table A; Target 102614; HLA-A*11:01; ZNF716; ENSG00000182111; TAA
CGQEDLQVKK

SEQ ID NO: 102615 - protein, 9 aa, Homo sapiens
  misc_feature: Table A; Target 102615; HLA-A*02:07; ZNF716; ENSG00000182111; TAA
CLDHAQQNL

SEQ ID NO: 102616 - protein, 10 aa, Homo sapiens
  misc_feature: Table A; Target 102616; HLA-A*01:01; ZNF716; ENSG00000182111; TAA
CLDHAQQNLY

SEQ ID NO: 102617 - protein, 10 aa, Homo sapiens
  misc_feature: Table A; Target 102617; HLA-A*29:02; ZNF716; ENSG00000182111; TAA
CLDHAQQNLY

SEQ ID NO: 102618 - protein, 10 aa, Homo sapiens
  misc_feature: Table A; Target 102618; HLA-A*30:02; ZNF716; ENSG00000182111; TAA
CLDHAQQNLY

SEQ ID NO: 102619 - protein, 9 aa, Homo sapiens
  misc_feature: Table A; Target 102619; HLA-A*33:01; ZNF716; ENSG00000182111; TAA
DHAQQNLYR

SEQ ID NO: 102620 - protein, 11 aa, Homo sapiens
  misc_feature: Table A; Target 102620; HLA-A*25:01; ZNF716; ENSG00000182111; TAA
DIAIEFSLAEW

SEQ ID NO: 102621 - protein, 8 aa, Homo sapiens
  misc_feature: Table A; Target 102621; HLA-B*08:01; ZNF716; ENSG00000182111; TAA
DSLQKVIL

SEQ ID NO: 102622 - protein, 9 aa, Homo sapiens
  misc_feature: Table A; Target 102622; HLA-A*33:01; ZNF716; ENSG00000182111; TAA
DSLQKVILR

SEQ ID NO: 102623 - protein, 9 aa, Homo sapiens
  misc_feature: Table A; Target 102623; HLA-A*33:03; ZNF716; ENSG00000182111; TAA
DSLQKVILR

SEQ ID NO: 102624 - protein, 9 aa, Homo sapiens
  misc_feature: Table A; Target 102624; HLA-A*68:01; ZNF716; ENSG00000182111; TAA
DSLQKVILR

SEQ ID NO: 102625 - protein, 9 aa, Homo sapiens
  misc_feature: Table A; Target 102625; HLA-C*07:06; ZNF716; ENSG00000182111; TAA
DSLQKVILR

SEQ ID NO: 102626 - protein, 10 aa, Homo sapiens
  misc_feature: Table A; Target 102626; HLA-A*33:01; ZNF716; ENSG00000182111; TAA
DSLQKVILRR

SEQ ID NO: 102627 - protein, 10 aa, Homo sapiens
  misc_feature: Table A; Target 102627; HLA-A*25:01; ZNF716; ENSG00000182111; TAA
DVMLENYRNL

SEQ ID NO: 102628 - protein, 9 aa, Homo sapiens
  misc_feature: Table A; Target 102628; HLA-B*44:02; ZNF716; ENSG00000182111; TAA
EECDQTFKW

SEQ ID NO: 102629 - protein, 9 aa, Homo sapiens
  misc_feature: Table A; Target 102629; HLA-B*44:03; ZNF716; ENSG00000182111; TAA
EECDQTFKW

SEQ ID NO: 102630 - protein, 9 aa, Homo sapiens
  misc_feature: Table A; Target 102630; HLA-B*44:02; ZNF716; ENSG00000182111; TAA
EECGKAFSW

SEQ ID NO: 102631 - protein, 9 aa, Homo sapiens
  misc_feature: Table A; Target 102631; HLA-B*44:03; ZNF716; ENSG00000182111; TAA
EECGKAFSW

SEQ ID NO: 102632 - protein, 9 aa, Homo sapiens
  misc_feature: Table A; Target 102632; HLA-B*18:01; ZNF716; ENSG00000182111; TAA
EECGKAFTF

SEQ ID NO: 102633 - protein, 9 aa, Homo sapiens
  misc_feature: Table A; Target 102633; HLA-B*37:01; ZNF716; ENSG00000182111; TAA
EECGKAFTF

SEQ ID NO: 102634 - protein, 9 aa, Homo sapiens
  misc_feature: Table A; Target 102634; HLA-B*44:02; ZNF716; ENSG00000182111; TAA
EECGKAFTF

SEQ ID NO: 102635 - protein, 9 aa, Homo sapiens
  misc_feature: Table A; Target 102635; HLA-B*44:03; ZNF716; ENSG00000182111; TAA
EECGKAFTF

SEQ ID NO: 102636 - protein, 9 aa, Homo sapiens
  misc_feature: Table A; Target 102636; HLA-A*33:01; ZNF716; ENSG00000182111; TAA
EERGKVFSR

SEQ ID NO: 102637 - protein, 9 aa, Homo sapiens
  misc_feature: Table A; Target 102637; HLA-A*33:03; ZNF716; ENSG00000182111; TAA
EERGKVFSR

SEQ ID NO: 102638 - protein, 8 aa, Homo sapiens
  misc_feature: Table A; Target 102638; HLA-B*08:01; ZNF716; ENSG00000182111; TAA
EMVAKHPV

SEQ ID NO: 102639 - protein, 9 aa, Homo sapiens
  misc_feature: Table A; Target 102639; HLA-A*25:01; ZNF716; ENSG00000182111; TAA
ENYRNLVSL

SEQ ID NO: 102640 - protein, 9 aa, Homo sapiens
  misc_feature: Table A; Target 102640; HLA-A*33:01; ZNF716; ENSG00000182111; TAA
ENYRNLVSL

SEQ ID NO: 102641 - protein, 9 aa, Homo sapiens
  misc_feature: Table A; Target 102641; HLA-A*33:03; ZNF716; ENSG00000182111; TAA
ENYRNLVSL

SEQ ID NO: 102642 - protein, 8 aa, Homo sapiens
  misc_feature: Table A; Target 102642; HLA-B*08:01; ZNF716; ENSG00000182111; TAA
EQGIKDSL

SEQ ID NO: 102643 - protein, 9 aa, Homo sapiens
  misc_feature: Table A; Target 102643; HLA-B*38:01; ZNF716; ENSG00000182111; TAA
EQNKEPQNI

SEQ ID NO: 102644 - protein, 9 aa, Homo sapiens
  misc_feature: Table A; Target 102644; HLA-A*25:01; ZNF716; ENSG00000182111; TAA
EVHKGGYNY

SEQ ID NO: 102645 - protein, 9 aa, Homo sapiens
  misc_feature: Table A; Target 102645; HLA-A*26:01; ZNF716; ENSG00000182111; TAA
EVHKGGYNY

SEQ ID NO: 102646 - protein, 9 aa, Homo sapiens
  misc_feature: Table A; Target 102646; HLA-A*30:02; ZNF716; ENSG00000182111; TAA
EVHKGGYNY

SEQ ID NO: 102647 - protein, 9 aa, Homo sapiens
  misc_feature: Table A; Target 102647; HLA-B*35:01; ZNF716; ENSG00000182111; TAA
EVHKGGYNY

SEQ ID NO: 102648 - protein, 9 aa, Homo sapiens
  misc_feature: Table A; Target 102648; HLA-A*01:01; ZNF716; ENSG00000182111; TAA
FSLPSTFTY

SEQ ID NO: 102649 - protein, 9 aa, Homo sapiens
  misc_feature: Table A; Target 102649; HLA-A*23:01; ZNF716; ENSG00000182111; TAA
FSLPSTFTY

SEQ ID NO: 102650 - protein, 9 aa, Homo sapiens
  misc_feature: Table A; Target 102650; HLA-A*29:02; ZNF716; ENSG00000182111; TAA
FSLPSTFTY

SEQ ID NO: 102651 - protein, 9 aa, Homo sapiens
  misc_feature: Table A; Target 102651; HLA-A*30:02; ZNF716; ENSG00000182111; TAA
FSLPSTFTY

SEQ ID NO: 102652 - protein, 9 aa, Homo sapiens
  misc_feature: Table A; Target 102652; HLA-A*32:01; ZNF716; ENSG00000182111; TAA
FSLPSTFTY

SEQ ID NO: 102653 - protein, 9 aa, Homo sapiens
  misc_feature: Table A; Target 102653; HLA-B*15:03; ZNF716; ENSG00000182111; TAA
FSLPSTFTY

SEQ ID NO: 102654 - protein, 9 aa, Homo sapiens
  misc_feature: Table A; Target 102654; HLA-B*35:01; ZNF716; ENSG00000182111; TAA
FSLPSTFTY

SEQ ID NO: 102655 - protein, 9 aa, Homo sapiens
  misc_feature: Table A; Target 102655; HLA-B*46:01; ZNF716; ENSG00000182111; TAA
FSLPSTFTY

SEQ ID NO: 102656 - protein, 9 aa, Homo sapiens
  misc_feature: Table A; Target 102656; HLA-B*57:01; ZNF716; ENSG00000182111; TAA
FSLPSTFTY

SEQ ID NO: 102657 - protein, 9 aa, Homo sapiens
  misc_feature: Table A; Target 102657; HLA-B*58:01; ZNF716; ENSG00000182111; TAA
FSLPSTFTY

SEQ ID NO: 102658 - protein, 9 aa, Homo sapiens
  misc_feature: Table A; Target 102658; HLA-C*02:02; ZNF716; ENSG00000182111; TAA
FSLPSTFTY

SEQ ID NO: 102659 - protein, 9 aa, Homo sapiens
  misc_feature: Table A; Target 102659; HLA-C*03:04; ZNF716; ENSG00000182111; TAA
FSLPSTFTY

SEQ ID NO: 102660 - protein, 9 aa, Homo sapiens
  misc_feature: Table A; Target 102660; HLA-C*16:01; ZNF716; ENSG00000182111; TAA
FSLPSTFTY

SEQ ID NO: 102661 - protein, 9 aa, Homo sapiens
  misc_feature: Table A; Target 102661; HLA-C*16:04; ZNF716; ENSG00000182111; TAA
FSLPSTFTY

SEQ ID NO: 102662 - protein, 9 aa, Homo sapiens
  misc_feature: Table A; Target 102662; HLA-A*03:01; ZNF716; ENSG00000182111; TAA
FSLSSTLKK

SEQ ID NO: 102663 - protein, 9 aa, Homo sapiens
  misc_feature: Table A; Target 102663; HLA-A*11:01; ZNF716; ENSG00000182111; TAA
FSLSSTLKK

SEQ ID NO: 102664 - protein, 9 aa, Homo sapiens
  misc_feature: Table A; Target 102664; HLA-A*01:01; ZNF716; ENSG00000182111; TAA
FSRSTLTNY

SEQ ID NO: 102665 - protein, 9 aa, Homo sapiens
  misc_feature: Table A; Target 102665; HLA-A*30:02; ZNF716; ENSG00000182111; TAA
FSRSTLTNY

SEQ ID NO: 102666 - protein, 9 aa, Homo sapiens
  misc_feature: Table A; Target 102666; HLA-B*15:03; ZNF716; ENSG00000182111; TAA
FSRSTLTNY

SEQ ID NO: 102667 - protein, 9 aa, Homo sapiens
  misc_feature: Table A; Target 102667; HLA-B*46:01; ZNF716; ENSG00000182111; TAA
FSRSTLTNY

SEQ ID NO: 102668 - protein, 9 aa, Homo sapiens
  misc_feature: Table A; Target 102668; HLA-C*02:02; ZNF716; ENSG00000182111; TAA
FSRSTLTNY

SEQ ID NO: 102669 - protein, 10 aa, Homo sapiens
  misc_feature: Table A; Target 102669; HLA-B*44:02; ZNF716; ENSG00000182111; TAA
GECEVHKGGY

SEQ ID NO: 102670 - protein, 10 aa, Homo sapiens
  misc_feature: Table A; Target 102670; HLA-B*44:03; ZNF716; ENSG00000182111; TAA
GECEVHKGGY

SEQ ID NO: 102671 - protein, 9 aa, Homo sapiens
  misc_feature: Table A; Target 102671; HLA-A*02:03; ZNF716; ENSG00000182111; TAA
GIKDSLQKV

SEQ ID NO: 102672 - protein, 10 aa, Homo sapiens
  misc_feature: Table A; Target 102672; HLA-B*15:03; ZNF716; ENSG00000182111; TAA
GKAFSLPSTF

SEQ ID NO: 102673 - protein, 10 aa, Homo sapiens
  misc_feature: Table A; Target 102673; HLA-B*15:03; ZNF716; ENSG00000182111; TAA
GKAFSLSSTL

SEQ ID NO: 102674 - protein, 9 aa, Homo sapiens
  misc_feature: Table A; Target 102674; HLA-B*15:03; ZNF716; ENSG00000182111; TAA
GKVFSRSTL

SEQ ID NO: 102675 - protein, 10 aa, Homo sapiens
  misc_feature: Table A; Target 102675; HLA-B*07:02; ZNF716; ENSG00000182111; TAA
GPPGSREMGL

SEQ ID NO: 102676 - protein, 9 aa, Homo sapiens
  misc_feature: Table A; Target 102676; HLA-A*11:01; ZNF716; ENSG00000182111; TAA
GQEDLQVKK

SEQ ID NO: 102677 - protein, 9 aa, Homo sapiens
  misc_feature: Table A; Target 102677; HLA-B*27:05; ZNF716; ENSG00000182111; TAA
GQEDLQVKK

SEQ ID NO: 102678 - protein, 9 aa, Homo sapiens
  misc_feature: Table A; Target 102678; HLA-A*23:01; ZNF716; ENSG00000182111; TAA
GYNYVNQCL

SEQ ID NO: 102679 - protein, 9 aa, Homo sapiens
  misc_feature: Table A; Target 102679; HLA-A*24:02; ZNF716; ENSG00000182111; TAA
GYNYVNQCL

SEQ ID NO: 102680 - protein, 9 aa, Homo sapiens
  misc_feature: Table A; Target 102680; HLA-C*14:02; ZNF716; ENSG00000182111; TAA
GYNYVNQCL

SEQ ID NO: 102681 - protein, 9 aa, Homo sapiens
  misc_feature: Table A; Target 102681; HLA-A*01:01; ZNF716; ENSG00000182111; TAA
HTGEKPYKY

SEQ ID NO: 102682 - protein, 9 aa, Homo sapiens
  misc_feature: Table A; Target 102682; HLA-A*26:01; ZNF716; ENSG00000182111; TAA
HTGEKPYKY

SEQ ID NO: 102683 - protein, 9 aa, Homo sapiens
  misc_feature: Table A; Target 102683; HLA-A*29:02; ZNF716; ENSG00000182111; TAA
HTGEKPYKY

SEQ ID NO: 102684 - protein, 10 aa, Homo sapiens
  misc_feature: Table A; Target 102684; HLA-A*25:01; ZNF716; ENSG00000182111; TAA
IAIEFSLAEW

SEQ ID NO: 102685 - protein, 10 aa, Homo sapiens
  misc_feature: Table A; Target 102685; HLA-B*57:01; ZNF716; ENSG00000182111; TAA
IAIEFSLAEW

SEQ ID NO: 102686 - protein, 8 aa, Homo sapiens
  misc_feature: Table A; Target 102686; HLA-C*16:01; ZNF716; ENSG00000182111; TAA
IAVSKPDL

SEQ ID NO: 102687 - protein, 8 aa, Homo sapiens
  misc_feature: Table A; Target 102687; HLA-B*18:01; ZNF716; ENSG00000182111; TAA
IEFSLAEW

SEQ ID NO: 102688 - protein, 8 aa, Homo sapiens
  misc_feature: Table A; Target 102688; HLA-B*44:02; ZNF716; ENSG00000182111; TAA
IEFSLAEW

SEQ ID NO: 102689 - protein, 8 aa, Homo sapiens
  misc_feature: Table A; Target 102689; HLA-C*01:02; ZNF716; ENSG00000182111; TAA
IIHTGEKL

SEQ ID NO: 102690 - protein, 8 aa, Homo sapiens
  misc_feature: Table A; Target 102690; HLA-C*03:04; ZNF716; ENSG00000182111; TAA
IIHTGEKL

SEQ ID NO: 102691 - protein, 10 aa, Homo sapiens
  misc_feature: Table A; Target 102691; HLA-A*03:01; ZNF716; ENSG00000182111; TAA
IIHTGEKLYK

SEQ ID NO: 102692 - protein, 8 aa, Homo sapiens
  misc_feature: Table A; Target 102692; HLA-C*01:02; ZNF716; ENSG00000182111; TAA
IVHTGEKL

SEQ ID NO: 102693 - protein, 8 aa, Homo sapiens
  misc_feature: Table A; Target 102693; HLA-C*03:03; ZNF716; ENSG00000182111; TAA
IVHTGEKL

SEQ ID NO: 102694 - protein, 8 aa, Homo sapiens
  misc_feature: Table A; Target 102694; HLA-C*03:04; ZNF716; ENSG00000182111; TAA
IVHTGEKL

SEQ ID NO: 102695 - protein, 9 aa, Homo sapiens
  misc_feature: Table A; Target 102695; HLA-A*29:02; ZNF716; ENSG00000182111; TAA
IVHTGEKLY

SEQ ID NO: 102696 - protein, 9 aa, Homo sapiens
  misc_feature: Table A; Target 102696; HLA-A*30:02; ZNF716; ENSG00000182111; TAA
IVHTGEKLY

SEQ ID NO: 102697 - protein, 9 aa, Homo sapiens
  misc_feature: Table A; Target 102697; HLA-B*57:01; ZNF716; ENSG00000182111; TAA
IVHTGEKLY

SEQ ID NO: 102698 - protein, 9 aa, Homo sapiens
  misc_feature: Table A; Target 102698; HLA-B*58:01; ZNF716; ENSG00000182111; TAA
IVHTGEKLY

SEQ ID NO: 102699 - protein, 9 aa, Homo sapiens
  misc_feature: Table A; Target 102699; HLA-B*58:01; ZNF716; ENSG00000182111; TAA
KAFNCSSTL

SEQ ID NO: 102700 - protein, 9 aa, Homo sapiens
  misc_feature: Table A; Target 102700; HLA-C*03:03; ZNF716; ENSG00000182111; TAA
KAFNCSSTL

SEQ ID NO: 102701 - protein, 9 aa, Homo sapiens
  misc_feature: Table A; Target 102701; HLA-C*03:04; ZNF716; ENSG00000182111; TAA
KAFNCSSTL

SEQ ID NO: 102702 - protein, 9 aa, Homo sapiens
  misc_feature: Table A; Target 102702; HLA-C*12:03; ZNF716; ENSG00000182111; TAA
KAFNCSSTL

SEQ ID NO: 102703 - protein, 9 aa, Homo sapiens
  misc_feature: Table A; Target 102703; HLA-C*16:01; ZNF716; ENSG00000182111; TAA
KAFNCSSTL

SEQ ID NO: 102704 - protein, 9 aa, Homo sapiens
  misc_feature: Table A; Target 102704; HLA-C*16:02; ZNF716; ENSG00000182111; TAA
KAFNCSSTL

SEQ ID NO: 102705 - protein, 9 aa, Homo sapiens
  misc_feature: Table A; Target 102705; HLA-A*23:01; ZNF716; ENSG00000182111; TAA
KAFSLPSTF

SEQ ID NO: 102706 - protein, 9 aa, Homo sapiens
  misc_feature: Table A; Target 102706; HLA-A*30:02; ZNF716; ENSG00000182111; TAA
KAFSLPSTF

SEQ ID NO: 102707 - protein, 9 aa, Homo sapiens
  misc_feature: Table A; Target 102707; HLA-A*32:01; ZNF716; ENSG00000182111; TAA
KAFSLPSTF

SEQ ID NO: 102708 - protein, 9 aa, Homo sapiens
  misc_feature: Table A; Target 102708; HLA-B*15:01; ZNF716; ENSG00000182111; TAA
KAFSLPSTF

SEQ ID NO: 102709 - protein, 9 aa, Homo sapiens
  misc_feature: Table A; Target 102709; HLA-B*15:03; ZNF716; ENSG00000182111; TAA
KAFSLPSTF

SEQ ID NO: 102710 - protein, 9 aa, Homo sapiens
  misc_feature: Table A; Target 102710; HLA-B*46:01; ZNF716; ENSG00000182111; TAA
KAFSLPSTF

SEQ ID NO: 102711 - protein, 9 aa, Homo sapiens
  misc_feature: Table A; Target 102711; HLA-B*57:01; ZNF716; ENSG00000182111; TAA
KAFSLPSTF

SEQ ID NO: 102712 - protein, 9 aa, Homo sapiens
  misc_feature: Table A; Target 102712; HLA-B*58:01; ZNF716; ENSG00000182111; TAA
KAFSLPSTF

SEQ ID NO: 102713 - protein, 9 aa, Homo sapiens
  misc_feature: Table A; Target 102713; HLA-C*02:02; ZNF716; ENSG00000182111; TAA
KAFSLPSTF

SEQ ID NO: 102714 - protein, 9 aa, Homo sapiens
  misc_feature: Table A; Target 102714; HLA-C*12:03; ZNF716; ENSG00000182111; TAA
KAFSLPSTF

SEQ ID NO: 102715 - protein, 9 aa, Homo sapiens
  misc_feature: Table A; Target 102715; HLA-C*16:02; ZNF716; ENSG00000182111; TAA
KAFSLPSTF

SEQ ID NO: 102716 - protein, 9 aa, Homo sapiens
  misc_feature: Table A; Target 102716; HLA-C*16:04; ZNF716; ENSG00000182111; TAA
KAFSLPSTF

SEQ ID NO: 102717 - protein, 11 aa, Homo sapiens
  misc_feature: Table A; Target 102717; HLA-A*29:02; ZNF716; ENSG00000182111; TAA
KAFSLPSTFTY

SEQ ID NO: 102718 - protein, 11 aa, Homo sapiens
  misc_feature: Table A; Target 102718; HLA-A*30:02; ZNF716; ENSG00000182111; TAA
KAFSLPSTFTY

SEQ ID NO: 102719 - protein, 11 aa, Homo sapiens
  misc_feature: Table A; Target 102719; HLA-B*57:01; ZNF716; ENSG00000182111; TAA
KAFSLPSTFTY

SEQ ID NO: 102720 - protein, 11 aa, Homo sapiens
  misc_feature: Table A; Target 102720; HLA-C*02:02; ZNF716; ENSG00000182111; TAA
KAFSLPSTFTY

SEQ ID NO: 102721 - protein, 11 aa, Homo sapiens
  misc_feature: Table A; Target 102721; HLA-C*16:04; ZNF716; ENSG00000182111; TAA
KAFSLPSTFTY

SEQ ID NO: 102722 - protein, 9 aa, Homo sapiens
  misc_feature: Table A; Target 102722; HLA-A*30:01; ZNF716; ENSG00000182111; TAA
KAFSLSSTL

SEQ ID NO: 102723 - protein, 9 aa, Homo sapiens
  misc_feature: Table A; Target 102723; HLA-A*32:01; ZNF716; ENSG00000182111; TAA
KAFSLSSTL

SEQ ID NO: 102724 - protein, 9 aa, Homo sapiens
  misc_feature: Table A; Target 102724; HLA-B*07:02; ZNF716; ENSG00000182111; TAA
KAFSLSSTL

SEQ ID NO: 102725 - protein, 9 aa, Homo sapiens
  misc_feature: Table A; Target 102725; HLA-B*15:01; ZNF716; ENSG00000182111; TAA
KAFSLSSTL

SEQ ID NO: 102726 - protein, 9 aa, Homo sapiens
  misc_feature: Table A; Target 102726; HLA-B*15:03; ZNF716; ENSG00000182111; TAA
KAFSLSSTL

SEQ ID NO: 102727 - protein, 9 aa, Homo sapiens
  misc_feature: Table A; Target 102727; HLA-B*40:01; ZNF716; ENSG00000182111; TAA
KAFSLSSTL

SEQ ID NO: 102728 - protein, 9 aa, Homo sapiens
  misc_feature: Table A; Target 102728; HLA-B*46:01; ZNF716; ENSG00000182111; TAA
KAFSLSSTL

SEQ ID NO: 102729 - protein, 9 aa, Homo sapiens
  misc_feature: Table A; Target 102729; HLA-B*58:01; ZNF716; ENSG00000182111; TAA
KAFSLSSTL

SEQ ID NO: 102730 - protein, 9 aa, Homo sapiens
  misc_feature: Table A; Target 102730; HLA-C*01:02; ZNF716; ENSG00000182111; TAA
KAFSLSSTL

SEQ ID NO: 102731 - protein, 9 aa, Homo sapiens
  misc_feature: Table A; Target 102731; HLA-C*02:02; ZNF716; ENSG00000182111; TAA
KAFSLSSTL

SEQ ID NO: 102732 - protein, 9 aa, Homo sapiens
  misc_feature: Table A; Target 102732; HLA-C*03:03; ZNF716; ENSG00000182111; TAA
KAFSLSSTL

SEQ ID NO: 102733 - protein, 9 aa, Homo sapiens
  misc_feature: Table A; Target 102733; HLA-C*03:04; ZNF716; ENSG00000182111; TAA
KAFSLSSTL

SEQ ID NO: 102734 - protein, 9 aa, Homo sapiens
  misc_feature: Table A; Target 102734; HLA-C*05:01; ZNF716; ENSG00000182111; TAA
KAFSLSSTL

SEQ ID NO: 102735 - protein, 9 aa, Homo sapiens
  misc_feature: Table A; Target 102735; HLA-C*07:02; ZNF716; ENSG00000182111; TAA
KAFSLSSTL

SEQ ID NO: 102736 - protein, 9 aa, Homo sapiens
  misc_feature: Table A; Target 102736; HLA-C*12:03; ZNF716; ENSG00000182111; TAA
KAFSLSSTL

SEQ ID NO: 102737 - protein, 9 aa, Homo sapiens
  misc_feature: Table A; Target 102737; HLA-C*16:02; ZNF716; ENSG00000182111; TAA
KAFSLSSTL

SEQ ID NO: 102738 - protein, 9 aa, Homo sapiens
  misc_feature: Table A; Target 102738; HLA-C*16:04; ZNF716; ENSG00000182111; TAA
KAFSLSSTL

SEQ ID NO: 102739 - protein, 10 aa, Homo sapiens
  misc_feature: Table A; Target 102739; HLA-A*03:01; ZNF716; ENSG00000182111; TAA
KAFSLSSTLK

SEQ ID NO: 102740 - protein, 10 aa, Homo sapiens
  misc_feature: Table A; Target 102740; HLA-A*03:02; ZNF716; ENSG00000182111; TAA
KAFSLSSTLK

SEQ ID NO: 102741 - protein, 10 aa, Homo sapiens
  misc_feature: Table A; Target 102741; HLA-A*11:01; ZNF716; ENSG00000182111; TAA
KAFSLSSTLK

SEQ ID NO: 102742 - protein, 11 aa, Homo sapiens
  misc_feature: Table A; Target 102742; HLA-A*03:01; ZNF716; ENSG00000182111; TAA
KAFSLSSTLKK

SEQ ID NO: 102743 - protein, 9 aa, Homo sapiens
  misc_feature: Table A; Target 102743; HLA-A*32:01; ZNF716; ENSG00000182111; TAA
KAFSRSSTL

SEQ ID NO: 102744 - protein, 9 aa, Homo sapiens
  misc_feature: Table A; Target 102744; HLA-B*07:02; ZNF716; ENSG00000182111; TAA
KAFSRSSTL

SEQ ID NO: 102745 - protein, 9 aa, Homo sapiens
  misc_feature: Table A; Target 102745; HLA-B*08:01; ZNF716; ENSG00000182111; TAA
KAFSRSSTL

SEQ ID NO: 102746 - protein, 9 aa, Homo sapiens
  misc_feature: Table A; Target 102746; HLA-B*15:03; ZNF716; ENSG00000182111; TAA
KAFSRSSTL

SEQ ID NO: 102747 - protein, 9 aa, Homo sapiens
  misc_feature: Table A; Target 102747; HLA-B*37:01; ZNF716; ENSG00000182111; TAA
KAFSRSSTL

SEQ ID NO: 102748 - protein, 9 aa, Homo sapiens
  misc_feature: Table A; Target 102748; HLA-B*58:01; ZNF716; ENSG00000182111; TAA
KAFSRSSTL

SEQ ID NO: 102749 - protein, 9 aa, Homo sapiens
  misc_feature: Table A; Target 102749; HLA-C*02:02; ZNF716; ENSG00000182111; TAA
KAFSRSSTL

SEQ ID NO: 102750 - protein, 9 aa, Homo sapiens
  misc_feature: Table A; Target 102750; HLA-C*03:03; ZNF716; ENSG00000182111; TAA
KAFSRSSTL

SEQ ID NO: 102751 - protein, 9 aa, Homo sapiens
  misc_feature: Table A; Target 102751; HLA-C*03:04; ZNF716; ENSG00000182111; TAA
KAFSRSSTL

SEQ ID NO: 102752 - protein, 9 aa, Homo sapiens
  misc_feature: Table A; Target 102752; HLA-C*07:02; ZNF716; ENSG00000182111; TAA
KAFSRSSTL

SEQ ID NO: 102753 - protein, 9 aa, Homo sapiens
  misc_feature: Table A; Target 102753; HLA-C*12:03; ZNF716; ENSG00000182111; TAA
KAFSRSSTL

SEQ ID NO: 102754 - protein, 9 aa, Homo sapiens
  misc_feature: Table A; Target 102754; HLA-C*16:01; ZNF716; ENSG00000182111; TAA
KAFSRSSTL

SEQ ID NO: 102755 - protein, 9 aa, Homo sapiens
  misc_feature: Table A; Target 102755; HLA-C*16:02; ZNF716; ENSG00000182111; TAA
KAFSRSSTL

SEQ ID NO: 102756 - protein, 9 aa, Homo sapiens
  misc_feature: Table A; Target 102756; HLA-C*03:04; ZNF716; ENSG00000182111; TAA
KAFSWSASL

SEQ ID NO: 102757 - protein, 11 aa, Homo sapiens
  misc_feature: Table A; Target 102757; HLA-A*03:01; ZNF716; ENSG00000182111; TAA
KAFSWSASLTK

SEQ ID NO: 102758 - protein, 9 aa, Homo sapiens
  misc_feature: Table A; Target 102758; HLA-B*37:01; ZNF716; ENSG00000182111; TAA
KDSLQKVIL

SEQ ID NO: 102759 - protein, 9 aa, Homo sapiens
  misc_feature: Table A; Target 102759; HLA-B*37:01; ZNF716; ENSG00000182111; TAA
KECGKAFTF

SEQ ID NO: 102760 - protein, 9 aa, Homo sapiens
  misc_feature: Table A; Target 102760; HLA-B*58:01; ZNF716; ENSG00000182111; TAA
KIIHTGEKL

SEQ ID NO: 102761 - protein, 11 aa, Homo sapiens
  misc_feature: Table A; Target 102761; HLA-A*03:01; ZNF716; ENSG00000182111; TAA
KIIHTGEKLYK

SEQ ID NO: 102762 - protein, 8 aa, Homo sapiens
  misc_feature: Table A; Target 102762; HLA-B*07:02; ZNF716; ENSG00000182111; TAA
KPDLITCL

SEQ ID NO: 102763 - protein, 9 aa, Homo sapiens
  misc_feature: Table A; Target 102763; HLA-B*58:01; ZNF716; ENSG00000182111; TAA
KSFNCSSTL

SEQ ID NO: 102764 - protein, 11 aa, Homo sapiens
  misc_feature: Table A; Target 102764; HLA-A*31:01; ZNF716; ENSG00000182111; TAA
KVFGKFSNSNR

SEQ ID NO: 102765 - protein, 11 aa, Homo sapiens
  misc_feature: Table A; Target 102765; HLA-A*29:02; ZNF716; ENSG00000182111; TAA
KVFSRSTLTNY

SEQ ID NO: 102766 - protein, 11 aa, Homo sapiens
  misc_feature: Table A; Target 102766; HLA-A*30:02; ZNF716; ENSG00000182111; TAA
KVFSRSTLTNY

SEQ ID NO: 102767 - protein, 11 aa, Homo sapiens
  misc_feature: Table A; Target 102767; HLA-A*32:01; ZNF716; ENSG00000182111; TAA
KVFSRSTLTNY

SEQ ID NO: 102768 - protein, 8 aa, Homo sapiens
  misc_feature: Table A; Target 102768; HLA-B*37:01; ZNF716; ENSG00000182111; TAA
LDHAQQNL

SEQ ID NO: 102769 - protein, 9 aa, Homo sapiens
  misc_feature: Table A; Target 102769; HLA-A*30:02; ZNF716; ENSG00000182111; TAA
LDHAQQNLY

SEQ ID NO: 102770 - protein, 9 aa, Homo sapiens
  misc_feature: Table A; Target 102770; HLA-B*18:01; ZNF716; ENSG00000182111; TAA
LDHAQQNLY

SEQ ID NO: 102771 - protein, 9 aa, Homo sapiens
  misc_feature: Table A; Target 102771; HLA-C*07:01; ZNF716; ENSG00000182111; TAA
LDHAQQNLY

SEQ ID NO: 102772 - protein, 9 aa, Homo sapiens
  misc_feature: Table A; Target 102772; HLA-C*07:04; ZNF716; ENSG00000182111; TAA
LDHAQQNLY

SEQ ID NO: 102773 - protein, 9 aa, Homo sapiens
  misc_feature: Table A; Target 102773; HLA-C*16:02; ZNF716; ENSG00000182111; TAA
LDHAQQNLY

SEQ ID NO: 102774 - protein, 9 aa, Homo sapiens
  misc_feature: Table A; Target 102774; HLA-C*16:04; ZNF716; ENSG00000182111; TAA
LDHAQQNLY

SEQ ID NO: 102775 - protein, 10 aa, Homo sapiens
  misc_feature: Table A; Target 102775; HLA-A*33:01; ZNF716; ENSG00000182111; TAA
LNQHQIIHTR

SEQ ID NO: 102776 - protein, 9 aa, Homo sapiens
  misc_feature: Table A; Target 102776; HLA-B*57:01; ZNF716; ENSG00000182111; TAA
LSATQNKTF

SEQ ID NO: 102777 - protein, 9 aa, Homo sapiens
  misc_feature: Table A; Target 102777; HLA-B*58:01; ZNF716; ENSG00000182111; TAA
LSATQNKTF

SEQ ID NO: 102778 - protein, 9 aa, Homo sapiens
  misc_feature: Table A; Target 102778; HLA-C*02:02; ZNF716; ENSG00000182111; TAA
LSATQNKTF

SEQ ID NO: 102779 - protein, 9 aa, Homo sapiens
  misc_feature: Table A; Target 102779; HLA-C*16:01; ZNF716; ENSG00000182111; TAA
LSATQNKTF

SEQ ID NO: 102780 - protein, 9 aa, Homo sapiens
  misc_feature: Table A; Target 102780; HLA-C*16:02; ZNF716; ENSG00000182111; TAA
LSATQNKTF

SEQ ID NO: 102781 - protein, 10 aa, Homo sapiens
  misc_feature: Table A; Target 102781; HLA-B*57:01; ZNF716; ENSG00000182111; TAA
LTFRDIAIEF

SEQ ID NO: 102782 - protein, 10 aa, Homo sapiens
  misc_feature: Table A; Target 102782; HLA-A*03:01; ZNF716; ENSG00000182111; TAA
LVSLGIAVSK

SEQ ID NO: 102783 - protein, 10 aa, Homo sapiens
  misc_feature: Table A; Target 102783; HLA-A*03:02; ZNF716; ENSG00000182111; TAA
LVSLGIAVSK

SEQ ID NO: 102784 - protein, 10 aa, Homo sapiens
  misc_feature: Table A; Target 102784; HLA-A*11:01; ZNF716; ENSG00000182111; TAA
LVSLGIAVSK

SEQ ID NO: 102785 - protein, 9 aa, Homo sapiens
  misc_feature: Table A; Target 102785; HLA-B*18:01; ZNF716; ENSG00000182111; TAA
NEMVAKHPV

SEQ ID NO: 102786 - protein, 9 aa, Homo sapiens
  misc_feature: Table A; Target 102786; HLA-B*37:01; ZNF716; ENSG00000182111; TAA
NEMVAKHPV

SEQ ID NO: 102787 - protein, 9 aa, Homo sapiens
  misc_feature: Table A; Target 102787; HLA-B*49:01; ZNF716; ENSG00000182111; TAA
NEMVAKHPV

SEQ ID NO: 102788 - protein, 9 aa, Homo sapiens
  misc_feature: Table A; Target 102788; HLA-A*02:01; ZNF716; ENSG00000182111; TAA
NLVSLGIAV

SEQ ID NO: 102789 - protein, 9 aa, Homo sapiens
  misc_feature: Table A; Target 102789; HLA-B*13:02; ZNF716; ENSG00000182111; TAA
NLVSLGIAV

SEQ ID NO: 102790 - protein, 9 aa, Homo sapiens
  misc_feature: Table A; Target 102790; HLA-A*31:01; ZNF716; ENSG00000182111; TAA
NQHQIIHTR

SEQ ID NO: 102791 - protein, 9 aa, Homo sapiens
  misc_feature: Table A; Target 102791; HLA-A*33:01; ZNF716; ENSG00000182111; TAA
NQHQIIHTR

SEQ ID NO: 102792 - protein, 9 aa, Homo sapiens
  misc_feature: Table A; Target 102792; HLA-A*33:03; ZNF716; ENSG00000182111; TAA
NQHQIIHTR

SEQ ID NO: 102793 - protein, 9 aa, Homo sapiens
  misc_feature: Table A; Target 102793; HLA-A*68:01; ZNF716; ENSG00000182111; TAA
NQHQIIHTR

SEQ ID NO: 102794 - protein, 9 aa, Homo sapiens
  misc_feature: Table A; Target 102794; HLA-C*07:06; ZNF716; ENSG00000182111; TAA
NQHQIIHTR

SEQ ID NO: 102795 - protein, 9 aa, Homo sapiens
  misc_feature: Table A; Target 102795; HLA-B*44:03; ZNF716; ENSG00000182111; TAA
QEDLQVKKC

SEQ ID NO: 102796 - protein, 9 aa, Homo sapiens
  misc_feature: Table A; Target 102796; HLA-B*49:01; ZNF716; ENSG00000182111; TAA
QEDLQVKKC

SEQ ID NO: 102797 - protein, 10 aa, Homo sapiens
  misc_feature: Table A; Target 102797; HLA-A*33:01; ZNF716; ENSG00000182111; TAA
QNKEPQNIKR

SEQ ID NO: 102798 - protein, 10 aa, Homo sapiens
  misc_feature: Table A; Target 102798; HLA-A*33:03; ZNF716; ENSG00000182111; TAA
QNKEPQNIKR

SEQ ID NO: 102799 - protein, 9 aa, Homo sapiens
  misc_feature: Table A; Target 102799; HLA-A*03:01; ZNF716; ENSG00000182111; TAA
RLNQHQIIH

SEQ ID NO: 102800 - protein, 11 aa, Homo sapiens
  misc_feature: Table A; Target 102800; HLA-A*31:01; ZNF716; ENSG00000182111; TAA
RLNQHQIIHTR

SEQ ID NO: 102801 - protein, 10 aa, Homo sapiens
  misc_feature: Table A; Target 102801; HLA-B*07:02; ZNF716; ENSG00000182111; TAA
RPGPPGSREM

SEQ ID NO: 102802 - protein, 10 aa, Homo sapiens
  misc_feature: Table A; Target 102802; HLA-C*07:02; ZNF716; ENSG00000182111; TAA
RPGPPGSREM

SEQ ID NO: 102803 - protein, 9 aa, Homo sapiens
  misc_feature: Table A; Target 102803; HLA-A*03:02; ZNF716; ENSG00000182111; TAA
RSSTLTNHK

SEQ ID NO: 102804 - protein, 8 aa, Homo sapiens
  misc_feature: Table A; Target 102804; HLA-B*58:01; ZNF716; ENSG00000182111; TAA
SATQNKTF

SEQ ID NO: 102805 - protein, 8 aa, Homo sapiens
  misc_feature: Table A; Target 102805; HLA-C*16:01; ZNF716; ENSG00000182111; TAA
SATQNKTF

SEQ ID NO: 102806 - protein, 8 aa, Homo sapiens
  misc_feature: Table A; Target 102806; HLA-C*16:02; ZNF716; ENSG00000182111; TAA
SATQNKTF

SEQ ID NO: 102807 - protein, 9 aa, Homo sapiens
  misc_feature: Table A; Target 102807; HLA-A*30:01; ZNF716; ENSG00000182111; TAA
SEQGIKDSL

SEQ ID NO: 102808 - protein, 9 aa, Homo sapiens
  misc_feature: Table A; Target 102808; HLA-B*27:02; ZNF716; ENSG00000182111; TAA
SEQGIKDSL

SEQ ID NO: 102809 - protein, 9 aa, Homo sapiens
  misc_feature: Table A; Target 102809; HLA-B*37:01; ZNF716; ENSG00000182111; TAA
SEQGIKDSL

SEQ ID NO: 102810 - protein, 9 aa, Homo sapiens
  misc_feature: Table A; Target 102810; HLA-B*40:01; ZNF716; ENSG00000182111; TAA
SEQGIKDSL

SEQ ID NO: 102811 - protein, 9 aa, Homo sapiens
  misc_feature: Table A; Target 102811; HLA-B*40:02; ZNF716; ENSG00000182111; TAA
SEQGIKDSL

SEQ ID NO: 102812 - protein, 9 aa, Homo sapiens
  misc_feature: Table A; Target 102812; HLA-B*44:02; ZNF716; ENSG00000182111; TAA
SEQGIKDSL

SEQ ID NO: 102813 - protein, 9 aa, Homo sapiens
  misc_feature: Table A; Target 102813; HLA-B*44:03; ZNF716; ENSG00000182111; TAA
SEQGIKDSL

SEQ ID NO: 102814 - protein, 9 aa, Homo sapiens
  misc_feature: Table A; Target 102814; HLA-C*16:04; ZNF716; ENSG00000182111; TAA
SEQGIKDSL

SEQ ID NO: 102815 - protein, 8 aa, Homo sapiens
  misc_feature: Table A; Target 102815; HLA-C*14:02; ZNF716; ENSG00000182111; TAA
SFNCSSTL

SEQ ID NO: 102816 - protein, 9 aa, Homo sapiens
  misc_feature: Table A; Target 102816; HLA-B*15:03; ZNF716; ENSG00000182111; TAA
SKPDLITCL

SEQ ID NO: 102817 - protein, 8 aa, Homo sapiens
  misc_feature: Table A; Target 102817; HLA-A*03:02; ZNF716; ENSG00000182111; TAA
SLGIAVSK

SEQ ID NO: 102818 - protein, 8 aa, Homo sapiens
  misc_feature: Table A; Target 102818; HLA-A*29:02; ZNF716; ENSG00000182111; TAA
SLPSTFTY

SEQ ID NO: 102819 - protein, 9 aa, Homo sapiens
  misc_feature: Table A; Target 102819; HLA-A*03:01; ZNF716; ENSG00000182111; TAA
SLPSTFTYH

SEQ ID NO: 102820 - protein, 9 aa, Homo sapiens
  misc_feature: Table A; Target 102820; HLA-A*02:04; ZNF716; ENSG00000182111; TAA
SLQKVILRR

SEQ ID NO: 102821 - protein, 9 aa, Homo sapiens
  misc_feature: Table A; Target 102821; HLA-A*03:01; ZNF716; ENSG00000182111; TAA
SLQKVILRR

SEQ ID NO: 102822 - protein, 9 aa, Homo sapiens
  misc_feature: Table A; Target 102822; HLA-A*31:01; ZNF716; ENSG00000182111; TAA
SLQKVILRR

SEQ ID NO: 102823 - protein, 9 aa, Homo sapiens
  misc_feature: Table A; Target 102823; HLA-A*33:01; ZNF716; ENSG00000182111; TAA
SLQKVILRR

SEQ ID NO: 102824 - protein, 9 aa, Homo sapiens
  misc_feature: Table A; Target 102824; HLA-B*27:05; ZNF716; ENSG00000182111; TAA
SRSSTLTNH

SEQ ID NO: 102825 - protein, 9 aa, Homo sapiens
  misc_feature: Table A; Target 102825; HLA-B*27:05; ZNF716; ENSG00000182111; TAA
SRSTLTNYK

SEQ ID NO: 102826 - protein, 9 aa, Homo sapiens
  misc_feature: Table A; Target 102826; HLA-A*03:02; ZNF716; ENSG00000182111; TAA
SVGECEVHK

SEQ ID NO: 102827 - protein, 9 aa, Homo sapiens
  misc_feature: Table A; Target 102827; HLA-A*11:01; ZNF716; ENSG00000182111; TAA
SVGECEVHK

SEQ ID NO: 102828 - protein, 9 aa, Homo sapiens
  misc_feature: Table A; Target 102828; HLA-A*23:01; ZNF716; ENSG00000182111; TAA
TFRDIAIEF

SEQ ID NO: 102829 - protein, 9 aa, Homo sapiens
  misc_feature: Table A; Target 102829; HLA-A*24:02; ZNF716; ENSG00000182111; TAA
TFRDIAIEF

SEQ ID NO: 102830 - protein, 9 aa, Homo sapiens
  misc_feature: Table A; Target 102830; HLA-A*29:02; ZNF716; ENSG00000182111; TAA
TFRDIAIEF

SEQ ID NO: 102831 - protein, 9 aa, Homo sapiens
  misc_feature: Table A; Target 102831; HLA-C*14:02; ZNF716; ENSG00000182111; TAA
TFRDIAIEF

SEQ ID NO: 102832 - protein, 10 aa, Homo sapiens
  misc_feature: Table A; Target 102832; HLA-B*38:01; ZNF716; ENSG00000182111; TAA
TQDLQSEQGI

SEQ ID NO: 102833 - protein, 9 aa, Homo sapiens
  misc_feature: Table A; Target 102833; HLA-A*32:01; ZNF716; ENSG00000182111; TAA
TQNKTFQTH

SEQ ID NO: 102834 - protein, 10 aa, Homo sapiens
  misc_feature: Table A; Target 102834; HLA-A*03:02; ZNF716; ENSG00000182111; TAA
TQNKTFQTHK

SEQ ID NO: 102835 - protein, 8 aa, Homo sapiens
  misc_feature: Table A; Target 102835; HLA-C*12:03; ZNF716; ENSG00000182111; TAA
VAKHPVTC

SEQ ID NO: 102836 - protein, 10 aa, Homo sapiens
  misc_feature: Table A; Target 102836; HLA-A*29:02; ZNF716; ENSG00000182111; TAA
VFSRSTLTNY

SEQ ID NO: 102837 - protein, 10 aa, Homo sapiens
  misc_feature: Table A; Target 102837; HLA-A*30:02; ZNF716; ENSG00000182111; TAA
VFSRSTLTNY

SEQ ID NO: 102838 - protein, 9 aa, Homo sapiens
  misc_feature: Table A; Target 102838; HLA-A*02:04; ZNF716; ENSG00000182111; TAA
VMLENYRNL

SEQ ID NO: 102839 - protein, 9 aa, Homo sapiens
  misc_feature: Table A; Target 102839; HLA-A*03:01; ZNF716; ENSG00000182111; TAA
VSLGIAVSK

SEQ ID NO: 102840 - protein, 9 aa, Homo sapiens
  misc_feature: Table A; Target 102840; HLA-A*03:02; ZNF716; ENSG00000182111; TAA
VSLGIAVSK

SEQ ID NO: 102841 - protein, 9 aa, Homo sapiens
  misc_feature: Table A; Target 102841; HLA-A*11:01; ZNF716; ENSG00000182111; TAA
VSLGIAVSK

SEQ ID NO: 102842 - protein, 9 aa, Homo sapiens
  misc_feature: Table A; Target 102842; HLA-C*07:06; ZNF716; ENSG00000182111; TAA
VSLGIAVSK

SEQ ID NO: 102843 - protein, 9 aa, Homo sapiens
  misc_feature (1)..(9): Table A1; Target 1; HLA-A*01:01; MAGA3; ENSG00000221867; Melanoma-associated antigen 3 (Antigen MZ2-D) (Cancer/testis antigen 1.3) (CT1.3) (MAGE-3 antigen)
EVDPIGHLY

SEQ ID NO: 102844 - protein, 9 aa, Homo sapiens
  misc_feature (1)..(9): Table A1; Target 2; HLA-A*29:02; MAGA3; ENSG00000221867; Melanoma-associated antigen 3 (Antigen MZ2-D) (Cancer/testis antigen 1.3) (CT1.3) (MAGE-3 antigen)
FVQENYLEY

SEQ ID NO: 102845 - protein, 9 aa, Homo sapiens
  misc_feature (1)..(9): Table A1; Target 3; HLA-A*29:02; MAGA3; ENSG00000221867; Melanoma-associated antigen 3 (Antigen MZ2-D) (Cancer/testis antigen 1.3) (CT1.3) (MAGE-3 antigen)
LVHFLLLKY

SEQ ID NO: 102846 - protein, 10 aa, Homo sapiens
  misc_feature (1)..(10): Table A1; Target 4; HLA-B*44:03; MAGA3; ENSG00000221867; Melanoma-associated antigen 3 (Antigen MZ2-D) (Cancer/testis antigen 1.3) (CT1.3) (MAGE-3 antigen)
MEVDPIGHLY

SEQ ID NO: 102847 - protein, 9 aa, Homo sapiens
  misc_feature (1)..(9): Table A1; Target 5; HLA-B*35:01; DSCR6; ENSG00000183145; Protein ripply3 (Down syndrome critical region protein 6)
FPVQATIDF

SEQ ID NO: 102848 - protein, 9 aa, Homo sapiens
  misc_feature (1)..(9): Table A1; Target 6; HLA-A*26:01; MAGA3; ENSG00000221867; Melanoma-associated antigen 3 (Antigen MZ2-D) (Cancer/testis antigen 1.3) (CT1.3) (MAGE-3 antigen)
EVDPIGHLY

SEQ ID NO: 102849 - protein, 9 aa, Homo sapiens
  misc_feature (1)..(9): Table A1; Target 7; HLA-A*26:01; MAGA6; ENSG00000197172; Melanoma-associated antigen 6 (Cancer/testis antigen 1.6) (CT1.6) (MAGE-6 antigen) (MAGE3B antigen)
EVDPIGHVY

SEQ ID NO: 102850 - protein, 9 aa, Homo sapiens
  misc_feature (1)..(9): Table A1; Target 8; HLA-A*29:02; MAGA6; ENSG00000197172; Melanoma-associated antigen 6 (Cancer/testis antigen 1.6) (CT1.6) (MAGE-6 antigen) (MAGE3B antigen)
FVQENYLEY

SEQ ID NO: 102851 - protein, 9 aa, Homo sapiens
  misc_feature (1)..(9): Table A1; Target 9; HLA-A*29:02; MAGA6; ENSG00000197172; Melanoma-associated antigen 6 (Cancer/testis antigen 1.6) (CT1.6) (MAGE-6 antigen) (MAGE3B antigen)
LVHFLLLKY

SEQ ID NO: 102852 - protein, 10 aa, Homo sapiens
  misc_feature (1)..(10): Table A1; Target 10; HLA-B*44:03; MAGA6; ENSG00000197172; Melanoma-associated antigen 6 (Cancer/testis antigen 1.6) (CT1.6) (MAGE-6 antigen) (MAGE3B antigen)
MEVDPIGHVY

SEQ ID NO: 102853 - protein, 11 aa, Homo sapiens
  misc_feature (1)..(11): Table A1; Target 11; HLA-C*02:02; MAGA3; ENSG00000221867; Melanoma-associated antigen 3 (Antigen MZ2-D) (Cancer/testis antigen 1.3) (CT1.3) (MAGE-3 antigen)
AEMLGSVVGNW

SEQ ID NO: 102854 - protein, 11 aa, Homo sapiens
  misc_feature (1)..(11): Table A1; Target 12; HLA-C*02:02; MAGA6; ENSG00000197172; Melanoma-associated antigen 6 (Cancer/testis antigen 1.6) (CT1.6) (MAGE-6 antigen) (MAGE3B antigen)
AEMLGSVVGNW

SEQ ID NO: 102855 - protein, 9 aa, Homo sapiens
  misc_feature (1)..(9): Table A1; Target 13; HLA-A*01:01; MAGA6; ENSG00000197172; Melanoma-associated antigen 6 (Cancer/testis antigen 1.6) (CT1.6) (MAGE-6 antigen) (MAGE3B antigen)
EVDPIGHVY

SEQ ID NO: 102856 - protein, 11 aa, Homo sapiens
  misc_feature (1)..(11): Table A1; Target 14; HLA-B*44:02; MAGA4; ENSG00000147381; Melanoma-associated antigen 4 (Cancer/testis antigen 1.4) (CT1.4) (MAGE-4 antigen) (MAGE-41 antigen) (MAGE-X2 antigen)
AEMLERVIKNY

SEQ ID NO: 102857 - protein, 11 aa, Homo sapiens
  misc_feature (1)..(11): Table A1; Target 15; HLA-B*44:03; MAGA4; ENSG00000147381; Melanoma-associated antigen 4 (Cancer/testis antigen 1.4) (CT1.4) (MAGE-4 antigen) (MAGE-41 antigen) (MAGE-X2 antigen)
AEMLERVIKNY

SEQ ID NO: 102858 - protein, 11 aa, Homo sapiens
  misc_feature (1)..(11): Table A1; Target 16; HLA-C*02:02; MAGA4; ENSG00000147381; Melanoma-associated antigen 4 (Cancer/testis antigen 1.4) (CT1.4) (MAGE-4 antigen) (MAGE-41 antigen) (MAGE-X2 antigen)
AEMLERVIKNY

SEQ ID NO: 102859 - protein, 9 aa, Homo sapiens
  misc_feature (1)..(9): Table A1; Target 17; HLA-B*44:03; MAGA4; ENSG00000147381; Melanoma-associated antigen 4 (Cancer/testis antigen 1.4) (CT1.4) (MAGE-4 antigen) (MAGE-41 antigen) (MAGE-X2 antigen)
AETSYVKVL

SEQ ID NO: 102860 - protein, 9 aa, Homo sapiens
  misc_feature (1)..(9): Table A1; Target 18; HLA-A*02:01; MAGA4; ENSG00000147381; Melanoma-associated antigen 4 (Cancer/testis antigen 1.4) (CT1.4) (MAGE-4 antigen) (MAGE-41 antigen) (MAGE-X2 antigen)
ALLEEEEGV

SEQ ID NO: 102861 - protein, 9 aa, Homo sapiens
  misc_feature (1)..(9): Table A1; Target 19; HLA-A*01:01; MAGA4; ENSG00000147381; Melanoma-associated antigen 4 (Cancer/testis antigen 1.4) (CT1.4) (MAGE-4 antigen) (MAGE-41 antigen) (MAGE-X2 antigen)
EVDPASNTY

SEQ ID NO: 102862 - protein, 9 aa, Homo sapiens
  misc_feature (1)..(9): Table A1; Target 20; HLA-A*02:07; MAGA4; ENSG00000147381; Melanoma-associated antigen 4 (Cancer/testis antigen 1.4) (CT1.4) (MAGE-4 antigen) (MAGE-41 antigen) (MAGE-X2 antigen)
KVDELAHFL

SEQ ID NO: 102863 - protein, 11 aa, Homo sapiens
  misc_feature (1)..(11): Table A1; Target 21; HLA-A*30:02; MAGA4; ENSG00000147381; Melanoma-associated antigen 4 (Cancer/testis antigen 1.4) (CT1.4) (MAGE-4 antigen) (MAGE-41 antigen) (MAGE-X2 antigen)
RQVPGSNPARY

SEQ ID NO: 102864 - protein, 9 aa, Homo sapiens
  misc_feature (1)..(9): Table A1; Target 22; HLA-B*35:01; MAGA4; ENSG00000147381; Melanoma-associated antigen 4 (Cancer/testis antigen 1.4) (CT1.4) (MAGE-4 antigen) (MAGE-41 antigen) (MAGE-X2 antigen)
SALPTTISF

SEQ ID NO: 102865 - protein, 9 aa, Homo sapiens
  misc_feature (1)..(9): Table A1; Target 23; HLA-B*46:01; MAGA4; ENSG00000147381; Melanoma-associated antigen 4 (Cancer/testis antigen 1.4) (CT1.4) (MAGE-4 antigen) (MAGE-41 antigen) (MAGE-X2 antigen)
SALPTTISF

SEQ ID NO: 102866 - protein, 10 aa, Homo sapiens
  misc_feature (1)..(10): Table A1; Target 24; HLA-A*02:07; MAGA4; ENSG00000147381; Melanoma-associated antigen 4 (Cancer/testis antigen 1.4) (CT1.4) (MAGE-4 antigen) (MAGE-41 antigen) (MAGE-X2 antigen)
KVDELAHFLL

SEQ ID NO: 102867 - protein, 9 aa, Homo sapiens
  misc_feature (1)..(9): Table A1; Target 25; HLA-A*02:01; CLD6ENSG00000184697; Claudin-6 (Skullin);
ALFGLLVYL

SEQ ID NO: 102868 - protein, 9 aa, Homo sapiens
  misc_feature (1)..(9): Table A1; Target 26; HLA-A*11:01; CLD6ENSG00000184697; Claudin-6 (Skullin);
STSAPAISR

SEQ ID NO: 102869 - protein, 10 aa, Homo sapiens
  misc_feature (1)..(10): Table A1; Target 27; HLA-C*02:02; MAGA4; ENSG00000147381; Melanoma-associated antigen 4 (Cancer/testis antigen 1.4) (CT1.4) (MAGE-4 antigen) (MAGE-41 antigen) (MAGE-X2 antigen)
KEVDPASNTY

SEQ ID NO: 102870 - protein, 11 aa, Homo sapiens
  misc_feature (1)..(11): Table A1; Target 28; HLA-B*44:02; MAGAC; ENSG00000213401; Melanoma-associated antigen 12 (Cancer/testis antigen 1.12) (CT1.12) (MAGE-12 antigen) (MAGE12F antigen)
AEMLGSVIRNF

SEQ ID NO: 102871 - protein, 11 aa, Homo sapiens
  misc_feature (1)..(11): Table A1; Target 29; HLA-C*02:02; MAGAC; ENSG00000213401; Melanoma-associated antigen 12 (Cancer/testis antigen 1.12) (CT1.12) (MAGE-12 antigen) (MAGE12F antigen)
AEMLGSVIRNF

SEQ ID NO: 102872 - protein, 11 aa, Homo sapiens
  misc_feature (1)..(11): Table A1; Target 30; HLA-A*03:01; MAGA3; ENSG00000221867; Melanoma-associated antigen 3 (Antigen MZ2-D) (Cancer/testis antigen 1.3) (CT1.3) (MAGE-3 antigen)
GLLGDNQIMPK

SEQ ID NO: 102873 - protein, 11 aa, Homo sapiens
  misc_feature (1)..(11): Table A1; Target 31; HLA-B*44:02; MAGA3; ENSG00000221867; Melanoma-associated antigen 3 (Antigen MZ2-D) (Cancer/testis antigen 1.3) (CT1.3) (MAGE-3 antigen)
AEMLGSVVGNW

SEQ ID NO: 102874 - protein, 9 aa, Homo sapiens
  misc_feature (1)..(9): Table A1; Target 32; HLA-B*27:02; MAGA3; ENSG00000221867; Melanoma-associated antigen 3 (Antigen MZ2-D) (Cancer/testis antigen 1.3) (CT1.3) (MAGE-3 antigen)
PRALVETSY

SEQ ID NO: 102875 - protein, 9 aa, Homo sapiens
  misc_feature (1)..(9): Table A1; Target 33; HLA-A*01:01; KKLC1; ENSG00000204019; Kita-kyushu lung cancer antigen 1 (KK-LC-1) (Cancer/testis antigen 83)
NTDNNLAVY

SEQ ID NO: 102876 - protein, 11 aa, Homo sapiens
  misc_feature (1)..(11): Table A1; Target 34; HLA-B*44:03; MAGA3; ENSG00000221867; Melanoma-associated antigen 3 (Antigen MZ2-D) (Cancer/testis antigen 1.3) (CT1.3) (MAGE-3 antigen)
AEMLGSVVGNW

SEQ ID NO: 102877 - protein, 11 aa, Homo sapiens
  misc_feature (1)..(11): Table A1; Target 35; HLA-B*44:02; MAGA6; ENSG00000197172; Melanoma-associated antigen 6 (Cancer/testis antigen 1.6) (CT1.6) (MAGE-6 antigen) (MAGE3B antigen)
AEMLGSVVGNW

SEQ ID NO: 102878 - protein, 11 aa, Homo sapiens
  misc_feature (1)..(11): Table A1; Target 36; HLA-B*44:02; MAGA1; ENSG00000198681; Melanoma-associated antigen 1 (Antigen MZ2-E) (Cancer/testis antigen 1.1) (CT1.1) (MAGE-1 antigen)
AEMLESVIKNY

SEQ ID NO: 102879 - protein, 11 aa, Homo sapiens
  misc_feature (1)..(11): Table A1; Target 37; HLA-B*44:03; MAGA1; ENSG00000198681; Melanoma-associated antigen 1 (Antigen MZ2-E) (Cancer/testis antigen 1.1) (CT1.1) (MAGE-1 antigen)
AEMLESVIKNY

SEQ ID NO: 102880 - protein, 11 aa, Homo sapiens
  misc_feature (1)..(11): Table A1; Target 38; HLA-C*02:02; MAGA1; ENSG00000198681; Melanoma-associated antigen 1 (Antigen MZ2-E) (Cancer/testis antigen 1.1) (CT1.1) (MAGE-1 antigen)
AEMLESVIKNY

SEQ ID NO: 102881 - protein, 9 aa, Homo sapiens
  misc_feature (1)..(9): Table A1; Target 39; HLA-B*44:03; MAGA1; ENSG00000198681; Melanoma-associated antigen 1 (Antigen MZ2-E) (Cancer/testis antigen 1.1) (CT1.1) (MAGE-1 antigen)
AETSYVKVL

SEQ ID NO: 102882 - protein, 9 aa, Homo sapiens
  misc_feature (1)..(9): Table A1; Target 40; HLA-B*18:01; MAGA1; ENSG00000198681; Melanoma-associated antigen 1 (Antigen MZ2-E) (Cancer/testis antigen 1.1) (CT1.1) (MAGE-1 antigen)
EELSVMEVY

SEQ ID NO: 102883 - protein, 11 aa, Homo sapiens
  misc_feature (1)..(11): Table A1; Target 41; HLA-A*26:01; MAGA1; ENSG00000198681; Melanoma-associated antigen 1 (Antigen MZ2-E) (Cancer/testis antigen 1.1) (CT1.1) (MAGE-1 antigen)
EVYDGREHSAY

SEQ ID NO: 102884 - protein, 9 aa, Homo sapiens
  misc_feature (1)..(9): Table A1; Target 42; HLA-A*33:01; MAGA1; ENSG00000198681; Melanoma-associated antigen 1 (Antigen MZ2-E) (Cancer/testis antigen 1.1) (CT1.1) (MAGE-1 antigen)
EYVIKVSAR

SEQ ID NO: 102885 - protein, 9 aa, Homo sapiens
  misc_feature (1)..(9): Table A1; Target 43; HLA-A*02:01; MAGA1; ENSG00000198681; Melanoma-associated antigen 1 (Antigen MZ2-E) (Cancer/testis antigen 1.1) (CT1.1) (MAGE-1 antigen)
KVLEYVIKV

SEQ ID NO: 102886 - protein, 9 aa, Homo sapiens
  misc_feature (1)..(9): Table A1; Target 44; HLA-A*02:07; MAGA1; ENSG00000198681; Melanoma-associated antigen 1 (Antigen MZ2-E) (Cancer/testis antigen 1.1) (CT1.1) (MAGE-1 antigen)
KVLEYVIKV

SEQ ID NO: 102887 - protein, 9 aa, Homo sapiens
  misc_feature (1)..(9): Table A1; Target 45; HLA-A*29:02; MAGA1; ENSG00000198681; Melanoma-associated antigen 1 (Antigen MZ2-E) (Cancer/testis antigen 1.1) (CT1.1) (MAGE-1 antigen)
LVGFLLLKY

SEQ ID NO: 102888 - protein, 9 aa, Homo sapiens
  misc_feature (1)..(9): Table A1; Target 46; HLA-B*35:01; MAGA1; ENSG00000198681; Melanoma-associated antigen 1 (Antigen MZ2-E) (Cancer/testis antigen 1.1) (CT1.1) (MAGE-1 antigen)
SAFPTTINF

SEQ ID NO: 102889 - protein, 9 aa, Homo sapiens
  misc_feature (1)..(9): Table A1; Target 47; HLA-C*02:02; MAGA1; ENSG00000198681; Melanoma-associated antigen 1 (Antigen MZ2-E) (Cancer/testis antigen 1.1) (CT1.1) (MAGE-1 antigen)
SAFPTTINF

SEQ ID NO: 102890 - protein, 9 aa, Homo sapiens
  misc_feature (1)..(9): Table A1; Target 48; HLA-A*29:02; MAGAC; ENSG00000213401; Melanoma-associated antigen 12 (Cancer/testis antigen 1.12) (CT1.12) (MAGE-12 antigen) (MAGE12F antigen)
LVHFLLLKY

SEQ ID NO: 102891 - protein, 9 aa, Homo sapiens
  misc_feature (1)..(9): Table A1; Target 49; HLA-A*30:02; MAGAC; ENSG00000213401; Melanoma-associated antigen 12 (Cancer/testis antigen 1.12) (CT1.12) (MAGE-12 antigen) (MAGE12F antigen)
STLPTTINY

SEQ ID NO: 102892 - protein, 10 aa, Homo sapiens
  misc_feature (1)..(10): Table A1; Target 50; HLA-B*18:01; MAGA6; ENSG00000197172; Melanoma-associated antigen 6 (Cancer/testis antigen 1.6) (CT1.6) (MAGE-6 antigen) (MAGE3B antigen)
MEVDPIGHVY

SEQ ID NO: 102893 - protein, 9 aa, Homo sapiens
  misc_feature (1)..(9): Table A1; Target 51; HLA-B*51:01; PPBNENSG00000163286; Alkaline phosphatase, placental-like (EC 3.1.3.1) (ALP-1) (Alkaline phosphatase Nagao isozyme) (Germ cell alkaline phosphatase) (GCAP) (Placental alkaline phosphatase-like) (PLAP-like)
DAAHPGPSV

SEQ ID NO: 102894 - protein, 10 aa, Homo sapiens
  misc_feature (1)..(10): Table A1; Target 52; HLA-B*35:01; PPBNENSG00000163286; Alkaline phosphatase, placental-like (EC 3.1.3.1) (ALP-1) (Alkaline phosphatase Nagao isozyme) (Germ cell alkaline phosphatase) (GCAP) (Placental alkaline phosphatase-like) (PLAP-like)
FPMGTPDPEY

SEQ ID NO: 102895 - protein, 11 aa, Homo sapiens
  misc_feature (1)..(11): Table A1; Target 53; HLA-A*30:02; PPBNENSG00000163286; Alkaline phosphatase, placental-like (EC 3.1.3.1) (ALP-1) (Alkaline phosphatase Nagao isozyme) (Germ cell alkaline phosphatase) (GCAP) (Placental alkaline phosphatase-like) (PLAP-like)
RVQHASPAGAY

SEQ ID NO: 102896 - protein, 9 aa, Homo sapiens
  misc_feature (1)..(9): Table A1; Target 54; HLA-A*02:07; PPBNENSG00000163286; Alkaline phosphatase, placental-like (EC 3.1.3.1) (ALP-1) (Alkaline phosphatase Nagao isozyme) (Germ cell alkaline phosphatase) (GCAP) (Placental alkaline phosphatase-like) (PLAP-like)
SLDPSVTHL

SEQ ID NO: 102897 - protein, 10 aa, Homo sapiens
  misc_feature (1)..(10): Table A1; Target 55; HLA-A*30:02; PPBNENSG00000163286; Alkaline phosphatase, placental-like (EC 3.1.3.1) (ALP-1) (Alkaline phosphatase Nagao isozyme) (Germ cell alkaline phosphatase) (GCAP) (Placental alkaline phosphatase-like) (PLAP-like)
VQHASPAGAY

SEQ ID NO: 102898 - protein, 9 aa, Homo sapiens
  misc_feature (1)..(9): Table A1; Target 56; HLA-A*30:02; MAGA6; ENSG00000197172; Melanoma-associated antigen 6 (Cancer/testis antigen 1.6) (CT1.6) (MAGE-6 antigen) (MAGE3B antigen)
EVDPIGHVY

SEQ ID NO: 102899 - protein, 9 aa, Homo sapiens
  misc_feature (1)..(9): Table A1; Target 57; HLA-A*29:02; PLCX2; ENSG00000240891; PI-PLC X domain-containing protein 2
IFLDFNHFY

SEQ ID NO: 102900 - protein, 9 aa, Homo sapiens
  misc_feature (1)..(9): Table A1; Target 58; HLA-A*29:02; MAGA1; ENSG00000198681; Melanoma-associated antigen 1 (Antigen MZ2-E) (Cancer/testis antigen 1.1) (CT1.1) (MAGE-1 antigen)
LVQEKYLEY

SEQ ID NO: 102901 - protein, 11 aa, Homo sapiens
  misc_feature (1)..(11): Table A1; Target 59; HLA-A*30:02; MAGA1; ENSG00000198681; Melanoma-associated antigen 1 (Antigen MZ2-E) (Cancer/testis antigen 1.1) (CT1.1) (MAGE-1 antigen)
RQVPDSDPARY

SEQ ID NO: 102902 - protein, 11 aa, Homo sapiens
  misc_feature (1)..(11): Table A1; Target 60; HLA-B*44:03; MAGA6; ENSG00000197172; Melanoma-associated antigen 6 (Cancer/testis antigen 1.6) (CT1.6) (MAGE-6 antigen) (MAGE3B antigen)
AEMLGSVVGNW

SEQ ID NO: 102903 - protein, 11 aa, Homo sapiens
  misc_feature (1)..(11): Table A1; Target 61; HLA-A*02:01; MAGA6; ENSG00000197172; Melanoma-associated antigen 6 (Cancer/testis antigen 1.6) (CT1.6) (MAGE-6 antigen) (MAGE3B antigen)
FLWGPRALIET

SEQ ID NO: 102904 - protein, 11 aa, Homo sapiens
  misc_feature (1)..(11): Table A1; Target 62; HLA-A*02:01; MAGA3; ENSG00000221867; Melanoma-associated antigen 3 (Antigen MZ2-D) (Cancer/testis antigen 1.3) (CT1.3) (MAGE-3 antigen)
FLWGPRALVET

SEQ ID NO: 102905 - protein, 11 aa, Homo sapiens
  misc_feature (1)..(11): Table A1; Target 63; HLA-B*44:03; MAGAC; ENSG00000213401; Melanoma-associated antigen 12 (Cancer/testis antigen 1.12) (CT1.12) (MAGE-12 antigen) (MAGE12F antigen)
AEMLGSVIRNF

SEQ ID NO: 102906 - protein, 9 aa, Homo sapiens
  misc_feature (1)..(9): Table A1; Target 64; HLA-A*29:02; MAGAC; ENSG00000213401; Melanoma-associated antigen 12 (Cancer/testis antigen 1.12) (CT1.12) (MAGE-12 antigen) (MAGE12F antigen)
LVQENYLEY

SEQ ID NO: 102907 - protein, 9 aa, Homo sapiens
  misc_feature (1)..(9): Table A1; Target 65; HLA-A*26:01; MAGC2; ENSG00000046774; Melanoma-associated antigen C2 (Cancer/testis antigen 10) (CT10) (Hepatocellular carcinoma-associated antigen 587) (MAGE-C2 antigen) (MAGE-E1 antigen)
EVLNAVGVY

SEQ ID NO: 102908 - protein, 9 aa, Homo sapiens
  misc_feature (1)..(9): Table A1; Target 66; HLA-A*29:02; Q5T1G4; ENSG00000204179; Protein tyrosine phosphatase, non-receptor type 20A (Tyrosine-protein phosphatase non-receptor type 20) (Fragment)
GAVSLLLRY

SEQ ID NO: 102909 - protein, 9 aa, Homo sapiens
  misc_feature (1)..(9): Table A1; Target 67; HLA-A*02:07; ZN560; ENSG00000198028; Zinc finger protein 560
LLDPVQRNL

SEQ ID NO: 102910 - protein, 9 aa, Homo sapiens
  misc_feature (1)..(9): Table A1; Target 68; HLA-C*04:01; ZN560; ENSG00000198028; Zinc finger protein 560
TFDSVAVEF

SEQ ID NO: 102911 - protein, 9 aa, Homo sapiens
  misc_feature (1)..(9): Table A1; Target 69; HLA-A*01:01; ZN560; ENSG00000198028; Zinc finger protein 560
YSDVMLENY

SEQ ID NO: 102912 - protein, 9 aa, Homo sapiens
  misc_feature (1)..(9): Table A1; Target 70; HLA-A*02:07; MAGC2; ENSG00000046774; Melanoma-associated antigen C2 (Cancer/testis antigen 10) (CT10) (Hepatocellular carcinoma-associated antigen 587) (MAGE-C2 antigen) (MAGE-E1 antigen)
TLDEKVAEL

SEQ ID NO: 102913 - protein, 8 aa, Homo sapiens
  misc_feature (1)..(8): Table A1; Target 71; HLA-B*51:01; CLD6ENSG00000184697; Claudin-6 (Skullin);
TAFIGNSI

SEQ ID NO: 102914 - protein, 9 aa, Homo sapiens
  misc_feature (1)..(9): Table A1; Target 72; HLA-A*11:01; MAGAC; ENSG00000213401; Melanoma-associated antigen 12 (Cancer/testis antigen 1.12) (CT1.12) (MAGE-12 antigen) (MAGE12F antigen)
STLPTTINY

SEQ ID NO: 102915 - protein, 9 aa, Homo sapiens
  misc_feature (1)..(9): Table A1; Target 73; HLA-C*04:01; SSX1ENSG00000126752; Protein SSX1 (Cancer/testis antigen 5.1) (CT5.1) (Synovial sarcoma, X breakpoint 1)
AFDDIATYF

SEQ ID NO: 102916 - protein, 10 aa, Homo sapiens
  misc_feature (1)..(10): Table A1; Target 74; HLA-B*35:01; NACA2; ENSG00000253506; Nascent polypeptide-associated complex subunit alpha-2 (Alpha-NAC-like) (Hom s 2.01) (Nascent polypeptide-associated complex subunit alpha-like) (NAC-alpha-like)
SPASDAYIVF

SEQ ID NO: 102917 - protein, 10 aa, Homo sapiens
  misc_feature (1)..(10): Table A1; Target 75; HLA-A*30:02; NACA2; ENSG00000253506; Nascent polypeptide-associated complex subunit alpha-2 (Alpha-NAC-like) (Hom s 2.01) (Nascent polypeptide-associated complex subunit alpha-like) (NAC-alpha-like)
VYKSPASDAY

SEQ ID NO: 102918 - protein, 10 aa, Homo sapiens
  misc_feature (1)..(10): Table A1; Target 76; HLA-B*44:03; MAGA4; ENSG00000147381; Melanoma-associated antigen 4 (Cancer/testis antigen 1.4) (CT1.4) (MAGE-4 antigen) (MAGE-41 antigen) (MAGE-X2 antigen)
KEVDPASNTY

SEQ ID NO: 102919 - protein, 9 aa, Homo sapiens
  misc_feature (1)..(9): Table A1; Target 77; HLA-A*30:02; DMBX1; ENSG00000197587; Diencephalon/mesencephalon homeobox protein 1 (Orthodenticle homolog 3) (Paired-like homeobox protein DMBX1)
AMNSLSAMY

SEQ ID NO: 102920 - protein, 9 aa, Homo sapiens
  misc_feature (1)..(9): Table A1; Target 78; HLA-A*11:01; SMC1B; ENSG00000077935; Structural maintenance of chromosomes protein 1B (SMC protein 1B) (SMC-1-beta) (SMC-1B)
ASQEDILLK

SEQ ID NO: 102921 - protein, 9 aa, Homo sapiens
  misc_feature (1)..(9): Table A1; Target 79; HLA-A*11:01; SMC1B; ENSG00000077935; Structural maintenance of chromosomes protein 1B (SMC protein 1B) (SMC-1-beta) (SMC-1B)
ATMTQQLEK

SEQ ID NO: 102922 - protein, 11 aa, Homo sapiens
  misc_feature (1)..(11): Table A1; Target 80; HLA-B*44:03; SMC1B; ENSG00000077935; Structural maintenance of chromosomes protein 1B (SMC protein 1B) (SMC-1-beta) (SMC-1B)
EEIGVENIREF

SEQ ID NO: 102923 - protein, 10 aa, Homo sapiens
  misc_feature (1)..(10): Table A1; Target 81; HLA-A*11:01; SMC1B; ENSG00000077935; Structural maintenance of chromosomes protein 1B (SMC protein 1B) (SMC-1-beta) (SMC-1B)
GTVESISVKK

SEQ ID NO: 102924 - protein, 10 aa, Homo sapiens
  misc_feature (1)..(10): Table A1; Target 82; HLA-A*30:02; SMC1B; ENSG00000077935; Structural maintenance of chromosomes protein 1B (SMC protein 1B) (SMC-1-beta) (SMC-1B)
STSGELIGEY

SEQ ID NO: 102925 - protein, 9 aa, Homo sapiens
  misc_feature (1)..(9): Table A1; Target 83; HLA-A*24:02; SMC1B; ENSG00000077935; Structural maintenance of chromosomes protein 1B (SMC protein 1B) (SMC-1-beta) (SMC-1B)
VYIAELEKI

SEQ ID NO: 102926 - protein, 11 aa, Homo sapiens
  misc_feature (1)..(11): Table A1; Target 84; HLA-A*11:01; ACTL8; ENSG00000117148; Actin-like protein 8 (Cancer/testis antigen 57) (CT57)
AGQDLSAYLLK

SEQ ID NO: 102927 - protein, 9 aa, Homo sapiens
  misc_feature (1)..(9): Table A1; Target 85; HLA-A*26:01; ACTL8; ENSG00000117148; Actin-like protein 8 (Cancer/testis antigen 57) (CT57)
SVVAHLSTY

SEQ ID NO: 102928 - protein, 9 aa, Homo sapiens
  misc_feature (1)..(9): Table A1; Target 86; HLA-A*11:01; MAGB2; ENSG00000099399; Melanoma-associated antigen B2 (Cancer/testis antigen 3.2) (CT3.2) (DSS-AHC critical interval MAGE superfamily 6) (DAM6) (MAGE XP-2 antigen) (MAGE-B2 antigen)
AAAGVSSTK

SEQ ID NO: 102929 - protein, 9 aa, Homo sapiens
  misc_feature (1)..(9): Table A1; Target 87; HLA-A*30:02; MAGB2; ENSG00000099399; Melanoma-associated antigen B2 (Cancer/testis antigen 3.2) (CT3.2) (DSS-AHC critical interval MAGE superfamily 6) (DAM6) (MAGE XP-2 antigen) (MAGE-B2 antigen)
KVNPNGHTY

SEQ ID NO: 102930 - protein, 11 aa, Homo sapiens
  misc_feature (1)..(11): Table A1; Target 88; HLA-B*44:02; MAGAA; ENSG00000124260; Melanoma-associated antigen 10 (Cancer/testis antigen 1.10) (CT1.10) (MAGE-10 antigen)
AEILESVIRNY

SEQ ID NO: 102931 - protein, 11 aa, Homo sapiens
  misc_feature (1)..(11): Table A1; Target 89; HLA-B*44:03; MAGAA; ENSG00000124260; Melanoma-associated antigen 10 (Cancer/testis antigen 1.10) (CT1.10) (MAGE-10 antigen)
AEILESVIRNY

SEQ ID NO: 102932 - protein, 11 aa, Homo sapiens
  misc_feature (1)..(11): Table A1; Target 90; HLA-C*02:02; MAGAA; ENSG00000124260; Melanoma-associated antigen 10 (Cancer/testis antigen 1.10) (CT1.10) (MAGE-10 antigen)
AEILESVIRNY

SEQ ID NO: 102933 - protein, 11 aa, Homo sapiens
  misc_feature (1)..(11): Table A1; Target 91; HLA-A*30:02; MAGAA; ENSG00000124260; Melanoma-associated antigen 10 (Cancer/testis antigen 1.10) (CT1.10) (MAGE-10 antigen)
RQVPGSDPARY

SEQ ID NO: 102934 - protein, 9 aa, Homo sapiens
  misc_feature (1)..(9): Table A1; Target 92; HLA-C*01:02; MAGAA; ENSG00000124260; Melanoma-associated antigen 10 (Cancer/testis antigen 1.10) (CT1.10) (MAGE-10 antigen)
SSPSVVASL

SEQ ID NO: 102935 - protein, 10 aa, Homo sapiens
  misc_feature (1)..(10): Table A1; Target 93; HLA-A*01:01; ZN560; ENSG00000198028; Zinc finger protein 560
LLDPAQRNLY

SEQ ID NO: 102936 - protein, 9 aa, Homo sapiens
  misc_feature (1)..(9): Table A1; Target 94; HLA-A*26:01; MAGA4; ENSG00000147381; Melanoma-associated antigen 4 (Cancer/testis antigen 1.4) (CT1.4) (MAGE-4 antigen) (MAGE-41 antigen) (MAGE-X2 antigen)
EVDPASNTY

SEQ ID NO: 102937 - protein, 9 aa, Homo sapiens
  misc_feature (1)..(9): Table A1; Target 95; HLA-A*26:01; MAGA6; ENSG00000197172; Melanoma-associated antigen 6 (Cancer/testis antigen 1.6) (CT1.6) (MAGE-6 antigen) (MAGE3B antigen)
FVQENYLEY

SEQ ID NO: 102938 - protein, 10 aa, Homo sapiens
  misc_feature (1)..(10): Table A1; Target 96; HLA-C*02:02; MAGA6; ENSG00000197172; Melanoma-associated antigen 6 (Cancer/testis antigen 1.6) (CT1.6) (MAGE-6 antigen) (MAGE3B antigen)
MEVDPIGHVY

SEQ ID NO: 102939 - protein, 9 aa, Homo sapiens
  misc_feature (1)..(9): Table A1; Target 97; HLA-C*16:01; MAGA4; ENSG00000147381; Melanoma-associated antigen 4 (Cancer/testis antigen 1.4) (CT1.4) (MAGE-4 antigen) (MAGE-41 antigen) (MAGE-X2 antigen)
SALPTTISF

SEQ ID NO: 102940 - protein, 8 aa, Homo sapiens
  misc_feature (1)..(8): Table A1; Target 98; HLA-A*01:01; V9GYR9; ENSG00000225362; Cancer/testis antigen 62 (Fragment)
LTDQPSAY

SEQ ID NO: 102941 - protein, 8 aa, Homo sapiens
  misc_feature (1)..(8): Table A1; Target 99; HLA-C*04:01; STRA8; ENSG00000146857; Stimulated by retinoic acid gene 8 protein homolog
AFDVASFL

SEQ ID NO: 102942 - protein, 9 aa, Homo sapiens
  misc_feature (1)..(9): Table A1; Target 100; HLA-A*30:02; MAGA3; ENSG00000221867; Melanoma-associated antigen 3 (Antigen MZ2-D) (Cancer/testis antigen 1.3) (CT1.3) (MAGE-3 antigen)
SSLPTTMNY

SEQ ID NO: 102943 - protein, 10 aa, Homo sapiens
  misc_feature (1)..(10): Table A1; Target 101; HLA-B*44:03; TDRD1; ENSG00000095627; Tudor domain-containing protein 1 (Cancer/testis antigen 41.1) (CT41.1)
EEIIPLNRIY

SEQ ID NO: 102944 - protein, 10 aa, Homo sapiens
  misc_feature (1)..(10): Table A1; Target 102; HLA-A*01:01; TDRD1; ENSG00000095627; Tudor domain-containing protein 1 (Cancer/testis antigen 41.1) (CT41.1)
TSDTDVEVLY

SEQ ID NO: 102945 - protein, 11 aa, Homo sapiens
  misc_feature (1)..(11): Table A1; Target 103; HLA-A*29:02; DMBX1; ENSG00000197587; Diencephalon/mesencephalon homeobox protein 1 (Orthodenticle homolog 3) (Paired-like homeobox protein DMBX1)
TFQDIILEARY

SEQ ID NO: 102946 - protein, 10 aa, Homo sapiens
  misc_feature (1)..(10): Table A1; Target 104; HLA-A*29:02; MAGA6; ENSG00000197172; Melanoma-associated antigen 6 (Cancer/testis antigen 1.6) (CT1.6) (MAGE-6 antigen) (MAGE3B antigen)
YFVQENYLEY

SEQ ID NO: 102947 - protein, 9 aa, Homo sapiens
  misc_feature (1)..(9): Table A1; Target 105; HLA-A*29:02; MAGA4; ENSG00000147381; Melanoma-associated antigen 4 (Cancer/testis antigen 1.4) (CT1.4) (MAGE-4 antigen) (MAGE-41 antigen) (MAGE-X2 antigen)
WVQENYLEY

SEQ ID NO: 102948 - protein, 9 aa, Homo sapiens
  misc_feature (1)..(9): Table A1; Target 106; HLA-A*33:01; GBG1ENSG00000127928; Guanine nucleotide-binding protein G(T) subunit gamma-T1 (Transducin gamma chain)
EVRDYVEER

SEQ ID NO: 102949 - protein, 9 aa, Homo sapiens
  misc_feature (1)..(9): Table A1; Target 107; HLA-C*16:01; MAGA1; ENSG00000198681; Melanoma-associated antigen 1 (Antigen MZ2-E) (Cancer/testis antigen 1.1) (CT1.1) (MAGE-1 antigen)
SAFPTTINF

SEQ ID NO: 102950 - protein, 9 aa, Homo sapiens
  misc_feature (1)..(9): Table A1; Target 108; HLA-A*02:07; CLD6ENSG00000184697; Claudin-6 (Skullin);
ALFGLLVYL

SEQ ID NO: 102951 - protein, 9 aa, Homo sapiens
  misc_feature (1)..(9): Table A1; Target 109; HLA-A*02:01; CLD6ENSG00000184697; Claudin-6 (Skullin);
VLTSGIVFV

SEQ ID NO: 102952 - protein, 9 aa, Homo sapiens
  misc_feature (1)..(9): Table A1; Target 110; HLA-B*35:01; MAGA6; ENSG00000197172; Melanoma-associated antigen 6 (Cancer/testis antigen 1.6) (CT1.6) (MAGE-6 antigen) (MAGE3B antigen)
FVQENYLEY

SEQ ID NO: 102953 - protein, 8 aa, Homo sapiens
  misc_feature (1)..(8): Table A1; Target 111; HLA-B*51:01; CX7B2; ENSG00000170516; Cytochrome c oxidase subunit 7B2, mitochondrial (Cytochrome c oxidase polypeptide VIIb2)
NALSSLKI

SEQ ID NO: 102954 - protein, 10 aa, Homo sapiens
  misc_feature (1)..(10): Table A1; Target 112; HLA-B*35:01; CX7B2; ENSG00000170516; Cytochrome c oxidase subunit 7B2, mitochondrial (Cytochrome c oxidase polypeptide VIIb2)
NAVLASGTAF

SEQ ID NO: 102955 - protein, 9 aa, Homo sapiens
  misc_feature (1)..(9): Table A1; Target 113; HLA-B*27:02; MAGAC; ENSG00000213401; Melanoma-associated antigen 12 (Cancer/testis antigen 1.12) (CT1.12) (MAGE-12 antigen) (MAGE12F antigen)
PRALVETSY

SEQ ID NO: 102956 - protein, 9 aa, Homo sapiens
  misc_feature (1)..(9): Table A1; Target 114; HLA-A*11:01; PABP3; ENSG00000151846; Polyadenylate-binding protein 3 (PABP-3) (Poly(A)-binding protein 3) (Testis-specific poly(A)-binding protein)
ASAPPQKQK

SEQ ID NO: 102957 - protein, 9 aa, Homo sapiens
  misc_feature (1)..(9): Table A1; Target 115; HLA-A*01:01; PABP3; ENSG00000151846; Polyadenylate-binding protein 3 (PABP-3) (Poly(A)-binding protein 3) (Testis-specific poly(A)-binding protein)
EIDNSELLY

SEQ ID NO: 102958 - protein, 9 aa, Homo sapiens
  misc_feature (1)..(9): Table A1; Target 116; HLA-A*02:07; PABP3; ENSG00000151846; Polyadenylate-binding protein 3 (PABP-3) (Poly(A)-binding protein 3) (Testis-specific poly(A)-binding protein)
KVDEAVAVL

SEQ ID NO: 102959 - protein, 9 aa, Homo sapiens
  misc_feature (1)..(9): Table A1; Target 117; HLA-A*33:01; PABP3; ENSG00000151846; Polyadenylate-binding protein 3 (PABP-3) (Poly(A)-binding protein 3) (Testis-specific poly(A)-binding protein)
NGKQIYVGR

SEQ ID NO: 102960 - protein, 9 aa, Homo sapiens
  misc_feature (1)..(9): Table A1; Target 118; HLA-B*51:01; PABP3; ENSG00000151846; Polyadenylate-binding protein 3 (PABP-3) (Poly(A)-binding protein 3) (Testis-specific poly(A)-binding protein)
SPAGPILSI

SEQ ID NO: 102961 - protein, 9 aa, Homo sapiens
  misc_feature (1)..(9): Table A1; Target 119; HLA-B*35:01; SOX14; ENSG00000168875; Transcription factor SOX-14 (Protein SOX-28)
LPYASTLGY

SEQ ID NO: 102962 - protein, 9 aa, Homo sapiens
  misc_feature (1)..(9): Table A1; Target 120; HLA-A*26:01; TDRD1; ENSG00000095627; Tudor domain-containing protein 1 (Cancer/testis antigen 41.1) (CT41.1)
DVADKLVTF

SEQ ID NO: 102963 - protein, 9 aa, Homo sapiens
  misc_feature (1)..(9): Table A1; Target 121; HLA-A*11:01; SMC1B; ENSG00000077935; Structural maintenance of chromosomes protein 1B (SMC protein 1B) (SMC-1-beta) (SMC-1B)
GTVESISVK

SEQ ID NO: 102964 - protein, 9 aa, Homo sapiens
  misc_feature (1)..(9): Table A1; Target 122; HLA-B*18:01; X6RD31; ENSG00000234068; P antigen family member 2 (Fragment)
IENQAVPAF

SEQ ID NO: 102965 - protein, 9 aa, Homo sapiens
  misc_feature (1)..(9): Table A1; Target 123; HLA-A*03:01; MSLNL; ENSG00000162006; Mesothelin-like protein (Pre-pro-megakaryocyte-potentiating-factor-like)
AVLQKFLEH

SEQ ID NO: 102966 - protein, 9 aa, Homo sapiens
  misc_feature (1)..(9): Table A1; Target 124; HLA-B*35:01; MSLNL; ENSG00000162006; Mesothelin-like protein (Pre-pro-megakaryocyte-potentiating-factor-like)
QPAAPGPAL

SEQ ID NO: 102967 - protein, 9 aa, Homo sapiens
  misc_feature (1)..(9): Table A1; Target 125; HLA-B*18:01; NALP7; ENSG00000167634; NACHT, LRR and PYD domains-containing protein 7 (Nucleotide-binding oligomerization domain protein 12) (PYRIN-containing APAF1-like protein 3)
DEDQAMRAF

SEQ ID NO: 102968 - protein, 10 aa, Homo sapiens
  misc_feature (1)..(10): Table A1; Target 126; HLA-B*35:01; NALP7; ENSG00000167634; NACHT, LRR and PYD domains-containing protein 7 (Nucleotide-binding oligomerization domain protein 12) (PYRIN-containing APAF1-like protein 3)
NPIGDTGVKF

SEQ ID NO: 102969 - protein, 8 aa, Homo sapiens
  misc_feature (1)..(8): Table A1; Target 127; HLA-C*05:01; V9GYR9; ENSG00000225362; Cancer/testis antigen 62 (Fragment)
NADLQSEF

SEQ ID NO: 102970 - protein, 9 aa, Homo sapiens
  misc_feature (1)..(9): Table A1; Target 128; HLA-B*44:03; PIWL1; ENSG00000125207; Piwi-like protein 1 (EC 3.1.26.-)
SEVSFLEYY

SEQ ID NO: 102971 - protein, 9 aa, Homo sapiens
  misc_feature (1)..(9): Table A1; Target 129; HLA-A*02:01; PIWL1; ENSG00000125207; Piwi-like protein 1 (EC 3.1.26.-)
SLSNRLYYL

SEQ ID NO: 102972 - protein, 11 aa, Homo sapiens
  misc_feature (1)..(11): Table A1; Target 130; HLA-B*44:02; A0A075B7A9; ENSG00000267978; Melanoma-associated antigen 9 (Fragment)
AEMLESVIKNY

SEQ ID NO: 102973 - protein, 11 aa, Homo sapiens
  misc_feature (1)..(11): Table A1; Target 131; HLA-B*44:03; A0A075B7A9; ENSG00000267978; Melanoma-associated antigen 9 (Fragment)
AEMLESVIKNY

SEQ ID NO: 102974 - protein, 11 aa, Homo sapiens
  misc_feature (1)..(11): Table A1; Target 132; HLA-C*02:02; A0A075B7A9; ENSG00000267978; Melanoma-associated antigen 9 (Fragment)
AEMLESVIKNY

SEQ ID NO: 102975 - protein, 10 aa, Homo sapiens
  misc_feature (1)..(10): Table A1; Target 133; HLA-A*02:01; MAGB2; ENSG00000099399; Melanoma-associated antigen B2 (Cancer/testis antigen 3.2) (CT3.2) (DSS-AHC critical interval MAGE superfamily 6) (DAM6) (MAGE XP-2 antigen) (MAGE-B2 antigen)
GVYDGEEHSV

SEQ ID NO: 102976 - protein, 8 aa, Homo sapiens
  misc_feature (1)..(8): Table A1; Target 134; HLA-B*51:01; V9GZ46; ENSG00000124092; Transcriptional repressor CTCFL
DANFIPTV

SEQ ID NO: 102977 - protein, 9 aa, Homo sapiens
  misc_feature (1)..(9): Table A1; Target 135; HLA-A*30:02; MAGA6; ENSG00000197172; Melanoma-associated antigen 6 (Cancer/testis antigen 1.6) (CT1.6) (MAGE-6 antigen) (MAGE3B antigen)
SSLPTTMNY

SEQ ID NO: 102978 - protein, 9 aa, Homo sapiens
  misc_feature (1)..(9): Table A1; Target 136; HLA-B*44:03; MAGA4; ENSG00000147381; Melanoma-associated antigen 4 (Cancer/testis antigen 1.4) (CT1.4) (MAGE-4 antigen) (MAGE-41 antigen) (MAGE-X2 antigen)
EELGVMGVY

SEQ ID NO: 102979 - protein, 8 aa, Homo sapiens
  misc_feature (1)..(8): Table A1; Target 137; HLA-B*51:01; FOXI3; ENSG00000214336; Forkhead box protein I3
YPREGSEV

SEQ ID NO: 102980 - protein, 11 aa, Homo sapiens
  misc_feature (1)..(11): Table A1; Target 138; HLA-B*27:02; MAGA3; ENSG00000221867; Melanoma-associated antigen 3 (Antigen MZ2-D) (Cancer/testis antigen 1.3) (CT1.3) (MAGE-3 antigen)
GLLGDNQIMPK

SEQ ID NO: 102981 - protein, 9 aa, Homo sapiens
  misc_feature (1)..(9): Table A1; Target 139; HLA-A*11:01; LGSNENSG00000146166; Lengsin (Glutamate-ammonia ligase domain-containing protein 1) (Lens glutamine synthase-like)
ATDLHGVSR

SEQ ID NO: 102982 - protein, 11 aa, Homo sapiens
  misc_feature (1)..(11): Table A1; Target 140; HLA-B*44:02; LGSNENSG00000146166; Lengsin (Glutamate-ammonia ligase domain-containing protein 1) (Lens glutamine synthase-like)
TEQLTITGKKW

SEQ ID NO: 102983 - protein, 11 aa, Homo sapiens
  misc_feature (1)..(11): Table A1; Target 141; HLA-B*44:03; LGSNENSG00000146166; Lengsin (Glutamate-ammonia ligase domain-containing protein 1) (Lens glutamine synthase-like)
TEQLTITGKKW

SEQ ID NO: 102984 - protein, 10 aa, Homo sapiens
  misc_feature (1)..(10): Table A1; Target 142; HLA-B*44:02; ZFP42; ENSG00000179059; Zinc finger protein 42 homolog (Zfp-42) (Reduced expression protein 1) (REX-1) (hREX-1) (Zinc finger protein 754)
AEIEPVSAVW

SEQ ID NO: 102985 - protein, 10 aa, Homo sapiens
  misc_feature (1)..(10): Table A1; Target 143; HLA-B*44:03; ZFP42; ENSG00000179059; Zinc finger protein 42 homolog (Zfp-42) (Reduced expression protein 1) (REX-1) (hREX-1) (Zinc finger protein 754)
AEIEPVSAVW

SEQ ID NO: 102986 - protein, 10 aa, Homo sapiens
  misc_feature (1)..(10): Table A1; Target 144; HLA-C*02:02; ZFP42; ENSG00000179059; Zinc finger protein 42 homolog (Zfp-42) (Reduced expression protein 1) (REX-1) (hREX-1) (Zinc finger protein 754)
AEIEPVSAVW

SEQ ID NO: 102987 - protein, 10 aa, Homo sapiens
  misc_feature (1)..(10): Table A1; Target 145; HLA-B*44:02; ZFP42; ENSG00000179059; Zinc finger protein 42 homolog (Zfp-42) (Reduced expression protein 1) (REX-1) (hREX-1) (Zinc finger protein 754)
SEQQLSQKVF

SEQ ID NO: 102988 - protein, 10 aa, Homo sapiens
  misc_feature (1)..(10): Table A1; Target 146; HLA-B*44:03; ZFP42; ENSG00000179059; Zinc finger protein 42 homolog (Zfp-42) (Reduced expression protein 1) (REX-1) (hREX-1) (Zinc finger protein 754)
SEQQLSQKVF

SEQ ID NO: 102989 - protein, 10 aa, Homo sapiens
  misc_feature (1)..(10): Table A1; Target 147; HLA-C*02:02; ZFP42; ENSG00000179059; Zinc finger protein 42 homolog (Zfp-42) (Reduced expression protein 1) (REX-1) (hREX-1) (Zinc finger protein 754)
SEQQLSQKVF

SEQ ID NO: 102990 - protein, 10 aa, Homo sapiens
  misc_feature (1)..(10): Table A1; Target 148; HLA-A*01:01; ZN560; ENSG00000198028; Zinc finger protein 560
LLDPVQRNLY

SEQ ID NO: 102991 - protein, 9 aa, Homo sapiens
  misc_feature (1)..(9): Table A1; Target 149; HLA-A*29:02; NPFF2; ENSG00000056291; Neuropeptide FF receptor 2 (G-protein coupled receptor 74) (G-protein coupled receptor HLWAR77) (Neuropeptide G-protein coupled receptor)
LYSDINITY

SEQ ID NO: 102992 - protein, 9 aa, Homo sapiens
  misc_feature (1)..(9): Table A1; Target 150; HLA-C*05:01; NPFF2; ENSG00000056291; Neuropeptide FF receptor 2 (G-protein coupled receptor 74) (G-protein coupled receptor HLWAR77) (Neuropeptide G-protein coupled receptor)
YADLSPNEL

SEQ ID NO: 102993 - protein, 9 aa, Homo sapiens
  misc_feature (1)..(9): Table A1; Target 151; HLA-B*51:01; NPFF2; ENSG00000056291; Neuropeptide FF receptor 2 (G-protein coupled receptor 74) (G-protein coupled receptor HLWAR77) (Neuropeptide G-protein coupled receptor)
YPFKPKLTI

SEQ ID NO: 102994 - protein, 11 aa, Homo sapiens
  misc_feature (1)..(11): Table A1; Target 152; HLA-A*01:01; NPFF2; ENSG00000056291; Neuropeptide FF receptor 2 (G-protein coupled receptor 74) (G-protein coupled receptor HLWAR77) (Neuropeptide G-protein coupled receptor)
YSDINITYVNY

SEQ ID NO: 102995 - protein, 8 aa, Homo sapiens
  misc_feature (1)..(8): Table A1; Target 153; HLA-A*01:01; NPFF2; ENSG00000056291; Neuropeptide FF receptor 2 (G-protein coupled receptor 74) (G-protein coupled receptor HLWAR77) (Neuropeptide G-protein coupled receptor)
YSDINITY

SEQ ID NO: 102996 - protein, 9 aa, Homo sapiens
  misc_feature (1)..(9): Table A1; Target 154; HLA-A*31:01; NKX12; ENSG00000229544; NK1 transcription factor-related protein 2 (Homeobox protein SAX-1) (NKX-1.1)
QVKIWFQNR

SEQ ID NO: 102997 - protein, 8 aa, Homo sapiens
  misc_feature (1)..(8): Table A1; Target 155; HLA-B*51:01; NKX12; ENSG00000229544; NK1 transcription factor-related protein 2 (Homeobox protein SAX-1) (NKX-1.1)
TPFYAPRL

SEQ ID NO: 102998 - protein, 10 aa, Homo sapiens
  misc_feature (1)..(10): Table A1; Target 156; HLA-A*11:01; V9GZ46; ENSG00000124092; Transcriptional repressor CTCFL
GTMKIHILQK

SEQ ID NO: 102999 - protein, 9 aa, Homo sapiens
  misc_feature (1)..(9): Table A1; Target 157; HLA-A*29:02; NPBW1; ENSG00000183729; Neuropeptides B/W receptor type 1 (G-protein coupled receptor 7)
SYFITSLSY

SEQ ID NO: 103000 - protein, 9 aa, Homo sapiens
  misc_feature (1)..(9): Table A1; Target 158; HLA-B*35:01; ACTL8; ENSG00000117148; Actin-like protein 8 (Cancer/testis antigen 57) (CT57)
SALDESNTY

SEQ ID NO: 103001 - protein, 9 aa, Homo sapiens
  misc_feature (1)..(9): Table A1; Target 159; HLA-B*18:01; MAGC1; ENSG00000155495; Melanoma-associated antigen C1 (Cancer/testis antigen 7.1) (CT7.1) (MAGE-C1 antigen)
IESEPLFTY

SEQ ID NO: 103002 - protein, 9 aa, Homo sapiens
  misc_feature (1)..(9): Table A1; Target 160; HLA-B*18:01; TERTENSG00000164362; Telomerase reverse transcriptase (EC 2.7.7.49) (HEST2) (Telomerase catalytic subunit) (Telomerase-associated protein 2) (TP2)
DEALGGTAF

SEQ ID NO: 103003 - protein, 9 aa, Homo sapiens
  misc_feature (1)..(9): Table A1; Target 161; HLA-A*26:01; TERTENSG00000164362; Telomerase reverse transcriptase (EC 2.7.7.49) (HEST2) (Telomerase catalytic subunit) (Telomerase-associated protein 2) (TP2)
EVQSDYSSY

SEQ ID NO: 103004 - protein, 9 aa, Homo sapiens
  misc_feature (1)..(9): Table A1; Target 162; HLA-A*29:02; TERTENSG00000164362; Telomerase reverse transcriptase (EC 2.7.7.49) (HEST2) (Telomerase catalytic subunit) (Telomerase-associated protein 2) (TP2)
GLFDVFLRF

SEQ ID NO: 103005 - protein, 9 aa, Homo sapiens
  misc_feature (1)..(9): Table A1; Target 163; HLA-C*01:02; TERTENSG00000164362; Telomerase reverse transcriptase (EC 2.7.7.49) (HEST2) (Telomerase catalytic subunit) (Telomerase-associated protein 2) (TP2)
VVIEQSSSL

SEQ ID NO: 103006 - protein, 9 aa, Homo sapiens
  misc_feature (1)..(9): Table A1; Target 164; HLA-A*11:01; ROP1A; ENSG00000065371; Ropporin-1A (Cancer/testis antigen 91) (CT91) (Rhophilin-associated protein 1A)
SALGVTITK

SEQ ID NO: 103007 - protein, 10 aa, Homo sapiens
  misc_feature (1)..(10): Table A1; Target 165; HLA-A*11:01; CA094; ENSG00000142698; Uncharacterized protein C1orf94
GTASLTLPPK

SEQ ID NO: 103008 - protein, 10 aa, Homo sapiens
  misc_feature (1)..(10): Table A1; Target 166; HLA-B*44:03; CA094; ENSG00000142698; Uncharacterized protein C1orf94
VEVDGPELKF

SEQ ID NO: 103009 - protein, 9 aa, Homo sapiens
  misc_feature (1)..(9): Table A1; Target 167; HLA-B*51:01; BRDTENSG00000137948; Bromodomain testis-specific protein (Cancer/testis antigen 9) (CT9) (RING3-like protein)
DAYKFAADV

SEQ ID NO: 103010 - protein, 9 aa, Homo sapiens
  misc_feature (1)..(9): Table A1; Target 168; HLA-A*33:01; BRDTENSG00000137948; Bromodomain testis-specific protein (Cancer/testis antigen 9) (CT9) (RING3-like protein)
DVNNQLNSR

SEQ ID NO: 103011 - protein, 9 aa, Homo sapiens
  misc_feature (1)..(9): Table A1; Target 169; HLA-B*35:01; BRDTENSG00000137948; Bromodomain testis-specific protein (Cancer/testis antigen 9) (CT9) (RING3-like protein)
IPIEPVESM

SEQ ID NO: 103012 - protein, 10 aa, Homo sapiens
  misc_feature (1)..(10): Table A1; Target 170; HLA-A*11:01; BRDTENSG00000137948; Bromodomain testis-specific protein (Cancer/testis antigen 9) (CT9) (RING3-like protein)
SSQTAAQVTK

SEQ ID NO: 103013 - protein, 9 aa, Homo sapiens
  misc_feature (1)..(9): Table A1; Target 171; HLA-C*01:02; MAGA4; ENSG00000147381; Melanoma-associated antigen 4 (Cancer/testis antigen 1.4) (CT1.4) (MAGE-4 antigen) (MAGE-41 antigen) (MAGE-X2 antigen)
QSPQGASAL

SEQ ID NO: 103014 - protein, 9 aa, Homo sapiens
  misc_feature (1)..(9): Table A1; Target 172; HLA-B*46:01; CX7B2; ENSG00000170516; Cytochrome c oxidase subunit 7B2, mitochondrial (Cytochrome c oxidase polypeptide VIIb2)
AVLASGTAF

SEQ ID NO: 103015 - protein, 11 aa, Homo sapiens
  misc_feature (1)..(11): Table A1; Target 173; HLA-A*26:01; NPSR1; ENSG00000187258; Neuropeptide S receptor (G-protein coupled receptor 154) (G-protein coupled receptor PGR14) (G-protein coupled receptor for asthma susceptibility)
EVVEGKEWGSF

SEQ ID NO: 103016 - protein, 9 aa, Homo sapiens
  misc_feature (1)..(9): Table A1; Target 174; HLA-A*01:01; NPSR1; ENSG00000187258; Neuropeptide S receptor (G-protein coupled receptor 154) (G-protein coupled receptor PGR14) (G-protein coupled receptor for asthma susceptibility)
NSAINPLIY

SEQ ID NO: 103017 - protein, 9 aa, Homo sapiens
  misc_feature (1)..(9): Table A1; Target 175; HLA-A*29:02; NPSR1; ENSG00000187258; Neuropeptide S receptor (G-protein coupled receptor 154) (G-protein coupled receptor PGR14) (G-protein coupled receptor for asthma susceptibility)
RYLQVVLLY

SEQ ID NO: 103018 - protein, 11 aa, Homo sapiens
  misc_feature (1)..(11): Table A1; Target 176; HLA-A*29:02; NPFF2; ENSG00000056291; Neuropeptide FF receptor 2 (G-protein coupled receptor 74) (G-protein coupled receptor HLWAR77) (Neuropeptide G-protein coupled receptor)
FQNPHGETLLY

SEQ ID NO: 103019 - protein, 11 aa, Homo sapiens
  misc_feature (1)..(11): Table A1; Target 177; HLA-A*11:01; LDHCENSG00000166796; L-lactate dehydrogenase C chain (LDH-C) (EC 1.1.1.27) (Cancer/testis antigen 32) (CT32) (LDH testis subunit) (LDH-X)
SVMDLVGSILK

SEQ ID NO: 103020 - protein, 11 aa, Homo sapiens
  misc_feature (1)..(11): Table A1; Target 178; HLA-A*33:01; PAGE5; ENSG00000158639; P antigen family member 5 (PAGE-5) (Cancer/testis antigen 16.1) (CT16.1) (G antigen family E member 1) (Prostate-associated gene 5 protein)
EVRDMSEHVTR

SEQ ID NO: 103021 - protein, 10 aa, Homo sapiens
  misc_feature (1)..(10): Table A1; Target 179; HLA-A*30:02; ONEC3; ENSG00000205922; One cut domain family member 3 (One cut homeobox 3) (Transcription factor ONECUT-3) (OC-3)
AALASVGHLY

SEQ ID NO: 103022 - protein, 11 aa, Homo sapiens
  misc_feature (1)..(11): Table A1; Target 180; HLA-A*01:01; PPBNENSG00000163286; Alkaline phosphatase, placental-like (EC 3.1.3.1) (ALP-1) (Alkaline phosphatase Nagao isozyme) (Germ cell alkaline phosphatase) (GCAP) (Placental alkaline phosphatase-like) (PLAP-like)
VTESESGSPEY

SEQ ID NO: 103023 - protein, 9 aa, Homo sapiens
  misc_feature (1)..(9): Table A1; Target 181; HLA-A*02:07; PLAC1; ENSG00000170965; Placenta-specific protein 1
SIDWFMVTV

SEQ ID NO: 103024 - protein, 8 aa, Homo sapiens
  misc_feature (1)..(8): Table A1; Target 182; HLA-B*18:01; TDRD1; ENSG00000095627; Tudor domain-containing protein 1 (Cancer/testis antigen 41.1) (CT41.1)
LEEEVVTF

SEQ ID NO: 103025 - protein, 9 aa, Homo sapiens
  misc_feature (1)..(9): Table A1; Target 183; HLA-A*26:01; MAGA3; ENSG00000221867; Melanoma-associated antigen 3 (Antigen MZ2-D) (Cancer/testis antigen 1.3) (CT1.3) (MAGE-3 antigen)
FVQENYLEY

SEQ ID NO: 103026 - protein, 9 aa, Homo sapiens
  misc_feature (1)..(9): Table A1; Target 184; HLA-A*29:02; MAGB2; ENSG00000099399; Melanoma-associated antigen B2 (Cancer/testis antigen 3.2) (CT3.2) (DSS-AHC critical interval MAGE superfamily 6) (DAM6) (MAGE XP-2 antigen) (MAGE-B2 antigen)
LVQEKYLEY

SEQ ID NO: 103027 - protein, 9 aa, Homo sapiens
  misc_feature (1)..(9): Table A1; Target 185; HLA-B*35:01; NPBW1; ENSG00000183729; Neuropeptides B/W receptor type 1 (G-protein coupled receptor 7)
NASGPDPAL

SEQ ID NO: 103028 - protein, 9 aa, Homo sapiens
  misc_feature (1)..(9): Table A1; Target 186; HLA-C*01:02; MAGA3; ENSG00000221867; Melanoma-associated antigen 3 (Antigen MZ2-D) (Cancer/testis antigen 1.3) (CT1.3) (MAGE-3 antigen)
QSPQGASSL

SEQ ID NO: 103029 - protein, 9 aa, Homo sapiens
  misc_feature (1)..(9): Table A1; Target 187; HLA-B*44:03; BRDTENSG00000137948; Bromodomain testis-specific protein (Cancer/testis antigen 9) (CT9) (RING3-like protein)
SESEMFPKF

SEQ ID NO: 103030 - protein, 9 aa, Homo sapiens
  misc_feature (1)..(9): Table A1; Target 188; HLA-A*29:02; FATE1; ENSG00000147378; Fetal and adult testis-expressed transcript protein (Cancer/testis antigen 43) (CT43) (Tumor antigen BJ-HCC-2)
NFQGIRFHY

SEQ ID NO: 103031 - protein, 8 aa, Homo sapiens
  misc_feature (1)..(8): Table A1; Target 189; HLA-B*51:01; SAGE1; ENSG00000181433; Sarcoma antigen 1 (Cancer/testis antigen 14) (CT14)
DAAVTHSI

SEQ ID NO: 103032 - protein, 9 aa, Homo sapiens
  misc_feature (1)..(9): Table A1; Target 190; HLA-A*24:02; SAGE1; ENSG00000181433; Sarcoma antigen 1 (Cancer/testis antigen 14) (CT14)
LYKPDSNEF

SEQ ID NO: 103033 - protein, 9 aa, Homo sapiens
  misc_feature (1)..(9): Table A1; Target 191; HLA-B*35:01; SAGE1; ENSG00000181433; Sarcoma antigen 1 (Cancer/testis antigen 14) (CT14)
MAAAGIPSM

SEQ ID NO: 103034 - protein, 9 aa, Homo sapiens
  misc_feature (1)..(9): Table A1; Target 192; HLA-B*35:01; SAGE1; ENSG00000181433; Sarcoma antigen 1 (Cancer/testis antigen 14) (CT14)
MAAGGIPSM

SEQ ID NO: 103035 - protein, 9 aa, Homo sapiens
  misc_feature (1)..(9): Table A1; Target 193; HLA-B*35:01; SAGE1; ENSG00000181433; Sarcoma antigen 1 (Cancer/testis antigen 14) (CT14)
MAATPIPAM

SEQ ID NO: 103036 - protein, 10 aa, Homo sapiens
  misc_feature (1)..(10): Table A1; Target 194; HLA-B*44:03; SAGE1; ENSG00000181433; Sarcoma antigen 1 (Cancer/testis antigen 14) (CT14)
NEFAVGTKNY

SEQ ID NO: 103037 - protein, 10 aa, Homo sapiens
  misc_feature (1)..(10): Table A1; Target 195; HLA-C*02:02; SAGE1; ENSG00000181433; Sarcoma antigen 1 (Cancer/testis antigen 14) (CT14)
NEFAVGTKNY

SEQ ID NO: 103038 - protein, 9 aa, Homo sapiens
  misc_feature (1)..(9): Table A1; Target 196; HLA-A*24:02; SAGE1; ENSG00000181433; Sarcoma antigen 1 (Cancer/testis antigen 14) (CT14)
QYAAVTHNI

SEQ ID NO: 103039 - protein, 9 aa, Homo sapiens
  misc_feature (1)..(9): Table A1; Target 197; HLA-A*03:01; MAGA1; ENSG00000198681; Melanoma-associated antigen 1 (Antigen MZ2-E) (Cancer/testis antigen 1.1) (CT1.1) (MAGE-1 antigen)
SLFRAVITK

SEQ ID NO: 103040 - protein, 9 aa, Homo sapiens
  misc_feature (1)..(9): Table A1; Target 198; HLA-A*29:02; NMUR2; ENSG00000132911; Neuromedin-U receptor 2 (NMU-R2) (G-protein coupled receptor FM-4) (G-protein coupled receptor TGR-1)
FFLPVSVVY

SEQ ID NO: 103041 - protein, 9 aa, Homo sapiens
  misc_feature (1)..(9): Table A1; Target 199; HLA-A*24:02; NPFF2; ENSG00000056291; Neuropeptide FF receptor 2 (G-protein coupled receptor 74) (G-protein coupled receptor HLWAR77) (Neuropeptide G-protein coupled receptor)
IYGFFNENF

SEQ ID NO: 103042 - protein, 11 aa, Homo sapiens
  misc_feature (1)..(11): Table A1; Target 200; HLA-A*33:01; PIWL1; ENSG00000125207; Piwi-like protein 1 (EC 3.1.26.-)
DYIHKNDNVQR

SEQ ID NO: 103043 - protein, 9 aa, Homo sapiens
  misc_feature (1)..(9): Table A1; Target 201; HLA-C*02:02; MAGA4; ENSG00000147381; Melanoma-associated antigen 4 (Cancer/testis antigen 1.4) (CT1.4) (MAGE-4 antigen) (MAGE-41 antigen) (MAGE-X2 antigen)
SALPTTISF

SEQ ID NO: 103044 - protein, 9 aa, Homo sapiens
  misc_feature (1)..(9): Table A1; Target 202; HLA-B*51:01; DPPA2; ENSG00000163530; Developmental pluripotency-associated protein 2 (Pluripotent embryonic stem cell-related gene 1 protein)
IPALPLPTI

SEQ ID NO: 103045 - protein, 9 aa, Homo sapiens
  misc_feature (1)..(9): Table A1; Target 203; HLA-A*11:01; DPPA2; ENSG00000163530; Developmental pluripotency-associated protein 2 (Pluripotent embryonic stem cell-related gene 1 protein)
STSDVKLEK

SEQ ID NO: 103046 - protein, 9 aa, Homo sapiens
  misc_feature (1)..(9): Table A1; Target 204; HLA-B*44:03; ACHA9; ENSG00000174343; Neuronal acetylcholine receptor subunit alpha-9 (Nicotinic acetylcholine receptor subunit alpha-9) (NACHR alpha-9)
AEARPVPHW

SEQ ID NO: 103047 - protein, 10 aa, Homo sapiens
  misc_feature (1)..(10): Table A1; Target 205; HLA-B*35:01; ACHA9; ENSG00000174343; Neuronal acetylcholine receptor subunit alpha-9 (Nicotinic acetylcholine receptor subunit alpha-9) (NACHR alpha-9)
MPAVKNVISY

SEQ ID NO: 103048 - protein, 9 aa, Homo sapiens
  misc_feature (1)..(9): Table A1; Target 206; HLA-B*46:01; MAGA1; ENSG00000198681; Melanoma-associated antigen 1 (Antigen MZ2-E) (Cancer/testis antigen 1.1) (CT1.1) (MAGE-1 antigen)
SAFPTTINF

SEQ ID NO: 103049 - protein, 10 aa, Homo sapiens
  misc_feature (1)..(10): Table A1; Target 207; HLA-B*35:01; P5F1B; ENSG00000212993; Putative POU domain, class 5, transcription factor 1B (Oct4-pg1) (Octamer-binding protein 3-like) (Octamer-binding transcription factor 3-like)
SPFSGGPVSF

SEQ ID NO: 103050 - protein, 9 aa, Homo sapiens
  misc_feature (1)..(9): Table A1; Target 208; HLA-B*35:01; MESP2; ENSG00000188095; Mesoderm posterior protein 2 (Class C basic helix-loop-helix protein 6) (bHLHc6)
TAAPATLEL

SEQ ID NO: 103051 - protein, 9 aa, Homo sapiens
  misc_feature (1)..(9): Table A1; Target 209; HLA-B*46:01; NKX12; ENSG00000229544; NK1 transcription factor-related protein 2 (Homeobox protein SAX-1) (NKX-1.1)
TAAAPGSPF

SEQ ID NO: 103052 - protein, 9 aa, Homo sapiens
  misc_feature (1)..(9): Table A1; Target 210; HLA-B*46:01; J3KR52; ENSG00000185055; EF-hand calcium-binding domain-containing protein 10
IAKVTGVAF

SEQ ID NO: 103053 - protein, 9 aa, Homo sapiens
  misc_feature (1)..(9): Table A1; Target 211; HLA-A*11:01; MAGA4; ENSG00000147381; Melanoma-associated antigen 4 (Cancer/testis antigen 1.4) (CT1.4) (MAGE-4 antigen) (MAGE-41 antigen) (MAGE-X2 antigen)
ALAETSYVK

SEQ ID NO: 103054 - protein, 10 aa, Homo sapiens
  misc_feature (1)..(10): Table A1; Target 212; HLA-A*30:02; NAA11; ENSG00000156269; N-alpha-acetyltransferase 11 (EC 2.3.1.255) (N-terminal acetyltransferase complex ARD1 subunit homolog B) (hARD2) (NatA catalytic subunit Naa11)
AMIENFNAKY

SEQ ID NO: 103055 - protein, 9 aa, Homo sapiens
  misc_feature (1)..(9): Table A1; Target 213; HLA-B*18:01; NAA11; ENSG00000156269; N-alpha-acetyltransferase 11 (EC 2.3.1.255) (N-terminal acetyltransferase complex ARD1 subunit homolog B) (hARD2) (NatA catalytic subunit Naa11)
DEDGKIVGY

SEQ ID NO: 103056 - protein, 10 aa, Homo sapiens
  misc_feature (1)..(10): Table A1; Target 214; HLA-A*26:01; NAA11; ENSG00000156269; N-alpha-acetyltransferase 11 (EC 2.3.1.255) (N-terminal acetyltransferase complex ARD1 subunit homolog B) (hARD2) (NatA catalytic subunit Naa11)
DVPHGHITSL

SEQ ID NO: 103057 - protein, 9 aa, Homo sapiens
  misc_feature (1)..(9): Table A1; Target 215; HLA-B*35:01; NAA11; ENSG00000156269; N-alpha-acetyltransferase 11 (EC 2.3.1.255) (N-terminal acetyltransferase complex ARD1 subunit homolog B) (hARD2) (NatA catalytic subunit Naa11)
LPENYQMKY

SEQ ID NO: 103058 - protein, 9 aa, Homo sapiens
  misc_feature (1)..(9): Table A1; Target 216; HLA-A*02:07; MAGA4; ENSG00000147381; Melanoma-associated antigen 4 (Cancer/testis antigen 1.4) (CT1.4) (MAGE-4 antigen) (MAGE-41 antigen) (MAGE-X2 antigen)
ALLEEEEGV

SEQ ID NO: 103059 - protein, 8 aa, Homo sapiens
  misc_feature (1)..(8): Table A1; Target 217; HLA-B*51:01; S6A18; ENSG00000164363; Sodium-dependent neutral amino acid transporter B(0)AT3 (Sodium- and chloride-dependent transporter XTRP2) (Solute carrier family 6 member 18) (System B(0) neutral amino acid transporter AT3)
DAVVIALV

SEQ ID NO: 103060 - protein, 9 aa, Homo sapiens
  misc_feature (1)..(9): Table A1; Target 218; HLA-A*26:01; S6A18; ENSG00000164363; Sodium-dependent neutral amino acid transporter B(0)AT3 (Sodium- and chloride-dependent transporter XTRP2) (Solute carrier family 6 member 18) (System B(0) neutral amino acid transporter AT3)
EVVGVVYVY

SEQ ID NO: 103061 - protein, 9 aa, Homo sapiens
  misc_feature (1)..(9): Table A1; Target 219; HLA-B*35:01; S6A18; ENSG00000164363; Sodium-dependent neutral amino acid transporter B(0)AT3 (Sodium- and chloride-dependent transporter XTRP2) (Solute carrier family 6 member 18) (System B(0) neutral amino acid transporter AT3)
EVVGVVYVY

SEQ ID NO: 103062 - protein, 8 aa, Homo sapiens
  misc_feature (1)..(8): Table A1; Target 220; HLA-B*51:01; S6A18; ENSG00000164363; Sodium-dependent neutral amino acid transporter B(0)AT3 (Sodium- and chloride-dependent transporter XTRP2) (Solute carrier family 6 member 18) (System B(0) neutral amino acid transporter AT3)
FPYLVLTI

SEQ ID NO: 103063 - protein, 10 aa, Homo sapiens
  misc_feature (1)..(10): Table A1; Target 221; HLA-A*29:02; S6A18; ENSG00000164363; Sodium-dependent neutral amino acid transporter B(0)AT3 (Sodium- and chloride-dependent transporter XTRP2) (Solute carrier family 6 member 18) (System B(0) neutral amino acid transporter AT3)
ILLFWKPLRY

SEQ ID NO: 103064 - protein, 8 aa, Homo sapiens
  misc_feature (1)..(8): Table A1; Target 222; HLA-B*18:01; S6A18; ENSG00000164363; Sodium-dependent neutral amino acid transporter B(0)AT3 (Sodium- and chloride-dependent transporter XTRP2) (Solute carrier family 6 member 18) (System B(0) neutral amino acid transporter AT3)
LEVVGVVY

SEQ ID NO: 103065 - protein, 9 aa, Homo sapiens
  misc_feature (1)..(9): Table A1; Target 223; HLA-A*29:02; S6A18; ENSG00000164363; Sodium-dependent neutral amino acid transporter B(0)AT3 (Sodium- and chloride-dependent transporter XTRP2) (Solute carrier family 6 member 18) (System B(0) neutral amino acid transporter AT3)
LLFWKPLRY

SEQ ID NO: 103066 - protein, 8 aa, Homo sapiens
  misc_feature (1)..(8): Table A1; Target 224; HLA-B*51:01; NPBW1; ENSG00000183729; Neuropeptides B/W receptor type 1 (G-protein coupled receptor 7)
LPQTPLVI

SEQ ID NO: 103067 - protein, 9 aa, Homo sapiens
  misc_feature (1)..(9): Table A1; Target 225; HLA-B*46:01; NPBW1; ENSG00000183729; Neuropeptides B/W receptor type 1 (G-protein coupled receptor 7)
VAIDQYNTF

SEQ ID NO: 103068 - protein, 10 aa, Homo sapiens
  misc_feature (1)..(10): Table A1; Target 226; HLA-A*01:01; DCC ENSG00000187323; Netrin receptor DCC (Colorectal cancer suppressor) (Immunoglobulin superfamily DCC subclass member 1) (Tumor suppressor protein DCC)
ITDPTDPVDY

SEQ ID NO: 103069 - protein, 9 aa, Homo sapiens
  misc_feature (1)..(9): Table A1; Target 227; HLA-A*02:07; DCC ENSG00000187323; Netrin receptor DCC (Colorectal cancer suppressor) (Immunoglobulin superfamily DCC subclass member 1) (Tumor suppressor protein DCC)
LLPASSFSV

SEQ ID NO: 103070 - protein, 9 aa, Homo sapiens
  misc_feature (1)..(9): Table A1; Target 228; HLA-A*02:01; DCC ENSG00000187323; Netrin receptor DCC (Colorectal cancer suppressor) (Immunoglobulin superfamily DCC subclass member 1) (Tumor suppressor protein DCC)
SIWEGLVTV

SEQ ID NO: 103071 - protein, 9 aa, Homo sapiens
  misc_feature (1)..(9): Table A1; Target 229; HLA-A*30:02; BRDTENSG00000137948; Bromodomain testis-specific protein (Cancer/testis antigen 9) (CT9) (RING3-like protein)
IVNPPPPEY

SEQ ID NO: 103072 - protein, 9 aa, Homo sapiens
  misc_feature (1)..(9): Table A1; Target 230; HLA-A*02:01; ACHA9; ENSG00000174343; Neuronal acetylcholine receptor subunit alpha-9 (Nicotinic acetylcholine receptor subunit alpha-9) (NACHR alpha-9)
FLAPLSFYL

SEQ ID NO: 103073 - protein, 9 aa, Homo sapiens
  misc_feature (1)..(9): Table A1; Target 231; HLA-A*29:02; ACHA9; ENSG00000174343; Neuronal acetylcholine receptor subunit alpha-9 (Nicotinic acetylcholine receptor subunit alpha-9) (NACHR alpha-9)
VNTNVVLRY

SEQ ID NO: 103074 - protein, 10 aa, Homo sapiens
  misc_feature (1)..(10): Table A1; Target 232; HLA-B*18:01; SAGE1; ENSG00000181433; Sarcoma antigen 1 (Cancer/testis antigen 14) (CT14)
NEFAVGTKNY

SEQ ID NO: 103075 - protein, 9 aa, Homo sapiens
  misc_feature (1)..(9): Table A1; Target 233; HLA-A*11:01; V9GZ46; ENSG00000124092; Transcriptional repressor CTCFL
ASVEASKLK

SEQ ID NO: 103076 - protein, 9 aa, Homo sapiens
  misc_feature (1)..(9): Table A1; Target 234; HLA-A*26:01; UROL1; ENSG00000177398; Uromodulin-like 1 (Olfactorin)
EVISVQMSM

SEQ ID NO: 103077 - protein, 9 aa, Homo sapiens
  misc_feature (1)..(9): Table A1; Target 235; HLA-B*35:01; UROL1; ENSG00000177398; Uromodulin-like 1 (Olfactorin)
TATLLIVRY

SEQ ID NO: 103078 - protein, 10 aa, Homo sapiens
  misc_feature (1)..(10): Table A1; Target 236; HLA-B*44:02; UROL1; ENSG00000177398; Uromodulin-like 1 (Olfactorin)
TEDPTGHFLW

SEQ ID NO: 103079 - protein, 10 aa, Homo sapiens
  misc_feature (1)..(10): Table A1; Target 237; HLA-B*44:03; UROL1; ENSG00000177398; Uromodulin-like 1 (Olfactorin)
TEDPTGHFLW

SEQ ID NO: 103080 - protein, 8 aa, Homo sapiens
  misc_feature (1)..(8): Table A1; Target 238; HLA-B*08:01; UROL1; ENSG00000177398; Uromodulin-like 1 (Olfactorin)
TIKTKYVL

SEQ ID NO: 103081 - protein, 8 aa, Homo sapiens
  misc_feature (1)..(8): Table A1; Target 239; HLA-B*18:01; UROL1; ENSG00000177398; Uromodulin-like 1 (Olfactorin)
YEVISVQM

SEQ ID NO: 103082 - protein, 10 aa, Homo sapiens
  misc_feature (1)..(10): Table A1; Target 240; HLA-A*02:07; LN28A; ENSG00000131914; Protein lin-28 homolog A (Lin-28A) (Zinc finger CCHC domain-containing protein 1)
ALDPPVDVFV

SEQ ID NO: 103083 - protein, 9 aa, Homo sapiens
  misc_feature (1)..(9): Table A1; Target 241; HLA-B*35:01; PPBNENSG00000163286; Alkaline phosphatase, placental-like (EC 3.1.3.1) (ALP-1) (Alkaline phosphatase Nagao isozyme) (Germ cell alkaline phosphatase) (GCAP) (Placental alkaline phosphatase-like) (PLAP-like)
HAGEDVAVF

SEQ ID NO: 103084 - protein, 9 aa, Homo sapiens
  misc_feature (1)..(9): Table A1; Target 242; HLA-C*02:02; MAGA4; ENSG00000147381; Melanoma-associated antigen 4 (Cancer/testis antigen 1.4) (CT1.4) (MAGE-4 antigen) (MAGE-41 antigen) (MAGE-X2 antigen)
AETSYVKVL

SEQ ID NO: 103085 - protein, 9 aa, Homo sapiens
  misc_feature (1)..(9): Table A1; Target 243; HLA-A*29:02; TRI51; ENSG00000124900; Tripartite motif-containing protein 51 (SPRY domain-containing protein 5)
AFGDILHRY

SEQ ID NO: 103086 - protein, 9 aa, Homo sapiens
  misc_feature (1)..(9): Table A1; Target 244; HLA-A*26:01; ACHA9; ENSG00000174343; Neuronal acetylcholine receptor subunit alpha-9 (Nicotinic acetylcholine receptor subunit alpha-9) (NACHR alpha-9)
ENVPLIGKY

SEQ ID NO: 103087 - protein, 10 aa, Homo sapiens
  misc_feature (1)..(10): Table A1; Target 245; HLA-A*11:01; PPBNENSG00000163286; Alkaline phosphatase, placental-like (EC 3.1.3.1) (ALP-1) (Alkaline phosphatase Nagao isozyme) (Germ cell alkaline phosphatase) (GCAP) (Placental alkaline phosphatase-like) (PLAP-like)
SSIFGLAPGK

SEQ ID NO: 103088 - protein, 9 aa, Homo sapiens
  misc_feature (1)..(9): Table A1; Target 246; HLA-B*51:01; ROP1A; ENSG00000065371; Ropporin-1A (Cancer/testis antigen 91) (CT91) (Rhophilin-associated protein 1A)
LPTDLFNSV

SEQ ID NO: 103089 - protein, 9 aa, Homo sapiens
  misc_feature (1)..(9): Table A1; Target 247; HLA-A*33:01; ACTL8; ENSG00000117148; Actin-like protein 8 (Cancer/testis antigen 57) (CT57)
DTFSYPIER

SEQ ID NO: 103090 - protein, 10 aa, Homo sapiens
  misc_feature (1)..(10): Table A1; Target 248; HLA-A*26:01; MAGC2; ENSG00000046774; Melanoma-associated antigen C2 (Cancer/testis antigen 10) (CT10) (Hepatocellular carcinoma-associated antigen 587) (MAGE-C2 antigen) (MAGE-E1 antigen)
EVPSGVIPNL

SEQ ID NO: 103091 - protein, 9 aa, Homo sapiens
  misc_feature (1)..(9): Table A1; Target 249; HLA-A*24:02; SAGE1; ENSG00000181433; Sarcoma antigen 1 (Cancer/testis antigen 14) (CT14)
LYATVIHDI

SEQ ID NO: 103092 - protein, 9 aa, Homo sapiens
  misc_feature (1)..(9): Table A1; Target 250; HLA-B*35:01; MAGA3; ENSG00000221867; Melanoma-associated antigen 3 (Antigen MZ2-D) (Cancer/testis antigen 1.3) (CT1.3) (MAGE-3 antigen)
FVQENYLEY

SEQ ID NO: 103093 - protein, 10 aa, Homo sapiens
  misc_feature (1)..(10): Table A1; Target 251; HLA-A*11:01; NPSR1; ENSG00000187258; Neuropeptide S receptor (G-protein coupled receptor 154) (G-protein coupled receptor PGR14) (G-protein coupled receptor for asthma susceptibility)
SSYNRGLISK

SEQ ID NO: 103094 - protein, 10 aa, Homo sapiens
  misc_feature (1)..(10): Table A1; Target 252; HLA-A*02:07; ACTL8; ENSG00000117148; Actin-like protein 8 (Cancer/testis antigen 57) (CT57)
ALDESNTYQL

SEQ ID NO: 103095 - protein, 10 aa, Homo sapiens
  misc_feature (1)..(10): Table A1; Target 253; HLA-B*44:02; CRLF2; ENSG00000205755; Cytokine receptor-like factor 2 (Cytokine receptor-like 2) (IL-XR) (Thymic stromal lymphopoietin protein receptor) (TSLP receptor)
AEQRDDILYF

SEQ ID NO: 103096 - protein, 10 aa, Homo sapiens
  misc_feature (1)..(10): Table A1; Target 254; HLA-B*44:03; CRLF2; ENSG00000205755; Cytokine receptor-like factor 2 (Cytokine receptor-like 2) (IL-XR) (Thymic stromal lymphopoietin protein receptor) (TSLP receptor)
AEQRDDILYF

SEQ ID NO: 103097 - protein, 11 aa, Homo sapiens
  misc_feature (1)..(11): Table A1; Target 255; HLA-A*02:01; MAGA4; ENSG00000147381; Melanoma-associated antigen 4 (Cancer/testis antigen 1.4) (CT1.4) (MAGE-4 antigen) (MAGE-41 antigen) (MAGE-X2 antigen)
FLWGPRALAET

SEQ ID NO: 103098 - protein, 9 aa, Homo sapiens
  misc_feature (1)..(9): Table A1; Target 256; HLA-A*11:01; X6RD31; ENSG00000234068; P antigen family member 2 (Fragment)
IVQEPTEEK

SEQ ID NO: 103099 - protein, 11 aa, Homo sapiens
  misc_feature (1)..(11): Table A1; Target 257; HLA-B*44:03; TDRD1; ENSG00000095627; Tudor domain-containing protein 1 (Cancer/testis antigen 41.1) (CT41.1)
EESVLVGYVDY

SEQ ID NO: 103100 - protein, 9 aa, Homo sapiens
  misc_feature (1)..(9): Table A1; Target 258; HLA-B*08:01; BRDTENSG00000137948; Bromodomain testis-specific protein (Cancer/testis antigen 9) (CT9) (RING3-like protein)
EVKARTQEL

SEQ ID NO: 103101 - protein, 11 aa, Homo sapiens
  misc_feature (1)..(11): Table A1; Target 259; HLA-A*11:01; BRDTENSG00000137948; Bromodomain testis-specific protein (Cancer/testis antigen 9) (CT9) (RING3-like protein)
SSDSESEMFPK

SEQ ID NO: 103102 - protein, 9 aa, Homo sapiens
  misc_feature (1)..(9): Table A1; Target 260; HLA-B*35:01; V9GZ46; ENSG00000124092; Transcriptional repressor CTCFL
DANFIPTVY

SEQ ID NO: 103103 - protein, 9 aa, Homo sapiens
  misc_feature (1)..(9): Table A1; Target 261; HLA-B*44:03; NALP7; ENSG00000167634; NACHT, LRR and PYD domains-containing protein 7 (Nucleotide-binding oligomerization domain protein 12) (PYRIN-containing APAF1-like protein 3)
QESDLRLFL

SEQ ID NO: 103104 - protein, 9 aa, Homo sapiens
  misc_feature (1)..(9): Table A1; Target 262; HLA-A*01:01; SSX1ENSG00000126752; Protein SSX1 (Cancer/testis antigen 5.1) (CT5.1) (Synovial sarcoma, X breakpoint 1)
YSEKISYVY

SEQ ID NO: 103105 - protein, 10 aa, Homo sapiens
  misc_feature (1)..(10): Table A1; Target 263; HLA-A*03:01; LDHCENSG00000166796; L-lactate dehydrogenase C chain (LDH-C) (EC 1.1.1.27) (Cancer/testis antigen 32) (CT32) (LDH testis subunit) (LDH-X)
RVHPVSTMVK

SEQ ID NO: 103106 - protein, 11 aa, Homo sapiens
  misc_feature (1)..(11): Table A1; Target 264; HLA-B*44:03; NAA11; ENSG00000156269; N-alpha-acetyltransferase 11 (EC 2.3.1.255) (N-terminal acetyltransferase complex ARD1 subunit homolog B) (hARD2) (NatA catalytic subunit Naa11)
AEDEDGKIVGY

SEQ ID NO: 103107 - protein, 10 aa, Homo sapiens
  misc_feature (1)..(10): Table A1; Target 265; HLA-B*44:03; VCX1ENSG00000182583; Variable charge X-linked protein 1 (Variable charge protein on X with ten repeats) (VCX-10r) (Variably charged protein X-B1) (VCX-B1)
EEPLSVTAKY

SEQ ID NO: 103108 - protein, 10 aa, Homo sapiens
  misc_feature (1)..(10): Table A1; Target 266; HLA-A*29:02; S6A18; ENSG00000164363; Sodium-dependent neutral amino acid transporter B(0)AT3 (Sodium- and chloride-dependent transporter XTRP2) (Solute carrier family 6 member 18) (System B(0) neutral amino acid transporter AT3)
AFLEVVGVVY

SEQ ID NO: 103109 - protein, 9 aa, Homo sapiens
  misc_feature (1)..(9): Table A1; Target 267; HLA-A*29:02; NPSR1; ENSG00000187258; Neuropeptide S receptor (G-protein coupled receptor 154) (G-protein coupled receptor PGR14) (G-protein coupled receptor for asthma susceptibility)
ILTDINWRF

SEQ ID NO: 103110 - protein, 9 aa, Homo sapiens
  misc_feature (1)..(9): Table A1; Target 268; HLA-B*18:01; TRPC5; ENSG00000072315; Short transient receptor potential channel 5 (TrpC5) (Transient receptor protein 5) (TRP-5) (hTRP-5) (hTRP5)
SEDPILTAF

SEQ ID NO: 103111 - protein, 9 aa, Homo sapiens
  misc_feature (1)..(9): Table A1; Target 269; HLA-B*44:03; TRPC5; ENSG00000072315; Short transient receptor potential channel 5 (TrpC5) (Transient receptor protein 5) (TRP-5) (hTRP-5) (hTRP5)
SEDPILTAF

SEQ ID NO: 103112 - protein, 9 aa, Homo sapiens
  misc_feature (1)..(9): Table A1; Target 270; HLA-B*44:03; INSL6; ENSG00000120210; Insulin-like peptide INSL6 (Insulin-like peptide 6) (Relaxin/insulin-like factor 1) [Cleaved into: Insulin-like peptide INSL6 B chain; Insulin-like peptide INSL6 A chain]
EETPFSRLI

SEQ ID NO: 103113 - protein, 9 aa, Homo sapiens
  misc_feature (1)..(9): Table A1; Target 271; HLA-A*24:02; INSL6; ENSG00000120210; Insulin-like peptide INSL6 (Insulin-like peptide 6) (Relaxin/insulin-like factor 1) [Cleaved into: Insulin-like peptide INSL6 B chain; Insulin-like peptide INSL6 A chain]
VYIHENAKF

SEQ ID NO: 103114 - protein, 9 aa, Homo sapiens
  misc_feature (1)..(9): Table A1; Target 272; HLA-C*01:02; TDRD1; ENSG00000095627; Tudor domain-containing protein 1 (Cancer/testis antigen 41.1) (CT41.1)
ITPQRQSAL

SEQ ID NO: 103115 - protein, 9 aa, Homo sapiens
  misc_feature (1)..(9): Table A1; Target 273; HLA-B*51:01; CNTP5; ENSG00000155052; Contactin-associated protein-like 5 (Cell recognition molecule Caspr5)
EPYPVTKNI

SEQ ID NO: 103116 - protein, 9 aa, Homo sapiens
  misc_feature (1)..(9): Table A1; Target 274; HLA-B*35:01; X6RE50; ENSG00000004809; Solute carrier family 22 member 16 (Fragment)
IAAAFAVDY

SEQ ID NO: 103117 - protein, 8 aa, Homo sapiens
  misc_feature (1)..(8): Table A1; Target 275; HLA-B*35:01; NMUR2; ENSG00000132911; Neuromedin-U receptor 2 (NMU-R2) (G-protein coupled receptor FM-4) (G-protein coupled receptor TGR-1)
MPLEVYEM

SEQ ID NO: 103118 - protein, 11 aa, Homo sapiens
  misc_feature (1)..(11): Table A1; Target 276; HLA-B*44:03; TRIMM; ENSG00000179046; Probable E3 ubiquitin-protein ligase TRIML2 (EC 2.3.2.27) (RING-type E3 ubiquitin transferase TRIML2) (SPRY domain-containing protein 6) (Tripartite motif family-like
AEATQSMNAKY

SEQ ID NO: 103119 - protein, 11 aa, Homo sapiens
  misc_feature (1)..(11): Table A1; Target 277; HLA-C*02:02; TRIMM; ENSG00000179046; Probable E3 ubiquitin-protein ligase TRIML2 (EC 2.3.2.27) (RING-type E3 ubiquitin transferase TRIML2) (SPRY domain-containing protein 6) (Tripartite motif family-like
AEATQSMNAKY

SEQ ID NO: 103120 - protein, 9 aa, Homo sapiens
  misc_feature (1)..(9): Table A1; Target 278; HLA-A*30:02; TRIMM; ENSG00000179046; Probable E3 ubiquitin-protein ligase TRIML2 (EC 2.3.2.27) (RING-type E3 ubiquitin transferase TRIML2) (SPRY domain-containing protein 6) (Tripartite motif family-like
ATQSMNAKY

SEQ ID NO: 103121 - protein, 9 aa, Homo sapiens
  misc_feature (1)..(9): Table A1; Target 279; HLA-A*02:07; TRIMM; ENSG00000179046; Probable E3 ubiquitin-protein ligase TRIML2 (EC 2.3.2.27) (RING-type E3 ubiquitin transferase TRIML2) (SPRY domain-containing protein 6) (Tripartite motif family-like
KLDTVGVFL

SEQ ID NO: 103122 - protein, 9 aa, Homo sapiens
  misc_feature (1)..(9): Table A1; Target 280; HLA-B*44:03; MEIG1; ENSG00000197889; Meiosis expressed gene 1 protein homolog
EEIENLYRF

SEQ ID NO: 103123 - protein, 11 aa, Homo sapiens
  misc_feature (1)..(11): Table A1; Target 281; HLA-A*29:02; NALP7; ENSG00000167634; NACHT, LRR and PYD domains-containing protein 7 (Nucleotide-binding oligomerization domain protein 12) (PYRIN-containing APAF1-like protein 3)
VLLDEGAMLLY

SEQ ID NO: 103124 - protein, 10 aa, Homo sapiens
  misc_feature (1)..(10): Table A1; Target 282; HLA-B*44:03; S100G; ENSG00000169906; Protein S100-G (Calbindin-D9k) (S100 calcium-binding protein G) (Vitamin D-dependent calcium-binding protein, intestinal) (CABP)
EEFQVLVKKI

SEQ ID NO: 103125 - protein, 9 aa, Homo sapiens
  misc_feature (1)..(9): Table A1; Target 283; HLA-A*02:07; S100G; ENSG00000169906; Protein S100-G (Calbindin-D9k) (S100 calcium-binding protein G) (Vitamin D-dependent calcium-binding protein, intestinal) (CABP)
TLDDLFQEL

SEQ ID NO: 103126 - protein, 9 aa, Homo sapiens
  misc_feature (1)..(9): Table A1; Target 284; HLA-C*04:01; MAGAA; ENSG00000124260; Melanoma-associated antigen 10 (Cancer/testis antigen 1.10) (CT1.10) (MAGE-10 antigen)
TYDGMLSDV

SEQ ID NO: 103127 - protein, 8 aa, Homo sapiens
  misc_feature (1)..(8): Table A1; Target 285; HLA-B*18:01; TRPC5; ENSG00000072315; Short transient receptor potential channel 5 (TrpC5) (Transient receptor protein 5) (TRP-5) (hTRP-5) (hTRP5)
TEFVGATM

SEQ ID NO: 103128 - protein, 9 aa, Homo sapiens
  misc_feature (1)..(9): Table A1; Target 286; HLA-C*01:02; MAGA6; ENSG00000197172; Melanoma-associated antigen 6 (Cancer/testis antigen 1.6) (CT1.6) (MAGE-6 antigen) (MAGE3B antigen)
QSPQGASSL

SEQ ID NO: 103129 - protein, 8 aa, Homo sapiens
  misc_feature (1)..(8): Table A1; Target 287; HLA-B*51:01; A0A1B0GTJ6; ENSG00000268655; HCG1796489
IPFTPPTV

SEQ ID NO: 103130 - protein, 11 aa, Homo sapiens
  misc_feature (1)..(11): Table A1; Target 288; HLA-A*11:01; A0A1B0GTJ6; ENSG00000268655; HCG1796489
TVADPLPQVAK

SEQ ID NO: 103131 - protein, 9 aa, Homo sapiens
  misc_feature (1)..(9): Table A1; Target 289; HLA-A*02:01; A0A1B0GTJ6; ENSG00000268655; HCG1796489
TVADPLPQV

SEQ ID NO: 103132 - protein, 9 aa, Homo sapiens
  misc_feature (1)..(9): Table A1; Target 290; HLA-A*29:02; X6RE50; ENSG00000004809; Solute carrier family 22 member 16 (Fragment)
GYLVVGFVY

SEQ ID NO: 103133 - protein, 11 aa, Homo sapiens
  misc_feature (1)..(11): Table A1; Target 291; HLA-A*30:02; CRSPL; ENSG00000101074; Peptidase inhibitor R3HDML (Cysteine-rich secretory protein R3HDML)
GQNLSIHSGQY

SEQ ID NO: 103134 - protein, 11 aa, Homo sapiens
  misc_feature (1)..(11): Table A1; Target 292; HLA-A*30:02; CRSPL; ENSG00000101074; Peptidase inhibitor R3HDML (Cysteine-rich secretory protein R3HDML)
SVYPPAANMEY

SEQ ID NO: 103135 - protein, 9 aa, Homo sapiens
  misc_feature (1)..(9): Table A1; Target 293; HLA-A*11:01; DMRT1; ENSG00000137090; Doublesex- and mab-3-related transcription factor 1 (DM domain expressed in testis protein 1)
SSSSPISNK

SEQ ID NO: 103136 - protein, 10 aa, Homo sapiens
  misc_feature (1)..(10): Table A1; Target 294; HLA-A*29:02; MAJIN; ENSG00000168070; Membrane-anchored junction protein
FLSSLFPFRY

SEQ ID NO: 103137 - protein, 10 aa, Homo sapiens
  misc_feature (1)..(10): Table A1; Target 295; HLA-B*18:01; MAJIN; ENSG00000168070; Membrane-anchored junction protein
QELEVGKEAY

SEQ ID NO: 103138 - protein, 10 aa, Homo sapiens
  misc_feature (1)..(10): Table A1; Target 296; HLA-B*44:03; MAJIN; ENSG00000168070; Membrane-anchored junction protein
QELEVGKEAY

SEQ ID NO: 103139 - protein, 10 aa, Homo sapiens
  misc_feature (1)..(10): Table A1; Target 297; HLA-C*02:02; MAJIN; ENSG00000168070; Membrane-anchored junction protein
QELEVGKEAY

SEQ ID NO: 103140 - protein, 10 aa, Homo sapiens
  misc_feature (1)..(10): Table A1; Target 298; HLA-B*44:02; MAJIN; ENSG00000168070; Membrane-anchored junction protein
SEQPPASLGF

SEQ ID NO: 103141 - protein, 10 aa, Homo sapiens
  misc_feature (1)..(10): Table A1; Target 299; HLA-B*44:03; MAJIN; ENSG00000168070; Membrane-anchored junction protein
SEQPPASLGF

SEQ ID NO: 103142 - protein, 10 aa, Homo sapiens
  misc_feature (1)..(10): Table A1; Target 300; HLA-C*02:02; MAJIN; ENSG00000168070; Membrane-anchored junction protein
SEQPPASLGF

SEQ ID NO: 103143 - protein, 11 aa, Homo sapiens
  misc_feature (1)..(11): Table A1; Target 301; HLA-B*44:03; PDCL2; ENSG00000163440; Phosducin-like protein 2
GELREISGNQY

SEQ ID NO: 103144 - protein, 9 aa, Homo sapiens
  misc_feature (1)..(9): Table A1; Target 302; HLA-A*26:01; STRA8; ENSG00000146857; Stimulated by retinoic acid gene 8 protein homolog
EVKKEYASM

SEQ ID NO: 103145 - protein, 9 aa, Homo sapiens
  misc_feature (1)..(9): Table A1; Target 303; HLA-A*33:01; MAGC2; ENSG00000046774; Melanoma-associated antigen C2 (Cancer/testis antigen 10) (CT10) (Hepatocellular carcinoma-associated antigen 587) (MAGE-C2 antigen) (MAGE-E1 antigen)
DYFPVILKR

SEQ ID NO: 103146 - protein, 10 aa, Homo sapiens
  misc_feature (1)..(10): Table A1; Target 304; HLA-B*44:03; LN28B; ENSG00000187772; Protein lin-28 homolog B (Lin-28B)
KEGEPVEFTF

SEQ ID NO: 103147 - protein, 9 aa, Homo sapiens
  misc_feature (1)..(9): Table A1; Target 305; HLA-A*11:01; ACTL8; ENSG00000117148; Actin-like protein 8 (Cancer/testis antigen 57) (CT57)
TVAVTQMNK

SEQ ID NO: 103148 - protein, 9 aa, Homo sapiens
  misc_feature (1)..(9): Table A1; Target 306; HLA-A*02:07; SMC1B; ENSG00000077935; Structural maintenance of chromosomes protein 1B (SMC protein 1B) (SMC-1-beta) (SMC-1B)
VLDEVDAAL

SEQ ID NO: 103149 - protein, 9 aa, Homo sapiens
  misc_feature (1)..(9): Table A1; Target 307; HLA-A*26:01; UROL1; ENSG00000177398; Uromodulin-like 1 (Olfactorin)
DVRIEVGLY

SEQ ID NO: 103150 - protein, 9 aa, Homo sapiens
  misc_feature (1)..(9): Table A1; Target 308; HLA-B*35:01; PO4F1; ENSG00000152192; POU domain, class 4, transcription factor 1 (Brain-specific homeobox/POU domain protein 3A) (Brain-3A) (Brn-3A) (Homeobox/POU domain protein RDC-1) (Oct-T1)
HPFKPDATY

SEQ ID NO: 103151 - protein, 11 aa, Homo sapiens
  misc_feature (1)..(11): Table A1; Target 309; HLA-A*11:01; ZPLD1; ENSG00000170044; Zona pellucida-like domain-containing protein 1 (ZP domain-containing protein 1)
AVLSAGPIITR

SEQ ID NO: 103152 - protein, 11 aa, Homo sapiens
  misc_feature (1)..(11): Table A1; Target 310; HLA-A*26:01; ZPLD1; ENSG00000170044; Zona pellucida-like domain-containing protein 1 (ZP domain-containing protein 1)
DTPDPPTIISY

SEQ ID NO: 103153 - protein, 10 aa, Homo sapiens
  misc_feature (1)..(10): Table A1; Target 311; HLA-B*35:01; ZPLD1; ENSG00000170044; Zona pellucida-like domain-containing protein 1 (ZP domain-containing protein 1)
FPAERDISVY

SEQ ID NO: 103154 - protein, 9 aa, Homo sapiens
  misc_feature (1)..(9): Table A1; Target 312; HLA-A*26:01; ZPLD1; ENSG00000170044; Zona pellucida-like domain-containing protein 1 (ZP domain-containing protein 1)
STIPGVSAY

SEQ ID NO: 103155 - protein, 9 aa, Homo sapiens
  misc_feature (1)..(9): Table A1; Target 313; HLA-B*46:01; ZPLD1; ENSG00000170044; Zona pellucida-like domain-containing protein 1 (ZP domain-containing protein 1)
STIPGVSAY

SEQ ID NO: 103156 - protein, 9 aa, Homo sapiens
  misc_feature (1)..(9): Table A1; Target 314; HLA-A*30:02; SYCY2; ENSG00000244476; Syncytin-2 (Endogenous retrovirus group FRD member 1) (Envelope polyprotein) (HERV-FRD) (HERV-FRD; 6p24.1 provirus ancestral Env polyprotein)
  misc_feature (1)..(9): [Cleaved into: Surface protein (SU); Transmembrane protein (TM)]
AGMTIATSY

SEQ ID NO: 103157 - protein, 11 aa, Homo sapiens
  misc_feature (1)..(11): Table A1; Target 315; HLA-A*33:01; SYCY2; ENSG00000244476; Syncytin-2 (Endogenous retrovirus group FRD member 1) (Envelope polyprotein) (HERV-FRD) (HERV-FRD; 6p24.1 provirus ancestral Env polyprotein)
  misc_feature (1)..(11): [Cleaved into: Surface protein (SU); Transmembrane protein (TM)]
DSLAAVVLQNR

SEQ ID NO: 103158 - protein, 9 aa, Homo sapiens
  misc_feature (1)..(9): Table A1; Target 316; HLA-A*03:01; SYCY2; ENSG00000244476; Syncytin-2 (Endogenous retrovirus group FRD member 1) (Envelope polyprotein) (HERV-FRD) (HERV-FRD; 6p24.1 provirus ancestral Env polyprotein)
  misc_feature (1)..(9): [Cleaved into: Surface protein (SU); Transmembrane protein (TM)]
GTGIAGITK

SEQ ID NO: 103159 - protein, 9 aa, Homo sapiens
  misc_feature (1)..(9): Table A1; Target 317; HLA-A*11:01; SYCY2; ENSG00000244476; Syncytin-2 (Endogenous retrovirus group FRD member 1) (Envelope polyprotein) (HERV-FRD) (HERV-FRD; 6p24.1 provirus ancestral Env polyprotein)
  misc_feature (1)..(9): [Cleaved into: Surface protein (SU); Transmembrane protein (TM)]
GTGIAGITK

SEQ ID NO: 103160 - protein, 11 aa, Homo sapiens
  misc_feature (1)..(11): Table A1; Target 318; HLA-A*11:01; SYCY2; ENSG00000244476; Syncytin-2 (Endogenous retrovirus group FRD member 1) (Envelope polyprotein) (HERV-FRD) (HERV-FRD; 6p24.1 provirus ancestral Env polyprotein)
  misc_feature (1)..(11): [Cleaved into: Surface protein (SU); Transmembrane protein (TM)]
GTGTGIAGITK

SEQ ID NO: 103161 - protein, 9 aa, Homo sapiens
  misc_feature (1)..(9): Table A1; Target 319; HLA-B*18:01; SYCY2; ENSG00000244476; Syncytin-2 (Endogenous retrovirus group FRD member 1) (Envelope polyprotein) (HERV-FRD) (HERV-FRD; 6p24.1 provirus ancestral Env polyprotein)
  misc_feature (1)..(9): [Cleaved into: Surface protein (SU); Transmembrane protein (TM)]
IEAELHISY

SEQ ID NO: 103162 - protein, 9 aa, Homo sapiens
  misc_feature (1)..(9): [Cleaved into: Surface protein (SU); Transmembrane protein (TM)]
IEAELHISY

SEQ ID NO: 103163 - protein, 8 aa, Homo sapiens
  misc_feature (1)..(8): Table A1; Target 321; HLA-B*51:01; SYCY2; ENSG00000244476; Syncytin-2 (Endogenous retrovirus group FRD member 1) (Envelope polyprotein) (HERV-FRD) (HERV-FRD; 6p24.1 provirus ancestral Env polyprotein)
  misc_feature (1)..(8): [Cleaved into: Surface protein (SU); Transmembrane protein (TM)]
LPLTGPLV

SEQ ID NO: 103164 - protein, 9 aa, Homo sapiens
  misc_feature (1)..(9): Table A1; Target 322; HLA-A*01:01; SYCY2; ENSG00000244476; Syncytin-2 (Endogenous retrovirus group FRD member 1) (Envelope polyprotein) (HERV-FRD) (HERV-FRD; 6p24.1 provirus ancestral Env polyprotein)
  misc_feature (1)..(9): [Cleaved into: Surface protein (SU); Transmembrane protein (TM)]
TVDSNQQTY

SEQ ID NO: 103165 - protein, 10 aa, Homo sapiens
  misc_feature (1)..(10): Table A1; Target 323; HLA-A*24:02; SYCY2; ENSG00000244476; Syncytin-2 (Endogenous retrovirus group FRD member 1) (Envelope polyprotein) (HERV-FRD) (HERV-FRD; 6p24.1 provirus ancestral Env polyprotein)
  misc_feature (1)..(10): [Cleaved into: Surface protein (SU); Transmembrane protein (TM)]
TYQTYTHNQF

SEQ ID NO: 103166 - protein, 9 aa, Homo sapiens
  misc_feature (1)..(9): Table A1; Target 324; HLA-B*51:01; ADAM2; ENSG00000104755; Disintegrin and metalloproteinase domain-containing protein 2 (ADAM 2) (Cancer/testis antigen 15) (CT15) (Fertilin subunit beta) (PH-30) (PH30) (PH30-beta)
DPFFKQQAV

SEQ ID NO: 103167 - protein, 10 aa, Homo sapiens
  misc_feature (1)..(10): Table A1; Target 325; HLA-B*44:03; ADAM2; ENSG00000104755; Disintegrin and metalloproteinase domain-containing protein 2 (ADAM 2) (Cancer/testis antigen 15) (CT15) (Fertilin subunit beta) (PH-30) (PH30) (PH30-beta)
GEANELLHTF

SEQ ID NO: 103168 - protein, 9 aa, Homo sapiens
  misc_feature (1)..(9): Table A1; Target 326; HLA-C*04:01; ADAM2; ENSG00000104755; Disintegrin and metalloproteinase domain-containing protein 2 (ADAM 2) (Cancer/testis antigen 15) (CT15) (Fertilin subunit beta) (PH-30) (PH30) (PH30-beta)
NFDSLPVQI

SEQ ID NO: 103169 - protein, 11 aa, Homo sapiens
  misc_feature (1)..(11): Table A1; Target 327; HLA-A*11:01; FHL17; ENSG00000132446; Ferritin heavy polypeptide-like 17 (Cancer/testis antigen 38) (CT38)
ATAQPSQVRQK

SEQ ID NO: 103170 - protein, 9 aa, Homo sapiens
  misc_feature (1)..(9): Table A1; Target 328; HLA-A*11:01; V9GZ46; ENSG00000124092; Transcriptional repressor CTCFL
SVLSEQFTK

SEQ ID NO: 103171 - protein, 9 aa, Homo sapiens
  misc_feature (1)..(9): Table A1; Target 329; HLA-A*33:01; I22R2; ENSG00000164485; Interleukin-22 receptor subunit alpha-2 (IL-22 receptor subunit alpha-2) (IL-22R-alpha-2) (IL-22RA2) (Cytokine receptor class-II member 10)
  misc_feature (1)..(9): (Cytokine receptor family 2 member 10) (CRF2-10) (Cytokine receptor family type 2, soluble 1) (CRF2-S1) (Interleukin-22-binding protein) (IL-22BP) (IL22BP) (ZcytoR16)
DIQEPYYGR

SEQ ID NO: 103172 - protein, 9 aa, Homo sapiens
  misc_feature (1)..(9): Table A1; Target 330; HLA-A*01:01; I22R2; ENSG00000164485; Interleukin-22 receptor subunit alpha-2 (IL-22 receptor subunit alpha-2) (IL-22R-alpha-2) (IL-22RA2) (Cytokine receptor class-II member 10)
  misc_feature (1)..(9): (Cytokine receptor family 2 member 10) (CRF2-10) (Cytokine receptor family type 2, soluble 1) (CRF2-S1) (Interleukin-22-binding protein) (IL-22BP) (IL22BP) (ZcytoR16)
TSDIQEPYY

SEQ ID NO: 103173 - protein, 9 aa, Homo sapiens
  misc_feature (1)..(9): Table A1; Target 331; HLA-A*02:07; TDT ENSG00000107447; DNA nucleotidylexotransferase (EC 2.7.7.31) (Terminal addition enzyme) (Terminal deoxynucleotidyltransferase) (Terminal transferase)
FLPDAFVTM

SEQ ID NO: 103174 - protein, 9 aa, Homo sapiens
  misc_feature (1)..(9): Table A1; Target 332; HLA-A*29:02; TDT ENSG00000107447; DNA nucleotidylexotransferase (EC 2.7.7.31) (Terminal addition enzyme) (Terminal deoxynucleotidyltransferase) (Terminal transferase)
IFAHLGLDY

SEQ ID NO: 103175 - protein, 9 aa, Homo sapiens
  misc_feature (1)..(9): Table A1; Target 333; HLA-A*02:01; TDT ENSG00000107447; DNA nucleotidylexotransferase (EC 2.7.7.31) (Terminal addition enzyme) (Terminal deoxynucleotidyltransferase) (Terminal transferase)
KLFTSVFGV

SEQ ID NO: 103176 - protein, 9 aa, Homo sapiens
  misc_feature (1)..(9): Table A1; Target 334; HLA-C*04:01; TDT ENSG00000107447; DNA nucleotidylexotransferase (EC 2.7.7.31) (Terminal addition enzyme) (Terminal deoxynucleotidyltransferase) (Terminal transferase)
YYDLVESTF

SEQ ID NO: 103177 - protein, 9 aa, Homo sapiens
  misc_feature (1)..(9): Table A1; Target 335; HLA-B*08:01; CNTP5; ENSG00000155052; Contactin-associated protein-like 5 (Cell recognition molecule Caspr5)
YPVTKNISL

SEQ ID NO: 103178 - protein, 8 aa, Homo sapiens
  misc_feature (1)..(8): Table A1; Target 336; HLA-B*18:01; PIWL1; ENSG00000125207; Piwi-like protein 1 (EC 3.1.26.-)
SEVSFLEY

SEQ ID NO: 103179 - protein, 10 aa, Homo sapiens
  misc_feature (1)..(10): Table A1; Target 337; HLA-A*11:01; ACHA9; ENSG00000174343; Neuronal acetylcholine receptor subunit alpha-9 (Nicotinic acetylcholine receptor subunit alpha-9) (NACHR alpha-9)
ITWDAPAITK

SEQ ID NO: 103180 - protein, 9 aa, Homo sapiens
  misc_feature (1)..(9): Table A1; Target 338; HLA-B*44:03; NPSR1; ENSG00000187258; Neuropeptide S receptor (G-protein coupled receptor 154) (G-protein coupled receptor PGR14) (G-protein coupled receptor for asthma susceptibility)
TEVVEGKEW

SEQ ID NO: 103181 - protein, 9 aa, Homo sapiens
  misc_feature (1)..(9): Table A1; Target 339; HLA-C*02:02; NPBW1; ENSG00000183729; Neuropeptides B/W receptor type 1 (G-protein coupled receptor 7)
VAIDQYNTF

SEQ ID NO: 103182 - protein, 9 aa, Homo sapiens
  misc_feature (1)..(9): Table A1; Target 340; HLA-B*35:01; CRBA4; ENSG00000196431; Beta-crystallin A4 (Beta-A4 crystallin)
DAWGGNTAY

SEQ ID NO: 103183 - protein, 9 aa, Homo sapiens
  misc_feature (1)..(9): Table A1; Target 341; HLA-B*08:01; CRBA4; ENSG00000196431; Beta-crystallin A4 (Beta-A4 crystallin)
YPAERLTSF

SEQ ID NO: 103184 - protein, 9 aa, Homo sapiens
  misc_feature (1)..(9): Table A1; Target 342; HLA-B*44:03; SUN3ENSG00000164744; SUN domain-containing protein 3 (Sad1/unc-84 domain-containing protein 1)
EEVSNLVNY

SEQ ID NO: 103185 - protein, 9 aa, Homo sapiens
  misc_feature (1)..(9): Table A1; Target 343; HLA-B*18:01; SUN3ENSG00000164744; SUN domain-containing protein 3 (Sad1/unc-84 domain-containing protein 1)
IEAGTSESY

SEQ ID NO: 103186 - protein, 9 aa, Homo sapiens
  misc_feature (1)..(9): Table A1; Target 344; HLA-B*44:03; SUN3ENSG00000164744; SUN domain-containing protein 3 (Sad1/unc-84 domain-containing protein 1)
IEAGTSESY

SEQ ID NO: 103187 - protein, 10 aa, Homo sapiens
  misc_feature (1)..(10): Table A1; Target 345; HLA-A*29:02; SUN3ENSG00000164744; SUN domain-containing protein 3 (Sad1/unc-84 domain-containing protein 1)
IFSNWGHPKY

SEQ ID NO: 103188 - protein, 9 aa, Homo sapiens
  misc_feature (1)..(9): Table A1; Target 346; HLA-A*11:01; SUN3ENSG00000164744; SUN domain-containing protein 3 (Sad1/unc-84 domain-containing protein 1)
VTMEHISEK

SEQ ID NO: 103189 - protein, 9 aa, Homo sapiens
  misc_feature (1)..(9): Table A1; Target 347; HLA-A*02:01; NALP7; ENSG00000167634; NACHT, LRR and PYD domains-containing protein 7 (Nucleotide-binding oligomerization domain protein 12) (PYRIN-containing APAF1-like protein 3)
YLSEALQEA

SEQ ID NO: 103190 - protein, 10 aa, Homo sapiens
  misc_feature (1)..(10): Table A1; Target 348; HLA-A*26:01; TFDP3; ENSG00000183434; Transcription factor Dp family member 3 (Cancer/testis antigen 30) (CT30) (Hepatocellular carcinoma-associated antigen 661)
EVVGELVAKF

SEQ ID NO: 103191 - protein, 9 aa, Homo sapiens
  misc_feature (1)..(9): Table A1; Target 349; HLA-A*02:01; NKAI3; ENSG00000185942; Sodium/potassium-transporting ATPase subunit beta-1-interacting protein 3 (Na(+)/K(+)-transporting ATPase subunit beta-1-interacting protein 3) (Protein FAM77D)
GMMDDYTYV

SEQ ID NO: 103192 - protein, 10 aa, Homo sapiens
  misc_feature (1)..(10): Table A1; Target 350; HLA-B*44:03; COX8C; ENSG00000187581; Cytochrome c oxidase subunit 8C, mitochondrial (Cytochrome c oxidase polypeptide 8 isoform 3)
  misc_feature (1)..(10): (Cytochrome c oxidase polypeptide VIII isoform 3) (COX VIII-3) (Cytochrome c oxidase subunit 8-3) (COX8-3) (Cytochrome c oxidase subunit VIIIC)
AEMAVGLVVF

SEQ ID NO: 103193 - protein, 10 aa, Homo sapiens
  misc_feature (1)..(10): Table A1; Target 351; HLA-C*02:02; COX8C; ENSG00000187581; Cytochrome c oxidase subunit 8C, mitochondrial (Cytochrome c oxidase polypeptide 8 isoform 3)
  misc_feature (1)..(10): (Cytochrome c oxidase polypeptide VIII isoform 3) (COX VIII-3) (Cytochrome c oxidase subunit 8-3) (COX8-3) (Cytochrome c oxidase subunit VIIIC)
AEMAVGLVVF

SEQ ID NO: 103194 - protein, 10 aa, Homo sapiens
  misc_feature (1)..(10): Table A1; Target 352; HLA-B*44:03; DC4L2; ENSG00000176566; DDB1- and CUL4-associated factor 4-like protein 2 (WD repeat-containing protein 21C)
SENDIPSVAF

SEQ ID NO: 103195 - protein, 9 aa, Homo sapiens
  misc_feature (1)..(9): Table A1; Target 353; HLA-A*33:01; KKLC1; ENSG00000204019; Kita-kyushu lung cancer antigen 1 (KK-LC-1) (Cancer/testis antigen 83)
NNFPHSIAR

SEQ ID NO: 103196 - protein, 11 aa, Homo sapiens
  misc_feature (1)..(11): Table A1; Target 354; HLA-A*31:01; PPBNENSG00000163286; Alkaline phosphatase, placental-like (EC 3.1.3.1) (ALP-1) (Alkaline phosphatase Nagao isozyme) (Germ cell alkaline phosphatase) (GCAP) (Placental alkaline phosphatase-like) (PLAP-like)
RGNEVISVMNR

SEQ ID NO: 103197 - protein, 11 aa, Homo sapiens
  misc_feature (1)..(11): Table A1; Target 355; HLA-A*11:01; NALP7; ENSG00000167634; NACHT, LRR and PYD domains-containing protein 7 (Nucleotide-binding oligomerization domain protein 12) (PYRIN-containing APAF1-like protein 3)
KTYETNLEIKK

SEQ ID NO: 103198 - protein, 10 aa, Homo sapiens
  misc_feature (1)..(10): Table A1; Target 356; HLA-A*11:01; SMC1B; ENSG00000077935; Structural maintenance of chromosomes protein 1B (SMC protein 1B) (SMC-1-beta) (SMC-1B)
AALDNTNIGK

SEQ ID NO: 103199 - protein, 9 aa, Homo sapiens
  misc_feature (1)..(9): Table A1; Target 357; HLA-A*29:02; ONEC3; ENSG00000205922; One cut domain family member 3 (One cut homeobox 3) (Transcription factor ONECUT-3) (OC-3)
ALASVGHLY

SEQ ID NO: 103200 - protein, 9 aa, Homo sapiens
  misc_feature (1)..(9): Table A1; Target 358; HLA-A*26:01; PERLENSG00000167419; Lactoperoxidase (LPO) (EC 1.11.1.7) (Salivary peroxidase) (SPO)
EVSNKIVGY

SEQ ID NO: 103201 - protein, 9 aa, Homo sapiens
  misc_feature (1)..(9): Table A1; Target 359; HLA-A*29:02; PERLENSG00000167419; Lactoperoxidase (LPO) (EC 1.11.1.7) (Salivary peroxidase) (SPO)
SFLDASFVY

SEQ ID NO: 103202 - protein, 11 aa, Homo sapiens
  misc_feature (1)..(11): Table A1; Target 360; HLA-A*11:01; PERLENSG00000167419; Lactoperoxidase (LPO) (EC 1.11.1.7) (Salivary peroxidase) (SPO)
TVSQAKVQVNK

SEQ ID NO: 103203 - protein, 9 aa, Homo sapiens
  misc_feature (1)..(9): Table A1; Target 361; HLA-A*26:01; TRPC5; ENSG00000072315; Short transient receptor potential channel 5 (TrpC5) (Transient receptor protein 5) (TRP-5) (hTRP-5) (hTRP5)
ELKQDISSF

SEQ ID NO: 103204 - protein, 9 aa, Homo sapiens
  misc_feature (1)..(9): Table A1; Target 362; HLA-B*18:01; TRPC5; ENSG00000072315; Short transient receptor potential channel 5 (TrpC5) (Transient receptor protein 5) (TRP-5) (hTRP-5) (hTRP5)
VENEFKAEY

SEQ ID NO: 103205 - protein, 9 aa, Homo sapiens
  misc_feature (1)..(9): Table A1; Target 363; HLA-A*29:02; VRTNENSG00000133980; Vertnin; ;
SFSNVWHLY

SEQ ID NO: 103206 - protein, 11 aa, Homo sapiens
  misc_feature (1)..(11): Table A1; Target 364; HLA-A*03:01; FHL17; ENSG00000132446; Ferritin heavy polypeptide-like 17 (Cancer/testis antigen 38) (CT38)
ATAQPSQVRQK

SEQ ID NO: 103207 - protein, 8 aa, Homo sapiens
  misc_feature (1)..(8): Table A1; Target 365; HLA-B*51:01; FHL17; ENSG00000132446; Ferritin heavy polypeptide-like 17 (Cancer/testis antigen 38) (CT38)
DAAINSHI

SEQ ID NO: 103208 - protein, 9 aa, Homo sapiens
  misc_feature (1)..(9): Table A1; Target 366; HLA-A*29:02; FHL17; ENSG00000132446; Ferritin heavy polypeptide-like 17 (Cancer/testis antigen 38) (CT38)
VALENFFRY

SEQ ID NO: 103209 - protein, 11 aa, Homo sapiens
  misc_feature (1)..(11): Table A1; Target 367; HLA-B*44:03; MAGC1; ENSG00000155495; Melanoma-associated antigen C1 (Cancer/testis antigen 7.1) (CT7.1) (MAGE-C1 antigen)
AEMLTNVISRY

SEQ ID NO: 103210 - protein, 9 aa, Homo sapiens
  misc_feature (1)..(9): Table A1; Target 368; HLA-B*44:03; NAA11; ENSG00000156269; N-alpha-acetyltransferase 11 (EC 2.3.1.255) (N-terminal acetyltransferase complex ARD1 subunit homolog B) (hARD2) (NatA catalytic subunit Naa11)
DEDGKIVGY

SEQ ID NO: 103211 - protein, 9 aa, Homo sapiens
  misc_feature (1)..(9): Table A1; Target 369; HLA-A*11:01; SG1D1; ENSG00000168515; Secretoglobin family 1D member 1 (Lipophilin-A)
KTLGKIAEK

SEQ ID NO: 103212 - protein, 9 aa, Homo sapiens
  misc_feature (1)..(9): Table A1; Target 370; HLA-A*24:02; TDT ENSG00000107447; DNA nucleotidylexotransferase (EC 2.7.7.31) (Terminal addition enzyme) (Terminal deoxynucleotidyltransferase) (Terminal transferase)
YYDLVESTF

SEQ ID NO: 103213 - protein, 9 aa, Homo sapiens
  misc_feature (1)..(9): Table A1; Target 371; HLA-A*30:02; TRI51; ENSG00000124900; Tripartite motif-containing protein 51 (SPRY domain-containing protein 5)
AQAFTSGKY

SEQ ID NO: 103214 - protein, 11 aa, Homo sapiens
  misc_feature (1)..(11): Table A1; Target 372; HLA-B*18:01; PDCL2; ENSG00000163440; Phosducin-like protein 2
DEEDMQAVETY

SEQ ID NO: 103215 - protein, 9 aa, Homo sapiens
  misc_feature (1)..(9): Table A1; Target 373; HLA-A*30:02; 5HT1F; ENSG00000179097; 5-hydroxytryptamine receptor 1F (5-HT-1F) (5-HT1F) (Serotonin receptor 1F)
STKSVSTSY

SEQ ID NO: 103216 - protein, 9 aa, Homo sapiens
  misc_feature (1)..(9): Table A1; Target 374; HLA-A*02:01; SPERT; ENSG00000174015; Spermatid-associated protein (Protein chibby homolog 2)
LVIDTVTEV

SEQ ID NO: 103217 - protein, 8 aa, Homo sapiens
  misc_feature (1)..(8): Table A1; Target 375; HLA-C*05:01; SPERT; ENSG00000174015; Spermatid-associated protein (Protein chibby homolog 2)
VIDTVTEV

SEQ ID NO: 103218 - protein, 9 aa, Homo sapiens
  misc_feature (1)..(9): Table A1; Target 376; HLA-B*51:01; SPERT; ENSG00000174015; Spermatid-associated protein (Protein chibby homolog 2)
YPLNRFSSV

SEQ ID NO: 103219 - protein, 9 aa, Homo sapiens
  misc_feature (1)..(9): Table A1; Target 377; HLA-B*35:01; CRBA4; ENSG00000196431; Beta-crystallin A4 (Beta-A4 crystallin)
YPAERLTSF

SEQ ID NO: 103220 - protein, 9 aa, Homo sapiens
  misc_feature (1)..(9): Table A1; Target 378; HLA-B*18:01; R4GMQ3; ENSG00000107831; Fibroblast growth factor 8
TEIVLENNY

SEQ ID NO: 103221 - protein, 9 aa, Homo sapiens
  misc_feature (1)..(9): Table A1; Target 379; HLA-A*01:01; R4GMQ3; ENSG00000107831; Fibroblast growth factor 8
YTALQNAKY

SEQ ID NO: 103222 - protein, 9 aa, Homo sapiens
  misc_feature (1)..(9): Table A1; Target 380; HLA-A*33:01; ZN728; ENSG00000269067; Zinc finger protein 728
DSFQKVILR

SEQ ID NO: 103223 - protein, 10 aa, Homo sapiens
  misc_feature (1)..(10): Table A1; Target 381; HLA-B*44:03; CNTP5; ENSG00000155052; Contactin-associated protein-like 5 (Cell recognition molecule Caspr5)
SEPQIVPITF

SEQ ID NO: 103224 - protein, 10 aa, Homo sapiens
  misc_feature (1)..(10): Table A1; Target 382; HLA-B*44:02; TDRD1; ENSG00000095627; Tudor domain-containing protein 1 (Cancer/testis antigen 41.1) (CT41.1)
EEIIPLNRIY

SEQ ID NO: 103225 - protein, 9 aa, Homo sapiens
  misc_feature (1)..(9): Table A1; Target 383; HLA-A*24:02; LMIPENSG00000105370; Lens fiber membrane intrinsic protein (MP18) (MP19) (MP20)
IYTGVTVSF

SEQ ID NO: 103226 - protein, 10 aa, Homo sapiens
  misc_feature (1)..(10): Table A1; Target 384; HLA-A*29:02; LMIPENSG00000105370; Lens fiber membrane intrinsic protein (MP18) (MP19) (MP20)
SFAHQGLWRY

SEQ ID NO: 103227 - protein, 10 aa, Homo sapiens
  misc_feature (1)..(10): Table A1; Target 385; HLA-B*44:03; LRIQ4; ENSG00000188306; Leucine-rich repeat and IQ domain-containing protein 4 (Leucine-rich repeat-containing protein 64)
EEIPQEIQRL

SEQ ID NO: 103228 - protein, 9 aa, Homo sapiens
  misc_feature (1)..(9): Table A1; Target 386; HLA-A*01:01; LRIQ4; ENSG00000188306; Leucine-rich repeat and IQ domain-containing protein 4 (Leucine-rich repeat-containing protein 64)
YIENNHLEY

SEQ ID NO: 103229 - protein, 10 aa, Homo sapiens
  misc_feature (1)..(10): Table A1; Target 387; HLA-A*01:01; TRPC5; ENSG00000072315; Short transient receptor potential channel 5 (TrpC5) (Transient receptor protein 5) (TRP-5) (hTRP-5) (hTRP5)
HSEELDPQKY

SEQ ID NO: 103230 - protein, 11 aa, Homo sapiens
  misc_feature (1)..(11): Table A1; Target 388; HLA-B*44:02; MAGA8; ENSG00000156009; Melanoma-associated antigen 8 (Cancer/testis antigen 1.8) (CT1.8) (MAGE-8 antigen)
AEMLESVIKNY

SEQ ID NO: 103231 - protein, 11 aa, Homo sapiens
  misc_feature (1)..(11): Table A1; Target 389; HLA-B*44:03; MAGA8; ENSG00000156009; Melanoma-associated antigen 8 (Cancer/testis antigen 1.8) (CT1.8) (MAGE-8 antigen)
AEMLESVIKNY

SEQ ID NO: 103232 - protein, 11 aa, Homo sapiens
  misc_feature (1)..(11): Table A1; Target 390; HLA-C*02:02; MAGA8; ENSG00000156009; Melanoma-associated antigen 8 (Cancer/testis antigen 1.8) (CT1.8) (MAGE-8 antigen)
AEMLESVIKNY

SEQ ID NO: 103233 - protein, 9 aa, Homo sapiens
  misc_feature (1)..(9): Table A1; Target 391; HLA-B*44:03; MAGA8; ENSG00000156009; Melanoma-associated antigen 8 (Cancer/testis antigen 1.8) (CT1.8) (MAGE-8 antigen)
AETSYVKVL

SEQ ID NO: 103234 - protein, 9 aa, Homo sapiens
  misc_feature (1)..(9): Table A1; Target 392; HLA-A*02:01; MAGA8; ENSG00000156009; Melanoma-associated antigen 8 (Cancer/testis antigen 1.8) (CT1.8) (MAGE-8 antigen)
ALDEKVAEL

SEQ ID NO: 103235 - protein, 9 aa, Homo sapiens
  misc_feature (1)..(9): Table A1; Target 393; HLA-A*02:07; MAGA8; ENSG00000156009; Melanoma-associated antigen 8 (Cancer/testis antigen 1.8) (CT1.8) (MAGE-8 antigen)
ALDEKVAEL

SEQ ID NO: 103236 - protein, 10 aa, Homo sapiens
  misc_feature (1)..(10): Table A1; Target 394; HLA-A*02:01; MAGA8; ENSG00000156009; Melanoma-associated antigen 8 (Cancer/testis antigen 1.8) (CT1.8) (MAGE-8 antigen)
GLYDGREHSV

SEQ ID NO: 103237 - protein, 11 aa, Homo sapiens
  misc_feature (1)..(11): Table A1; Target 395; HLA-B*44:03; SPNXB; ENSG00000227234; Sperm protein associated with the nucleus on the X chromosome B1 (Cancer/testis antigen 11.2) (CT11.2) (Nuclear-associated protein SPAN-Xb) (SPANX-B) (SPANX family member B1) (SPANX family member
SESSTILVVRY

SEQ ID NO: 103238 - protein, 9 aa, Homo sapiens
  misc_feature (1)..(9): Table A1; Target 396; HLA-A*01:01; GFY ENSG00000261949; Golgi-associated olfactory signaling regulator (Protein Goofy)
QTEFPTTYY

SEQ ID NO: 103239 - protein, 8 aa, Homo sapiens
  misc_feature (1)..(8): Table A1; Target 397; HLA-B*18:01; GFY ENSG00000261949; Golgi-associated olfactory signaling regulator (Protein Goofy)
TEFPTTYY

SEQ ID NO: 103240 - protein, 11 aa, Homo sapiens
  misc_feature (1)..(11): Table A1; Target 398; HLA-A*01:01; GFY ENSG00000261949; Golgi-associated olfactory signaling regulator (Protein Goofy)
TSDPQISTSLY

SEQ ID NO: 103241 - protein, 9 aa, Homo sapiens
  misc_feature (1)..(9): Table A1; Target 399; HLA-A*02:07; SUN3ENSG00000164744; SUN domain-containing protein 3 (Sad1/unc-84 domain-containing protein 1)
VLDEEVSNL

SEQ ID NO: 103242 - protein, 9 aa, Homo sapiens
  misc_feature (1)..(9): Table A1; Target 400; HLA-B*46:01; NBPF4; ENSG00000196427; Neuroblastoma breakpoint family member 4
FLITQATAY

SEQ ID NO: 103243 - protein, 9 aa, Homo sapiens
  misc_feature (1)..(9): Table A1; Target 401; HLA-A*30:02; PPATENSG00000142513; Testicular acid phosphatase (EC 3.1.3.2)
ALQGALGLY

SEQ ID NO: 103244 - protein, 9 aa, Homo sapiens
  misc_feature (1)..(9): Table A1; Target 402; HLA-B*51:01; PPATENSG00000142513; Testicular acid phosphatase (EC 3.1.3.2)
YPMDPHKEV

SEQ ID NO: 103245 - protein, 9 aa, Homo sapiens
  misc_feature (1)..(9): Table A1; Target 403; HLA-B*51:01; PIWL1; ENSG00000125207; Piwi-like protein 1 (EC 3.1.26.-)
LAFLVGQSI

SEQ ID NO: 103246 - protein, 9 aa, Homo sapiens
  misc_feature (1)..(9): Table A1; Target 404; HLA-B*35:01; E9PRF5; ENSG00000233436; BTB/POZ domain-containing protein 18 (Fragment)
MPSEVSEVL

SEQ ID NO: 103247 - protein, 9 aa, Homo sapiens
  misc_feature (1)..(9): Table A1; Target 405; HLA-A*02:07; TDT ENSG00000107447; DNA nucleotidylexotransferase (EC 2.7.7.31) (Terminal addition enzyme) (Terminal deoxynucleotidyltransferase) (Terminal transferase)
KLFTSVFGV

SEQ ID NO: 103248 - protein, 9 aa, Homo sapiens
  misc_feature (1)..(9): Table A1; Target 406; HLA-B*35:01; S22AD; ENSG00000172940; Solute carrier family 22 member 13 (Organic cation transporter-like 3) (ORCTL-3)
TAAAFTISY

SEQ ID NO: 103249 - protein, 9 aa, Homo sapiens
  misc_feature (1)..(9): Table A1; Target 407; HLA-A*29:02; MBOA4; ENSG00000177669; Ghrelin O-acyltransferase (EC 2.3.1.-) (Membrane-bound O-acyltransferase domain-containing protein 4) (O-acyltransferase domain-containing protein 4)
FFLHPISFY

SEQ ID NO: 103250 - protein, 11 aa, Homo sapiens
  misc_feature (1)..(11): Table A1; Target 408; HLA-A*11:01; DPPA3; ENSG00000187569; Developmental pluripotency-associated protein 3 (Stella-related protein)
ASQISSETLIK

SEQ ID NO: 103251 - protein, 9 aa, Homo sapiens
  misc_feature (1)..(9): Table A1; Target 409; HLA-A*11:01; RNS10; ENSG00000182545; Inactive ribonuclease-like protein 10
ASALFQSNK

SEQ ID NO: 103252 - protein, 9 aa, Homo sapiens
  misc_feature (1)..(9): Table A1; Target 410; HLA-B*18:01; TDRD1; ENSG00000095627; Tudor domain-containing protein 1 (Cancer/testis antigen 41.1) (CT41.1)
SEESVLVGY

SEQ ID NO: 103253 - protein, 10 aa, Homo sapiens
  misc_feature (1)..(10): Table A1; Target 411; HLA-A*26:01; MAGA1; ENSG00000198681; Melanoma-associated antigen 1 (Antigen MZ2-E) (Cancer/testis antigen 1.1) (CT1.1) (MAGE-1 antigen)
ETSYVKVLEY

SEQ ID NO: 103254 - protein, 8 aa, Homo sapiens
  misc_feature (1)..(8): Table A1; Target 412; HLA-B*18:01; KCNH5; ENSG00000140015; Potassium voltage-gated channel subfamily H member 5 (Ether-a-go-go potassium channel 2) (hEAG2) (Voltage-gated potassium channel subunit Kv10.2)
DEGISSLF

SEQ ID NO: 103255 - protein, 9 aa, Homo sapiens
  misc_feature (1)..(9): Table A1; Target 413; HLA-A*03:01; KCNH5; ENSG00000140015; Potassium voltage-gated channel subfamily H member 5 (Ether-a-go-go potassium channel 2) (hEAG2) (Voltage-gated potassium channel subunit Kv10.2)
KVNSPIRMK

SEQ ID NO: 103256 - protein, 9 aa, Homo sapiens
  misc_feature (1)..(9): Table A1; Target 414; HLA-B*35:01; KCNH5; ENSG00000140015; Potassium voltage-gated channel subfamily H member 5 (Ether-a-go-go potassium channel 2) (hEAG2) (Voltage-gated potassium channel subunit Kv10.2)
LPYDIINAF

SEQ ID NO: 103257 - protein, 9 aa, Homo sapiens
  misc_feature (1)..(9): Table A1; Target 415; HLA-C*05:01; KCNH5; ENSG00000140015; Potassium voltage-gated channel subfamily H member 5 (Ether-a-go-go potassium channel 2) (hEAG2) (Voltage-gated potassium channel subunit Kv10.2)
NVDEGISSL

SEQ ID NO: 103258 - protein, 11 aa, Homo sapiens
  misc_feature (1)..(11): Table A1; Target 416; HLA-A*11:01; KCNH5; ENSG00000140015; Potassium voltage-gated channel subfamily H member 5 (Ether-a-go-go potassium channel 2) (hEAG2) (Voltage-gated potassium channel subunit Kv10.2)
SVLQQLTPMNK

SEQ ID NO: 103259 - protein, 9 aa, Homo sapiens
  misc_feature (1)..(9): Table A1; Target 417; HLA-B*35:01; KCNH5; ENSG00000140015; Potassium voltage-gated channel subfamily H member 5 (Ether-a-go-go potassium channel 2) (hEAG2) (Voltage-gated potassium channel subunit Kv10.2)
TPIQTSLAY

SEQ ID NO: 103260 - protein, 9 aa, Homo sapiens
  misc_feature (1)..(9): Table A1; Target 418; HLA-B*35:01; I22R2; ENSG00000164485; Interleukin-22 receptor subunit alpha-2 (IL-22 receptor subunit alpha-2) (IL-22R-alpha-2) (IL-22RA2) (Cytokine receptor class-II member 10)
  misc_feature (1)..(9): (Cytokine receptor family 2 member 10) (CRF2-10) (Cytokine receptor family type 2, soluble 1) (CRF2-S1) (Interleukin-22-binding protein) (IL-22BP) (IL22BP) (ZcytoR16)
EALTPHSSY

SEQ ID NO: 103261 - protein, 10 aa, Homo sapiens
  misc_feature (1)..(10): Table A1; Target 419; HLA-A*01:01; R4GMQ3; ENSG00000107831; Fibroblast growth factor 8
FTEIVLENNY

SEQ ID NO: 103262 - protein, 9 aa, Homo sapiens
  misc_feature (1)..(9): Table A1; Target 420; HLA-B*44:03; GCNT7; ENSG00000124091; Beta-1,3-galactosyl-O-glycosyl-glycoprotein beta-1,6-N-acetylglucosaminyltransferase 7 (EC 2.4.1.-)
AEVPIEPHW

SEQ ID NO: 103263 - protein, 8 aa, Homo sapiens
  misc_feature (1)..(8): Table A1; Target 421; HLA-B*35:01; TDT ENSG00000107447; DNA nucleotidylexotransferase (EC 2.7.7.31) (Terminal addition enzyme) (Terminal deoxynucleotidyltransferase) (Terminal transferase)
LPFTIISM

SEQ ID NO: 103264 - protein, 9 aa, Homo sapiens
  misc_feature (1)..(9): Table A1; Target 422; HLA-B*35:01; DPPA3; ENSG00000187569; Developmental pluripotency-associated protein 3 (Stella-related protein)
DPSQFNPTY

SEQ ID NO: 103265 - protein, 9 aa, Homo sapiens
  misc_feature (1)..(9): Table A1; Target 423; HLA-B*44:03; A0A1B0GTN1; ENSG00000224960; Putative SMEK homolog 3
AEILKNEAY

SEQ ID NO: 103266 - protein, 9 aa, Homo sapiens
  misc_feature (1)..(9): Table A1; Target 424; HLA-C*02:02; A0A1B0GTN1; ENSG00000224960; Putative SMEK homolog 3
AEILKNEAY

SEQ ID NO: 103267 - protein, 10 aa, Homo sapiens
  misc_feature (1)..(10): Table A1; Target 425; HLA-B*44:02; A0A1B0GTN1; ENSG00000224960; Putative SMEK homolog 3
AENQGLVLKF

SEQ ID NO: 103268 - protein, 10 aa, Homo sapiens
  misc_feature (1)..(10): Table A1; Target 426; HLA-B*44:03; A0A1B0GTN1; ENSG00000224960; Putative SMEK homolog 3
AENQGLVLKF

SEQ ID NO: 103269 - protein, 9 aa, Homo sapiens
  misc_feature (1)..(9): Table A1; Target 427; HLA-A*02:01; A0A1B0GTN1; ENSG00000224960; Putative SMEK homolog 3
ALFETLIQL

SEQ ID NO: 103270 - protein, 9 aa, Homo sapiens
  misc_feature (1)..(9): Table A1; Target 428; HLA-A*26:01; A0A1B0GTN1; ENSG00000224960; Putative SMEK homolog 3
ESIEYVQTF

SEQ ID NO: 103271 - protein, 10 aa, Homo sapiens
  misc_feature (1)..(10): Table A1; Target 429; HLA-A*26:01; A0A1B0GTN1; ENSG00000224960; Putative SMEK homolog 3
EVIPITNSEL

SEQ ID NO: 103272 - protein, 9 aa, Homo sapiens
  misc_feature (1)..(9): Table A1; Target 430; HLA-B*51:01; A0A1B0GTN1; ENSG00000224960; Putative SMEK homolog 3
LPALKIVMI

SEQ ID NO: 103273 - protein, 9 aa, Homo sapiens
  misc_feature (1)..(9): Table A1; Target 431; HLA-B*18:01; A0A1B0GTN1; ENSG00000224960; Putative SMEK homolog 3
NEMSVISNM

SEQ ID NO: 103274 - protein, 9 aa, Homo sapiens
  misc_feature (1)..(9): Table A1; Target 432; HLA-A*01:01; A0A1B0GTN1; ENSG00000224960; Putative SMEK homolog 3
NTEGLHHLY

SEQ ID NO: 103275 - protein, 9 aa, Homo sapiens
  misc_feature (1)..(9): Table A1; Target 433; HLA-A*24:02; A0A1B0GTN1; ENSG00000224960; Putative SMEK homolog 3
NYIIKGNLF

SEQ ID NO: 103276 - protein, 9 aa, Homo sapiens
  misc_feature (1)..(9): Table A1; Target 434; HLA-A*02:01; A0A1B0GTN1; ENSG00000224960; Putative SMEK homolog 3
QIADIVTSV

SEQ ID NO: 103277 - protein, 9 aa, Homo sapiens
  misc_feature (1)..(9): Table A1; Target 435; HLA-C*01:02; A0A1B0GTN1; ENSG00000224960; Putative SMEK homolog 3
VIPITNSEL

SEQ ID NO: 103278 - protein, 10 aa, Homo sapiens
  misc_feature (1)..(10): Table A1; Target 436; HLA-B*18:01; DC4L2; ENSG00000176566; DDB1- and CUL4-associated factor 4-like protein 2 (WD repeat-containing protein 21C)
SENDIPSVAF

SEQ ID NO: 103279 - protein, 9 aa, Homo sapiens
  misc_feature (1)..(9): Table A1; Target 437; HLA-C*01:02; FOXI3; ENSG00000214336; Forkhead box protein I3
AAPAGPGEL

SEQ ID NO: 103280 - protein, 9 aa, Homo sapiens
  misc_feature (1)..(9): Table A1; Target 438; HLA-C*02:02; TRPC5; ENSG00000072315; Short transient receptor potential channel 5 (TrpC5) (Transient receptor protein 5) (TRP-5) (hTRP-5) (hTRP5)
AESSSKRSF

SEQ ID NO: 103281 - protein, 9 aa, Homo sapiens
  misc_feature (1)..(9): Table A1; Target 439; HLA-B*18:01; TRPC5; ENSG00000072315; Short transient receptor potential channel 5 (TrpC5) (Transient receptor protein 5) (TRP-5) (hTRP-5) (hTRP5)
TEFVGATMF

SEQ ID NO: 103282 - protein, 9 aa, Homo sapiens
  misc_feature (1)..(9): Table A1; Target 440; HLA-A*29:02; TRPC5; ENSG00000072315; Short transient receptor potential channel 5 (TrpC5) (Transient receptor protein 5) (TRP-5) (hTRP-5) (hTRP5)
VYVGDALLY

SEQ ID NO: 103283 - protein, 9 aa, Homo sapiens
  misc_feature (1)..(9): Table A1; Target 441; HLA-B*51:01; LUZP4; ENSG00000102021; Leucine zipper protein 4 (Cancer/testis antigen 28) (CT-28) (CT28) (Tumor antigen HOM-TES-85)
HPLNGQPLI

SEQ ID NO: 103284 - protein, 9 aa, Homo sapiens
  misc_feature (1)..(9): Table A1; Target 442; HLA-A*02:07; PASD1; ENSG00000166049; Circadian clock protein PASD1 (Cancer/testis antigen 63) (CT63) (OX-TES-1) (PAS domain-containing protein 1)
LLDGFMITL

SEQ ID NO: 103285 - protein, 9 aa, Homo sapiens
  misc_feature (1)..(9): Table A1; Target 443; HLA-A*24:02; PASD1; ENSG00000166049; Circadian clock protein PASD1 (Cancer/testis antigen 63) (CT63) (OX-TES-1) (PAS domain-containing protein 1)
VYQKIILKF

SEQ ID NO: 103286 - protein, 9 aa, Homo sapiens
  misc_feature (1)..(9): Table A1; Target 444; HLA-B*35:01; VCX3ENSG00000169059; Variable charge X-linked protein 3 (Variable charge protein on X with eight repeats) (VCX-8r) (Variably charged protein X-A) (VCX-A)
EPLSVTASY

SEQ ID NO: 103287 - protein, 8 aa, Homo sapiens
  misc_feature (1)..(8): Table A1; Target 445; HLA-B*51:01; CP2AD; ENSG00000197838; Cytochrome P450 2A13 (EC 1.14.14.1) (CYPIIA13)
DAFVPFSI

SEQ ID NO: 103288 - protein, 9 aa, Homo sapiens
  misc_feature (1)..(9): Table A1; Target 446; HLA-A*26:01; CP2AD; ENSG00000197838; Cytochrome P450 2A13 (EC 1.14.14.1) (CYPIIA13)
ETVSTTLRY

SEQ ID NO: 103289 - protein, 11 aa, Homo sapiens
  misc_feature (1)..(11): Table A1; Target 447; HLA-A*01:01; CP2AD; ENSG00000197838; Cytochrome P450 2A13 (EC 1.14.14.1) (CYPIIA13)
GTETVSTTLRY

SEQ ID NO: 103290 - protein, 11 aa, Homo sapiens
  misc_feature (1)..(11): Table A1; Target 448; HLA-A*02:01; MAGAC; ENSG00000213401; Melanoma-associated antigen 12 (Cancer/testis antigen 1.12) (CT1.12) (MAGE-12 antigen) (MAGE12F antigen)
FLWGPRALVET

SEQ ID NO: 103291 - protein, 11 aa, Homo sapiens
  misc_feature (1)..(11): Table A1; Target 449; HLA-A*11:01; SPT22; ENSG00000141255; Spermatogenesis-associated protein 22 (Testis development protein NYD-SP20)
AVNPELAPVMK

SEQ ID NO: 103292 - protein, 9 aa, Homo sapiens
  misc_feature (1)..(9): Table A1; Target 450; HLA-C*16:01; SPT22; ENSG00000141255; Spermatogenesis-associated protein 22 (Testis development protein NYD-SP20)
SAVTPGPYY

SEQ ID NO: 103293 - protein, 9 aa, Homo sapiens
  misc_feature (1)..(9): Table A1; Target 451; HLA-A*31:01; ALX3ENSG00000156150; Homeobox protein aristaless-like 3 (Proline-rich transcription factor ALX3)
RVQVWFQNR

SEQ ID NO: 103294 - protein, 9 aa, Homo sapiens
  misc_feature (1)..(9): Table A1; Target 452; HLA-A*02:07; MAGAC; ENSG00000213401; Melanoma-associated antigen 12 (Cancer/testis antigen 1.12) (CT1.12) (MAGE-12 antigen) (MAGE12F antigen)
KMAELVHFL

SEQ ID NO: 103295 - protein, 11 aa, Homo sapiens
  misc_feature (1)..(11): Table A1; Target 453; HLA-A*29:02; C295L; ENSG00000178404; CEP295 N-terminal-like protein (KIAA1731 N-terminal like protein)
IFINKEDSLLY

SEQ ID NO: 103296 - protein, 11 aa, Homo sapiens
  misc_feature (1)..(11): Table A1; Target 454; HLA-A*02:01; HDGL1; ENSG00000112273; Hepatoma-derived growth factor-like protein 1 (PWWP domain-containing protein 1)
GLWEIENNPTV

SEQ ID NO: 103297 - protein, 9 aa, Homo sapiens
  misc_feature (1)..(9): Table A1; Target 455; HLA-A*03:01; HDGL1; ENSG00000112273; Hepatoma-derived growth factor-like protein 1 (PWWP domain-containing protein 1)
SAYGMPMYK

SEQ ID NO: 103298 - protein, 9 aa, Homo sapiens
  misc_feature (1)..(9): Table A1; Target 456; HLA-A*11:01; HDGL1; ENSG00000112273; Hepatoma-derived growth factor-like protein 1 (PWWP domain-containing protein 1)
SAYGMPMYK

SEQ ID NO: 103299 - protein, 9 aa, Homo sapiens
  misc_feature (1)..(9): Table A1; Target 457; HLA-B*35:01; NKX24; ENSG00000125816; Homeobox protein Nkx-2.4 (Homeobox protein NK-2 homolog D)
AAAAAAATY

SEQ ID NO: 103300 - protein, 9 aa, Homo sapiens
  misc_feature (1)..(9): Table A1; Target 458; HLA-A*03:01; NKX24; ENSG00000125816; Homeobox protein Nkx-2.4 (Homeobox protein NK-2 homolog D)
RVAVPVLVK

SEQ ID NO: 103301 - protein, 11 aa, Homo sapiens
  misc_feature (1)..(11): Table A1; Target 459; HLA-A*30:02; NKX24; ENSG00000125816; Homeobox protein Nkx-2.4 (Homeobox protein NK-2 homolog D)
SQFPHGAMGSY

SEQ ID NO: 103302 - protein, 8 aa, Homo sapiens
  misc_feature (1)..(8): Table A1; Target 460; HLA-B*51:01; RBM46; ENSG00000151962; Probable RNA-binding protein 46 (Cancer/testis antigen 68) (CT68) (RNA-binding motif protein 46)
DAVAAMSV

SEQ ID NO: 103303 - protein, 10 aa, Homo sapiens
  misc_feature (1)..(10): Table A1; Target 461; HLA-A*29:02; RBM46; ENSG00000151962; Probable RNA-binding protein 46 (Cancer/testis antigen 68) (CT68) (RNA-binding motif protein 46)
NWAPPEYYLY

SEQ ID NO: 103304 - protein, 9 aa, Homo sapiens
  misc_feature (1)..(9): Table A1; Target 462; HLA-B*18:01; RBM46; ENSG00000151962; Probable RNA-binding protein 46 (Cancer/testis antigen 68) (CT68) (RNA-binding motif protein 46)
TEETIKAEF

SEQ ID NO: 103305 - protein, 9 aa, Homo sapiens
  misc_feature (1)..(9): Table A1; Target 463; HLA-A*29:02; RBM46; ENSG00000151962; Probable RNA-binding protein 46 (Cancer/testis antigen 68) (CT68) (RNA-binding motif protein 46)
WAPPEYYLY

SEQ ID NO: 103306 - protein, 10 aa, Homo sapiens
  misc_feature (1)..(10): Table A1; Target 464; HLA-C*02:02; MAGAA; ENSG00000124260; Melanoma-associated antigen 10 (Cancer/testis antigen 1.10) (CT1.10) (MAGE-10 antigen)
KEVDPTGHSF

SEQ ID NO: 103307 - protein, 9 aa, Homo sapiens
  misc_feature (1)..(9): Table A1; Target 465; HLA-B*18:01; PRDM7; ENSG00000126856; Probable histone-lysine N-methyltransferase PRDM7 (EC 2.1.1.43) (PR domain zinc finger protein 7) (PR domain-containing protein 7)
DEEQNLVAF

SEQ ID NO: 103308 - protein, 10 aa, Homo sapiens
  misc_feature (1)..(10): Table A1; Target 466; HLA-B*44:03; PRDM7; ENSG00000126856; Probable histone-lysine N-methyltransferase PRDM7 (EC 2.1.1.43) (PR domain zinc finger protein 7) (PR domain-containing protein 7)
EEAANSGYSW

SEQ ID NO: 103309 - protein, 10 aa, Homo sapiens
  misc_feature (1)..(10): Table A1; Target 467; HLA-C*02:02; PRDM7; ENSG00000126856; Probable histone-lysine N-methyltransferase PRDM7 (EC 2.1.1.43) (PR domain zinc finger protein 7) (PR domain-containing protein 7)
EEAANSGYSW

SEQ ID NO: 103310 - protein, 10 aa, Homo sapiens
  misc_feature (1)..(10): Table A1; Target 468; HLA-B*44:03; PRDM7; ENSG00000126856; Probable histone-lysine N-methyltransferase PRDM7 (EC 2.1.1.43) (PR domain zinc finger protein 7) (PR domain-containing protein 7)
EEQNLVAFQY

SEQ ID NO: 103311 - protein, 11 aa, Homo sapiens
  misc_feature (1)..(11): Table A1; Target 469; HLA-A*11:01; TDT ENSG00000107447; DNA nucleotidylexotransferase (EC 2.7.7.31) (Terminal addition enzyme) (Terminal deoxynucleotidyltransferase) (Terminal transferase)
STEDEEQLLQK

SEQ ID NO: 103312 - protein, 9 aa, Homo sapiens
  misc_feature (1)..(9): Table A1; Target 470; HLA-C*16:01; PRD13; ENSG00000112238; PR domain zinc finger protein 13 (EC 2.1.1.-) (PR domain-containing protein 13)
ASIDREIAM

SEQ ID NO: 103313 - protein, 10 aa, Homo sapiens
  misc_feature (1)..(10): Table A1; Target 471; HLA-A*03:01; PRD13; ENSG00000112238; PR domain zinc finger protein 13 (EC 2.1.1.-) (PR domain-containing protein 13)
RLGPVPGTFK

SEQ ID NO: 103314 - protein, 11 aa, Homo sapiens
  misc_feature (1)..(11): Table A1; Target 472; HLA-A*11:01; BRDTENSG00000137948; Bromodomain testis-specific protein (Cancer/testis antigen 9) (CT9) (RING3-like protein)
SSSQTAAQVTK

SEQ ID NO: 103315 - protein, 10 aa, Homo sapiens
  misc_feature (1)..(10): Table A1; Target 473; HLA-B*44:02; COX8C; ENSG00000187581; Cytochrome c oxidase subunit 8C, mitochondrial (Cytochrome c oxidase polypeptide 8 isoform 3)
  misc_feature (1)..(10): (Cytochrome c oxidase polypeptide VIII isoform 3) (COX VIII-3) (Cytochrome c oxidase subunit 8-3) (COX8-3) (Cytochrome c oxidase subunit VIIIC)
AEMAVGLVVF

SEQ ID NO: 103316 - protein, 9 aa, Homo sapiens
  misc_feature (1)..(9): Table A1; Target 474; HLA-A*02:07; TERTENSG00000164362; Telomerase reverse transcriptase (EC 2.7.7.49) (HEST2) (Telomerase catalytic subunit) (Telomerase-associated protein 2) (TP2)
FLDLQVNSL

SEQ ID NO: 103317 - protein, 11 aa, Homo sapiens
  misc_feature (1)..(11): Table A1; Target 475; HLA-A*29:02; DPPA3; ENSG00000187569; Developmental pluripotency-associated protein 3 (Stella-related protein)
VLREIEDEWLY

SEQ ID NO: 103318 - protein, 9 aa, Homo sapiens
  misc_feature (1)..(9): Table A1; Target 476; HLA-B*18:01; 1A1L2; ENSG00000205126; Probable inactive 1-aminocyclopropane-1-carboxylate synthase-like protein 2 (ACC synthase-like protein 2)
DESITFHSI

SEQ ID NO: 103319 - protein, 9 aa, Homo sapiens
  misc_feature (1)..(9): Table A1; Target 477; HLA-B*18:01; 1A1L2; ENSG00000205126; Probable inactive 1-aminocyclopropane-1-carboxylate synthase-like protein 2 (ACC synthase-like protein 2)
EEVARFLTY

SEQ ID NO: 103320 - protein, 9 aa, Homo sapiens
  misc_feature (1)..(9): Table A1; Target 478; HLA-B*44:03; 1A1L2; ENSG00000205126; Probable inactive 1-aminocyclopropane-1-carboxylate synthase-like protein 2 (ACC synthase-like protein 2)
EEVARFLTY

SEQ ID NO: 103321 - protein, 9 aa, Homo sapiens
  misc_feature (1)..(9): Table A1; Target 479; HLA-A*26:01; 1A1L2; ENSG00000205126; Probable inactive 1-aminocyclopropane-1-carboxylate synthase-like protein 2 (ACC synthase-like protein 2)
EVASAVSAF

SEQ ID NO: 103322 - protein, 9 aa, Homo sapiens
  misc_feature (1)..(9): Table A1; Target 480; HLA-A*02:07; PTX4ENSG00000251692; Pentraxin-4;
LLPGSIHFV

SEQ ID NO: 103323 - protein, 9 aa, Homo sapiens
  misc_feature (1)..(9): Table A1; Target 481; HLA-B*44:03; TDT ENSG00000107447; DNA nucleotidylexotransferase (EC 2.7.7.31) (Terminal addition enzyme) (Terminal deoxynucleotidyltransferase) (Terminal transferase)
EEQLLQKVM

SEQ ID NO: 103324 - protein, 9 aa, Homo sapiens
  misc_feature (1)..(9): Table A1; Target 482; HLA-A*02:07; MAGB2; ENSG00000099399; Melanoma-associated antigen B2 (Cancer/testis antigen 3.2) (CT3.2) (DSS-AHC critical interval MAGE superfamily 6) (DAM6) (MAGE XP-2 antigen) (MAGE-B2 antigen)
KVLEFLAKV

SEQ ID NO: 103325 - protein, 11 aa, Homo sapiens
  misc_feature (1)..(11): Table A1; Target 483; HLA-A*02:07; LUZP4; ENSG00000102021; Leucine zipper protein 4 (Cancer/testis antigen 28) (CT-28) (CT28) (Tumor antigen HOM-TES-85)
SLDDIIIYKEL

SEQ ID NO: 103326 - protein, 10 aa, Homo sapiens
  misc_feature (1)..(10): Table A1; Target 484; HLA-B*44:03; LN28A; ENSG00000131914; Protein lin-28 homolog A (Lin-28A) (Zinc finger CCHC domain-containing protein 1)
KEGEAVEFTF

SEQ ID NO: 103327 - protein, 8 aa, Homo sapiens
  misc_feature (1)..(8): Table A1; Target 485; HLA-B*18:01; NALP7; ENSG00000167634; NACHT, LRR and PYD domains-containing protein 7 (Nucleotide-binding oligomerization domain protein 12) (PYRIN-containing APAF1-like protein 3)
DEGAMLLY

SEQ ID NO: 103328 - protein, 10 aa, Homo sapiens
  misc_feature (1)..(10): Table A1; Target 486; HLA-A*11:01; NALP7; ENSG00000167634; NACHT, LRR and PYD domains-containing protein 7 (Nucleotide-binding oligomerization domain protein 12) (PYRIN-containing APAF1-like protein 3)
KTYETNLEIK

SEQ ID NO: 103329 - protein, 10 aa, Homo sapiens
  misc_feature (1)..(10): Table A1; Target 487; HLA-A*01:01; NALP7; ENSG00000167634; NACHT, LRR and PYD domains-containing protein 7 (Nucleotide-binding oligomerization domain protein 12) (PYRIN-containing APAF1-like protein 3)
LLDEGAMLLY

SEQ ID NO: 103330 - protein, 9 aa, Homo sapiens
  misc_feature (1)..(9): Table A1; Target 488; HLA-B*35:01; NPBW1; ENSG00000183729; Neuropeptides B/W receptor type 1 (G-protein coupled receptor 7)
TPLVIAISY

SEQ ID NO: 103331 - protein, 9 aa, Homo sapiens
  misc_feature (1)..(9): Table A1; Target 489; HLA-B*44:03; RFPLB; ENSG00000251258; Ret finger protein-like 4B (RING finger protein 211)
VEVGEVKSW

SEQ ID NO: 103332 - protein, 9 aa, Homo sapiens
  misc_feature (1)..(9): Table A1; Target 490; HLA-C*02:02; RFPLB; ENSG00000251258; Ret finger protein-like 4B (RING finger protein 211)
VEVGEVKSW

SEQ ID NO: 103333 - protein, 11 aa, Homo sapiens
  misc_feature (1)..(11): Table A1; Target 491; HLA-B*44:03; RFPLB; ENSG00000251258; Ret finger protein-like 4B (RING finger protein 211)
WEVEVGEVKSW

SEQ ID NO: 103334 - protein, 10 aa, Homo sapiens
  misc_feature (1)..(10): Table A1; Target 492; HLA-A*26:01; Q5JUY5; ENSG00000117400; Thrombopoietin receptor
TTAPGTVHSY

SEQ ID NO: 103335 - protein, 9 aa, Homo sapiens
  misc_feature (1)..(9): Table A1; Target 493; HLA-C*16:01; PABP3; ENSG00000151846; Polyadenylate-binding protein 3 (PABP-3) (Poly(A)-binding protein 3) (Testis-specific poly(A)-binding protein)
ASSQVPRVM

SEQ ID NO: 103336 - protein, 9 aa, Homo sapiens
  misc_feature (1)..(9): Table A1; Target 494; HLA-A*01:01; CD051; ENSG00000237136; Uncharacterized protein C4orf51
WSDSSVTTY

SEQ ID NO: 103337 - protein, 9 aa, Homo sapiens
  misc_feature (1)..(9): Table A1; Target 495; HLA-C*02:02; SSX1ENSG00000126752; Protein SSX1 (Cancer/testis antigen 5.1) (CT5.1) (Synovial sarcoma, X breakpoint 1)
KAFDDIATY

SEQ ID NO: 103338 - protein, 9 aa, Homo sapiens
  misc_feature (1)..(9): Table A1; Target 496; HLA-A*29:02; CTSRD; ENSG00000174898; Cation channel sperm-associated protein subunit delta (CatSper-delta) (CatSperdelta) (Transmembrane protein 146)
HVSNLVFAY

SEQ ID NO: 103339 - protein, 9 aa, Homo sapiens
  misc_feature (1)..(9): Table A1; Target 497; HLA-A*29:02; CTSRD; ENSG00000174898; Cation channel sperm-associated protein subunit delta (CatSper-delta) (CatSperdelta) (Transmembrane protein 146)
ILGSVWLAY

SEQ ID NO: 103340 - protein, 9 aa, Homo sapiens
  misc_feature (1)..(9): Table A1; Target 498; HLA-B*44:03; CTSRD; ENSG00000174898; Cation channel sperm-associated protein subunit delta (CatSper-delta) (CatSperdelta) (Transmembrane protein 146)
KEFGGPFFW

SEQ ID NO: 103341 - protein, 9 aa, Homo sapiens
  misc_feature (1)..(9): Table A1; Target 499; HLA-B*35:01; CTSRD; ENSG00000174898; Cation channel sperm-associated protein subunit delta (CatSper-delta) (CatSperdelta) (Transmembrane protein 146)
LPFTIPTSM

SEQ ID NO: 103342 - protein, 10 aa, Homo sapiens
  misc_feature (1)..(10): Table A1; Target 500; HLA-A*11:01; CTSRD; ENSG00000174898; Cation channel sperm-associated protein subunit delta (CatSper-delta) (CatSperdelta) (Transmembrane protein 146)
VVNQGKGMFK

SEQ ID NO: 103343 - protein, 9 aa, Homo sapiens
  misc_feature (1)..(9): Table A1; Target 501; HLA-A*24:02; CTSRD; ENSG00000174898; Cation channel sperm-associated protein subunit delta (CatSper-delta) (CatSperdelta) (Transmembrane protein 146)
VYGAFPVQL

SEQ ID NO: 103344 - protein, 9 aa, Homo sapiens
  misc_feature (1)..(9): Table A1; Target 502; HLA-A*01:01; CTSRD; ENSG00000174898; Cation channel sperm-associated protein subunit delta (CatSper-delta) (CatSperdelta) (Transmembrane protein 146)
YTSDGNTKY

SEQ ID NO: 103345 - protein, 9 aa, Homo sapiens
  misc_feature (1)..(9): Table A1; Target 503; HLA-A*24:02; DPPA5; ENSG00000203909; Developmental pluripotency-associated 5 protein (hDPPA5) (Embryonal stem cell-specific gene 1 protein) (ESG-1)
VYGSYLYKL

SEQ ID NO: 103346 - protein, 9 aa, Homo sapiens
  misc_feature (1)..(9): Table A1; Target 504; HLA-A*30:02; NAA11; ENSG00000156269; N-alpha-acetyltransferase 11 (EC 2.3.1.255) (N-terminal acetyltransferase complex ARD1 subunit homolog B) (hARD2) (NatA catalytic subunit Naa11)
QISEVEPKY

SEQ ID NO: 103347 - protein, 9 aa, Homo sapiens
  misc_feature (1)..(9): Table A1; Target 505; HLA-A*29:02; I22R2; ENSG00000164485; Interleukin-22 receptor subunit alpha-2 (IL-22 receptor subunit alpha-2) (IL-22R-alpha-2) (IL-22RA2) (Cytokine receptor class-II member 10)
  misc_feature (1)..(9): (Cytokine receptor family 2 member 10) (CRF2-10) (Cytokine receptor family type 2, soluble 1) (CRF2-S1) (Interleukin-22-binding protein) (IL-22BP) (IL22BP) (ZcytoR16)
HAPNLPYRY

SEQ ID NO: 103348 - protein, 11 aa, Homo sapiens
  misc_feature (1)..(11): Table A1; Target 506; HLA-B*35:01; ERVV2; ENSG00000268964; Endogenous retrovirus group V member 2 Env polyprotein (HERV-V; 19q13.41 provirus ancestral Env polyprotein 2)
LPFDGSPKITY

SEQ ID NO: 103349 - protein, 9 aa, Homo sapiens
  misc_feature (1)..(9): Table A1; Target 507; HLA-B*51:01; ERVV2; ENSG00000268964; Endogenous retrovirus group V member 2 Env polyprotein (HERV-V; 19q13.41 provirus ancestral Env polyprotein 2)
LPFDGSPKI

SEQ ID NO: 103350 - protein, 10 aa, Homo sapiens
  misc_feature (1)..(10): Table A1; Target 508; HLA-A*11:01; ERVV2; ENSG00000268964; Endogenous retrovirus group V member 2 Env polyprotein (HERV-V; 19q13.41 provirus ancestral Env polyprotein 2)
SVIGGPSTYK

SEQ ID NO: 103351 - protein, 11 aa, Homo sapiens
  misc_feature (1)..(11): Table A1; Target 509; HLA-A*03:01; ERVV2; ENSG00000268964; Endogenous retrovirus group V member 2 Env polyprotein (HERV-V; 19q13.41 provirus ancestral Env polyprotein 2)
TIYNTTQPRQK

SEQ ID NO: 103352 - protein, 8 aa, Homo sapiens
  misc_feature (1)..(8): Table A1; Target 510; HLA-B*35:01; PPATENSG00000142513; Testicular acid phosphatase (EC 3.1.3.2)
EAFLSPEY

SEQ ID NO: 103353 - protein, 9 aa, Homo sapiens
  misc_feature (1)..(9): Table A1; Target 511; HLA-C*16:01; RNF17; ENSG00000132972; RING finger protein 17 (Tudor domain-containing protein 4)
AAMNIARAL

SEQ ID NO: 103354 - protein, 10 aa, Homo sapiens
  misc_feature (1)..(10): Table A1; Target 512; HLA-A*11:01; RNF17; ENSG00000132972; RING finger protein 17 (Tudor domain-containing protein 4)
ASYEIGYILK

SEQ ID NO: 103355 - protein, 11 aa, Homo sapiens
  misc_feature (1)..(11): Table A1; Target 513; HLA-A*26:01; RNF17; ENSG00000132972; RING finger protein 17 (Tudor domain-containing protein 4)
EVVGGAVRVQY

SEQ ID NO: 103356 - protein, 9 aa, Homo sapiens
  misc_feature (1)..(9): Table A1; Target 514; HLA-B*46:01; RNF17; ENSG00000132972; RING finger protein 17 (Tudor domain-containing protein 4)
LVKEGLASY

SEQ ID NO: 103357 - protein, 9 aa, Homo sapiens
  misc_feature (1)..(9): Table A1; Target 515; HLA-A*02:01; VRTNENSG00000133980; Vertnin; ;
ALYDGLTLV

SEQ ID NO: 103358 - protein, 9 aa, Homo sapiens
  misc_feature (1)..(9): Table A1; Target 516; HLA-A*02:01; TRIMM; ENSG00000179046; Probable E3 ubiquitin-protein ligase TRIML2 (EC 2.3.2.27) (RING-type E3 ubiquitin transferase TRIML2) (SPRY domain-containing protein 6) (Tripartite motif family-like
SLLKLIVEL

SEQ ID NO: 103359 - protein, 9 aa, Homo sapiens
  misc_feature (1)..(9): Table A1; Target 517; HLA-B*35:01; PTX4ENSG00000251692; Pentraxin-4;
IASNYNVSY

SEQ ID NO: 103360 - protein, 11 aa, Homo sapiens
  misc_feature (1)..(11): Table A1; Target 518; HLA-A*30:02; MAGA8; ENSG00000156009; Melanoma-associated antigen 8 (Cancer/testis antigen 1.8) (CT1.8) (MAGE-8 antigen)
RQAPGSDPVRY

SEQ ID NO: 103361 - protein, 11 aa, Homo sapiens
  misc_feature (1)..(11): Table A1; Target 519; HLA-B*44:02; MAGC1; ENSG00000155495; Melanoma-associated antigen C1 (Cancer/testis antigen 7.1) (CT7.1) (MAGE-C1 antigen)
AEMLTNVISRY

SEQ ID NO: 103362 - protein, 9 aa, Homo sapiens
  misc_feature (1)..(9): Table A1; Target 520; HLA-B*46:01; 5HT1F; ENSG00000179097; 5-hydroxytryptamine receptor 1F (5-HT-1F) (5-HT1F) (Serotonin receptor 1F)
STKSVSTSY

SEQ ID NO: 103363 - protein, 9 aa, Homo sapiens
  misc_feature (1)..(9): Table A1; Target 521; HLA-B*35:01; SAGE1; ENSG00000181433; Sarcoma antigen 1 (Cancer/testis antigen 14) (CT14)
MAATGVSSM

SEQ ID NO: 103364 - protein, 9 aa, Homo sapiens
  misc_feature (1)..(9): Table A1; Target 522; HLA-A*33:01; TIFAB; ENSG00000255833; TRAF-interacting protein with FHA domain-containing protein B (TIFA-like protein)
DTSPLLLGR

SEQ ID NO: 103365 - protein, 9 aa, Homo sapiens
  misc_feature (1)..(9): Table A1; Target 523; HLA-A*29:02; TIFAB; ENSG00000255833; TRAF-interacting protein with FHA domain-containing protein B (TIFA-like protein)
HVSPSPLIY

SEQ ID NO: 103366 - protein, 9 aa, Homo sapiens
  misc_feature (1)..(9): Table A1; Target 524; HLA-B*35:01; TIFAB; ENSG00000255833; TRAF-interacting protein with FHA domain-containing protein B (TIFA-like protein)
HVSPSPLIY

SEQ ID NO: 103367 - protein, 9 aa, Homo sapiens
  misc_feature (1)..(9): Table A1; Target 525; HLA-A*29:02; TIFAB; ENSG00000255833; TRAF-interacting protein with FHA domain-containing protein B (TIFA-like protein)
WVNGLTLRY

SEQ ID NO: 103368 - protein, 9 aa, Homo sapiens
  misc_feature (1)..(9): Table A1; Target 526; HLA-A*11:01; J3KR52; ENSG00000185055; EF-hand calcium-binding domain-containing protein 10
GTISFVQYK

SEQ ID NO: 103369 - protein, 9 aa, Homo sapiens
  misc_feature (1)..(9): Table A1; Target 527; HLA-C*04:01; TDT ENSG00000107447; DNA nucleotidylexotransferase (EC 2.7.7.31) (Terminal addition enzyme) (Terminal deoxynucleotidyltransferase) (Terminal transferase)
AFVTMTGGF

SEQ ID NO: 103370 - protein, 11 aa, Homo sapiens
  misc_feature (1)..(11): Table A1; Target 528; HLA-A*29:02; TDT ENSG00000107447; DNA nucleotidylexotransferase (EC 2.7.7.31) (Terminal addition enzyme) (Terminal deoxynucleotidyltransferase) (Terminal transferase)
NLWEKKGLLLY

SEQ ID NO: 103371 - protein, 9 aa, Homo sapiens
  misc_feature (1)..(9): Table A1; Target 529; HLA-A*26:01; SYCY1; ENSG00000242950; Syncytin-1 (Endogenous retrovirus group W member 1) (Env-W) (Envelope polyprotein gPr73) (Enverin) (HERV-7q Envelope protein)
  misc_feature (1)..(9): (HERV-W envelope protein) (HERV-W; 7q21.2 provirus ancestral Env polyprotein) (Syncytin) [Cleaved into: Surface protein (SU) (gp50); Transmembrane protein (TM) (gp24)]
EVISQLTRV

SEQ ID NO: 103372 - protein, 9 aa, Homo sapiens
  misc_feature (1)..(9): Table A1; Target 530; HLA-A*01:01; SYCY1; ENSG00000242950; Syncytin-1 (Endogenous retrovirus group W member 1) (Env-W) (Envelope polyprotein gPr73) (Enverin) (HERV-7q Envelope protein)
  misc_feature (1)..(9): (HERV-W envelope protein) (HERV-W; 7q21.2 provirus ancestral Env polyprotein) (Syncytin) [Cleaved into: Surface protein (SU) (gp50); Transmembrane protein (TM) (gp24)]
YTEQDLYSY

SEQ ID NO: 103373 - protein, 9 aa, Homo sapiens
  misc_feature (1)..(9): Table A1; Target 531; HLA-A*24:02; TRI51; ENSG00000124900; Tripartite motif-containing protein 51 (SPRY domain-containing protein 5)
NYFLDPVTI

SEQ ID NO: 103374 - protein, 9 aa, Homo sapiens
  misc_feature (1)..(9): Table A1; Target 532; HLA-A*02:07; HDGL1; ENSG00000112273; Hepatoma-derived growth factor-like protein 1 (PWWP domain-containing protein 1)
AVDEESPFL

SEQ ID NO: 103375 - protein, 9 aa, Homo sapiens
  misc_feature (1)..(9): Table A1; Target 533; HLA-B*51:01; NPBW1; ENSG00000183729; Neuropeptides B/W receptor type 1 (G-protein coupled receptor 7)
TPYHLSTVV

SEQ ID NO: 103376 - protein, 9 aa, Homo sapiens
  misc_feature (1)..(9): Table A1; Target 534; HLA-A*01:01; GLYL3; ENSG00000203972; Glycine N-acyltransferase-like protein 3 (EC 2.3.1.-)
NLDHYTNAY

SEQ ID NO: 103377 - protein, 9 aa, Homo sapiens
  misc_feature (1)..(9): Table A1; Target 535; HLA-B*51:01; STRA8; ENSG00000146857; Stimulated by retinoic acid gene 8 protein homolog
DAFDVASFL

SEQ ID NO: 103378 - protein, 10 aa, Homo sapiens
  misc_feature (1)..(10): Table A1; Target 536; HLA-A*29:02; DYTNENSG00000232125; Dystrotelin;
RTFPITGLRY

SEQ ID NO: 103379 - protein, 11 aa, Homo sapiens
  misc_feature (1)..(11): Table A1; Target 537; HLA-A*01:01; PRD14; ENSG00000147596; PR domain zinc finger protein 14 (EC 2.1.1.-) (PR domain-containing protein 14)
FTEEDLHFVLY

SEQ ID NO: 103380 - protein, 11 aa, Homo sapiens
  misc_feature (1)..(11): Table A1; Target 538; HLA-A*29:02; S7A13; ENSG00000164893; Solute carrier family 7 member 13 (Sodium-independent aspartate/glutamate transporter 1) (X-amino acid transporter 2)
IFVSPKGVLAY

SEQ ID NO: 103381 - protein, 9 aa, Homo sapiens
  misc_feature (1)..(9): Table A1; Target 539; HLA-B*44:03; S7A13; ENSG00000164893; Solute carrier family 7 member 13 (Sodium-independent aspartate/glutamate transporter 1) (X-amino acid transporter 2)
QEGQLPLLF

SEQ ID NO: 103382 - protein, 9 aa, Homo sapiens
  misc_feature (1)..(9): Table A1; Target 540; HLA-A*02:01; NALP7; ENSG00000167634; NACHT, LRR and PYD domains-containing protein 7 (Nucleotide-binding oligomerization domain protein 12) (PYRIN-containing APAF1-like protein 3)
LLAQQPIYV

SEQ ID NO: 103383 - protein, 8 aa, Homo sapiens
  misc_feature (1)..(8): Table A1; Target 541; HLA-B*51:01; TDT ENSG00000107447; DNA nucleotidylexotransferase (EC 2.7.7.31) (Terminal addition enzyme) (Terminal deoxynucleotidyltransferase) (Terminal transferase)
LPFTIISM

SEQ ID NO: 103384 - protein, 9 aa, Homo sapiens
  misc_feature (1)..(9): Table A1; Target 542; HLA-A*11:01; AXDN1; ENSG00000162779; Axonemal dynein light chain domain-containing protein 1
AVIEHMQEK

SEQ ID NO: 103385 - protein, 11 aa, Homo sapiens
  misc_feature (1)..(11): Table A1; Target 543; HLA-B*44:03; AXDN1; ENSG00000162779; Axonemal dynein light chain domain-containing protein 1
EEIIKNIQKLY

SEQ ID NO: 103386 - protein, 9 aa, Homo sapiens
  misc_feature (1)..(9): Table A1; Target 544; HLA-A*02:01; AXDN1; ENSG00000162779; Axonemal dynein light chain domain-containing protein 1
YLIDHPVSL

SEQ ID NO: 103387 - protein, 9 aa, Homo sapiens
  misc_feature (1)..(9): Table A1; Target 545; HLA-A*02:07; AXDN1; ENSG00000162779; Axonemal dynein light chain domain-containing protein 1
YLIDHPVSL

SEQ ID NO: 103388 - protein, 9 aa, Homo sapiens
  misc_feature (1)..(9): Table A1; Target 546; HLA-A*24:02; CT55ENSG00000169551; Cancer/testis antigen 55 (Tumor antigen BJ-HCC-20)
IYISNSIYF

SEQ ID NO: 103389 - protein, 9 aa, Homo sapiens
  misc_feature (1)..(9): Table A1; Target 547; HLA-A*11:01; CT55ENSG00000169551; Cancer/testis antigen 55 (Tumor antigen BJ-HCC-20)
VVTGNVPLK

SEQ ID NO: 103390 - protein, 9 aa, Homo sapiens
  misc_feature (1)..(9): Table A1; Target 548; HLA-A*11:01; U3KQD4; ENSG00000105549; Testicular haploid-expressed gene protein (Theg homolog (Mouse), isoform CRA; a)
ASMSLPPPK

SEQ ID NO: 103391 - protein, 9 aa, Homo sapiens
  misc_feature (1)..(9): Table A1; Target 549; HLA-C*16:01; U3KQD4; ENSG00000105549; Testicular haploid-expressed gene protein (Theg homolog (Mouse), isoform CRA; a)
VASPRIISL

SEQ ID NO: 103392 - protein, 9 aa, Homo sapiens
  misc_feature (1)..(9): Table A1; Target 550; HLA-A*29:02; TDT ENSG00000107447; DNA nucleotidylexotransferase (EC 2.7.7.31) (Terminal addition enzyme) (Terminal deoxynucleotidyltransferase) (Terminal transferase)
MILDNHALY

SEQ ID NO: 103393 - protein, 9 aa, Homo sapiens
  misc_feature (1)..(9): Table A1; Target 551; HLA-A*02:07; MAGC1; ENSG00000155495; Melanoma-associated antigen C1 (Cancer/testis antigen 7.1) (CT7.1) (MAGE-C1 antigen)
TLDEKVDEL

SEQ ID NO: 103394 - protein, 9 aa, Homo sapiens
  misc_feature (1)..(9): Table A1; Target 552; HLA-B*35:01; S6A18; ENSG00000164363; Sodium-dependent neutral amino acid transporter B(0)AT3 (Sodium- and chloride-dependent transporter XTRP2) (Solute carrier family 6 member 18) (System B(0) neutral amino acid transporter AT3)
LAFGGHIAF

SEQ ID NO: 103395 - protein, 9 aa, Homo sapiens
  misc_feature (1)..(9): Table A1; Target 553; HLA-A*30:02; ONEC3; ENSG00000205922; One cut domain family member 3 (One cut homeobox 3) (Transcription factor ONECUT-3) (OC-3)
ALASVGHLY

SEQ ID NO: 103396 - protein, 9 aa, Homo sapiens
  misc_feature (1)..(9): Table A1; Target 554; HLA-B*35:01; NKX24; ENSG00000125816; Homeobox protein Nkx-2.4 (Homeobox protein NK-2 homolog D)
APLGAAAAY

SEQ ID NO: 103397 - protein, 9 aa, Homo sapiens
  misc_feature (1)..(9): Table A1; Target 555; HLA-A*29:02; NDST4; ENSG00000138653; Bifunctional heparan sulfate N-deacetylase/N-sulfotransferase 4 (EC 2.8.2.8) (Glucosaminyl N-deacetylase/N-sulfotransferase 4) (NDST-4)
  misc_feature (1)..(9): (N-heparan sulfate sulfotransferase 4) (N-HSST 4) [Includes: Heparan sulfate N-deacetylase 4 (EC 3.-.-.-); Heparan sulfate N-sulfotransferase 4 (EC 2.8.2.-)]
GLFTHTIFY

SEQ ID NO: 103398 - protein, 9 aa, Homo sapiens
  misc_feature (1)..(9): Table A1; Target 556; HLA-B*51:01; NDST4; ENSG00000138653; Bifunctional heparan sulfate N-deacetylase/N-sulfotransferase 4 (EC 2.8.2.8) (Glucosaminyl N-deacetylase/N-sulfotransferase 4) (NDST-4)
  misc_feature (1)..(9): (N-heparan sulfate sulfotransferase 4) (N-HSST 4) [Includes: Heparan sulfate N-deacetylase 4 (EC 3.-.-.-); Heparan sulfate N-sulfotransferase 4 (EC 2.8.2.-)]
VPKAKIITI

SEQ ID NO: 103399 - protein, 9 aa, Homo sapiens
  misc_feature (1)..(9): Table A1; Target 557; HLA-A*01:01; ZN729; ENSG00000196350; Zinc finger protein 729
HTEDKPYKY

SEQ ID NO: 103400 - protein, 9 aa, Homo sapiens
  misc_feature (1)..(9): Table A1; Target 558; HLA-A*01:01; FGF16; ENSG00000196468; Fibroblast growth factor 16 (FGF-16)
HSDSERQYY

SEQ ID NO: 103401 - protein, 9 aa, Homo sapiens
  misc_feature (1)..(9): Table A1; Target 559; HLA-A*02:07; FGF16; ENSG00000196468; Fibroblast growth factor 16 (FGF-16)
SLDWDLHGF

SEQ ID NO: 103402 - protein, 9 aa, Homo sapiens
  misc_feature (1)..(9): Table A1; Target 560; HLA-A*31:01; HXB1ENSG00000120094; Homeobox protein Hox-B1 (Homeobox protein Hox-2I)
QVKIWFQNR

SEQ ID NO: 103403 - protein, 10 aa, Homo sapiens
  misc_feature (1)..(10): Table A1; Target 561; HLA-A*11:01; ACHB4; ENSG00000117971; Neuronal acetylcholine receptor subunit beta-4
TSLDVPLIGK

SEQ ID NO: 103404 - protein, 9 aa, Homo sapiens
  misc_feature (1)..(9): Table A1; Target 562; HLA-B*44:03; PRD14; ENSG00000147596; PR domain zinc finger protein 14 (EC 2.1.1.-) (PR domain-containing protein 14)
EEDLHFVLY

SEQ ID NO: 103405 - protein, 9 aa, Homo sapiens
  misc_feature (1)..(9): Table A1; Target 563; HLA-B*46:01; ACTL8; ENSG00000117148; Actin-like protein 8 (Cancer/testis antigen 57) (CT57)
SVVAHLSTY

SEQ ID NO: 103406 - protein, 10 aa, Homo sapiens
  misc_feature (1)..(10): Table A1; Target 564; HLA-B*44:03; BRDTENSG00000137948; Bromodomain testis-specific protein (Cancer/testis antigen 9) (CT9) (RING3-like protein)
SEAQDKSKLW

SEQ ID NO: 103407 - protein, 9 aa, Homo sapiens
  misc_feature (1)..(9): Table A1; Target 565; HLA-A*29:02; ESPB1; ENSG00000169393; Epididymal sperm-binding protein 1 (Epididymal secretory protein 12) (hE12)
AVYNGQWKY

SEQ ID NO: 103408 - protein, 9 aa, Homo sapiens
  misc_feature (1)..(9): Table A1; Target 566; HLA-A*11:01; ESPB1; ENSG00000169393; Epididymal sperm-binding protein 1 (Epididymal secretory protein 12) (hE12)
SVTSVFDEK

SEQ ID NO: 103409 - protein, 9 aa, Homo sapiens
  misc_feature (1)..(9): Table A1; Target 567; HLA-A*02:01; NAL11; ENSG00000179873; NACHT, LRR and PYD domains-containing protein 11 (Nucleotide-binding oligomerization domain protein 17) (PAAD-and NACHT domain-containing protein 10) (PYRIN-containing APAF1-like
ALMEVTVYL

SEQ ID NO: 103410 - protein, 11 aa, Homo sapiens
  misc_feature (1)..(11): Table A1; Target 568; HLA-B*44:03; NAL11; ENSG00000179873; NACHT, LRR and PYD domains-containing protein 11 (Nucleotide-binding oligomerization domain protein 17) (PAAD-and NACHT domain-containing protein 10) (PYRIN-containing APAF1-like
EELANVLPISY

SEQ ID NO: 103411 - protein, 10 aa, Homo sapiens
  misc_feature (1)..(10): Table A1; Target 569; HLA-B*44:03; NAL11; ENSG00000179873; NACHT, LRR and PYD domains-containing protein 11 (Nucleotide-binding oligomerization domain protein 17) (PAAD-and NACHT domain-containing protein 10) (PYRIN-containing APAF1-like
SEAGLTANQY

SEQ ID NO: 103412 - protein, 10 aa, Homo sapiens
  misc_feature (1)..(10): Table A1; Target 570; HLA-C*02:02; NAL11; ENSG00000179873; NACHT, LRR and PYD domains-containing protein 11 (Nucleotide-binding oligomerization domain protein 17) (PAAD-and NACHT domain-containing protein 10) (PYRIN-containing APAF1-like
SEAGLTANQY

SEQ ID NO: 103413 - protein, 9 aa, Homo sapiens
  misc_feature (1)..(9): Table A1; Target 571; HLA-A*29:02; NAL11; ENSG00000179873; NACHT, LRR and PYD domains-containing protein 11 (Nucleotide-binding oligomerization domain protein 17) (PAAD-and NACHT domain-containing protein 10) (PYRIN-containing APAF1-like
VFYILQLAY

SEQ ID NO: 103414 - protein, 11 aa, Homo sapiens
  misc_feature (1)..(11): Table A1; Target 572; HLA-A*11:01; GCM1ENSG00000137270; Chorion-specific transcription factor GCMa (hGCMa) (GCM motif protein 1) (Glial cells missing homolog 1)
STVDPMKLYEK

SEQ ID NO: 103415 - protein, 9 aa, Homo sapiens
  misc_feature (1)..(9): Table A1; Target 573; HLA-B*35:01; SPT22; ENSG00000141255; Spermatogenesis-associated protein 22 (Testis development protein NYD-SP20)
SAVTPGPYY

SEQ ID NO: 103416 - protein, 9 aa, Homo sapiens
  misc_feature (1)..(9): Table A1; Target 574; HLA-A*02:07; LRC52; ENSG00000162763; Leucine-rich repeat-containing protein 52 (BK channel auxiliary gamma subunit LRRC52)
YLDLRNTGL

SEQ ID NO: 103417 - protein, 10 aa, Homo sapiens
  misc_feature (1)..(10): Table A1; Target 575; HLA-A*11:01; PCDC1; ENSG00000248383; Protocadherin alpha-C1 (PCDH-alpha-C1)
ATIDVTTVER

SEQ ID NO: 103418 - protein, 8 aa, Homo sapiens
  misc_feature (1)..(8): Table A1; Target 576; HLA-B*51:01; PCDC1; ENSG00000248383; Protocadherin alpha-C1 (PCDH-alpha-C1)
DPLELHKI

SEQ ID NO: 103419 - protein, 9 aa, Homo sapiens
  misc_feature (1)..(9): Table A1; Target 577; HLA-A*02:07; A0A1B0GTJ6; ENSG00000268655; HCG1796489
TVADPLPQV

SEQ ID NO: 103420 - protein, 9 aa, Homo sapiens
  misc_feature (1)..(9): Table A1; Target 578; HLA-B*35:01; FHL17; ENSG00000132446; Ferritin heavy polypeptide-like 17 (Cancer/testis antigen 38) (CT38)
SPEAGLAEY

SEQ ID NO: 103421 - protein, 9 aa, Homo sapiens
  misc_feature (1)..(9): Table A1; Target 579; HLA-B*51:01; CALIENSG00000185972; Calicin; ;
IPMDGTAVI

SEQ ID NO: 103422 - protein, 9 aa, Homo sapiens
  misc_feature (1)..(9): Table A1; Target 580; HLA-A*01:01; PIWL1; ENSG00000125207; Piwi-like protein 1 (EC 3.1.26.-)
GSEVSFLEY

SEQ ID NO: 103423 - protein, 9 aa, Homo sapiens
  misc_feature (1)..(9): Table A1; Target 581; HLA-B*44:02; CTSRD; ENSG00000174898; Cation channel sperm-associated protein subunit delta (CatSper-delta) (CatSperdelta) (Transmembrane protein 146)
KEFGGPFFW

SEQ ID NO: 103424 - protein, 9 aa, Homo sapiens
  misc_feature (1)..(9): Table A1; Target 582; HLA-A*11:01; GSX2ENSG00000180613; GS homeobox 2 (Genetic-screened homeobox 2) (Homeobox protein GSH-2)
AAGALPLLK

SEQ ID NO: 103425 - protein, 9 aa, Homo sapiens
  misc_feature (1)..(9): Table A1; Target 583; HLA-A*11:01; GSX2ENSG00000180613; GS homeobox 2 (Genetic-screened homeobox 2) (Homeobox protein GSH-2)
ATYLNLSEK

SEQ ID NO: 103426 - protein, 9 aa, Homo sapiens
  misc_feature (1)..(9): Table A1; Target 584; HLA-B*51:01; GSX2ENSG00000180613; GS homeobox 2 (Genetic-screened homeobox 2) (Homeobox protein GSH-2)
MPPPLVMSV

SEQ ID NO: 103427 - protein, 9 aa, Homo sapiens
  misc_feature (1)..(9): Table A1; Target 585; HLA-A*31:01; GSX2ENSG00000180613; GS homeobox 2 (Genetic-screened homeobox 2) (Homeobox protein GSH-2)
QVKIWFQNR

SEQ ID NO: 103428 - protein, 9 aa, Homo sapiens
  misc_feature (1)..(9): Table A1; Target 586; HLA-B*51:01; ADIGENSG00000182035; Adipogenin;
VPPWNPQLI

SEQ ID NO: 103429 - protein, 8 aa, Homo sapiens
  misc_feature (1)..(8): Table A1; Target 587; HLA-C*04:01; FOXE3; ENSG00000186790; Forkhead box protein E3 (Forkhead-related protein FKHL12) (Forkhead-related transcription factor 8) (FREAC-8)
MFDNGSFL

SEQ ID NO: 103430 - protein, 9 aa, Homo sapiens
  misc_feature (1)..(9): Table A1; Target 588; HLA-A*11:01; HDGL1; ENSG00000112273; Hepatoma-derived growth factor-like protein 1 (PWWP domain-containing protein 1)
KSGDLVFAK

SEQ ID NO: 103431 - protein, 9 aa, Homo sapiens
  misc_feature (1)..(9): Table A1; Target 589; HLA-A*31:01; GCNT7; ENSG00000124091; Beta-1,3-galactosyl-O-glycosyl-glycoprotein beta-1,6-N-acetylglucosaminyltransferase 7 (EC 2.4.1.-)
ATKSGLVVR

SEQ ID NO: 103432 - protein, 9 aa, Homo sapiens
  misc_feature (1)..(9): Table A1; Target 590; HLA-B*51:01; F71F1; ENSG00000135248; Protein FAM71F1 (Protein FAM137A) (Testis development protein NYD-SP18)
LAPPIGNSI

SEQ ID NO: 103433 - protein, 11 aa, Homo sapiens
  misc_feature (1)..(11): Table A1; Target 591; HLA-B*44:03; NALP7; ENSG00000167634; NACHT, LRR and PYD domains-containing protein 7 (Nucleotide-binding oligomerization domain protein 12) (PYRIN-containing APAF1-like protein 3)
EEGEDRDGHAW

SEQ ID NO: 103434 - protein, 9 aa, Homo sapiens
  misc_feature (1)..(9): Table A1; Target 592; HLA-A*24:02; TRI60; ENSG00000176979; Tripartite motif-containing protein 60 (RING finger protein 129) (RING finger protein 33)
EYLKDPVTI

SEQ ID NO: 103435 - protein, 9 aa, Homo sapiens
  misc_feature (1)..(9): Table A1; Target 593; HLA-B*44:03; TRI60; ENSG00000176979; Tripartite motif-containing protein 60 (RING finger protein 129) (RING finger protein 33)
SEFEQIRLF

SEQ ID NO: 103436 - protein, 9 aa, Homo sapiens
  misc_feature (1)..(9): Table A1; Target 594; HLA-B*18:01; PIWL1; ENSG00000125207; Piwi-like protein 1 (EC 3.1.26.-)
SEVSFLEYY

SEQ ID NO: 103437 - protein, 9 aa, Homo sapiens
  misc_feature (1)..(9): Table A1; Target 595; HLA-A*11:01; SAGE1; ENSG00000181433; Sarcoma antigen 1 (Cancer/testis antigen 14) (CT14)
AGISSTITR

SEQ ID NO: 103438 - protein, 8 aa, Homo sapiens
  misc_feature (1)..(8): Table A1; Target 596; HLA-B*18:01; FOXR2; ENSG00000189299; Forkhead box protein R2 (Forkhead box protein N6)
EETRVLAF

SEQ ID NO: 103439 - protein, 9 aa, Homo sapiens
  misc_feature (1)..(9): Table A1; Target 597; HLA-A*11:01; FOXR2; ENSG00000189299; Forkhead box protein R2 (Forkhead box protein N6)
SSEQSPLQK

SEQ ID NO: 103440 - protein, 10 aa, Homo sapiens
  misc_feature (1)..(10): Table A1; Target 598; HLA-A*02:01; E5RK72; ENSG00000215262; Potassium channel subfamily U member 1
ALYSGDLHAA

SEQ ID NO: 103441 - protein, 9 aa, Homo sapiens
  misc_feature (1)..(9): Table A1; Target 599; HLA-B*18:01; E5RK72; ENSG00000215262; Potassium channel subfamily U member 1
EEFSLQKSY

SEQ ID NO: 103442 - protein, 9 aa, Homo sapiens
  misc_feature (1)..(9): Table A1; Target 600; HLA-B*44:03; E5RK72; ENSG00000215262; Potassium channel subfamily U member 1
EEFSLQKSY

SEQ ID NO: 103443 - protein, 9 aa, Homo sapiens
  misc_feature (1)..(9): Table A1; Target 601; HLA-C*02:02; E5RK72; ENSG00000215262; Potassium channel subfamily U member 1
EEFSLQKSY

SEQ ID NO: 103444 - protein, 9 aa, Homo sapiens
  misc_feature (1)..(9): Table A1; Target 602; HLA-A*02:07; E5RK72; ENSG00000215262; Potassium channel subfamily U member 1
FLDSLLATL

SEQ ID NO: 103445 - protein, 9 aa, Homo sapiens
  misc_feature (1)..(9): Table A1; Target 603; HLA-B*35:01; E5RK72; ENSG00000215262; Potassium channel subfamily U member 1
HAEDISNIM

SEQ ID NO: 103446 - protein, 11 aa, Homo sapiens
  misc_feature (1)..(11): Table A1; Target 604; HLA-A*11:01; E5RK72; ENSG00000215262; Potassium channel subfamily U member 1
STVGFGDVVAK

SEQ ID NO: 103447 - protein, 9 aa, Homo sapiens
  misc_feature (1)..(9): Table A1; Target 605; HLA-B*35:01; E5RK72; ENSG00000215262; Potassium channel subfamily U member 1
TAFSTGTVF

SEQ ID NO: 103448 - protein, 9 aa, Homo sapiens
  misc_feature (1)..(9): Table A1; Target 606; HLA-A*02:07; E5RK72; ENSG00000215262; Potassium channel subfamily U member 1
TVDSVTAFL

SEQ ID NO: 103449 - protein, 10 aa, Homo sapiens
  misc_feature (1)..(10): Table A1; Target 607; HLA-A*11:01; ANHXENSG00000227059; Anomalous homeobox protein
GVAALTPVQK

SEQ ID NO: 103450 - protein, 10 aa, Homo sapiens
  misc_feature (1)..(10): Table A1; Target 608; HLA-A*02:01; ANHXENSG00000227059; Anomalous homeobox protein
HLLDNADVAL

SEQ ID NO: 103451 - protein, 9 aa, Homo sapiens
  misc_feature (1)..(9): Table A1; Target 609; HLA-A*02:07; ANHXENSG00000227059; Anomalous homeobox protein
LLDNADVAL

SEQ ID NO: 103452 - protein, 9 aa, Homo sapiens
  misc_feature (1)..(9): Table A1; Target 610; HLA-C*02:02; SYCY2; ENSG00000244476; Syncytin-2 (Endogenous retrovirus group FRD member 1) (Envelope polyprotein)
  misc_feature (1)..(9): (HERV-FRD) (HERV-FRD; 6p24.1 provirus ancestral Env polyprotein) [Cleaved into: Surface protein (SU); Transmembrane protein (TM)]
IEAELHISY

SEQ ID NO: 103453 - protein, 8 aa, Homo sapiens
  misc_feature (1)..(8): Table A1; Target 611; HLA-B*18:01; SYCY2; ENSG00000244476; Syncytin-2 (Endogenous retrovirus group FRD member 1) (Envelope polyprotein) (HERV-FRD) (HERV-FRD; 6p24.1 provirus ancestral Env polyprotein)
  misc_feature (1)..(8): [Cleaved into: Surface protein (SU); Transmembrane protein (TM)]
TETPGTAY

SEQ ID NO: 103454 - protein, 8 aa, Homo sapiens
  misc_feature (1)..(8): Table A1; Target 612; HLA-C*01:02; S22AD; ENSG00000172940; Solute carrier family 22 member 13 (Organic cation transporter-like 3) (ORCTL-3)
TGPSGNAL

SEQ ID NO: 103455 - protein, 9 aa, Homo sapiens
  misc_feature (1)..(9): Table A1; Target 613; HLA-A*11:01; NALP9; ENSG00000185792; NACHT, LRR and PYD domains-containing protein 9 (Nucleotide-binding oligomerization domain protein 6) (PYRIN and NACHT-containing protein 12)
ASFLTTVFK

SEQ ID NO: 103456 - protein, 9 aa, Homo sapiens
  misc_feature (1)..(9): Table A1; Target 614; HLA-A*24:02; NALP9; ENSG00000185792; NACHT, LRR and PYD domains-containing protein 9 (Nucleotide-binding oligomerization domain protein 6) (PYRIN and NACHT-containing protein 12)
IYIGNIEHL

SEQ ID NO: 103457 - protein, 8 aa, Homo sapiens
  misc_feature (1)..(8): Table A1; Target 615; HLA-B*51:01; CXA10; ENSG00000135355; Gap junction alpha-10 protein (Connexin-62) (Cx62)
DAFPISLI

SEQ ID NO: 103458 - protein, 10 aa, Homo sapiens
  misc_feature (1)..(10): Table A1; Target 616; HLA-A*30:02; X1WI33; ENSG00000170788; DPY30 domain-containing protein 1 (Fragment)
KTLAEISDRY

SEQ ID NO: 103459 - protein, 9 aa, Homo sapiens
  misc_feature (1)..(9): Table A1; Target 617; HLA-A*11:01; X1WI33; ENSG00000170788; DPY30 domain-containing protein 1 (Fragment)
VTMEQLRQK

SEQ ID NO: 103460 - protein, 8 aa, Homo sapiens
  misc_feature (1)..(8): Table A1; Target 618; HLA-B*08:01; CF010; ENSG00000204296; Uncharacterized protein C6orf10
HAYHKVTL

SEQ ID NO: 103461 - protein, 9 aa, Homo sapiens
  misc_feature (1)..(9): Table A1; Target 619; HLA-A*01:01; CF010; ENSG00000204296; Uncharacterized protein C6orf10
QSEMYISRY

SEQ ID NO: 103462 - protein, 11 aa, Homo sapiens
  misc_feature (1)..(11): Table A1; Target 620; HLA-A*01:01; CF010; ENSG00000204296; Uncharacterized protein C6orf10
SSEQSARLLDY

SEQ ID NO: 103463 - protein, 9 aa, Homo sapiens
  misc_feature (1)..(9): Table A1; Target 621; HLA-A*11:01; FHL17; ENSG00000132446; Ferritin heavy polypeptide-like 17 (Cancer/testis antigen 38) (CT38)
ATAQPSQVR

SEQ ID NO: 103464 - protein, 11 aa, Homo sapiens
  misc_feature (1)..(11): Table A1; Target 622; HLA-A*26:01; RNF17; ENSG00000132972; RING finger protein 17 (Tudor domain-containing protein 4)
DIISEQKVSEF

SEQ ID NO: 103465 - protein, 9 aa, Homo sapiens
  misc_feature (1)..(9): Table A1; Target 623; HLA-A*02:01; IZUM2; ENSG00000161652; Izumo sperm-egg fusion protein 2
ALLGILISV

SEQ ID NO: 103466 - protein, 9 aa, Homo sapiens
  misc_feature (1)..(9): Table A1; Target 624; HLA-A*24:02; MSLNL; ENSG00000162006; Mesothelin-like protein (Pre-pro-megakaryocyte-potentiating-factor-like)
LYTKAHETF

SEQ ID NO: 103467 - protein, 9 aa, Homo sapiens
  misc_feature (1)..(9): Table A1; Target 625; HLA-A*24:02; ESPB1; ENSG00000169393; Epididymal sperm-binding protein 1 (Epididymal secretory protein 12) (hE12)
SYLLGWTTF

SEQ ID NO: 103468 - protein, 9 aa, Homo sapiens
  misc_feature (1)..(9): Table A1; Target 626; HLA-C*02:02; ZFP42; ENSG00000179059; Zinc finger protein 42 homolog (Zfp-42) (Reduced expression protein 1) (REX-1) (hREX-1) (Zinc finger protein 754)
AEIEPVSAV

SEQ ID NO: 103469 - protein, 11 aa, Homo sapiens
  misc_feature (1)..(11): Table A1; Target 627; HLA-A*11:01; ACTL8; ENSG00000117148; Actin-like protein 8 (Cancer/testis antigen 57) (CT57)
VIIDHGSGFLK

SEQ ID NO: 103470 - protein, 8 aa, Homo sapiens
  misc_feature (1)..(8): Table A1; Target 628; HLA-B*51:01; CP2AD; ENSG00000197838; Cytochrome P450 2A13 (EC 1.14.14.1) (CYPIIA13)
MPYTEAVI

SEQ ID NO: 103471 - protein, 9 aa, Homo sapiens
  misc_feature (1)..(9): Table A1; Target 629; HLA-B*35:01; ASCL4; ENSG00000187855; Achaete-scute homolog 4 (ASH-4) (hASH4) (Achaete-scute-like protein 4) (Class A basic helix-loop-helix protein 44) (bHLHa44)
LPVPLDSAF

SEQ ID NO: 103472 - protein, 9 aa, Homo sapiens
  misc_feature (1)..(9): Table A1; Target 630; HLA-B*44:03; ASCL4; ENSG00000187855; Achaete-scute homolog 4 (ASH-4) (hASH4) (Achaete-scute-like protein 4) (Class A basic helix-loop-helix protein 44) (bHLHa44)
QELLERQAW

SEQ ID NO: 103473 - protein, 9 aa, Homo sapiens
  misc_feature (1)..(9): Table A1; Target 631; HLA-B*51:01; IRPL2; ENSG00000189108; X-linked interleukin-1 receptor accessory protein-like 2 (IL-1 receptor accessory protein-like 2) (IL-1-RAPL-2) (IL-1RAPL-2)
  misc_feature (1)..(9): Table A1; Target 631; HLA-B*51:01; IRPL2; ENSG00000189108; X-linked (IL1RAPL-2) (IL1RAPL-2-related protein) (Interleukin-1 receptor 9) (IL-1R-9) (IL-1R9) (Three immunoglobulin domain-containing IL-1 receptor-related 1) (TIGIRR-1)
DAYLSYTKV

SEQ ID NO: 103474 - protein, 9 aa, Homo sapiens
  misc_feature (1)..(9): Table A1; Target 632; HLA-A*11:01; IRPL2; ENSG00000189108; X-linked interleukin-1 receptor accessory protein-like 2 (IL-1 receptor accessory protein-like 2) (IL-1-RAPL-2) (IL-1RAPL-2) (IL1RAPL-2)
  misc_feature (1)..(9): Table A1; Target 631; HLA-B*51:01; IRPL2; ENSG00000189108; X-linked (IL1RAPL-2-related protein) (Interleukin-1 receptor 9) (IL-1R-9) (IL-1R9) (Three immunoglobulin domain-containing IL-1 receptor-related 1) (TIGIRR-1)
STNLKMVSK

SEQ ID NO: 103475 - protein, 9 aa, Homo sapiens
  misc_feature (1)..(9): Table A1; Target 633; HLA-A*02:07; LN28A; ENSG00000131914; Protein lin-28 homolog A (Lin-28A) (Zinc finger CCHC domain-containing protein 1)
ALDPPVDVF

SEQ ID NO: 103476 - protein, 9 aa, Homo sapiens
  misc_feature (1)..(9): Table A1; Target 634; HLA-B*35:01; RBM46; ENSG00000151962; Probable RNA-binding protein 46 (Cancer/testis antigen 68) (CT68) (RNA-binding motif protein 46)
YPLSPTISL

SEQ ID NO: 103477 - protein, 10 aa, Homo sapiens
  misc_feature (1)..(10): Table A1; Target 635; HLA-A*03:01; ZFP42; ENSG00000179059; Zinc finger protein 42 homolog (Zfp-42) (Reduced expression protein 1) (REX-1) (hREX-1) (Zinc finger protein 754)
HILTHANTNK

SEQ ID NO: 103478 - protein, 9 aa, Homo sapiens
  misc_feature (1)..(9): Table A1; Target 636; HLA-A*26:01; CD051; ENSG00000237136; Uncharacterized protein C4orf51
SVTTYTGSY

SEQ ID NO: 103479 - protein, 9 aa, Homo sapiens
  misc_feature (1)..(9): Table A1; Target 637; HLA-A*29:02; RXFP2; ENSG00000133105; Relaxin receptor 2 (G-protein coupled receptor 106) (G-protein coupled receptor affecting testicular descent)
  misc_feature (1)..(9): (Leucine-rich repeat-containing G-protein coupled receptor 8) (Relaxin family peptide receptor 2)
AFLIIVFSY

SEQ ID NO: 103480 - protein, 10 aa, Homo sapiens
  misc_feature (1)..(10): Table A1; Target 638; HLA-A*29:02; RXFP2; ENSG00000133105; Relaxin receptor 2 (G-protein coupled receptor 106) (G-protein coupled receptor affecting testicular descent)
  misc_feature (1)..(10): (Leucine-rich repeat-containing G-protein coupled receptor 8) (Relaxin family peptide receptor 2)
FFVGIFDIKY

SEQ ID NO: 103481 - protein, 9 aa, Homo sapiens
  misc_feature (1)..(9): Table A1; Target 639; HLA-A*29:02; RXFP2; ENSG00000133105; Relaxin receptor 2 (G-protein coupled receptor 106) (G-protein coupled receptor affecting testicular descent)
  misc_feature (1)..(9): (Leucine-rich repeat-containing G-protein coupled receptor 8) (Relaxin family peptide receptor 2)
FVGIFDIKY

SEQ ID NO: 103482 - protein, 10 aa, Homo sapiens
  misc_feature (1)..(10): Table A1; Target 640; HLA-A*02:07; RXFP2; ENSG00000133105; Relaxin receptor 2 (G-protein coupled receptor 106) (G-protein coupled receptor affecting testicular descent)
  misc_feature (1)..(10): (Leucine-rich repeat-containing G-protein coupled receptor 8) (Relaxin family peptide receptor 2)
ILDDNPITRI

SEQ ID NO: 103483 - protein, 9 aa, Homo sapiens
  misc_feature (1)..(9): Table A1; Target 641; HLA-A*24:02; RXFP2; ENSG00000133105; Relaxin receptor 2 (G-protein coupled receptor 106) (G-protein coupled receptor affecting testicular descent)
  misc_feature (1)..(9): (Leucine-rich repeat-containing G-protein coupled receptor 8) (Relaxin family peptide receptor 2)
LYTLTTNFF

SEQ ID NO: 103484 - protein, 10 aa, Homo sapiens
  misc_feature (1)..(10): Table A1; Target 642; HLA-B*35:01; RXFP2; ENSG00000133105; Relaxin receptor 2 (G-protein coupled receptor 106) (G-protein coupled receptor affecting testicular descent)
  misc_feature (1)..(10): (Leucine-rich repeat-containing G-protein coupled receptor 8) (Relaxin family peptide receptor 2)
MPLTDGISSF

SEQ ID NO: 103485 - protein, 9 aa, Homo sapiens
  misc_feature (1)..(9): Table A1; Target 643; HLA-B*44:03; RXFP2; ENSG00000133105; Relaxin receptor 2 (G-protein coupled receptor 106) (G-protein coupled receptor affecting testicular descent)
  misc_feature (1)..(9): (Leucine-rich repeat-containing G-protein coupled receptor 8) (Relaxin family peptide receptor 2)
TEDIGSKGY

SEQ ID NO: 103486 - protein, 9 aa, Homo sapiens
  misc_feature (1)..(9): Table A1; Target 644; HLA-A*29:02; KCNV2; ENSG00000168263; Potassium voltage-gated channel subfamily V member 2 (Voltage-gated potassium channel subunit Kv8.2)
GYWGVRLKY

SEQ ID NO: 103487 - protein, 9 aa, Homo sapiens
  misc_feature (1)..(9): Table A1; Target 645; HLA-B*18:01; RNF17; ENSG00000132972; RING finger protein 17 (Tudor domain-containing protein 4)
LEEKMIAAY

SEQ ID NO: 103488 - protein, 9 aa, Homo sapiens
  misc_feature (1)..(9): Table A1; Target 646; HLA-A*02:07; RNF17; ENSG00000132972; RING finger protein 17 (Tudor domain-containing protein 4)
SLDEALQRV

SEQ ID NO: 103489 - protein, 9 aa, Homo sapiens
  misc_feature (1)..(9): Table A1; Target 647; HLA-A*29:02; UBP41; ENSG00000161133; Putative ubiquitin carboxyl-terminal hydrolase 41 (EC 3.4.19.12) (Deubiquitinating enzyme 41) (Ubiquitin thioesterase 41) (Ubiquitin-specific-processing protease 41)
AVWPLELAY

SEQ ID NO: 103490 - protein, 9 aa, Homo sapiens
  misc_feature (1)..(9): Table A1; Target 648; HLA-B*46:01; S6A18; ENSG00000164363; Sodium-dependent neutral amino acid transporter B(0)AT3 (Sodium- and chloride-dependent transporter XTRP2) (Solute carrier family 6 member 18) (System B(0) neutral amino acid transporter AT3)
LAFGGHIAF

SEQ ID NO: 103491 - protein, 9 aa, Homo sapiens
  misc_feature (1)..(9): Table A1; Target 649; HLA-A*01:01; PERLENSG00000167419; Lactoperoxidase (LPO) (EC 1.11.1.7) (Salivary peroxidase) (SPO)
DTELGSSEY

SEQ ID NO: 103492 - protein, 11 aa, Homo sapiens
  misc_feature (1)..(11): Table A1; Target 650; HLA-A*02:07; GP139; ENSG00000180269; Probable G-protein coupled receptor 139 (G(q)-coupled orphan receptor GPRg1) (G-protein-coupled receptor PGR3)
GLPDIMKPIKL

SEQ ID NO: 103493 - protein, 9 aa, Homo sapiens
  misc_feature (1)..(9): Table A1; Target 651; HLA-B*51:01; GP139; ENSG00000180269; Probable G-protein coupled receptor 139 (G(q)-coupled orphan receptor GPRg1) (G-protein-coupled receptor PGR3)
LPANILTVI

SEQ ID NO: 103494 - protein, 9 aa, Homo sapiens
  misc_feature (1)..(9): Table A1; Target 652; HLA-A*02:01; GALPENSG00000197487; Galanin-like peptide
SLAETPASA

SEQ ID NO: 103495 - protein, 9 aa, Homo sapiens
  misc_feature (1)..(9): Table A1; Target 653; HLA-A*30:02; C144L; ENSG00000205212; Putative coiled-coil domain-containing protein 144 N-terminal-like
SIQQLVPEY

SEQ ID NO: 103496 - protein, 9 aa, Homo sapiens
  misc_feature (1)..(9): Table A1; Target 654; HLA-B*18:01; E9PBZ7; ENSG00000242715; Coiled-coil domain-containing protein 169
DELEKQIVY

SEQ ID NO: 103497 - protein, 9 aa, Homo sapiens
  misc_feature (1)..(9): Table A1; Target 655; HLA-B*51:01; PERLENSG00000167419; Lactoperoxidase (LPO) (EC 1.11.1.7) (Salivary peroxidase) (SPO)
FPLPLAREV

SEQ ID NO: 103498 - protein, 10 aa, Homo sapiens
  misc_feature (1)..(10): Table A1; Target 656; HLA-A*11:01; FOXR1; ENSG00000176302; Forkhead box protein R1 (Forkhead box protein N5)
SSMALPSPHK

SEQ ID NO: 103499 - protein, 9 aa, Homo sapiens
  misc_feature (1)..(9): Table A1; Target 657; HLA-A*26:01; A0A1B0GVH6; ENSG00000226792; Long intergenic non-protein coding RNA 371
DVAEAIAFF

SEQ ID NO: 103500 - protein, 9 aa, Homo sapiens
  misc_feature (1)..(9): Table A1; Target 658; HLA-A*26:01; ATS20; ENSG00000173157; A disintegrin and metalloproteinase with thrombospondin motifs 20 (ADAM-TS 20) (ADAM-TS20) (ADAMTS-20) (EC 3.4.24.-)
DTAVLITRY

SEQ ID NO: 103501 - protein, 8 aa, Homo sapiens
  misc_feature (1)..(8): Table A1; Target 659; HLA-C*04:01; ATS20; ENSG00000173157; A disintegrin and metalloproteinase with thrombospondin motifs 20 (ADAM-TS 20) (ADAM-TS20) (ADAMTS-20) (EC 3.4.24.-)
NFDGATTL

SEQ ID NO: 103502 - protein, 9 aa, Homo sapiens
  misc_feature (1)..(9): Table A1; Target 660; HLA-A*03:01; ATS20; ENSG00000173157; A disintegrin and metalloproteinase with thrombospondin motifs 20 (ADAM-TS 20) (ADAM-TS20) (ADAMTS-20) (EC 3.4.24.-)
STNLPLTQK

SEQ ID NO: 103503 - protein, 9 aa, Homo sapiens
  misc_feature (1)..(9): Table A1; Target 661; HLA-A*11:01; ATS20; ENSG00000173157; A disintegrin and metalloproteinase with thrombospondin motifs 20 (ADAM-TS 20) (ADAM-TS20) (ADAMTS-20) (EC 3.4.24.-)
STNLPLTQK

SEQ ID NO: 103504 - protein, 9 aa, Homo sapiens
  misc_feature (1)..(9): Table A1; Target 662; HLA-A*24:02; TRI48; ENSG00000150244; Tripartite motif-containing protein 48 (RING finger protein 101)
NYFIDPVTI

SEQ ID NO: 103505 - protein, 8 aa, Homo sapiens
  misc_feature (1)..(8): Table A1; Target 663; HLA-B*51:01; UROL1; ENSG00000177398; Uromodulin-like 1 (Olfactorin)
DPITFSFI

SEQ ID NO: 103506 - protein, 10 aa, Homo sapiens
  misc_feature (1)..(10): Table A1; Target 664; HLA-A*26:01; UROL1; ENSG00000177398; Uromodulin-like 1 (Olfactorin)
EVISVQVQDV

SEQ ID NO: 103507 - protein, 9 aa, Homo sapiens
  misc_feature (1)..(9): Table A1; Target 665; HLA-A*02:01; ZFP42; ENSG00000179059; Zinc finger protein 42 homolog (Zfp-42) (Reduced expression protein 1) (REX-1) (hREX-1) (Zinc finger protein 754)
SLFESLEYL

SEQ ID NO: 103508 - protein, 9 aa, Homo sapiens
  misc_feature (1)..(9): Table A1; Target 666; HLA-B*46:01; NBPF6; ENSG00000186086; Neuroblastoma breakpoint family member 6
FLITQATAY

SEQ ID NO: 103509 - protein, 10 aa, Homo sapiens
  misc_feature (1)..(10): Table A1; Target 667; HLA-A*03:01; DYTNENSG00000232125; Dystrotelin;
RTFPITGLRY

SEQ ID NO: 103510 - protein, 10 aa, Homo sapiens
  misc_feature (1)..(10): Table A1; Target 668; HLA-C*02:02; TDRD1; ENSG00000095627; Tudor domain-containing protein 1 (Cancer/testis antigen 41.1) (CT41.1)
AELQASLSKY

SEQ ID NO: 103511 - protein, 9 aa, Homo sapiens
  misc_feature (1)..(9): Table A1; Target 669; HLA-A*29:02; PRD14; ENSG00000147596; PR domain zinc finger protein 14 (EC 2.1.1.-) (PR domain-containing protein 14)
IFSDQETFY

SEQ ID NO: 103512 - protein, 10 aa, Homo sapiens
  misc_feature (1)..(10): Table A1; Target 670; HLA-A*03:01; FBX39; ENSG00000177294; F-box only protein 39
AVYNSPQFKK

SEQ ID NO: 103513 - protein, 10 aa, Homo sapiens
  misc_feature (1)..(10): Table A1; Target 671; HLA-A*11:01; FBX39; ENSG00000177294; F-box only protein 39
AVYNSPQFKK

SEQ ID NO: 103514 - protein, 9 aa, Homo sapiens
  misc_feature (1)..(9): Table A1; Target 672; HLA-A*11:01; FBX39; ENSG00000177294; F-box only protein 39
AVYNSPQFK

SEQ ID NO: 103515 - protein, 9 aa, Homo sapiens
  misc_feature (1)..(9): Table A1; Target 673; HLA-B*51:01; ZPLD1; ENSG00000170044; Zona pellucida-like domain-containing protein 1 (ZP domain-containing protein 1)
SAYGNATSV

SEQ ID NO: 103516 - protein, 10 aa, Homo sapiens
  misc_feature (1)..(10): Table A1; Target 674; HLA-A*26:01; SYCY2; ENSG00000244476; Syncytin-2 (Endogenous retrovirus group FRD member 1) (Envelope polyprotein) (HERV-FRD)
  misc_feature (1)..(10): (HERV-FRD; 6p24.1 provirus ancestral Env polyprotein) [Cleaved into: Surface protein (SU); Transmembrane protein (TM)]
FTVDSNQQTY

SEQ ID NO: 103517 - protein, 10 aa, Homo sapiens
  misc_feature (1)..(10): Table A1; Target 675; HLA-A*30:02; NDST4; ENSG00000138653; Bifunctional heparan sulfate N-deacetylase/N-sulfotransferase 4 (EC 2.8.2.8)
  misc_feature (1)..(10): (Glucosaminyl N-deacetylase/N-sulfotransferase 4) (NDST-4) (N-heparan sulfate sulfotransferase 4) (N-HSST 4) [Includes: Heparan sulfate N-deacetylase 4 (EC 3.-.-.-); Heparan sulfate N-sulfotransferase 4 (EC 2.8.2.-)]
AVAPHHSGVY

SEQ ID NO: 103518 - protein, 9 aa, Homo sapiens
  misc_feature (1)..(9): Table A1; Target 676; HLA-A*11:01; NDST4; ENSG00000138653; Bifunctional heparan sulfate N-deacetylase/N-sulfotransferase 4 (EC 2.8.2.8) (Glucosaminyl N-deacetylase/N-sulfotransferase 4)
  misc_feature (1)..(9): (NDST-4) (N-heparan sulfate sulfotransferase 4) (N-HSST 4) [Includes: Heparan sulfate N-deacetylase 4 (EC 3.-.-.-); Heparan sulfate N-sulfotransferase 4 (EC 2.8.2.-)]
SVSIIGFHK

SEQ ID NO: 103519 - protein, 9 aa, Homo sapiens
  misc_feature (1)..(9): Table A1; Target 677; HLA-A*31:01; NALP9; ENSG00000185792; NACHT, LRR and PYD domains-containing protein 9 (Nucleotide-binding oligomerization domain protein 6) (PYRIN and NACHT-containing protein 12)
QSFPPKVNR

SEQ ID NO: 103520 - protein, 9 aa, Homo sapiens
  misc_feature (1)..(9): Table A1; Target 678; HLA-A*02:01; RNS10; ENSG00000182545; Inactive ribonuclease-like protein 10
FIHEDLNTV

SEQ ID NO: 103521 - protein, 9 aa, Homo sapiens
  misc_feature (1)..(9): Table A1; Target 679; HLA-A*29:02; NALP9; ENSG00000185792; NACHT, LRR and PYD domains-containing protein 9 (Nucleotide-binding oligomerization domain protein 6) (PYRIN and NACHT-containing protein 12)
NFFEEVFIY

SEQ ID NO: 103522 - protein, 10 aa, Homo sapiens
  misc_feature (1)..(10): Table A1; Target 680; HLA-B*44:02; NTM2G; ENSG00000188152; NUT family member 2G
EEMQIQKSQW

SEQ ID NO: 103523 - protein, 10 aa, Homo sapiens
  misc_feature (1)..(10): Table A1; Target 681; HLA-B*44:03; NTM2G; ENSG00000188152; NUT family member 2G
EEMQIQKSQW

SEQ ID NO: 103524 - protein, 9 aa, Homo sapiens
  misc_feature (1)..(9): Table A1; Target 682; HLA-A*01:01; NTM2G; ENSG00000188152; NUT family member 2G
TSDPGLLSY

SEQ ID NO: 103525 - protein, 8 aa, Homo sapiens
  misc_feature (1)..(8): Table A1; Target 683; HLA-B*18:01; TDRD1; ENSG00000095627; Tudor domain-containing protein 1 (Cancer/testis antigen 41.1) (CT41.1)
EESVLVGY

SEQ ID NO: 103526 - protein, 9 aa, Homo sapiens
  misc_feature (1)..(9): Table A1; Target 684; HLA-B*51:01; WNT9B; ENSG00000158955; Protein Wnt-9b (Protein Wnt-14b) (Protein Wnt-15)
DAHNTHVGI

SEQ ID NO: 103527 - protein, 9 aa, Homo sapiens
  misc_feature (1)..(9): Table A1; Target 685; HLA-A*29:02; WNT9B; ENSG00000158955; Protein Wnt-9b (Protein Wnt-14b) (Protein Wnt-15)
GFKETAFLY

SEQ ID NO: 103528 - protein, 9 aa, Homo sapiens
  misc_feature (1)..(9): Table A1; Target 686; HLA-A*24:02; WNT9B; ENSG00000158955; Protein Wnt-9b (Protein Wnt-14b) (Protein Wnt-15)
VYMEDSPSF

SEQ ID NO: 103529 - protein, 9 aa, Homo sapiens
  misc_feature (1)..(9): Table A1; Target 687; HLA-A*11:01; SG1D1; ENSG00000168515; Secretoglobin family 1D member 1 (Lipophilin-A)
AVAAKMEVK

SEQ ID NO: 103530 - protein, 9 aa, Homo sapiens
  misc_feature (1)..(9): Table A1; Target 688; HLA-A*29:02; GPC6A; ENSG00000173612; G-protein coupled receptor family C group 6 member A (hGPRC6A) (G-protein coupled receptor GPCR33) (hGPCR33)
AFLKMIYSY

SEQ ID NO: 103531 - protein, 8 aa, Homo sapiens
  misc_feature (1)..(8): Table A1; Target 689; HLA-B*18:01; GPC6A; ENSG00000173612; G-protein coupled receptor family C group 6 member A (hGPRC6A) (G-protein coupled receptor GPCR33) (hGPCR33)
NEAKFITF

SEQ ID NO: 103532 - protein, 9 aa, Homo sapiens
  misc_feature (1)..(9): Table A1; Target 690; HLA-B*51:01; PSG1ENSG00000231924; Pregnancy-specific beta-1-glycoprotein 1 (PS-beta-G-1) (PSBG-1) (Pregnancy-specific glycoprotein 1) (CD66 antigen-like family member F)
  misc_feature (1)..(9): (Fetal liver non-specific cross-reactive antigen 1/2) (FL-NCA-1/2) (PSG95) (Pregnancy-specific beta-1 glycoprotein C/D) (PS-beta-C/D) (CD antigen CD66f)
LPKLPKPYI

SEQ ID NO: 103533 - protein, 9 aa, Homo sapiens
  misc_feature (1)..(9): Table A1; Target 691; HLA-B*51:01; PSG1ENSG00000231924; Pregnancy-specific beta-1-glycoprotein 1 (PS-beta-G-1) (PSBG-1) (Pregnancy-specific glycoprotein 1) (CD66 antigen-like family member F)
  misc_feature (1)..(9): (Fetal liver non-specific cross-reactive antigen 1/2) (FL-NCA-1/2) (PSG95) (Pregnancy-specific beta-1 glycoprotein C/D) (PS-beta-C/D) (CD antigen CD66f)
LPTTAQVTI

SEQ ID NO: 103534 - protein, 9 aa, Homo sapiens
  misc_feature (1)..(9): Table A1; Target 692; HLA-B*51:01; ADAM7; ENSG00000069206; Disintegrin and metalloproteinase domain-containing protein 7 (ADAM 7) (Sperm maturation-related glycoprotein GP-83)
LPYYSTSII

SEQ ID NO: 103535 - protein, 8 aa, Homo sapiens
  misc_feature (1)..(8): Table A1; Target 693; HLA-B*51:01; ADAM7; ENSG00000069206; Disintegrin and metalloproteinase domain-containing protein 7 (ADAM 7) (Sperm maturation-related glycoprotein GP-83)
LPYYSTSI

SEQ ID NO: 103536 - protein, 9 aa, Homo sapiens
  misc_feature (1)..(9): Table A1; Target 694; HLA-A*11:01; RBM46; ENSG00000151962; Probable RNA-binding protein 46 (Cancer/testis antigen 68) (CT68) (RNA-binding motif protein 46)
VTLAKPVNK

SEQ ID NO: 103537 - protein, 10 aa, Homo sapiens
  misc_feature (1)..(10): Table A1; Target 695; HLA-A*11:01; CT55ENSG00000169551; Cancer/testis antigen 55 (Tumor antigen BJ-HCC-20)
STEPGISNIK

SEQ ID NO: 103538 - protein, 9 aa, Homo sapiens
  misc_feature (1)..(9): Table A1; Target 696; HLA-A*03:01; CT55ENSG00000169551; Cancer/testis antigen 55 (Tumor antigen BJ-HCC-20)
VVTGNVPLK

SEQ ID NO: 103539 - protein, 9 aa, Homo sapiens
  misc_feature (1)..(9): Table A1; Target 697; HLA-A*30:02; DDX53; ENSG00000184735; Probable ATP-dependent RNA helicase DDX53 (EC 3.6.4.13) (Cancer-associated gene protein) (Cancer/testis antigen 26) (CT26) (DEAD box protein 53) (DEAD box protein CAGE)
DLNDVTHVY

SEQ ID NO: 103540 - protein, 9 aa, Homo sapiens
  misc_feature (1)..(9): Table A1; Target 698; HLA-A*31:01; ESX1ENSG00000123576; Homeobox protein ESX1 (Extraembryonic, spermatogenesis, homeobox 1) [Cleaved into: Homeobox protein ESX1-N; Homeobox protein ESX1-C]
RVQVWFQNR

SEQ ID NO: 103541 - protein, 10 aa, Homo sapiens
  misc_feature (1)..(10): Table A1; Target 699; HLA-A*03:01; PSG8ENSG00000124467; Pregnancy-specific beta-1-glycoprotein 8 (PS-beta-G-8) (PSBG-8) (Pregnancy-specific glycoprotein 8)
KLFIPQITTK

SEQ ID NO: 103542 - protein, 9 aa, Homo sapiens
  misc_feature (1)..(9): Table A1; Target 700; HLA-B*51:01; PSG8ENSG00000124467; Pregnancy-specific beta-1-glycoprotein 8 (PS-beta-G-8) (PSBG-8) (Pregnancy-specific glycoprotein 8)
LPKLPKPYI

SEQ ID NO: 103543 - protein, 9 aa, Homo sapiens
  misc_feature (1)..(9): Table A1; Target 701; HLA-B*51:01; PSG8ENSG00000124467; Pregnancy-specific beta-1-glycoprotein 8 (PS-beta-G-8) (PSBG-8) (Pregnancy-specific glycoprotein 8)
YPKLPKPYI

SEQ ID NO: 103544 - protein, 8 aa, Homo sapiens
  misc_feature (1)..(8): Table A1; Target 702; HLA-B*35:01; S7A13; ENSG00000164893; Solute carrier family 7 member 13 (Sodium-independent aspartate/glutamate transporter 1) (X-amino acid transporter 2)
LPLVTVVY

SEQ ID NO: 103545 - protein, 9 aa, Homo sapiens
  misc_feature (1)..(9): Table A1; Target 703; HLA-A*24:02; NAL11; ENSG00000179873; NACHT, LRR and PYD domains-containing protein 11 (Nucleotide-binding oligomerization domain protein 17) (PAAD-and NACHT domain-containing protein 10) (PYRIN-containing APAF1-like
NYGVLHVTF

SEQ ID NO: 103546 - protein, 9 aa, Homo sapiens
  misc_feature (1)..(9): Table A1; Target 704; HLA-B*18:01; DAZLENSG00000092345; Deleted in azoospermia-like (DAZ homolog) (DAZ-like autosomal) (Deleted in azoospermia-like 1) (SPGY-like-autosomal)
DETEIRSFF

SEQ ID NO: 103547 - protein, 8 aa, Homo sapiens
  misc_feature (1)..(8): Table A1; Target 705; HLA-B*18:01; DAZLENSG00000092345; Deleted in azoospermia-like (DAZ homolog) (DAZ-like autosomal) (Deleted in azoospermia-like 1) (SPGY-like-autosomal)
DETEIRSF

SEQ ID NO: 103548 - protein, 9 aa, Homo sapiens
  misc_feature (1)..(9): Table A1; Target 706; HLA-B*35:01; DAZLENSG00000092345; Deleted in azoospermia-like (DAZ homolog) (DAZ-like autosomal) (Deleted in azoospermia-like 1) (SPGY-like-autosomal)
SPVQVITGY

SEQ ID NO: 103549 - protein, 11 aa, Homo sapiens
  misc_feature (1)..(11): Table A1; Target 707; HLA-B*51:01; OVOL3; ENSG00000105261; Putative transcription factor ovo-like protein 3
DAYIPGGPLTV

SEQ ID NO: 103550 - protein, 11 aa, Homo sapiens
  misc_feature (1)..(11): Table A1; Target 708; HLA-A*30:02; OVOL3; ENSG00000105261; Putative transcription factor ovo-like protein 3
KVHGQPASYAY

SEQ ID NO: 103551 - protein, 9 aa, Homo sapiens
  misc_feature (1)..(9): Table A1; Target 709; HLA-A*30:02; OVOL3; ENSG00000105261; Putative transcription factor ovo-like protein 3
KVHGQPASY

SEQ ID NO: 103552 - protein, 9 aa, Homo sapiens
  misc_feature (1)..(9): Table A1; Target 710; HLA-B*35:01; MSGN1; ENSG00000151379; Mesogenin-1 (Paraxial mesoderm-specific mesogenin1) (pMesogenin1) (pMsgn1)
SPAPSLESY

SEQ ID NO: 103553 - protein, 9 aa, Homo sapiens
  misc_feature (1)..(9): Table A1; Target 711; HLA-A*02:01; MSGN1; ENSG00000151379; Mesogenin-1 (Paraxial mesoderm-specific mesogenin1) (pMesogenin1) (pMsgn1)
TLADALHTL

SEQ ID NO: 103554 - protein, 9 aa, Homo sapiens
  misc_feature (1)..(9): Table A1; Target 712; HLA-B*51:01; TEKT5; ENSG00000153060; Tektin-5;
LPAVQAPVI

SEQ ID NO: 103555 - protein, 9 aa, Homo sapiens
  misc_feature (1)..(9): Table A1; Target 713; HLA-B*08:01; NPBW1; ENSG00000183729; Neuropeptides B/W receptor type 1 (G-protein coupled receptor 7)
YSAARAVSL

SEQ ID NO: 103556 - protein, 10 aa, Homo sapiens
  misc_feature (1)..(10): Table A1; Target 714; HLA-A*24:02; NALP9; ENSG00000185792; NACHT, LRR and PYD domains-containing protein 9 (Nucleotide-binding oligomerization domain protein 6) (PYRIN and NACHT-containing protein 12)
VYFGHDSELF

SEQ ID NO: 103557 - protein, 8 aa, Homo sapiens
  misc_feature (1)..(8): Table A1; Target 715; HLA-B*51:01; SYCY2; ENSG00000244476; Syncytin-2 (Endogenous retrovirus group FRD member 1) (Envelope polyprotein) (HERV-FRD)
  misc_feature (1)..(9): (HERV-FRD; 6p24.1 provirus ancestral Env polyprotein) [Cleaved into: Surface protein (SU); Transmembrane protein (TM)]
IGYVTPDI

SEQ ID NO: 103558 - protein, 8 aa, Homo sapiens
  misc_feature (1)..(8): Table A1; Target 716; HLA-B*51:01; WFD13; ENSG00000168634; WAP four-disulfide core domain protein 13
LPLQFLVV

SEQ ID NO: 103559 - protein, 9 aa, Homo sapiens
  misc_feature (1)..(9): Table A1; Target 717; HLA-B*51:01; AR13A; ENSG00000174225; ADP-ribosylation factor-like protein 13A
LPPTSSISI

SEQ ID NO: 103560 - protein, 9 aa, Homo sapiens
  misc_feature (1)..(9): Table A1; Target 718; HLA-A*24:02; ACHA9; ENSG00000174343; Neuronal acetylcholine receptor subunit alpha-9 (Nicotinic acetylcholine receptor subunit alpha-9) (NACHR alpha-9)
PYPDVTFTL

SEQ ID NO: 103561 - protein, 9 aa, Homo sapiens
  misc_feature (1)..(9): Table A1; Target 719; HLA-B*44:03; CRGBENSG00000182187; Gamma-crystallin B (Gamma-B-crystallin) (Gamma-crystallin 1-2)
GEYPDYQQW

SEQ ID NO: 103562 - protein, 9 aa, Homo sapiens
  misc_feature (1)..(9): Table A1; Target 720; HLA-C*02:02; CRGBENSG00000182187; Gamma-crystallin B (Gamma-B-crystallin) (Gamma-crystallin 1-2)
GEYPDYQQW

SEQ ID NO: 103563 - protein, 9 aa, Homo sapiens
  misc_feature (1)..(9): Table A1; Target 721; HLA-B*35:01; AMELX; ENSG00000125363; Amelogenin, X isoform
MPVPGQHSM

SEQ ID NO: 103564 - protein, 9 aa, Homo sapiens
  misc_feature (1)..(9): Table A1; Target 722; HLA-C*16:01; TF2LX; ENSG00000153779; Homeobox protein TGIF2LX (TGF-beta-induced transcription factor 2-like protein) (TGFB-induced factor 2-like protein, X-linked) (TGIF-like on the X)
AAVQRAAEL

SEQ ID NO: 103565 - protein, 9 aa, Homo sapiens
  misc_feature (1)..(9): Table A1; Target 723; HLA-A*29:02; S7A13; ENSG00000164893; Solute carrier family 7 member 13 (Sodium-independent aspartate/glutamate transporter 1) (X-amino acid transporter 2)
AIFQGYFAY

SEQ ID NO: 103566 - protein, 10 aa, Homo sapiens
  misc_feature (1)..(10): Table A1; Target 724; HLA-A*11:01; SOX14; ENSG00000168875; Transcription factor SOX-14 (Protein SOX-28)
AQFSSSAIQK

SEQ ID NO: 103567 - protein, 9 aa, Homo sapiens
  misc_feature (1)..(9): Table A1; Target 725; HLA-A*29:02; S22AO; ENSG00000197658; Solute carrier family 22 member 24
AFAPTFLVY

SEQ ID NO: 103568 - protein, 9 aa, Homo sapiens
  misc_feature (1)..(9): Table A1; Target 726; HLA-B*51:01; S22AO; ENSG00000197658; Solute carrier family 22 member 24
DAVRIKTSI

SEQ ID NO: 103569 - protein, 9 aa, Homo sapiens
  misc_feature (1)..(9): Table A1; Target 727; HLA-B*51:01; S22AO; ENSG00000197658; Solute carrier family 22 member 24
FPILAVPVI

SEQ ID NO: 103570 - protein, 9 aa, Homo sapiens
  misc_feature (1)..(9): Table A1; Target 728; HLA-C*16:01; S22AO; ENSG00000197658; Solute carrier family 22 member 24
SASVHHNEL

SEQ ID NO: 103571 - protein, 9 aa, Homo sapiens
  misc_feature (1)..(9): Table A1; Target 729; HLA-A*11:01; S22AO; ENSG00000197658; Solute carrier family 22 member 24
SVSGLVLSH

SEQ ID NO: 103572 - protein, 9 aa, Homo sapiens
  misc_feature (1)..(9): Table A1; Target 730; HLA-B*35:01; AP2DENSG00000008197; Transcription factor AP-2-delta (AP2-delta) (Activating enhancer-binding protein 2-delta) (Transcription factor AP-2-beta-like 1)
HPAVTPDAY

SEQ ID NO: 103573 - protein, 9 aa, Homo sapiens
  misc_feature (1)..(9): Table A1; Target 731; HLA-B*35:01; AP2DENSG00000008197; Transcription factor AP-2-delta (AP2-delta) (Activating enhancer-binding protein 2-delta) (Transcription factor AP-2-beta-like 1)
SVANSTVAY

SEQ ID NO: 103574 - protein, 9 aa, Homo sapiens
  misc_feature (1)..(9): Table A1; Target 732; HLA-A*01:01; AP2DENSG00000008197; Transcription factor AP-2-delta (AP2-delta) (Activating enhancer-binding protein 2-delta) (Transcription factor AP-2-beta-like 1)
YSSSSPLTY

SEQ ID NO: 103575 - protein, 9 aa, Homo sapiens
  misc_feature (1)..(9): Table A1; Target 733; HLA-B*51:01; DDX4ENSG00000152670; Probable ATP-dependent RNA helicase DDX4 (EC 3.6.4.13) (DEAD box protein 4) (Vasa homolog)
DAPPAILTF

SEQ ID NO: 103576 - protein, 8 aa, Homo sapiens
  misc_feature (1)..(8): Table A1; Target 734; HLA-B*18:01; DDX4ENSG00000152670; Probable ATP-dependent RNA helicase DDX4 (EC 3.6.4.13) (DEAD box protein 4) (Vasa homolog)
EEIAFSTY

SEQ ID NO: 103577 - protein, 9 aa, Homo sapiens
  misc_feature (1)..(9): Table A1; Target 735; HLA-A*26:01; DDX4ENSG00000152670; Probable ATP-dependent RNA helicase DDX4 (EC 3.6.4.13) (DEAD box protein 4) (Vasa homolog)
EINPHMSSY

SEQ ID NO: 103578 - protein, 9 aa, Homo sapiens
  misc_feature (1)..(9): Table A1; Target 736; HLA-A*11:01; DDX4ENSG00000152670; Probable ATP-dependent RNA helicase DDX4 (EC 3.6.4.13) (DEAD box protein 4) (Vasa homolog)
SSYVPIFEK

SEQ ID NO: 103579 - protein, 9 aa, Homo sapiens
  misc_feature (1)..(9): Table A1; Target 737; HLA-A*11:01; DDX4ENSG00000152670; Probable ATP-dependent RNA helicase DDX4 (EC 3.6.4.13) (DEAD box protein 4) (Vasa homolog)
STIDEYVHR

SEQ ID NO: 103580 - protein, 10 aa, Homo sapiens
  misc_feature (1)..(10): Table A1; Target 738; HLA-A*11:01; DDX4ENSG00000152670; Probable ATP-dependent RNA helicase DDX4 (EC 3.6.4.13) (DEAD box protein 4) (Vasa homolog)
STMGGFGVGK

SEQ ID NO: 103581 - protein, 9 aa, Homo sapiens
  misc_feature (1)..(9): Table A1; Target 739; HLA-A*02:07; DDX4ENSG00000152670; Probable ATP-dependent RNA helicase DDX4 (EC 3.6.4.13) (DEAD box protein 4) (Vasa homolog)
TIDEYVHRI

SEQ ID NO: 103582 - protein, 11 aa, Homo sapiens
  misc_feature (1)..(11): Table A1; Target 740; HLA-A*30:02; DDX4ENSG00000152670; Probable ATP-dependent RNA helicase DDX4 (EC 3.6.4.13) (DEAD box protein 4) (Vasa homolog)
TLNNNIAKAGY

SEQ ID NO: 103583 - protein, 9 aa, Homo sapiens
  misc_feature (1)..(9): Table A1; Target 741; HLA-A*11:01; CT55ENSG00000169551; Cancer/testis antigen 55 (Tumor antigen BJ-HCC-20)
AISITPVHK

SEQ ID NO: 103584 - protein, 11 aa, Homo sapiens
  misc_feature (1)..(11): Table A1; Target 742; HLA-B*44:03; MAGBG; ENSG00000189023; Melanoma-associated antigen B16 (MAGE-B16 antigen)
AESPLEVPQSF

SEQ ID NO: 103585 - protein, 9 aa, Homo sapiens
  misc_feature (1)..(9): Table A1; Target 743; HLA-A*02:07; MAGBG; ENSG00000189023; Melanoma-associated antigen B16 (MAGE-B16 antigen)
ALDQKVAFL

SEQ ID NO: 103586 - protein, 9 aa, Homo sapiens
  misc_feature (1)..(9): Table A1; Target 744; HLA-A*26:01; MAGBG; ENSG00000189023; Melanoma-associated antigen B16 (MAGE-B16 antigen)
EVLNLTGVY

SEQ ID NO: 103587 - protein, 9 aa, Homo sapiens
  misc_feature (1)..(9): Table A1; Target 745; HLA-A*29:02; MAGBG; ENSG00000189023; Melanoma-associated antigen B16 (MAGE-B16 antigen)
LFIKLGLTY

SEQ ID NO: 103588 - protein, 10 aa, Homo sapiens
  misc_feature (1)..(10): Table A1; Target 746; HLA-A*29:02; FOXR2; ENSG00000189299; Forkhead box protein R2 (Forkhead box protein N6)
SLAEQILAKY

SEQ ID NO: 103589 - protein, 11 aa, Homo sapiens
  misc_feature (1)..(11): Table A1; Target 747; HLA-A*11:01; FOXR2; ENSG00000189299; Forkhead box protein R2 (Forkhead box protein N6)
SSSSEQSPLQK

SEQ ID NO: 103590 - protein, 9 aa, Homo sapiens
  misc_feature (1)..(9): Table A1; Target 748; HLA-B*51:01; NMUR2; ENSG00000132911; Neuromedin-U receptor 2 (NMU-R2) (G-protein coupled receptor FM-4) (G-protein coupled receptor TGR-1)
LPNTSIHGI

SEQ ID NO: 103591 - protein, 9 aa, Homo sapiens
  misc_feature (1)..(9): Table A1; Target 749; HLA-B*51:01; DAZLENSG00000092345; Deleted in azoospermia-like (DAZ homolog) (DAZ-like autosomal) (Deleted in azoospermia-like 1) (SPGY-like-autosomal)
YPNSPVQVI

SEQ ID NO: 103592 - protein, 9 aa, Homo sapiens
  misc_feature (1)..(9): Table A1; Target 750; HLA-B*35:01; MBOA4; ENSG00000177669; Ghrelin O-acyltransferase (EC 2.3.1.-) (Membrane-bound O-acyltransferase domain-containing protein 4) (O-acyltransferase domain-containing protein 4)
HAAGFGPEL

SEQ ID NO: 103593 - protein, 9 aa, Homo sapiens
  misc_feature (1)..(9): Table A1; Target 751; HLA-A*29:02; ADAM7; ENSG00000069206; Disintegrin and metalloproteinase domain-containing protein 7 (ADAM 7) (Sperm maturation-related glycoprotein GP-83)
GVLILLVRY

SEQ ID NO: 103594 - protein, 11 aa, Homo sapiens
  misc_feature (1)..(11): Table A1; Target 752; HLA-A*02:01; LDH6A; ENSG00000166800; L-lactate dehydrogenase A-like 6A (EC 1.1.1.27)
GLYGINEDIFL

SEQ ID NO: 103595 - protein, 9 aa, Homo sapiens
  misc_feature (1)..(9): Table A1; Target 753; HLA-B*46:01; LDH6A; ENSG00000166800; L-lactate dehydrogenase A-like 6A (EC 1.1.1.27)
LMIPNITQY

SEQ ID NO: 103596 - protein, 11 aa, Homo sapiens
  misc_feature (1)..(11): Table A1; Target 754; HLA-A*11:01; LDH6A; ENSG00000166800; L-lactate dehydrogenase A-like 6A (EC 1.1.1.27)
SVADLTESILK

SEQ ID NO: 103597 - protein, 11 aa, Homo sapiens
  misc_feature (1)..(11): Table A1; Target 755; HLA-A*02:01; LDH6A; ENSG00000166800; L-lactate dehydrogenase A-like 6A (EC 1.1.1.27)
TLWEIQKELKL

SEQ ID NO: 103598 - protein, 9 aa, Homo sapiens
  misc_feature (1)..(9): Table A1; Target 756; HLA-B*35:01; V9GZ31; ENSG00000177414; Ubiquitin-conjugating enzyme E2 U (Fragment)
MPHEVTHSM

SEQ ID NO: 103599 - protein, 11 aa, Homo sapiens
  misc_feature (1)..(11): Table A1; Target 757; HLA-A*03:01; GDPD4; ENSG00000178795; Glycerophosphodiester phosphodiesterase domain-containing protein 4 (EC 3.1.-.-) (Glycerophosphodiester phosphodiesterase 6) (UgpQ)
ATFQTTLPTLK

SEQ ID NO: 103600 - protein, 11 aa, Homo sapiens
  misc_feature (1)..(11): Table A1; Target 758; HLA-A*11:01; GDPD4; ENSG00000178795; Glycerophosphodiester phosphodiesterase domain-containing protein 4 (EC 3.1.-.-) (Glycerophosphodiester phosphodiesterase 6) (UgpQ)
ATFQTTLPTLK

SEQ ID NO: 103601 - protein, 9 aa, Homo sapiens
  misc_feature (1)..(9): Table A1; Target 759; HLA-B*18:01; GDPD4; ENSG00000178795; Glycerophosphodiester phosphodiesterase domain-containing protein 4 (EC 3.1.-.-) (Glycerophosphodiester phosphodiesterase 6) (UgpQ)
LETDIHLSY

SEQ ID NO: 103602 - protein, 9 aa, Homo sapiens
  misc_feature (1)..(9): Table A1; Target 760; HLA-A*02:07; PERLENSG00000167419; Lactoperoxidase (LPO) (EC 1.11.1.7) (Salivary peroxidase) (SPO)
VLDQNRSTL

SEQ ID NO: 103603 - protein, 11 aa, Homo sapiens
  misc_feature (1)..(11): Table A1; Target 761; HLA-B*44:03; TEX19; ENSG00000182459; Testis-expressed protein 19
QEGSSGMELSW

SEQ ID NO: 103604 - protein, 9 aa, Homo sapiens
  misc_feature (1)..(9): Table A1; Target 762; HLA-C*16:01; SYCY2; ENSG00000244476; Syncytin-2 (Endogenous retrovirus group FRD member 1) (Envelope polyprotein)
  misc_feature (1)..(9): (HERV-FRD) (HERV-FRD; 6p24.1 provirus ancestral Env polyprotein) [Cleaved into: Surface protein (SU); Transmembrane protein (TM)]
IEAELHISY

SEQ ID NO: 103605 - protein, 9 aa, Homo sapiens
  misc_feature (1)..(9): Table A1; Target 763; HLA-B*51:01; TIFAB; ENSG00000255833; TRAF-interacting protein with FHA domain-containing protein B (TIFA-like protein)
VPLSTVNRV

SEQ ID NO: 103606 - protein, 9 aa, Homo sapiens
  misc_feature (1)..(9): Table A1; Target 764; HLA-B*35:01; BHE23; ENSG00000125533; Class E basic helix-loop-helix protein 23 (bHLHe23) (Class B basic helix-loop-helix protein 4) (bHLHb4)
AAAAAGLAY

SEQ ID NO: 103607 - protein, 9 aa, Homo sapiens
  misc_feature (1)..(9): Table A1; Target 765; HLA-B*51:01; BHE23; ENSG00000125533; Class E basic helix-loop-helix protein 23 (bHLHe23) (Class B basic helix-loop-helix protein 4) (bHLHb4)
IPYAHSPSV

SEQ ID NO: 103608 - protein, 8 aa, Homo sapiens
  misc_feature (1)..(8): Table A1; Target 766; HLA-B*18:01; FATE1; ENSG00000147378; Fetal and adult testis-expressed transcript protein (Cancer/testis antigen 43) (CT43) (Tumor antigen BJ-HCC-2)
EEFNVLEM

SEQ ID NO: 103609 - protein, 9 aa, Homo sapiens
  misc_feature (1)..(9): Table A1; Target 767; HLA-B*51:01; ZFP42; ENSG00000179059; Zinc finger protein 42 homolog (Zfp-42) (Reduced expression protein 1) (REX-1) (hREX-1) (Zinc finger protein 754)
LPPGGIPGI

SEQ ID NO: 103610 - protein, 10 aa, Homo sapiens
  misc_feature (1)..(10): Table A1; Target 768; HLA-C*02:02; MAGA1; ENSG00000198681; Melanoma-associated antigen 1 (Antigen MZ2-E) (Cancer/testis antigen 1.1) (CT1.1) (MAGE-1 antigen)
KEADPTGHSY

SEQ ID NO: 103611 - protein, 9 aa, Homo sapiens
  misc_feature (1)..(9): Table A1; Target 769; HLA-A*01:01; ZNF99; ENSG00000213973; Zinc finger protein 99
HTEDKPYKY

SEQ ID NO: 103612 - protein, 9 aa, Homo sapiens
  misc_feature (1)..(9): Table A1; Target 770; HLA-A*02:01; ZNF99; ENSG00000213973; Zinc finger protein 99
ILYDLKIAL

SEQ ID NO: 103613 - protein, 11 aa, Homo sapiens
  misc_feature (1)..(11): Table A1; Target 771; HLA-A*03:01; ZNF99; ENSG00000213973; Zinc finger protein 99
KVFNNSSTLMK

SEQ ID NO: 103614 - protein, 9 aa, Homo sapiens
  misc_feature (1)..(9): Table A1; Target 772; HLA-C*02:02; MORC1; ENSG00000114487; MORC family CW-type zinc finger protein 1 (Cancer/testis antigen 33) (CT33)
AEQQPQPQF

SEQ ID NO: 103615 - protein, 9 aa, Homo sapiens
  misc_feature (1)..(9): Table A1; Target 773; HLA-B*51:01; MORC1; ENSG00000114487; MORC family CW-type zinc finger protein 1 (Cancer/testis antigen 33) (CT33)
IPLGTMSTI

SEQ ID NO: 103616 - protein, 9 aa, Homo sapiens
  misc_feature (1)..(9): Table A1; Target 774; HLA-B*18:01; MORC1; ENSG00000114487; MORC family CW-type zinc finger protein 1 (Cancer/testis antigen 33) (CT33)
QEFLNVQEY

SEQ ID NO: 103617 - protein, 9 aa, Homo sapiens
  misc_feature (1)..(9): Table A1; Target 775; HLA-B*44:03; MORC1; ENSG00000114487; MORC family CW-type zinc finger protein 1 (Cancer/testis antigen 33) (CT33)
QEFLNVQEY

SEQ ID NO: 103618 - protein, 9 aa, Homo sapiens
  misc_feature (1)..(9): Table A1; Target 776; HLA-B*18:01; MORC1; ENSG00000114487; MORC family CW-type zinc finger protein 1 (Cancer/testis antigen 33) (CT33)
TEAELMQQF

SEQ ID NO: 103619 - protein, 9 aa, Homo sapiens
  misc_feature (1)..(9): Table A1; Target 777; HLA-B*44:03; MORC1; ENSG00000114487; MORC family CW-type zinc finger protein 1 (Cancer/testis antigen 33) (CT33)
TEAELMQQF

SEQ ID NO: 103620 - protein, 8 aa, Homo sapiens
  misc_feature (1)..(8): Table A1; Target 778; HLA-C*05:01; MORC1; ENSG00000114487; MORC family CW-type zinc finger protein 1 (Cancer/testis antigen 33) (CT33)
VTDDPQKF

SEQ ID NO: 103621 - protein, 10 aa, Homo sapiens
  misc_feature (1)..(10): Table A1; Target 779; HLA-A*29:02; RXFP2; ENSG00000133105; Relaxin receptor 2 (G-protein coupled receptor 106) (G-protein coupled receptor affecting testicular descent)
  misc_feature (1)..(10): (Leucine-rich repeat-containing G-protein coupled receptor 8) (Relaxin family peptide receptor 2)
SLPDKVFIKY

SEQ ID NO: 103622 - protein, 9 aa, Homo sapiens
  misc_feature (1)..(9): Table A1; Target 780; HLA-A*26:01; MMP20; ENSG00000137674; Matrix metalloproteinase-20 (MMP-20) (EC 3.4.24.-) (Enamel metalloproteinase) (Enamelysin)
EVAERGTAY

SEQ ID NO: 103623 - protein, 10 aa, Homo sapiens
  misc_feature (1)..(10): Table A1; Target 781; HLA-A*29:02; MMP20; ENSG00000137674; Matrix metalloproteinase-20 (MMP-20) (EC 3.4.24.-) (Enamel metalloproteinase) (Enamelysin)
FFSGPKTYKY

SEQ ID NO: 103624 - protein, 9 aa, Homo sapiens
  misc_feature (1)..(9): Table A1; Target 782; HLA-B*44:03; MMP20; ENSG00000137674; Matrix metalloproteinase-20 (MMP-20) (EC 3.4.24.-) (Enamel metalloproteinase) (Enamelysin)
GEADIMISF

SEQ ID NO: 103625 - protein, 9 aa, Homo sapiens
  misc_feature (1)..(9): Table A1; Target 783; HLA-C*02:02; MMP20; ENSG00000137674; Matrix metalloproteinase-20 (MMP-20) (EC 3.4.24.-) (Enamel metalloproteinase) (Enamelysin)
GEADIMISF

SEQ ID NO: 103626 - protein, 9 aa, Homo sapiens
  misc_feature (1)..(9): Table A1; Target 784; HLA-B*35:01; MMP20; ENSG00000137674; Matrix metalloproteinase-20 (MMP-20) (EC 3.4.24.-) (Enamel metalloproteinase) (Enamelysin)
LPASGLAVF

SEQ ID NO: 103627 - protein, 11 aa, Homo sapiens
  misc_feature (1)..(11): Table A1; Target 785; HLA-A*11:01; MMP20; ENSG00000137674; Matrix metalloproteinase-20 (MMP-20) (EC 3.4.24.-) (Enamel metalloproteinase) (Enamelysin)
SSFDAVTMLGK

SEQ ID NO: 103628 - protein, 9 aa, Homo sapiens
  misc_feature (1)..(9): Table A1; Target 786; HLA-A*01:01; MMP20; ENSG00000137674; Matrix metalloproteinase-20 (MMP-20) (EC 3.4.24.-) (Enamel metalloproteinase) (Enamelysin)
STDPSALMY

SEQ ID NO: 103629 - protein, 11 aa, Homo sapiens
  misc_feature (1)..(11): Table A1; Target 787; HLA-A*29:02; MMP20; ENSG00000137674; Matrix metalloproteinase-20 (MMP-20) (EC 3.4.24.-) (Enamel metalloproteinase) (Enamelysin)
YFFSGPKTYKY

SEQ ID NO: 103630 - protein, 9 aa, Homo sapiens
  misc_feature (1)..(9): Table A1; Target 788; HLA-A*24:02; CNTP5; ENSG00000155052; Contactin-associated protein-like 5 (Cell recognition molecule Caspr5)
IYSGNSYYF

SEQ ID NO: 103631 - protein, 9 aa, Homo sapiens
  misc_feature (1)..(9): Table A1; Target 789; HLA-A*33:01; PDCL2; ENSG00000163440; Phosducin-like protein 2
DMQAVETYR

SEQ ID NO: 103632 - protein, 9 aa, Homo sapiens
  misc_feature (1)..(9): Table A1; Target 790; HLA-A*31:01; DPPA2; ENSG00000163530; Developmental pluripotency-associated protein 2 (Pluripotent embryonic stem cell-related gene 1 protein)
ASWARIAAR

SEQ ID NO: 103633 - protein, 10 aa, Homo sapiens
  misc_feature (1)..(10): Table A1; Target 791; HLA-B*44:03; MAGB1; ENSG00000214107; Melanoma-associated antigen B1 (Cancer/testis antigen 3.1) (CT3.1) (DSS-AHC critical interval MAGE superfamily 10) (DAM10) (MAGE-B1 antigen) (MAGE-XP antigen)
KEDNPSGHTY

SEQ ID NO: 103634 - protein, 9 aa, Homo sapiens
  misc_feature (1)..(9): Table A1; Target 792; HLA-A*03:01; ACTL8; ENSG00000117148; Actin-like protein 8 (Cancer/testis antigen 57) (CT57)
TVAVTQMNK

SEQ ID NO: 103635 - protein, 11 aa, Homo sapiens
  misc_feature (1)..(11): Table A1; Target 793; HLA-A*31:01; RNF17; ENSG00000132972; RING finger protein 17 (Tudor domain-containing protein 4)
AVRGSDTLWYR

SEQ ID NO: 103636 - protein, 9 aa, Homo sapiens
  misc_feature (1)..(9): Table A1; Target 794; HLA-B*08:01; I22R2; ENSG00000164485; Interleukin-22 receptor subunit alpha-2 (IL-22 receptor subunit alpha-2) (IL-22R-alpha-2) (IL-22RA2) (Cytokine receptor class-II member 10)
  misc_feature (1)..(9): (Cytokine receptor family 2 member 10) (CRF2-10) (Cytokine receptor family type 2, soluble 1) (CRF2-S1) (Interleukin-22-binding protein) (IL-22BP) (IL22BP) (ZcytoR16)
YQKEKNVSI

SEQ ID NO: 103637 - protein, 9 aa, Homo sapiens
  misc_feature (1)..(9): Table A1; Target 795; HLA-C*04:01; A0A1B0GVH6; ENSG00000226792; Long intergenic non-protein coding RNA 371
FFDSIIAEL

SEQ ID NO: 103638 - protein, 10 aa, Homo sapiens
  misc_feature (1)..(10): Table A1; Target 796; HLA-B*27:02; DYTNENSG00000232125; Dystrotelin;
VDQIALPNLK

SEQ ID NO: 103639 - protein, 9 aa, Homo sapiens
  misc_feature (1)..(9): Table A1; Target 797; HLA-A*33:01; WNT8B; ENSG00000075290; Protein Wnt-8b
DTFRSISTR

SEQ ID NO: 103640 - protein, 9 aa, Homo sapiens
  misc_feature (1)..(9): Table A1; Target 798; HLA-B*27:02; WNT8B; ENSG00000075290; Protein Wnt-8b
GRGAIADTF

SEQ ID NO: 103641 - protein, 10 aa, Homo sapiens
  misc_feature (1)..(10): Table A1; Target 799; HLA-B*44:03; H2BWT; ENSG00000123569; Histone H2B type W-T (H2B histone family member W testis-specific)
AESEGTKAVL

SEQ ID NO: 103642 - protein, 10 aa, Homo sapiens
  misc_feature (1)..(10): Table A1; Target 800; HLA-C*02:02; H2BWT; ENSG00000123569; Histone H2B type W-T (H2B histone family member W testis-specific)
AESEGTKAVL

SEQ ID NO: 103643 - protein, 10 aa, Homo sapiens
  misc_feature (1)..(10): Table A1; Target 801; HLA-A*03:01; H2BWT; ENSG00000123569; Histone H2B type W-T (H2B histone family member W testis-specific)
SLYAIQQQRK

SEQ ID NO: 103644 - protein, 9 aa, Homo sapiens
  misc_feature (1)..(9): Table A1; Target 802; HLA-B*18:01; APOL5; ENSG00000128313; Apolipoprotein L5 (Apolipoprotein L-V) (ApoL-V)
DEAGMLSYF

SEQ ID NO: 103645 - protein, 8 aa, Homo sapiens
  misc_feature (1)..(8): Table A1; Target 803; HLA-B*18:01; APOL5; ENSG00000128313; Apolipoprotein L5 (Apolipoprotein L-V) (ApoL-V)
DEAGMLSY

SEQ ID NO: 103646 - protein, 9 aa, Homo sapiens
  misc_feature (1)..(9): Table A1; Target 804; HLA-B*44:03; APOL5; ENSG00000128313; Apolipoprotein L5 (Apolipoprotein L-V) (ApoL-V)
EEEKLFLSY

SEQ ID NO: 103647 - protein, 8 aa, Homo sapiens
  misc_feature (1)..(8): Table A1; Target 805; HLA-B*08:01; APOL5; ENSG00000128313; Apolipoprotein L5 (Apolipoprotein L-V) (ApoL-V)
ELLTKTSL

SEQ ID NO: 103648 - protein, 10 aa, Homo sapiens
  misc_feature (1)..(10): Table A1; Target 806; HLA-A*01:01; APOL5; ENSG00000128313; Apolipoprotein L5 (Apolipoprotein L-V) (ApoL-V)
HSDEAGMLSY

SEQ ID NO: 103649 - protein, 9 aa, Homo sapiens
  misc_feature (1)..(9): Table A1; Target 807; HLA-A*31:01; APOL5; ENSG00000128313; Apolipoprotein L5 (Apolipoprotein L-V) (ApoL-V)
IVTNVLENR

SEQ ID NO: 103650 - protein, 9 aa, Homo sapiens
  misc_feature (1)..(9): Table A1; Target 808; HLA-A*33:01; APOL5; ENSG00000128313; Apolipoprotein L5 (Apolipoprotein L-V) (ApoL-V)
IVTNVLENR

SEQ ID NO: 103651 - protein, 9 aa, Homo sapiens
  misc_feature (1)..(9): Table A1; Target 809; HLA-A*30:02; APOL5; ENSG00000128313; Apolipoprotein L5 (Apolipoprotein L-V) (ApoL-V)
QGIKDLHAY

SEQ ID NO: 103652 - protein, 10 aa, Homo sapiens
  misc_feature (1)..(10): Table A1; Target 810; HLA-B*44:03; APOL5; ENSG00000128313; Apolipoprotein L5 (Apolipoprotein L-V) (ApoL-V)
SEEEKLFLSY

SEQ ID NO: 103653 - protein, 8 aa, Homo sapiens
  misc_feature (1)..(8): Table A1; Target 811; HLA-B*18:01; APOL5; ENSG00000128313; Apolipoprotein L5 (Apolipoprotein L-V) (ApoL-V)
SEIEAAGF

SEQ ID NO: 103654 - protein, 9 aa, Homo sapiens
  misc_feature (1)..(9): Table A1; Target 812; HLA-A*11:01; K7EM39; ENSG00000141748; Putative ADP-ribosylation factor-like protein 5C (Fragment)
ASVLIFANK

SEQ ID NO: 103655 - protein, 9 aa, Homo sapiens
  misc_feature (1)..(9): Table A1; Target 813; HLA-B*44:03; SPT21; ENSG00000187144; Spermatogenesis-associated protein 21
EEQSLQKLY

SEQ ID NO: 103656 - protein, 9 aa, Homo sapiens
  misc_feature (1)..(9): Table A1; Target 814; HLA-A*01:01; SPT21; ENSG00000187144; Spermatogenesis-associated protein 21
QSSERTLSY

SEQ ID NO: 103657 - protein, 9 aa, Homo sapiens
  misc_feature (1)..(9): Table A1; Target 815; HLA-A*11:01; MAGB1; ENSG00000214107; Melanoma-associated antigen B1 (Cancer/testis antigen 3.1) (CT3.1) (DSS-AHC critical interval MAGE superfamily 10) (DAM10) (MAGE-B1 antigen) (MAGE-XP antigen)
ITQDLVQEK

SEQ ID NO: 103658 - protein, 9 aa, Homo sapiens
  misc_feature (1)..(9): Table A1; Target 816; HLA-A*29:02; FOXI3; ENSG00000214336; Forkhead box protein I3
FVADSFPFY

SEQ ID NO: 103659 - protein, 8 aa, Homo sapiens
  misc_feature (1)..(8): Table A1; Target 817; HLA-B*18:01; ADAM7; ENSG00000069206; Disintegrin and metalloproteinase domain-containing protein 7 (ADAM 7) (Sperm maturation-related glycoprotein GP-83)
DEGEHLVF

SEQ ID NO: 103660 - protein, 9 aa, Homo sapiens
  misc_feature (1)..(9): Table A1; Target 818; HLA-A*26:01; RNF17; ENSG00000132972; RING finger protein 17 (Tudor domain-containing protein 4)
EVATAVNTR

SEQ ID NO: 103661 - protein, 9 aa, Homo sapiens
  misc_feature (1)..(9): Table A1; Target 819; HLA-A*02:07; F71F1; ENSG00000135248; Protein FAM71F1 (Protein FAM137A) (Testis development protein NYD-SP18)
ILPLRFVEL

SEQ ID NO: 103662 - protein, 9 aa, Homo sapiens
  misc_feature (1)..(9): Table A1; Target 820; HLA-A*02:01; F71F1; ENSG00000135248; Protein FAM71F1 (Protein FAM137A) (Testis development protein NYD-SP18)
TVTEKIYYL

SEQ ID NO: 103663 - protein, 10 aa, Homo sapiens
  misc_feature (1)..(10): Table A1; Target 821; HLA-A*26:01; TRI43; ENSG00000144015; Tripartite motif-containing protein 43
EVTNHNIRLF

SEQ ID NO: 103664 - protein, 9 aa, Homo sapiens
  misc_feature (1)..(9): Table A1; Target 822; HLA-A*24:02; TRI43; ENSG00000144015; Tripartite motif-containing protein 43
EYQEIFQQL

SEQ ID NO: 103665 - protein, 10 aa, Homo sapiens
  misc_feature (1)..(10): Table A1; Target 823; HLA-A*29:02; TRI43; ENSG00000144015; Tripartite motif-containing protein 43
LTFPVRPFFY

SEQ ID NO: 103666 - protein, 9 aa, Homo sapiens
  misc_feature (1)..(9): Table A1; Target 824; HLA-B*35:01; TRI43; ENSG00000144015; Tripartite motif-containing protein 43
MPQPVNPEL

SEQ ID NO: 103667 - protein, 9 aa, Homo sapiens
  misc_feature (1)..(9): Table A1; Target 825; HLA-A*24:02; TRI43; ENSG00000144015; Tripartite motif-containing protein 43
NYLVDPVTI

SEQ ID NO: 103668 - protein, 9 aa, Homo sapiens
  misc_feature (1)..(9): Table A1; Target 826; HLA-A*11:01; TRI43; ENSG00000144015; Tripartite motif-containing protein 43
SVSFLNVTK

SEQ ID NO: 103669 - protein, 9 aa, Homo sapiens
  misc_feature (1)..(9): Table A1; Target 827; HLA-B*44:03; CRGCENSG00000163254; Gamma-crystallin C (Gamma-C-crystallin) (Gamma-crystallin 2-1) (Gamma-crystallin 3)
GEYPDYQQW

SEQ ID NO: 103670 - protein, 9 aa, Homo sapiens
  misc_feature (1)..(9): Table A1; Target 828; HLA-C*02:02; CRGCENSG00000163254; Gamma-crystallin C (Gamma-C-crystallin) (Gamma-crystallin 2-1) (Gamma-crystallin 3)
GEYPDYQQW

SEQ ID NO: 103671 - protein, 9 aa, Homo sapiens
  misc_feature (1)..(9): Table A1; Target 829; HLA-B*44:03; CC049; ENSG00000163632; Putative uncharacterized protein C3orf49
EEITQGNTL

SEQ ID NO: 103672 - protein, 11 aa, Homo sapiens
  misc_feature (1)..(11): Table A1; Target 830; HLA-A*31:01; CC049; ENSG00000163632; Putative uncharacterized protein C3orf49
ITQGNTLLRAR

SEQ ID NO: 103673 - protein, 9 aa, Homo sapiens
  misc_feature (1)..(9): Table A1; Target 831; HLA-B*35:01; CC049; ENSG00000163632; Putative uncharacterized protein C3orf49
LPEPFKIAY

SEQ ID NO: 103674 - protein, 9 aa, Homo sapiens
  misc_feature (1)..(9): Table A1; Target 832; HLA-A*02:07; CC049; ENSG00000163632; Putative uncharacterized protein C3orf49
QVDDLIETV

SEQ ID NO: 103675 - protein, 10 aa, Homo sapiens
  misc_feature (1)..(10): Table A1; Target 833; HLA-A*11:01; CC049; ENSG00000163632; Putative uncharacterized protein C3orf49
VTSLPSGLQK

SEQ ID NO: 103676 - protein, 10 aa, Homo sapiens
  misc_feature (1)..(10): Table A1; Target 834; HLA-A*29:02; CC049; ENSG00000163632; Putative uncharacterized protein C3orf49
YLPEPFKIAY

SEQ ID NO: 103677 - protein, 9 aa, Homo sapiens
  misc_feature (1)..(9): Table A1; Target 835; HLA-A*29:02; S6A18; ENSG00000164363; Sodium-dependent neutral amino acid transporter B(0)AT3 (Sodium- and chloride-dependent transporter XTRP2) (Solute carrier family 6 member 18) (System B(0) neutral amino acid transporter AT3)
EVVGVVYVY

SEQ ID NO: 103678 - protein, 9 aa, Homo sapiens
  misc_feature (1)..(9): Table A1; Target 836; HLA-B*35:01; CT55ENSG00000169551; Cancer/testis antigen 55 (Tumor antigen BJ-HCC-20)
TVQGVVTSF

SEQ ID NO: 103679 - protein, 9 aa, Homo sapiens
  misc_feature (1)..(9): Table A1; Target 837; HLA-A*11:01; S22AD; ENSG00000172940; Solute carrier family 22 member 13 (Organic cation transporter-like 3) (ORCTL-3)
ASLQDILSH

SEQ ID NO: 103680 - protein, 9 aa, Homo sapiens
  misc_feature (1)..(9): Table A1; Target 838; HLA-A*01:01; EP3BENSG00000181552; Epididymal secretory protein E3-beta (Human epididymis-specific protein 3-beta) (HE3-beta)
YTESRSFNY

SEQ ID NO: 103681 - protein, 9 aa, Homo sapiens
  misc_feature (1)..(9): Table A1; Target 839; HLA-A*02:07; TSPY1; ENSG00000258992; Testis-specific Y-encoded protein 1 (Cancer/testis antigen 78) (CT78)
LLDDIMAEV

SEQ ID NO: 103682 - protein, 9 aa, Homo sapiens
  misc_feature (1)..(9): Table A1; Target 840; HLA-A*02:01; RNF17; ENSG00000132972; RING finger protein 17 (Tudor domain-containing protein 4)
SLDEALQRV

SEQ ID NO: 103683 - protein, 9 aa, Homo sapiens
  misc_feature (1)..(9): Table A1; Target 841; HLA-B*51:01; CBPA5; ENSG00000158525; Carboxypeptidase A5 (EC 3.4.17.-)
DAVEALYKV

SEQ ID NO: 103684 - protein, 9 aa, Homo sapiens
  misc_feature (1)..(9): Table A1; Target 842; HLA-A*01:01; CBPA5; ENSG00000158525; Carboxypeptidase A5 (EC 3.4.17.-)
YLESHGLAY

SEQ ID NO: 103685 - protein, 9 aa, Homo sapiens
  misc_feature (1)..(9): Table A1; Target 843; HLA-A*02:07; C9JPU3; ENSG00000168757; Testis-specific Y-encoded protein 2
LLDDIMAEV

SEQ ID NO: 103686 - protein, 9 aa, Homo sapiens
  misc_feature (1)..(9): Table A1; Target 844; HLA-A*30:02; UROL1; ENSG00000177398; Uromodulin-like 1 (Olfactorin)
AVQTSYTSY

SEQ ID NO: 103687 - protein, 9 aa, Homo sapiens
  misc_feature (1)..(9): Table A1; Target 845; HLA-B*44:03; LY6LENSG00000261667; Lymphocyte antigen 6L (Lymphocyte antigen 6 complex locus protein L)
NEVVVSFKW

SEQ ID NO: 103688 - protein, 9 aa, Homo sapiens
  misc_feature (1)..(9): Table A1; Target 846; HLA-A*26:01; DDX4ENSG00000152670; Probable ATP-dependent RNA helicase DDX4 (EC 3.6.4.13) (DEAD box protein 4) (Vasa homolog)
DAPPAILTF

SEQ ID NO: 103689 - protein, 10 aa, Homo sapiens
  misc_feature (1)..(10): Table A1; Target 847; HLA-A*30:02; LMTD1; ENSG00000152936; Lamin tail domain-containing protein 1 (Intermediate filament tail domain-containing protein 1)
NVNGQTISLY

SEQ ID NO: 103690 - protein, 9 aa, Homo sapiens
  misc_feature (1)..(9): Table A1; Target 848; HLA-A*02:01; LMTD1; ENSG00000152936; Lamin tail domain-containing protein 1 (Intermediate filament tail domain-containing protein 1)
SLDASPFSV

SEQ ID NO: 103691 - protein, 9 aa, Homo sapiens
  misc_feature (1)..(9): Table A1; Target 849; HLA-A*11:01; LMTD1; ENSG00000152936; Lamin tail domain-containing protein 1 (Intermediate filament tail domain-containing protein 1)
STATITKEK

SEQ ID NO: 103692 - protein, 9 aa, Homo sapiens
  misc_feature (1)..(9): Table A1; Target 850; HLA-A*11:01; LMTD1; ENSG00000152936; Lamin tail domain-containing protein 1 (Intermediate filament tail domain-containing protein 1)
STTGQLTSK

SEQ ID NO: 103693 - protein, 8 aa, Homo sapiens
  misc_feature (1)..(8): Table A1; Target 851; HLA-B*51:01; NPSR1; ENSG00000187258; Neuropeptide S receptor (G-protein coupled receptor 154) (G-protein coupled receptor PGR14) (G-protein coupled receptor for asthma susceptibility)
IPLTIISI

SEQ ID NO: 103694 - protein, 8 aa, Homo sapiens
  misc_feature (1)..(8): Table A1; Target 852; HLA-B*51:01; PRS48; ENSG00000189099; Serine protease 48 (EC 3.4.21.-) (Epidermis-specific serine protease-like protein)
LPALEPVI

SEQ ID NO: 103695 - protein, 9 aa, Homo sapiens
  misc_feature (1)..(9): Table A1; Target 853; HLA-B*44:03; CLC6A; ENSG00000205846; C-type lectin domain family 6 member A (C-type lectin superfamily member 10) (Dendritic cell-associated C-type lectin 2) (DC-associated C-type lectin 2) (Dectin-2)
SEGTKVPAW

SEQ ID NO: 103696 - protein, 9 aa, Homo sapiens
  misc_feature (1)..(9): Table A1; Target 854; HLA-A*30:02; ADAM7; ENSG00000069206; Disintegrin and metalloproteinase domain-containing protein 7 (ADAM 7) (Sperm maturation-related glycoprotein GP-83)
YQGSIVHEY

SEQ ID NO: 103697 - protein, 9 aa, Homo sapiens
  misc_feature (1)..(9): Table A1; Target 855; HLA-B*08:01; MROH9; ENSG00000117501; Maestro heat-like repeat-containing protein family member 9
HMAHKVNSL

SEQ ID NO: 103698 - protein, 9 aa, Homo sapiens
  misc_feature (1)..(9): Table A1; Target 856; HLA-A*02:07; MROH9; ENSG00000117501; Maestro heat-like repeat-containing protein family member 9
IVDAIYRQL

SEQ ID NO: 103699 - protein, 9 aa, Homo sapiens
  misc_feature (1)..(9): Table A1; Target 857; HLA-A*30:02; MROH9; ENSG00000117501; Maestro heat-like repeat-containing protein family member 9
KVNSLLDAY

SEQ ID NO: 103700 - protein, 8 aa, Homo sapiens
  misc_feature (1)..(8): Table A1; Target 858; HLA-B*08:01; MROH9; ENSG00000117501; Maestro heat-like repeat-containing protein family member 9
NPKTKSSL

SEQ ID NO: 103701 - protein, 8 aa, Homo sapiens
  misc_feature (1)..(8): Table A1; Target 859; HLA-B*18:01; NMUR2; ENSG00000132911; Neuromedin-U receptor 2 (NMU-R2) (G-protein coupled receptor FM-4) (G-protein coupled receptor TGR-1)
SESLAAVF

SEQ ID NO: 103702 - protein, 9 aa, Homo sapiens
  misc_feature (1)..(9): Table A1; Target 860; HLA-B*51:01; OX2RENSG00000137252; Orexin receptor type 2 (Ox-2-R) (Ox2-R) (Ox2R) (Hypocretin receptor type 2)
IPYLQTVSV

SEQ ID NO: 103703 - protein, 9 aa, Homo sapiens
  misc_feature (1)..(9): Table A1; Target 861; HLA-A*02:01; OX2RENSG00000137252; Orexin receptor type 2 (Ox-2-R) (Ox2-R) (Ox2R) (Hypocretin receptor type 2)
SLADVLVTI

SEQ ID NO: 103704 - protein, 9 aa, Homo sapiens
  misc_feature (1)..(9): Table A1; Target 862; HLA-A*26:01; ZAN ENSG00000146839; Zonadhesin;
EVITTVYGY

SEQ ID NO: 103705 - protein, 9 aa, Homo sapiens
  misc_feature (1)..(9): Table A1; Target 863; HLA-A*02:01; ZAN ENSG00000146839; Zonadhesin;
FLQEVITTV

SEQ ID NO: 103706 - protein, 11 aa, Homo sapiens
  misc_feature (1)..(11): Table A1; Target 864; HLA-A*30:02; ZAN ENSG00000146839; Zonadhesin;
GQSPGAALHIY

SEQ ID NO: 103707 - protein, 9 aa, Homo sapiens
  misc_feature (1)..(9): Table A1; Target 865; HLA-B*18:01; ZAN ENSG00000146839; Zonadhesin;
LEIEIPTTY

SEQ ID NO: 103708 - protein, 9 aa, Homo sapiens
  misc_feature (1)..(9): Table A1; Target 866; HLA-A*30:02; ZAN ENSG00000146839; Zonadhesin;
SGHGVSSRY

SEQ ID NO: 103709 - protein, 9 aa, Homo sapiens
  misc_feature (1)..(9): Table A1; Target 867; HLA-B*18:01; ZAN ENSG00000146839; Zonadhesin;
VEVTVPSSY

SEQ ID NO: 103710 - protein, 9 aa, Homo sapiens
  misc_feature (1)..(9): Table A1; Target 868; HLA-A*02:01; PERLENSG00000167419; Lactoperoxidase (LPO) (EC 1.11.1.7) (Salivary peroxidase) (SPO)
GLMAVNQEV

SEQ ID NO: 103711 - protein, 10 aa, Homo sapiens
  misc_feature (1)..(10): Table A1; Target 869; HLA-B*44:03; VCX3ENSG00000169059; Variable charge X-linked protein 3 (Variable charge protein on X with eight repeats) (VCX-8r) (Variably charged protein X-A) (VCX-A)
EEPLSVTASY

SEQ ID NO: 103712 - protein, 9 aa, Homo sapiens
  misc_feature (1)..(9): Table A1; Target 870; HLA-B*18:01; HDGL1; ENSG00000112273; Hepatoma-derived growth factor-like protein 1 (PWWP domain-containing protein 1)
EESPFLVAV

SEQ ID NO: 103713 - protein, 8 aa, Homo sapiens
  misc_feature (1)..(8): Table A1; Target 871; HLA-B*18:01; OTORENSG00000125879; Otoraplin (Fibrocyte-derived protein) (Melanoma inhibitory activity-like protein)
DEMGVVGY

SEQ ID NO: 103714 - protein, 9 aa, Homo sapiens
  misc_feature (1)..(9): Table A1; Target 872; HLA-B*44:03; APOL5; ENSG00000128313; Apolipoprotein L5 (Apolipoprotein L-V) (ApoL-V)
HEAFGGINW

SEQ ID NO: 103715 - protein, 9 aa, Homo sapiens
  misc_feature (1)..(9): Table A1; Target 873; HLA-A*29:02; RXFP2; ENSG00000133105; Relaxin receptor 2 (G-protein coupled receptor 106) (G-protein coupled receptor affecting testicular descent)
  misc_feature (1)..(9): (Leucine-rich repeat-containing G-protein coupled receptor 8) (Relaxin family peptide receptor 2)
FFLSMVNNY

SEQ ID NO: 103716 - protein, 9 aa, Homo sapiens
  misc_feature (1)..(9): Table A1; Target 874; HLA-A*29:02; IFNKENSG00000147896; Interferon kappa (IFN-kappa)
IFSQHTFKY

SEQ ID NO: 103717 - protein, 9 aa, Homo sapiens
  misc_feature (1)..(9): Table A1; Target 875; HLA-C*02:02; GPC6A; ENSG00000173612; G-protein coupled receptor family C group 6 member A (hGPRC6A) (G-protein coupled receptor GPCR33) (hGPCR33)
QEINTKSAF

SEQ ID NO: 103718 - protein, 11 aa, Homo sapiens
  misc_feature (1)..(11): Table A1; Target 876; HLA-B*44:03; SPNXC; ENSG00000198573; Sperm protein associated with the nucleus on the X chromosome C (Cancer/testis antigen 11.3) (CT11.3)
  misc_feature (1)..(11): (Cancer/testis-associated protein CTp11) (Nuclear-associated protein SPAN-Xc) (SPANX-C) (SPANX family member C)
SESSTILVVRY

SEQ ID NO: 103719 - protein, 11 aa, Homo sapiens
  misc_feature (1)..(11): Table A1; Target 877; HLA-A*24:02; SYCY2; ENSG00000244476; Syncytin-2 (Endogenous retrovirus group FRD member 1) (Envelope polyprotein)
  misc_feature (1)..(11): (HERV-FRD) (HERV-FRD; 6p24.1 provirus ancestral Env polyprotein) [Cleaved into: Surface protein (SU); Transmembrane protein (TM)]
SYLGISAVSEF

SEQ ID NO: 103720 - protein, 11 aa, Homo sapiens
  misc_feature (1)..(11): Table A1; Target 878; HLA-A*11:01; LUZP4; ENSG00000102021; Leucine zipper protein 4 (Cancer/testis antigen 28) (CT-28) (CT28) (Tumor antigen HOM-TES-85)
ATQRDLIATQK

SEQ ID NO: 103721 - protein, 9 aa, Homo sapiens
  misc_feature (1)..(9): Table A1; Target 879; HLA-B*46:01; PSA7L; ENSG00000154611; Proteasome subunit alpha type-7-like (EC 3.4.25.1)
AVKKGSTAY

SEQ ID NO: 103722 - protein, 8 aa, Homo sapiens
  misc_feature (1)..(8): Table A1; Target 880; HLA-A*33:01; PSA7L; ENSG00000154611; Proteasome subunit alpha type-7-like (EC 3.4.25.1)
DARVVINR

SEQ ID NO: 103723 - protein, 9 aa, Homo sapiens
  misc_feature (1)..(9): Table A1; Target 881; HLA-B*51:01; PSA7L; ENSG00000154611; Proteasome subunit alpha type-7-like (EC 3.4.25.1)
TAYHVSLIV

SEQ ID NO: 103724 - protein, 9 aa, Homo sapiens
  misc_feature (1)..(9): Table A1; Target 882; HLA-B*18:01; PSA7L; ENSG00000154611; Proteasome subunit alpha type-7-like (EC 3.4.25.1)
VEDPVTVEY

SEQ ID NO: 103725 - protein, 9 aa, Homo sapiens
  misc_feature (1)..(9): Table A1; Target 883; HLA-B*46:01; TERTENSG00000164362; Telomerase reverse transcriptase (EC 2.7.7.49) (HEST2) (Telomerase catalytic subunit) (Telomerase-associated protein 2) (TP2)
VVIEQSSSL

SEQ ID NO: 103726 - protein, 9 aa, Homo sapiens
  misc_feature (1)..(9): Table A1; Target 884; HLA-B*44:02; ACHA9; ENSG00000174343; Neuronal acetylcholine receptor subunit alpha-9 (Nicotinic acetylcholine receptor subunit alpha-9) (NACHR alpha-9)
AEARPVPHW

SEQ ID NO: 103727 - protein, 9 aa, Homo sapiens
  misc_feature (1)..(9): Table A1; Target 885; HLA-C*05:01; V9GYR9; ENSG00000225362; Cancer/testis antigen 62 (Fragment)
NADLQSEFL

SEQ ID NO: 103728 - protein, 9 aa, Homo sapiens
  misc_feature (1)..(9): Table A1; Target 886; HLA-B*35:01; PIWL1; ENSG00000125207; Piwi-like protein 1 (EC 3.1.26.-)
HAFDGTILF

SEQ ID NO: 103729 - protein, 9 aa, Homo sapiens
  misc_feature (1)..(9): Table A1; Target 887; HLA-A*30:02; RNF17; ENSG00000132972; RING finger protein 17 (Tudor domain-containing protein 4)
KTGPSRSSY

SEQ ID NO: 103730 - protein, 9 aa, Homo sapiens
  misc_feature (1)..(9): Table A1; Target 888; HLA-A*03:01; FBX39; ENSG00000177294; F-box only protein 39
AVYNSPQFK

SEQ ID NO: 103731 - protein, 9 aa, Homo sapiens
  misc_feature (1)..(9): Table A1; Target 889; HLA-A*11:01; CB091; ENSG00000205086; Uncharacterized protein C2orf91
ASAVQLPEK

SEQ ID NO: 103732 - protein, 10 aa, Homo sapiens
  misc_feature (1)..(10): Table A1; Target 890; HLA-A*11:01; E9PHT4; ENSG00000206199; Protein ANKUB1
ATPSADFLLK

SEQ ID NO: 103733 - protein, 9 aa, Homo sapiens
  misc_feature (1)..(9): Table A1; Target 891; HLA-A*11:01; E9PHT4; ENSG00000206199; Protein ANKUB1
AVASAFKEK

SEQ ID NO: 103734 - protein, 9 aa, Homo sapiens
  misc_feature (1)..(9): Table A1; Target 892; HLA-A*29:02; E9PHT4; ENSG00000206199; Protein ANKUB1
GYSHPSFFY

SEQ ID NO: 103735 - protein, 9 aa, Homo sapiens
  misc_feature (1)..(9): Table A1; Target 893; HLA-A*26:01; CD051; ENSG00000237136; Uncharacterized protein C4orf51
ETTDIKGLF

SEQ ID NO: 103736 - protein, 10 aa, Homo sapiens
  misc_feature (1)..(10): Table A1; Target 894; HLA-A*30:02; HXB1ENSG00000120094; Homeobox protein Hox-B1 (Homeobox protein Hox-2I)
AQLGGLSDGY

SEQ ID NO: 103737 - protein, 9 aa, Homo sapiens
  misc_feature (1)..(9): Table A1; Target 895; HLA-B*44:03; HXB1ENSG00000120094; Homeobox protein Hox-B1 (Homeobox protein Hox-2I)
TELEKEFHF

SEQ ID NO: 103738 - protein, 11 aa, Homo sapiens
  misc_feature (1)..(11): Table A1; Target 896; HLA-B*44:03; PDCL2; ENSG00000163440; Phosducin-like protein 2
EEDVWVIIHLY

SEQ ID NO: 103739 - protein, 10 aa, Homo sapiens
  misc_feature (1)..(10): Table A1; Target 897; HLA-A*03:01; WFD13; ENSG00000168634; WAP four-disulfide core domain protein 13
ALQLVPGSPK

SEQ ID NO: 103740 - protein, 9 aa, Homo sapiens
  misc_feature (1)..(9): Table A1; Target 898; HLA-B*35:01; SAGE1; ENSG00000181433; Sarcoma antigen 1 (Cancer/testis antigen 14) (CT14)
MAGASIPAM

SEQ ID NO: 103741 - protein, 9 aa, Homo sapiens
  misc_feature (1)..(9): Table A1; Target 899; HLA-B*18:01; CNTP5; ENSG00000155052; Contactin-associated protein-like 5 (Cell recognition molecule Caspr5)
FEAGTSVTY

SEQ ID NO: 103742 - protein, 9 aa, Homo sapiens
  misc_feature (1)..(9): Table A1; Target 900; HLA-A*30:02; SSX1ENSG00000126752; Protein SSX1 (Cancer/testis antigen 5.1) (CT5.1) (Synovial sarcoma, X breakpoint 1)
KAFDDIATY

SEQ ID NO: 103743 - protein, 9 aa, Homo sapiens
  misc_feature (1)..(9): Table A1; Target 901; HLA-A*02:01; CER1ENSG00000147869; Cerberus (Cerberus-related protein) (DAN domain family member 4)
SQDSFIPGV

SEQ ID NO: 103744 - protein, 9 aa, Homo sapiens
  misc_feature (1)..(9): Table A1; Target 902; HLA-B*51:01; OLIG3; ENSG00000177468; Oligodendrocyte transcription factor 3 (Oligo3) (Class B basic helix-loop-helix protein 7) (bHLHb7) (Class E basic helix-loop-helix protein 20) (bHLHe20)
MPYAHGPSV

SEQ ID NO: 103745 - protein, 10 aa, Homo sapiens
  misc_feature (1)..(10): Table A1; Target 903; HLA-B*44:03; OLIG3; ENSG00000177468; Oligodendrocyte transcription factor 3 (Oligo3) (Class B basic helix-loop-helix protein 7) (bHLHb7) (Class E basic helix-loop-helix protein 20) (bHLHe20)
SEQDLQQLRL

SEQ ID NO: 103746 - protein, 9 aa, Homo sapiens
  misc_feature (1)..(9): Table A1; Target 904; HLA-C*01:02; OLIG3; ENSG00000177468; Oligodendrocyte transcription factor 3 (Oligo3) (Class B basic helix-loop-helix protein 7) (bHLHb7) (Class E basic helix-loop-helix protein 20) (bHLHe20)
SSPLSAASL

SEQ ID NO: 103747 - protein, 9 aa, Homo sapiens
  misc_feature (1)..(9): Table A1; Target 905; HLA-A*11:01; OLIG3; ENSG00000177468; Oligodendrocyte transcription factor 3 (Oligo3) (Class B basic helix-loop-helix protein 7) (bHLHb7) (Class E basic helix-loop-helix protein 20) (bHLHe20)
STQGDMMQK

SEQ ID NO: 103748 - protein, 9 aa, Homo sapiens
  misc_feature (1)..(9): Table A1; Target 906; HLA-A*11:01; PRS48; ENSG00000189099; Serine protease 48 (EC 3.4.21.-) (Epidermis-specific serine protease-like protein)
TTADVALLK

SEQ ID NO: 103749 - protein, 9 aa, Homo sapiens
  misc_feature (1)..(9): Table A1; Target 907; HLA-B*35:01; ZN729; ENSG00000196350; Zinc finger protein 729
NAFKFSSTF

SEQ ID NO: 103750 - protein, 9 aa, Homo sapiens
  misc_feature (1)..(9): Table A1; Target 908; HLA-B*44:03; GLYL3; ENSG00000203972; Glycine N-acyltransferase-like protein 3 (EC 2.3.1.-)
AETDNLDHY

SEQ ID NO: 103751 - protein, 9 aa, Homo sapiens
  misc_feature (1)..(9): Table A1; Target 909; HLA-A*30:02; Q5JUY5; ENSG00000117400; Thrombopoietin receptor
TTHIANHSY

SEQ ID NO: 103752 - protein, 11 aa, Homo sapiens
  misc_feature (1)..(11): Table A1; Target 910; HLA-A*11:01; PRD14; ENSG00000147596; PR domain zinc finger protein 14 (EC 2.1.1.-) (PR domain-containing protein 14)
ATVEEDFQPFR

SEQ ID NO: 103753 - protein, 10 aa, Homo sapiens
  misc_feature (1)..(10): Table A1; Target 911; HLA-B*44:03; ADA18; ENSG00000168619; Disintegrin and metalloproteinase domain-containing protein 18 (ADAM 18) (Transmembrane metalloproteinase-like, disintegrin-like, and cysteine-rich protein III) (tMDC III)
AEFPNSFVTL

SEQ ID NO: 103754 - protein, 9 aa, Homo sapiens
  misc_feature (1)..(9): Table A1; Target 912; HLA-A*29:02; ADA18; ENSG00000168619; Disintegrin and metalloproteinase domain-containing protein 18 (ADAM 18) (Transmembrane metalloproteinase-like, disintegrin-like, and cysteine-rich protein III) (tMDC III)
FLPQNFLVY

SEQ ID NO: 103755 - protein, 9 aa, Homo sapiens
  misc_feature (1)..(9): Table A1; Target 913; HLA-B*18:01; PP2D1; ENSG00000183977; Protein phosphatase 2C-like domain-containing protein 1
DEQQIINSF

SEQ ID NO: 103756 - protein, 10 aa, Homo sapiens
  misc_feature (1)..(10): Table A1; Target 914; HLA-A*24:02; PP2D1; ENSG00000183977; Protein phosphatase 2C-like domain-containing protein 1
IYNPENVETF

SEQ ID NO: 103757 - protein, 9 aa, Homo sapiens
  misc_feature (1)..(9): Table A1; Target 915; HLA-A*01:01; PP2D1; ENSG00000183977; Protein phosphatase 2C-like domain-containing protein 1
LSDSNYSKY

SEQ ID NO: 103758 - protein, 9 aa, Homo sapiens
  misc_feature (1)..(9): Table A1; Target 916; HLA-A*11:01; PP2D1; ENSG00000183977; Protein phosphatase 2C-like domain-containing protein 1
STSEPNLTK

SEQ ID NO: 103759 - protein, 10 aa, Homo sapiens
  misc_feature (1)..(10): Table A1; Target 917; HLA-A*30:02; MAGB1; ENSG00000214107; Melanoma-associated antigen B1 (Cancer/testis antigen 3.1) (CT3.1) (DSS-AHC critical interval MAGE superfamily 10) (DAM10) (MAGE-B1 antigen) (MAGE-XP antigen)
ITQDLVQEKY

SEQ ID NO: 103760 - protein, 9 aa, Homo sapiens
  misc_feature (1)..(9): Table A1; Target 918; HLA-A*11:01; PRDM7; ENSG00000126856; Probable histone-lysine N-methyltransferase PRDM7 (EC 2.1.1.43) (PR domain zinc finger protein 7) (PR domain-containing protein 7)
AVMTKPKVK

SEQ ID NO: 103761 - protein, 9 aa, Homo sapiens
  misc_feature (1)..(9): Table A1; Target 919; HLA-A*31:01; TEX37; ENSG00000172073; Testis-expressed sequence 37 protein (Testis-specific conserved protein of 21 kDa)
IVKVPILNR

SEQ ID NO: 103762 - protein, 9 aa, Homo sapiens
  misc_feature (1)..(9): Table A1; Target 920; HLA-B*35:01; NPBW1; ENSG00000183729; Neuropeptides B/W receptor type 1 (G-protein coupled receptor 7)
LAVAVPVVY

SEQ ID NO: 103763 - protein, 9 aa, Homo sapiens
  misc_feature (1)..(9): Table A1; Target 921; HLA-A*11:01; IRPL2; ENSG00000189108; X-linked interleukin-1 receptor accessory protein-like 2 (IL-1 receptor accessory protein-like 2) (IL-1-RAPL-2) (IL-1RAPL-2) (IL1RAPL-2)
  misc_feature (1)..(9): (IL1RAPL-2-related protein) (Interleukin-1 receptor 9) (IL-1R-9) (IL-1R9) (Three immunoglobulin domain-containing IL-1 receptor-related 1) (TIGIRR-1)
SVIDVQLGK

SEQ ID NO: 103764 - protein, 9 aa, Homo sapiens
  misc_feature (1)..(9): Table A1; Target 922; HLA-B*51:01; 1A1L2; ENSG00000205126; Probable inactive 1-aminocyclopropane-1-carboxylate synthase-like protein 2 (ACC synthase-like protein 2)
SAFGYLHSI

SEQ ID NO: 103765 - protein, 9 aa, Homo sapiens
  misc_feature (1)..(9): Table A1; Target 923; HLA-A*11:01; VCX3B; ENSG00000205642; Variable charge X-linked protein 3B (Variably charged protein X-C) (VCX-C)
ASGPPAKAK

SEQ ID NO: 103766 - protein, 10 aa, Homo sapiens
  misc_feature (1)..(10): Table A1; Target 924; HLA-B*44:03; VCX3B; ENSG00000205642; Variable charge X-linked protein 3B (Variably charged protein X-C) (VCX-C)
EEPLSVTAKY

SEQ ID NO: 103767 - protein, 10 aa, Homo sapiens
  misc_feature (1)..(10): Table A1; Target 925; HLA-A*24:02; A0A1B0GTN1; ENSG00000224960; Putative SMEK homolog 3
AYIPKLLQLF

SEQ ID NO: 103768 - protein, 10 aa, Homo sapiens
  misc_feature (1)..(10): Table A1; Target 926; HLA-A*11:01; SHP1L; ENSG00000157060; Testicular spindle-associated protein SHCBP1L (SHC SH2 domain-binding protein 1-like protein)
GTIPGPIAQR

SEQ ID NO: 103769 - protein, 10 aa, Homo sapiens
  misc_feature (1)..(10): Table A1; Target 927; HLA-A*03:01; SHP1L; ENSG00000157060; Testicular spindle-associated protein SHCBP1L (SHC SH2 domain-binding protein 1-like protein)
KTNPSVFFVK

SEQ ID NO: 103770 - protein, 9 aa, Homo sapiens
  misc_feature (1)..(9): Table A1; Target 928; HLA-A*11:01; SHP1L; ENSG00000157060; Testicular spindle-associated protein SHCBP1L (SHC SH2 domain-binding protein 1-like protein)
STLGGVNMK

SEQ ID NO: 103771 - protein, 9 aa, Homo sapiens
  misc_feature (1)..(9): Table A1; Target 929; HLA-B*51:01; SHP1L; ENSG00000157060; Testicular spindle-associated protein SHCBP1L (SHC SH2 domain-binding protein 1-like protein)
VPADSFRTI

SEQ ID NO: 103772 - protein, 9 aa, Homo sapiens
  misc_feature (1)..(9): Table A1; Target 930; HLA-B*44:03; TRI60; ENSG00000176979; Tripartite motif-containing protein 60 (RING finger protein 129) (RING finger protein 33)
EEMNILAKL

SEQ ID NO: 103773 - protein, 9 aa, Homo sapiens
  misc_feature (1)..(9): Table A1; Target 931; HLA-B*44:02; ASCL4; ENSG00000187855; Achaete-scute homolog 4 (ASH-4) (hASH4) (Achaete-scute-like protein 4) (Class A basic helix-loop-helix protein 44) (bHLHa44)
QELLERQAW

SEQ ID NO: 103774 - protein, 10 aa, Homo sapiens
  misc_feature (1)..(10): Table A1; Target 932; HLA-A*11:01; FOXR2; ENSG00000189299; Forkhead box protein R2 (Forkhead box protein N6)
SVQEIYNFTR

SEQ ID NO: 103775 - protein, 9 aa, Homo sapiens
  misc_feature (1)..(9): Table A1; Target 933; HLA-A*03:01; A0A1B0GUY1; ENSG00000248109; Uncharacterized protein
VLNQPGILK

SEQ ID NO: 103776 - protein, 9 aa, Homo sapiens
  misc_feature (1)..(9): Table A1; Target 934; HLA-A*11:01; F71F1; ENSG00000135248; Protein FAM71F1 (Protein FAM137A) (Testis development protein NYD-SP18)
SIAPNIFLK

SEQ ID NO: 103777 - protein, 9 aa, Homo sapiens
  misc_feature (1)..(9): Table A1; Target 935; HLA-C*05:01; UROL1; ENSG00000177398; Uromodulin-like 1 (Olfactorin)
IADVDVQEV

SEQ ID NO: 103778 - protein, 9 aa, Homo sapiens
  misc_feature (1)..(9): Table A1; Target 936; HLA-A*11:01; NGN1ENSG00000181965; Neurogenin-1 (NGN-1) (Class A basic helix-loop-helix protein 6) (bHLHa6) (Neurogenic basic-helix-loop-helix protein) (Neurogenic differentiation factor 3) (NeuroD3)
ASGPPAPAR

SEQ ID NO: 103779 - protein, 8 aa, Homo sapiens
  misc_feature (1)..(8): Table A1; Target 937; HLA-B*51:01; SGCZENSG00000185053; Zeta-sarcoglycan (Zeta-SG) (ZSG1)
LPLYVKEI

SEQ ID NO: 103780 - protein, 9 aa, Homo sapiens
  misc_feature (1)..(9): Table A1; Target 938; HLA-A*29:02; DYTNENSG00000232125; Dystrotelin;
TFPITGLRY

SEQ ID NO: 103781 - protein, 10 aa, Homo sapiens
  misc_feature (1)..(10): Table A1; Target 939; HLA-B*44:03; S14L3; ENSG00000100012; SEC14-like protein 3 (Tocopherol-associated protein 2)
SEAGVYVLRF

SEQ ID NO: 103782 - protein, 9 aa, Homo sapiens
  misc_feature (1)..(9): Table A1; Target 940; HLA-B*35:01; PSG8ENSG00000124467; Pregnancy-specific beta-1-glycoprotein 8 (PS-beta-G-8) (PSBG-8) (Pregnancy-specific glycoprotein 8)
YPVTLNVLY

SEQ ID NO: 103783 - protein, 8 aa, Homo sapiens
  misc_feature (1)..(8): Table A1; Target 941; HLA-B*18:01; SSX1ENSG00000126752; Protein SSX1 (Cancer/testis antigen 5.1) (CT5.1) (Synovial sarcoma, X breakpoint 1)
SEKISYVY

SEQ ID NO: 103784 - protein, 10 aa, Homo sapiens
  misc_feature (1)..(10): Table A1; Target 942; HLA-A*26:01; DPPA2; ENSG00000163530; Developmental pluripotency-associated protein 2 (Pluripotent embryonic stem cell-related gene 1 protein)
EVITSAPGAM

SEQ ID NO: 103785 - protein, 10 aa, Homo sapiens
  misc_feature (1)..(10): Table A1; Target 943; HLA-C*02:02; DC4L2; ENSG00000176566; DDB1- and CUL4-associated factor 4-like protein 2 (WD repeat-containing protein 21C)
SENDIPSVAF

SEQ ID NO: 103786 - protein, 10 aa, Homo sapiens
  misc_feature (1)..(10): Table A1; Target 944; HLA-C*02:02; NTM2G; ENSG00000188152; NUT family member 2G
EEMQIQKSQW

SEQ ID NO: 103787 - protein, 10 aa, Homo sapiens
  misc_feature (1)..(10): Table A1; Target 945; HLA-A*26:01; NTM1B; ENSG00000203740; Alpha N-terminal protein methyltransferase 1B (EC 2.1.1.299) (Methyltransferase-like protein 11B) (X-Pro-Lys N-terminal protein methyltransferase 1B) (NTM1B)
QVINGEMQFY

SEQ ID NO: 103788 - protein, 9 aa, Homo sapiens
  misc_feature (1)..(9): Table A1; Target 946; HLA-A*02:07; NTM1B; ENSG00000203740; Alpha N-terminal protein methyltransferase 1B (EC 2.1.1.299) (Methyltransferase-like protein 11B) (X-Pro-Lys N-terminal protein methyltransferase 1B) (NTM1B)
YLLEKIPLV

SEQ ID NO: 103789 - protein, 11 aa, Homo sapiens
  misc_feature (1)..(11): Table A1; Target 947; HLA-A*11:01; PTX4ENSG00000251692; Pentraxin-4;
ASVQGELAQLK

SEQ ID NO: 103790 - protein, 9 aa, Homo sapiens
  misc_feature (1)..(9): Table A1; Target 948; HLA-A*26:01; MAGA8; ENSG00000156009; Melanoma-associated antigen 8 (Cancer/testis antigen 1.8) (CT1.8) (MAGE-8 antigen)
EVDPAGHSY

SEQ ID NO: 103791 - protein, 10 aa, Homo sapiens
  misc_feature (1)..(10): Table A1; Target 949; HLA-A*01:01; V9GYJ5; ENSG00000188611; Neutral ceramidase (Fragment)
NSDNVGYASY

SEQ ID NO: 103792 - protein, 10 aa, Homo sapiens
  misc_feature (1)..(10): Table A1; Target 950; HLA-A*26:01; V9GYJ5; ENSG00000188611; Neutral ceramidase (Fragment)
QVADINLMGY

SEQ ID NO: 103793 - protein, 9 aa, Homo sapiens
  misc_feature (1)..(9): Table A1; Target 951; HLA-B*46:01; BHE23; ENSG00000125533; Class E basic helix-loop-helix protein 23 (bHLHe23) (Class B basic helix-loop-helix protein 4) (bHLHb4)
AAAAAGLAY

SEQ ID NO: 103794 - protein, 10 aa, Homo sapiens
  misc_feature (1)..(10): Table A1; Target 952; HLA-A*11:01; RNF17; ENSG00000132972; RING finger protein 17 (Tudor domain-containing protein 4)
KTADIISEQK

SEQ ID NO: 103795 - protein, 9 aa, Homo sapiens
  misc_feature (1)..(9): Table A1; Target 953; HLA-A*11:01; DDX4ENSG00000152670; Probable ATP-dependent RNA helicase DDX4 (EC 3.6.4.13) (DEAD box protein 4) (Vasa homolog)
QTLNNNIAK

SEQ ID NO: 103796 - protein, 9 aa, Homo sapiens
  misc_feature (1)..(9): Table A1; Target 954; HLA-C*02:02; AXDN1; ENSG00000162779; Axonemal dynein light chain domain-containing protein 1
GEMPSERQY

SEQ ID NO: 103797 - protein, 10 aa, Homo sapiens
  misc_feature (1)..(10): Table A1; Target 955; HLA-A*03:01; ACHA9; ENSG00000174343; Neuronal acetylcholine receptor subunit alpha-9 (Nicotinic acetylcholine receptor subunit alpha-9) (NACHR alpha-9)
ITWDAPAITK

SEQ ID NO: 103798 - protein, 9 aa, Homo sapiens
  misc_feature (1)..(9): Table A1; Target 956; HLA-B*51:01; CF010; ENSG00000204296; Uncharacterized protein C6orf10
LPQGSMSSI

SEQ ID NO: 103799 - protein, 10 aa, Homo sapiens
  misc_feature (1)..(10): Table A1; Target 957; HLA-B*44:03; CF010; ENSG00000204296; Uncharacterized protein C6orf10
SEQSARLLDY

SEQ ID NO: 103800 - protein, 9 aa, Homo sapiens
  misc_feature (1)..(9): Table A1; Target 958; HLA-A*11:01; M4A18; ENSG00000214782; Membrane-spanning 4-domains subfamily A member 18
ASFTSFNPK

SEQ ID NO: 103801 - protein, 9 aa, Homo sapiens
  misc_feature (1)..(9): Table A1; Target 959; HLA-C*01:02; M4A18; ENSG00000214782; Membrane-spanning 4-domains subfamily A member 18
QYPVGTASL

SEQ ID NO: 103802 - protein, 9 aa, Homo sapiens
  misc_feature (1)..(9): Table A1; Target 960; HLA-C*02:02; MORC1; ENSG00000114487; MORC family CW-type zinc finger protein 1 (Cancer/testis antigen 33) (CT33)
QEFLNVQEY

SEQ ID NO: 103803 - protein, 8 aa, Homo sapiens
  misc_feature (1)..(8): Table A1; Target 961; HLA-C*16:01; TRI51; ENSG00000124900; Tripartite motif-containing protein 51 (SPRY domain-containing protein 5)
IEAIRAEY

SEQ ID NO: 103804 - protein, 9 aa, Homo sapiens
  misc_feature (1)..(9): Table A1; Target 962; HLA-C*01:02; CA094; ENSG00000142698; Uncharacterized protein C1orf94
SSPEGTREL

SEQ ID NO: 103805 - protein, 9 aa, Homo sapiens
  misc_feature (1)..(9): Table A1; Target 963; HLA-A*11:01; WNT9B; ENSG00000158955; Protein Wnt-9b (Protein Wnt-14b) (Protein Wnt-15)
AVSSAALTH

SEQ ID NO: 103806 - protein, 9 aa, Homo sapiens
  misc_feature (1)..(9): Table A1; Target 964; HLA-A*11:01; OVCH1; ENSG00000187950; Ovochymase-1 (EC 3.4.21.-)
GTLAMILTK

SEQ ID NO: 103807 - protein, 11 aa, Homo sapiens
  misc_feature (1)..(11): Table A1; Target 965; HLA-A*03:01; OVCH1; ENSG00000187950; Ovochymase-1 (EC 3.4.21.-)
SVYDNVRSVGK

SEQ ID NO: 103808 - protein, 11 aa, Homo sapiens
  misc_feature (1)..(11): Table A1; Target 966; HLA-A*11:01; OVCH1; ENSG00000187950; Ovochymase-1 (EC 3.4.21.-)
SVYDNVRSVGK

SEQ ID NO: 103809 - protein, 10 aa, Homo sapiens
  misc_feature (1)..(10): Table A1; Target 967; HLA-A*29:02; OVCH1; ENSG00000187950; Ovochymase-1 (EC 3.4.21.-)
YMSPDIALLY

SEQ ID NO: 103810 - protein, 9 aa, Homo sapiens
  misc_feature (1)..(9): Table A1; Target 968; HLA-B*35:01; CRBA1; ENSG00000108255; Beta-crystallin A3 [Cleaved into: Beta-crystallin A3, isoform A1, Delta4 form; Beta-crystallin A3, isoform A1, Delta7 form; Beta-crystallin A3, isoform A1, Delta8 form]
DAWSGSNAY

SEQ ID NO: 103811 - protein, 9 aa, Homo sapiens
  misc_feature (1)..(9): Table A1; Target 969; HLA-B*44:03; AMELX; ENSG00000125363; Amelogenin, X isoform
YEVLTPLKW

SEQ ID NO: 103812 - protein, 9 aa, Homo sapiens
  misc_feature (1)..(9): Table A1; Target 970; HLA-B*35:01; CSTL1; ENSG00000125823; Cystatin-like 1 (RCET11)
NASNDTYLY

SEQ ID NO: 103813 - protein, 9 aa, Homo sapiens
  misc_feature (1)..(9): Table A1; Target 971; HLA-B*44:03; RHXF2; ENSG00000131721; Rhox homeobox family member 2 (Paired-like homeobox protein PEPP-2) (Testis homeobox gene 1)
AEAITAPLF

SEQ ID NO: 103814 - protein, 9 aa, Homo sapiens
  misc_feature (1)..(9): Table A1; Target 972; HLA-C*02:02; RHXF2; ENSG00000131721; Rhox homeobox family member 2 (Paired-like homeobox protein PEPP-2) (Testis homeobox gene 1)
AEAITAPLF

SEQ ID NO: 103815 - protein, 9 aa, Homo sapiens
  misc_feature (1)..(9): Table A1; Target 973; HLA-A*31:01; RHXF2; ENSG00000131721; Rhox homeobox family member 2 (Paired-like homeobox protein PEPP-2) (Testis homeobox gene 1)
AVQIWFENR

SEQ ID NO: 103816 - protein, 10 aa, Homo sapiens
  misc_feature (1)..(10): Table A1; Target 974; HLA-A*02:07; RHXF2; ENSG00000131721; Rhox homeobox family member 2 (Paired-like homeobox protein PEPP-2) (Testis homeobox gene 1)
IVPSFTFPNV

SEQ ID NO: 103817 - protein, 10 aa, Homo sapiens
  misc_feature (1)..(10): Table A1; Target 975; HLA-A*01:01; RHXF2; ENSG00000131721; Rhox homeobox family member 2 (Paired-like homeobox protein PEPP-2) (Testis homeobox gene 1)
QSEKEPGQQY

SEQ ID NO: 103818 - protein, 9 aa, Homo sapiens
  misc_feature (1)..(9): Table A1; Target 976; HLA-B*44:03; RHXF2; ENSG00000131721; Rhox homeobox family member 2 (Paired-like homeobox protein PEPP-2) (Testis homeobox gene 1)
SEKEPGQQY

SEQ ID NO: 103819 - protein, 9 aa, Homo sapiens
  misc_feature (1)..(9): Table A1; Target 977; HLA-C*02:02; RHXF2; ENSG00000131721; Rhox homeobox family member 2 (Paired-like homeobox protein PEPP-2) (Testis homeobox gene 1)
SEKEPGQQY

SEQ ID NO: 103820 - protein, 9 aa, Homo sapiens
  misc_feature (1)..(9): Table A1; Target 978; HLA-B*35:01; NYAP2; ENSG00000144460; Neuronal tyrosine-phosphorylated phosphoinositide-3-kinase adapter 2
LPVLENVSY

SEQ ID NO: 103821 - protein, 9 aa, Homo sapiens
  misc_feature (1)..(9): Table A1; Target 979; HLA-B*35:01; NYAP2; ENSG00000144460; Neuronal tyrosine-phosphorylated phosphoinositide-3-kinase adapter 2
MVNAAVNTY

SEQ ID NO: 103822 - protein, 9 aa, Homo sapiens
  misc_feature (1)..(9): Table A1; Target 980; HLA-A*02:01; SUN3ENSG00000164744; SUN domain-containing protein 3 (Sad1/unc-84 domain-containing protein 1)
FLIEQIDVL

SEQ ID NO: 103823 - protein, 10 aa, Homo sapiens
  misc_feature (1)..(10): Table A1; Target 981; HLA-A*24:02; ZPLD1; ENSG00000170044; Zona pellucida-like domain-containing protein 1 (ZP domain-containing protein 1)
SYLPGLLYKF

SEQ ID NO: 103824 - protein, 9 aa, Homo sapiens
  misc_feature (1)..(9): Table A1; Target 982; HLA-A*24:02; TEX19; ENSG00000182459; Testis-expressed protein 19
LYASWMYQL

SEQ ID NO: 103825 - protein, 9 aa, Homo sapiens
  misc_feature (1)..(9): Table A1; Target 983; HLA-A*11:01; KCNH7; ENSG00000184611; Potassium voltage-gated channel subfamily H member 7 (Ether-a-go-go-related gene potassium channel 3) (ERG-3)
  misc_feature (1)..(9): (Eag-related protein 3) (Ether-a-go-go-related protein 3) (hERG-3) (Voltage-gated potassium channel subunit Kv11.3)
AAGIIVIAK

SEQ ID NO: 103826 - protein, 10 aa, Homo sapiens
  misc_feature (1)..(10): Table A1; Target 984; HLA-A*11:01; KCNH7; ENSG00000184611; Potassium voltage-gated channel subfamily H member 7 (Ether-a-go-go-related gene potassium channel 3)
  misc_feature (1)..(10): (ERG-3) (Eag-related protein 3) (Ether-a-go-go-related protein 3) (hERG-3) (Voltage-gated potassium channel subunit Kv11.3)
HVSDPGLPGK

SEQ ID NO: 103827 - protein, 9 aa, Homo sapiens
  misc_feature (1)..(9): Table A1; Target 985; HLA-A*29:02; KCNH7; ENSG00000184611; Potassium voltage-gated channel subfamily H member 7 (Ether-a-go-go-related gene potassium channel 3)
  misc_feature (1)..(9): (ERG-3) (Eag-related protein 3) (Ether-a-go-go-related protein 3) (hERG-3) (Voltage-gated potassium channel subunit Kv11.3)
IFGEMVHLY

SEQ ID NO: 103828 - protein, 10 aa, Homo sapiens
  misc_feature (1)..(10): Table A1; Target 986; HLA-A*11:01; KCNH7; ENSG00000184611; Potassium voltage-gated channel subfamily H member 7 (Ether-a-go-go-related gene potassium channel 3) (ERG-3)
  misc_feature (1)..(10): (Eag-related protein 3) (Ether-a-go-go-related protein 3) (hERG-3) (Voltage-gated potassium channel subunit Kv11.3)
IVDSSPGIGK

SEQ ID NO: 103829 - protein, 9 aa, Homo sapiens
  misc_feature (1)..(9): Table A1; Target 987; HLA-A*01:01; KCNH7; ENSG00000184611; Potassium voltage-gated channel subfamily H member 7 (Ether-a-go-go-related gene potassium channel 3)
  misc_feature (1)..(9): (ERG-3) (Eag-related protein 3) (Ether-a-go-go-related protein 3) (hERG-3) (Voltage-gated potassium channel subunit Kv11.3)
TSDSNLNKY

SEQ ID NO: 103830 - protein, 9 aa, Homo sapiens
  misc_feature (1)..(9): Table A1; Target 988; HLA-A*11:01; KCNH7; ENSG00000184611; Potassium voltage-gated channel subfamily H member 7 (Ether-a-go-go-related gene potassium channel 3)
  misc_feature (1)..(9): (ERG-3) (Eag-related protein 3) (Ether-a-go-go-related protein 3) (hERG-3) (Voltage-gated potassium channel subunit Kv11.3)
VSDPGLPGK

SEQ ID NO: 103831 - protein, 11 aa, Homo sapiens
  misc_feature (1)..(11): Table A1; Target 989; HLA-B*44:03; C9J420; ENSG00000186038; 5-hydroxytryptamine receptor 3E (Fragment)
AEAELTGGSEW

SEQ ID NO: 103832 - protein, 9 aa, Homo sapiens
  misc_feature (1)..(9): Table A1; Target 990; HLA-B*51:01; C9J420; ENSG00000186038; 5-hydroxytryptamine receptor 3E (Fragment)
LPTSGTPLI

SEQ ID NO: 103833 - protein, 9 aa, Homo sapiens
  misc_feature (1)..(9): Table A1; Target 991; HLA-B*35:01; C9J420; ENSG00000186038; 5-hydroxytryptamine receptor 3E (Fragment)
VPTQVNISF

SEQ ID NO: 103834 - protein, 9 aa, Homo sapiens
  misc_feature (1)..(9): Table A1; Target 992; HLA-A*03:01; S22AO; ENSG00000197658; Solute carrier family 22 member 24
SVSGLVLSH

SEQ ID NO: 103835 - protein, 11 aa, Homo sapiens
  misc_feature (1)..(11): Table A1; Target 993; HLA-C*02:02; MAGB1; ENSG00000214107; Melanoma-associated antigen B1 (Cancer/testis antigen 3.1) (CT3.1) (DSS-AHC critical interval MAGE superfamily 10) (DAM10) (MAGE-B1 antigen) (MAGE-XP antigen)
TESSVKDPVAW

SEQ ID NO: 103836 - protein, 11 aa, Homo sapiens
  misc_feature (1)..(11): Table A1; Target 994; HLA-A*03:01; NOBOX; ENSG00000106410; Homeobox protein NOBOX
RSYSPAPGKQK

SEQ ID NO: 103837 - protein, 11 aa, Homo sapiens
  misc_feature (1)..(11): Table A1; Target 995; HLA-B*35:01; R113B; ENSG00000139797; RING finger protein 113B (Zinc finger protein 183-like 1)
EAAPESLDVVY

SEQ ID NO: 103838 - protein, 11 aa, Homo sapiens
  misc_feature (1)..(11): Table A1; Target 996; HLA-A*29:02; KCNH5; ENSG00000140015; Potassium voltage-gated channel subfamily H member 5 (Ether-a-go-go potassium channel 2) (hEAG2) (Voltage-gated potassium channel subunit Kv10.2)
LALSIGTPYRY

SEQ ID NO: 103839 - protein, 9 aa, Homo sapiens
  misc_feature (1)..(9): Table A1; Target 997; HLA-B*51:01; KCNH5; ENSG00000140015; Potassium voltage-gated channel subfamily H member 5 (Ether-a-go-go potassium channel 2) (hEAG2) (Voltage-gated potassium channel subunit Kv10.2)
MPLQVPPQI

SEQ ID NO: 103840 - protein, 9 aa, Homo sapiens
  misc_feature (1)..(9): Table A1; Target 998; HLA-A*31:01; GBX1ENSG00000164900; Homeobox protein GBX-1 (Gastrulation and brain-specific homeobox protein 1)
QVKIWFQNR

SEQ ID NO: 103841 - protein, 9 aa, Homo sapiens
  misc_feature (1)..(9): Table A1; Target 999; HLA-B*51:01; SG1D1; ENSG00000168515; Secretoglobin family 1D member 1 (Lipophilin-A)
MAYEKRVLI

SEQ ID NO: 103842 - protein, 9 aa, Homo sapiens
  misc_feature (1)..(9): Table A1; Target 1000; HLA-A*24:02; NKAI3; ENSG00000185942; Sodium/potassium-transporting ATPase subunit beta-1-interacting protein 3 (Na(+)/K(+)-transporting ATPase subunit beta-1-interacting protein 3) (Protein FAM77D)
VYTVWTALW

SEQ ID NO: 103843 - protein, 10 aa, Homo sapiens
  misc_feature (1)..(10): Table A1; Target 1001; HLA-B*44:03; MAGA1; ENSG00000198681; Melanoma-associated antigen 1 (Antigen MZ2-E) (Cancer/testis antigen 1.1) (CT1.1) (MAGE-1 antigen)
KEADPTGHSY

SEQ ID NO: 103844 - protein, 9 aa, Homo sapiens
  misc_feature (1)..(9): Table A1; Target 1002; HLA-A*11:01; SKOR2; ENSG00000215474; SKI family transcriptional corepressor 2 (Functional Smad-suppressing element on chromosome 18) (Fussel-18) (LBX1 corepressor 1-like protein) (Ladybird homeobox corepressor 1-like protein)
GSFGGVLQK

SEQ ID NO: 103845 - protein, 8 aa, Homo sapiens
  misc_feature (1)..(8): Table A1; Target 1003; HLA-B*51:01; SKOR2; ENSG00000215474; SKI family transcriptional corepressor 2 (Functional Smad-suppressing element on chromosome 18) (Fussel-18) (LBX1 corepressor 1-like protein) (Ladybird homeobox corepressor 1-like protein)
IPYAASLI

SEQ ID NO: 103846 - protein, 9 aa, Homo sapiens
  misc_feature (1)..(9): Table A1; Target 1004; HLA-A*02:07; A0A1B0GTN1; ENSG00000224960; Putative SMEK homolog 3
FLYEVFAQL

SEQ ID NO: 103847 - protein, 9 aa, Homo sapiens
  misc_feature (1)..(9): Table A1; Target 1005; HLA-C*16:01; PTX4ENSG00000251692; Pentraxin-4;
NASTRNVVF

SEQ ID NO: 103848 - protein, 9 aa, Homo sapiens
  misc_feature (1)..(9): Table A1; Target 1006; HLA-A*11:01; ZP4 ENSG00000116996; Zona pellucida sperm-binding protein 4 (Zona pellucida glycoprotein 4) (Zp-4) (Zona pellucida protein B) [Cleaved into: Processed zona pellucida sperm-binding protein 4]
QTQLIPVQK

SEQ ID NO: 103849 - protein, 10 aa, Homo sapiens
  misc_feature (1)..(10): Table A1; Target 1007; HLA-B*44:03; Q5T1N2; ENSG00000162641; Protein AKNAD1
AEDLAKAQRW

SEQ ID NO: 103850 - protein, 10 aa, Homo sapiens
  misc_feature (1)..(10): Table A1; Target 1008; HLA-A*11:01; Q5T1N2; ENSG00000162641; Protein AKNAD1
KSYQGQSPQK

SEQ ID NO: 103851 - protein, 10 aa, Homo sapiens
  misc_feature (1)..(10): Table A1; Target 1009; HLA-B*51:01; Q5T1N2; ENSG00000162641; Protein AKNAD1
LPYDGDLSQI

SEQ ID NO: 103852 - protein, 9 aa, Homo sapiens
  misc_feature (1)..(9): Table A1; Target 1010; HLA-A*11:01; Q5T1N2; ENSG00000162641; Protein AKNAD1
SSSSYIFQK

SEQ ID NO: 103853 - protein, 9 aa, Homo sapiens
  misc_feature (1)..(9): Table A1; Target 1011; HLA-B*44:03; ESPB1; ENSG00000169393; Epididymal sperm-binding protein 1 (Epididymal secretory protein 12) (hE12)
MEDESNKLW

SEQ ID NO: 103854 - protein, 9 aa, Homo sapiens
  misc_feature (1)..(9): Table A1; Target 1012; HLA-A*29:02; ZFP42; ENSG00000179059; Zinc finger protein 42 homolog (Zfp-42) (Reduced expression protein 1) (REX-1) (hREX-1) (Zinc finger protein 754)
IVGENSLEY

SEQ ID NO: 103855 - protein, 9 aa, Homo sapiens
  misc_feature (1)..(9): Table A1; Target 1013; HLA-B*51:01; PSG9ENSG00000183668; Pregnancy-specific beta-1-glycoprotein 9 (PS-beta-G-9) (PSBG-9) (Pregnancy-specific glycoprotein 9) (PS34) (Pregnancy-specific beta-1 glycoprotein B)
  misc_feature (1)..(9): (PS-beta-B) (Pregnancy-specific beta-1-glycoprotein 11) (PS-beta-G-11) (PSBG-11) (Pregnancy-specific glycoprotein 11) (Pregnancy-specific glycoprotein 7) (PSG7)
LPKLPIPYI

SEQ ID NO: 103856 - protein, 10 aa, Homo sapiens
  misc_feature (1)..(10): Table A1; Target 1014; HLA-B*44:03; ACHB4; ENSG00000117971; Neuronal acetylcholine receptor subunit beta-4
QEWTDYRLTW

SEQ ID NO: 103857 - protein, 9 aa, Homo sapiens
  misc_feature (1)..(9): Table A1; Target 1015; HLA-B*46:01; NKX24; ENSG00000125816; Homeobox protein Nkx-2.4 (Homeobox protein NK-2 homolog D)
AAAAAAATY

SEQ ID NO: 103858 - protein, 9 aa, Homo sapiens
  misc_feature (1)..(9): Table A1; Target 1016; HLA-B*51:01; SPI2A; ENSG00000147059; Spindlin-2A (Protein DXF34) (Spindlin-like protein 2A) (SPIN-2) (SPIN-2A)
DANLANTII

SEQ ID NO: 103859 - protein, 8 aa, Homo sapiens
  misc_feature (1)..(8): Table A1; Target 1017; HLA-B*51:01; SPI2A; ENSG00000147059; Spindlin-2A (Protein DXF34) (Spindlin-like protein 2A) (SPIN-2) (SPIN-2A)
DANLANTI

SEQ ID NO: 103860 - protein, 10 aa, Homo sapiens
  misc_feature (1)..(10): Table A1; Target 1018; HLA-B*44:03; SPI2A; ENSG00000147059; Spindlin-2A (Protein DXF34) (Spindlin-like protein 2A) (SPIN-2) (SPIN-2A)
KEGDEPITQW

SEQ ID NO: 103861 - protein, 9 aa, Homo sapiens
  misc_feature (1)..(9): Table A1; Target 1019; HLA-B*51:01; SL9C1; ENSG00000172139; Sodium/hydrogen exchanger 10 (Na(+)/H(+) exchanger 10) (NHE-10) (Solute carrier family 9 member 10) (Solute carrier family 9 member C1) (Sperm-specific Na(+)/H(+) exchanger) (sNHE)
DPMLTAAAI

SEQ ID NO: 103862 - protein, 8 aa, Homo sapiens
  misc_feature (1)..(8): Table A1; Target 1020; HLA-B*18:01; SL9C1; ENSG00000172139; Sodium/hydrogen exchanger 10 (Na(+)/H(+) exchanger 10) (NHE-10) (Solute carrier family 9 member 10) (Solute carrier family 9 member C1) (Sperm-specific Na(+)/H(+) exchanger) (sNHE)
EEFEHVGY

SEQ ID NO: 103863 - protein, 8 aa, Homo sapiens
  misc_feature (1)..(8): Table A1; Target 1021; HLA-B*51:01; SL9C1; ENSG00000172139; Sodium/hydrogen exchanger 10 (Na(+)/H(+) exchanger 10) (NHE-10) (Solute carrier family 9 member 10) (Solute carrier family 9 member C1) (Sperm-specific Na(+)/H(+) exchanger) (sNHE)
FPIPVPVI

SEQ ID NO: 103864 - protein, 8 aa, Homo sapiens
  misc_feature (1)..(8): Table A1; Target 1022; HLA-B*18:01; SL9C1; ENSG00000172139; Sodium/hydrogen exchanger 10 (Na(+)/H(+) exchanger 10) (NHE-10) (Solute carrier family 9 member 10) (Solute carrier family 9 member C1) (Sperm-specific Na(+)/H(+) exchanger) (sNHE)
NETEVIVF

SEQ ID NO: 103865 - protein, 9 aa, Homo sapiens
  misc_feature (1)..(9): Table A1; Target 1023; HLA-B*44:03; SL9C1; ENSG00000172139; Sodium/hydrogen exchanger 10 (Na(+)/H(+) exchanger 10) (NHE-10) (Solute carrier family 9 member 10) (Solute carrier family 9 member C1) (Sperm-specific Na(+)/H(+) exchanger) (sNHE)
SESQKTVTF

SEQ ID NO: 103866 - protein, 9 aa, Homo sapiens
  misc_feature (1)..(9): Table A1; Target 1024; HLA-C*02:02; SL9C1; ENSG00000172139; Sodium/hydrogen exchanger 10 (Na(+)/H(+) exchanger 10) (NHE-10) (Solute carrier family 9 member 10) (Solute carrier family 9 member C1) (Sperm-specific Na(+)/H(+) exchanger) (sNHE)
SESQKTVTF

SEQ ID NO: 103867 - protein, 9 aa, Homo sapiens
  misc_feature (1)..(9): Table A1; Target 1025; HLA-B*35:01; VCX1ENSG00000182583; Variable charge X-linked protein 1 (Variable charge protein on X with ten repeats) (VCX-10r) (Variably charged protein X-B1) (VCX-B1)
EPLSVTAKY

SEQ ID NO: 103868 - protein, 9 aa, Homo sapiens
  misc_feature (1)..(9): Table A1; Target 1026; HLA-C*02:02; NPSR1; ENSG00000187258; Neuropeptide S receptor (G-protein coupled receptor 154) (G-protein coupled receptor PGR14) (G-protein coupled receptor for asthma susceptibility)
TEVVEGKEW

SEQ ID NO: 103869 - protein, 9 aa, Homo sapiens
  misc_feature (1)..(9): Table A1; Target 1027; HLA-A*24:02; E5RK72; ENSG00000215262; Potassium channel subfamily U member 1
VYLPKIPSW

SEQ ID NO: 103870 - protein, 8 aa, Homo sapiens
  misc_feature (1)..(8): Table A1; Target 1028; HLA-B*51:01; CRSPL; ENSG00000101074; Peptidase inhibitor R3HDML (Cysteine-rich secretory protein R3HDML)
MPLLPSTV

SEQ ID NO: 103871 - protein, 11 aa, Homo sapiens
  misc_feature (1)..(11): Table A1; Target 1029; HLA-A*29:02; MROH9; ENSG00000117501; Maestro heat-like repeat-containing protein family member 9
NFPQFPETLSY

SEQ ID NO: 103872 - protein, 9 aa, Homo sapiens
  misc_feature (1)..(9): Table A1; Target 1030; HLA-B*18:01; NDST4; ENSG00000138653; Bifunctional heparan sulfate N-deacetylase/N-sulfotransferase 4 (EC 2.8.2.8) (Glucosaminyl N-deacetylase/N-sulfotransferase 4) (NDST-4)
  misc_feature (1)..(9): (N-heparan sulfate sulfotransferase 4) (N-HSST 4) [Includes: Heparan sulfate N-deacetylase 4 (EC 3.-.-.-); Heparan sulfate N-sulfotransferase 4 (EC 2.8.2.-)]
NESSLVEQM

SEQ ID NO: 103873 - protein, 9 aa, Homo sapiens
  misc_feature (1)..(9): Table A1; Target 1031; HLA-A*11:01; SHP1L; ENSG00000157060; Testicular spindle-associated protein SHCBP1L (SHC SH2 domain-binding protein 1-like protein)
KTITHIVAK

SEQ ID NO: 103874 - protein, 9 aa, Homo sapiens
  misc_feature (1)..(9): Table A1; Target 1032; HLA-A*02:07; SHP1L; ENSG00000157060; Testicular spindle-associated protein SHCBP1L (SHC SH2 domain-binding protein 1-like protein)
LVDEILEEL

SEQ ID NO: 103875 - protein, 11 aa, Homo sapiens
  misc_feature (1)..(11): Table A1; Target 1033; HLA-A*11:01; SP7 ENSG00000170374; Transcription factor Sp7 (Zinc finger protein osterix)
GTQDPGLLVPK

SEQ ID NO: 103876 - protein, 9 aa, Homo sapiens
  misc_feature (1)..(9): Table A1; Target 1034; HLA-B*44:03; XKR3ENSG00000172967; XK-related protein 3 (X Kell blood group-related 3) (XTES)
EEIVLGQRL

SEQ ID NO: 103877 - protein, 9 aa, Homo sapiens
  misc_feature (1)..(9): Table A1; Target 1035; HLA-A*26:01; XKR3ENSG00000172967; XK-related protein 3 (X Kell blood group-related 3) (XTES)
EVISRVVTL

SEQ ID NO: 103878 - protein, 9 aa, Homo sapiens
  misc_feature (1)..(9): Table A1; Target 1036; HLA-A*11:01; FGF16; ENSG00000196468; Fibroblast growth factor 16 (FGF-16)
NTYASTLYK

SEQ ID NO: 103879 - protein, 9 aa, Homo sapiens
  misc_feature (1)..(9): Table A1; Target 1037; HLA-A*26:01; TRPC7; ENSG00000069018; Short transient receptor potential channel 7 (TrpC7) (Transient receptor protein 7) (TRP-7) (hTRP7)
EVISVVLKY

SEQ ID NO: 103880 - protein, 9 aa, Homo sapiens
  misc_feature (1)..(9): Table A1; Target 1038; HLA-A*29:02; TRPC7; ENSG00000069018; Short transient receptor potential channel 7 (TrpC7) (Transient receptor protein 7) (TRP-7) (hTRP7)
EVISVVLKY

SEQ ID NO: 103881 - protein, 9 aa, Homo sapiens
  misc_feature (1)..(9): Table A1; Target 1039; HLA-B*18:01; TRPC7; ENSG00000069018; Short transient receptor potential channel 7 (TrpC7) (Transient receptor protein 7) (TRP-7) (hTRP7)
IETEFKNDY

SEQ ID NO: 103882 - protein, 9 aa, Homo sapiens
  misc_feature (1)..(9): Table A1; Target 1040; HLA-B*44:02; RHXF2; ENSG00000131721; Rhox homeobox family member 2 (Paired-like homeobox protein PEPP-2) (Testis homeobox gene 1)
SEKEPGQQY

SEQ ID NO: 103883 - protein, 9 aa, Homo sapiens
  misc_feature (1)..(9): Table A1; Target 1041; HLA-A*29:02; NDST4; ENSG00000138653; Bifunctional heparan sulfate N-deacetylase/N-sulfotransferase 4 (EC 2.8.2.8) (Glucosaminyl N-deacetylase/N-sulfotransferase 4) (NDST-4)
  misc_feature (1)..(9): (N-heparan sulfate sulfotransferase 4) (N-HSST 4) [Includes: Heparan sulfate N-deacetylase 4 (EC 3.-.-.-); Heparan sulfate N-sulfotransferase 4 (EC 2.8.2.-)]
IVISAYFLY

SEQ ID NO: 103884 - protein, 9 aa, Homo sapiens
  misc_feature (1)..(9): Table A1; Target 1042; HLA-A*02:07; NDST4; ENSG00000138653; Bifunctional heparan sulfate N-deacetylase/N-sulfotransferase 4 (EC 2.8.2.8) (Glucosaminyl N-deacetylase/N-sulfotransferase 4) (NDST-4)
  misc_feature (1)..(9): (N-heparan sulfate sulfotransferase 4) (N-HSST 4) [Includes: Heparan sulfate N-deacetylase 4 (EC 3.-.-.-); Heparan sulfate N-sulfotransferase 4 (EC 2.8.2.-)]
VMDEVQKFL

SEQ ID NO: 103885 - protein, 11 aa, Homo sapiens
  misc_feature (1)..(11): Table A1; Target 1043; HLA-A*29:02; X6R6V8; ENSG00000143552; Nuclear pore membrane glycoprotein 210-like
AFPHHPMGMLY

SEQ ID NO: 103886 - protein, 10 aa, Homo sapiens
  misc_feature (1)..(10): Table A1; Target 1044; HLA-A*11:01; X6R6V8; ENSG00000143552; Nuclear pore membrane glycoprotein 210-like
ASMSVTPVYK

SEQ ID NO: 103887 - protein, 9 aa, Homo sapiens
  misc_feature (1)..(9): Table A1; Target 1045; HLA-A*30:02; X6R6V8; ENSG00000143552; Nuclear pore membrane glycoprotein 210-like
ASMSVTPVY

SEQ ID NO: 103888 - protein, 8 aa, Homo sapiens
  misc_feature (1)..(8): Table A1; Target 1046; HLA-B*18:01; X6R6V8; ENSG00000143552; Nuclear pore membrane glycoprotein 210-like
DEVQILVF

SEQ ID NO: 103889 - protein, 11 aa, Homo sapiens
  misc_feature (1)..(11): Table A1; Target 1047; HLA-A*33:01; X6R6V8; ENSG00000143552; Nuclear pore membrane glycoprotein 210-like
DVINSIEIVSR

SEQ ID NO: 103890 - protein, 11 aa, Homo sapiens
  misc_feature (1)..(11): Table A1; Target 1048; HLA-A*26:01; X6R6V8; ENSG00000143552; Nuclear pore membrane glycoprotein 210-like
ETFSLVEGSGY

SEQ ID NO: 103891 - protein, 9 aa, Homo sapiens
  misc_feature (1)..(9): Table A1; Target 1049; HLA-A*33:01; X6R6V8; ENSG00000143552; Nuclear pore membrane glycoprotein 210-like
EYSENYILR

SEQ ID NO: 103892 - protein, 9 aa, Homo sapiens
  misc_feature (1)..(9): Table A1; Target 1050; HLA-A*24:02; X6R6V8; ENSG00000143552; Nuclear pore membrane glycoprotein 210-like
FYNSIGEKF

SEQ ID NO: 103893 - protein, 11 aa, Homo sapiens
  misc_feature (1)..(11): Table A1; Target 1051; HLA-B*35:01; X6R6V8; ENSG00000143552; Nuclear pore membrane glycoprotein 210-like
HPASMSVTPVY

SEQ ID NO: 103894 - protein, 8 aa, Homo sapiens
  misc_feature (1)..(8): Table A1; Target 1052; HLA-B*18:01; X6R6V8; ENSG00000143552; Nuclear pore membrane glycoprotein 210-like
IEIPIAMY

SEQ ID NO: 103895 - protein, 9 aa, Homo sapiens
  misc_feature (1)..(9): Table A1; Target 1053; HLA-A*02:01; X6R6V8; ENSG00000143552; Nuclear pore membrane glycoprotein 210-like
ILDDKTAMV

SEQ ID NO: 103896 - protein, 9 aa, Homo sapiens
  misc_feature (1)..(9): Table A1; Target 1054; HLA-A*02:07; X6R6V8; ENSG00000143552; Nuclear pore membrane glycoprotein 210-like
ILDDKTAMV

SEQ ID NO: 103897 - protein, 9 aa, Homo sapiens
  misc_feature (1)..(9): Table A1; Target 1055; HLA-A*01:01; X6R6V8; ENSG00000143552; Nuclear pore membrane glycoprotein 210-like
ISDNLRITY

SEQ ID NO: 103898 - protein, 9 aa, Homo sapiens
  misc_feature (1)..(9): Table A1; Target 1056; HLA-A*11:01; X6R6V8; ENSG00000143552; Nuclear pore membrane glycoprotein 210-like
IVTGVGVAR

SEQ ID NO: 103899 - protein, 11 aa, Homo sapiens
  misc_feature (1)..(11): Table A1; Target 1057; HLA-A*24:02; X6R6V8; ENSG00000143552; Nuclear pore membrane glycoprotein 210-like
IYNHPDVKETF

SEQ ID NO: 103900 - protein, 9 aa, Homo sapiens
  misc_feature (1)..(9): Table A1; Target 1058; HLA-A*24:02; X6R6V8; ENSG00000143552; Nuclear pore membrane glycoprotein 210-like
KYLESSATF

SEQ ID NO: 103901 - protein, 9 aa, Homo sapiens
  misc_feature (1)..(9): Table A1; Target 1059; HLA-B*51:01; X6R6V8; ENSG00000143552; Nuclear pore membrane glycoprotein 210-like
LPFHADVEI

SEQ ID NO: 103902 - protein, 9 aa, Homo sapiens
  misc_feature (1)..(9): Table A1; Target 1060; HLA-A*02:01; X6R6V8; ENSG00000143552; Nuclear pore membrane glycoprotein 210-like
LQTDIVTGV

SEQ ID NO: 103903 - protein, 9 aa, Homo sapiens
  misc_feature (1)..(9): Table A1; Target 1061; HLA-B*35:01; X6R6V8; ENSG00000143552; Nuclear pore membrane glycoprotein 210-like
NASLTSIIY

SEQ ID NO: 103904 - protein, 9 aa, Homo sapiens
  misc_feature (1)..(9): Table A1; Target 1062; HLA-A*02:01; X6R6V8; ENSG00000143552; Nuclear pore membrane glycoprotein 210-like
QLASAIVTL

SEQ ID NO: 103905 - protein, 9 aa, Homo sapiens
  misc_feature (1)..(9): Table A1; Target 1063; HLA-A*11:01; X6R6V8; ENSG00000143552; Nuclear pore membrane glycoprotein 210-like
QTNLVFVHK

SEQ ID NO: 103906 - protein, 9 aa, Homo sapiens
  misc_feature (1)..(9): Table A1; Target 1064; HLA-A*11:01; X6R6V8; ENSG00000143552; Nuclear pore membrane glycoprotein 210-like
QTTLVAIAK

SEQ ID NO: 103907 - protein, 9 aa, Homo sapiens
  misc_feature (1)..(9): Table A1; Target 1065; HLA-B*44:03; X6R6V8; ENSG00000143552; Nuclear pore membrane glycoprotein 210-like
SEAVVVRAM

SEQ ID NO: 103908 - protein, 10 aa, Homo sapiens
  misc_feature (1)..(10): Table A1; Target 1066; HLA-B*18:01; X6R6V8; ENSG00000143552; Nuclear pore membrane glycoprotein 210-like
SEQGVVTITY

SEQ ID NO: 103909 - protein, 10 aa, Homo sapiens
  misc_feature (1)..(10): Table A1; Target 1067; HLA-B*44:02; X6R6V8; ENSG00000143552; Nuclear pore membrane glycoprotein 210-like
SEQGVVTITY

SEQ ID NO: 103910 - protein, 10 aa, Homo sapiens
  misc_feature (1)..(10): Table A1; Target 1068; HLA-B*44:03; X6R6V8; ENSG00000143552; Nuclear pore membrane glycoprotein 210-like
SEQGVVTITY

SEQ ID NO: 103911 - protein, 10 aa, Homo sapiens
  misc_feature (1)..(10): Table A1; Target 1069; HLA-C*02:02; X6R6V8; ENSG00000143552; Nuclear pore membrane glycoprotein 210-like
SEQGVVTITY

SEQ ID NO: 103912 - protein, 9 aa, Homo sapiens
  misc_feature (1)..(9): Table A1; Target 1070; HLA-A*02:01; X6R6V8; ENSG00000143552; Nuclear pore membrane glycoprotein 210-like
SLGHTLVTV

SEQ ID NO: 103913 - protein, 9 aa, Homo sapiens
  misc_feature (1)..(9): Table A1; Target 1071; HLA-A*26:01; X6R6V8; ENSG00000143552; Nuclear pore membrane glycoprotein 210-like
STASIFLAY

SEQ ID NO: 103914 - protein, 9 aa, Homo sapiens
  misc_feature (1)..(9): Table A1; Target 1072; HLA-A*29:02; X6R6V8; ENSG00000143552; Nuclear pore membrane glycoprotein 210-like
STASIFLAY

SEQ ID NO: 103915 - protein, 9 aa, Homo sapiens
  misc_feature (1)..(9): Table A1; Target 1073; HLA-B*35:01; X6R6V8; ENSG00000143552; Nuclear pore membrane glycoprotein 210-like
TPMEQQDEY

SEQ ID NO: 103916 - protein, 9 aa, Homo sapiens
  misc_feature (1)..(9): Table A1; Target 1074; HLA-A*29:02; X6R6V8; ENSG00000143552; Nuclear pore membrane glycoprotein 210-like
VFEKLQLFY

SEQ ID NO: 103917 - protein, 9 aa, Homo sapiens
  misc_feature (1)..(9): Table A1; Target 1075; HLA-A*24:02; X6R6V8; ENSG00000143552; Nuclear pore membrane glycoprotein 210-like
VYVITVDVF

SEQ ID NO: 103918 - protein, 9 aa, Homo sapiens
  misc_feature (1)..(9): Table A1; Target 1076; HLA-A*02:07; X6R6V8; ENSG00000143552; Nuclear pore membrane glycoprotein 210-like
YVDDSPLEL

SEQ ID NO: 103919 - protein, 9 aa, Homo sapiens
  misc_feature (1)..(9): Table A1; Target 1077; HLA-C*05:01; X6R6V8; ENSG00000143552; Nuclear pore membrane glycoprotein 210-like
YVDDSPLEL

SEQ ID NO: 103920 - protein, 9 aa, Homo sapiens
  misc_feature (1)..(9): Table A1; Target 1078; HLA-A*01:01; CNTP5; ENSG00000155052; Contactin-associated protein-like 5 (Cell recognition molecule Caspr5)
ETDALDIDY

SEQ ID NO: 103921 - protein, 10 aa, Homo sapiens
  misc_feature (1)..(10): Table A1; Target 1079; HLA-A*11:01; I22R2; ENSG00000164485; Interleukin-22 receptor subunit alpha-2 (IL-22 receptor subunit alpha-2) (IL-22R-alpha-2) (IL-22RA2) (Cytokine receptor class-II member 10)
  misc_feature (1)..(10): (Cytokine receptor family 2 member 10) (CRF2-10) (Cytokine receptor family type 2, soluble 1) (CRF2-S1) (Interleukin-22-binding protein) (IL-22BP) (IL22BP) (ZcytoR16)
GTQSTHESLK

SEQ ID NO: 103922 - protein, 10 aa, Homo sapiens
  misc_feature (1)..(10): Table A1; Target 1080; HLA-A*02:01; PASD1; ENSG00000166049; Circadian clock protein PASD1 (Cancer/testis antigen 63) (CT63) (OX-TES-1) (PAS domain-containing protein 1)
QLLDGFMITL

SEQ ID NO: 103923 - protein, 9 aa, Homo sapiens
  misc_feature (1)..(9): Table A1; Target 1081; HLA-A*01:01; GG6L2; ENSG00000174450; Golgin subfamily A member 6-like protein 2
KTELETALY

SEQ ID NO: 103924 - protein, 9 aa, Homo sapiens
  misc_feature (1)..(9): Table A1; Target 1082; HLA-B*51:01; GG6L2; ENSG00000174450; Golgin subfamily A member 6-like protein 2
LPPSLQSSL

SEQ ID NO: 103925 - protein, 11 aa, Homo sapiens
  misc_feature (1)..(11): Table A1; Target 1083; HLA-C*02:02; MAGBG; ENSG00000189023; Melanoma-associated antigen B16 (MAGE-B16 antigen)
AESPLEVPQSF

SEQ ID NO: 103926 - protein, 9 aa, Homo sapiens
  misc_feature (1)..(9): Table A1; Target 1084; HLA-B*46:01; SYCY2; ENSG00000244476; Syncytin-2 (Endogenous retrovirus group FRD member 1) (Envelope polyprotein)
  misc_feature (1)..(9): (HERV-FRD) (HERV-FRD; 6p24.1 provirus ancestral Env polyprotein) [Cleaved into: Surface protein (SU); Transmembrane protein (TM)]
AGMTIATSY

SEQ ID NO: 103927 - protein, 10 aa, Homo sapiens
  misc_feature (1)..(10): Table A1; Target 1085; HLA-A*24:02; ZAN ENSG00000146839; Zonadhesin;
VYGDPHYVTF

SEQ ID NO: 103928 - protein, 8 aa, Homo sapiens
  misc_feature (1)..(8): Table A1; Target 1086; HLA-A*29:02; S6A18; ENSG00000164363; Sodium-dependent neutral amino acid transporter B(0)AT3 (Sodium- and chloride-dependent transporter XTRP2) (Solute carrier family 6 member 18) (System B(0) neutral amino acid transporter AT3)
LFWKPLRY

SEQ ID NO: 103929 - protein, 9 aa, Homo sapiens
  misc_feature (1)..(9): Table A1; Target 1087; HLA-B*08:01; S100G; ENSG00000169906; Protein S100-G (Calbindin-D9k) (S100 calcium-binding protein G) (Vitamin D-dependent calcium-binding protein, intestinal) (CABP)
QVLVKKISQ

SEQ ID NO: 103930 - protein, 9 aa, Homo sapiens
  misc_feature (1)..(9): Table A1; Target 1088; HLA-B*27:02; KR204; ENSG00000206105; Putative keratin-associated protein 20-4
GRTVAVAEY

SEQ ID NO: 103931 - protein, 9 aa, Homo sapiens
  misc_feature (1)..(9): Table A1; Target 1089; HLA-B*51:01; CL071; ENSG00000214700; Uncharacterized protein C12orf71
DAPSKGPSI

SEQ ID NO: 103932 - protein, 9 aa, Homo sapiens
  misc_feature (1)..(9): Table A1; Target 1090; HLA-A*02:07; GFRA4; ENSG00000125861; GDNF family receptor alpha-4 (GDNF receptor alpha-4) (GDNFR-alpha-4) (GFR-alpha-4) (Persephin receptor)
YVDNVSARV

SEQ ID NO: 103933 - protein, 9 aa, Homo sapiens
  misc_feature (1)..(9): Table A1; Target 1091; HLA-A*01:01; LYZL2; ENSG00000151033; Lysozyme-like protein 2 (Lysozyme-2) (EC 3.2.1.17)
VLDDGSIDY

SEQ ID NO: 103934 - protein, 11 aa, Homo sapiens
  misc_feature (1)..(11): Table A1; Target 1092; HLA-A*30:02; CNTP5; ENSG00000155052; Contactin-associated protein-like 5 (Cell recognition molecule Caspr5)
AVFEAGTSVTY

SEQ ID NO: 103935 - protein, 9 aa, Homo sapiens
  misc_feature (1)..(9): Table A1; Target 1093; HLA-A*02:01; S6A18; ENSG00000164363; Sodium-dependent neutral amino acid transporter B(0)AT3 (Sodium- and chloride-dependent transporter XTRP2) (Solute carrier family 6 member 18) (System B(0) neutral amino acid transporter AT3)
FLIPYVIAL

SEQ ID NO: 103936 - protein, 10 aa, Homo sapiens
  misc_feature (1)..(10): Table A1; Target 1094; HLA-A*29:02; S7A13; ENSG00000164893; Solute carrier family 7 member 13 (Sodium-independent aspartate/glutamate transporter 1) (X-amino acid transporter 2)
FVSPKGVLAY

SEQ ID NO: 103937 - protein, 9 aa, Homo sapiens
  misc_feature (1)..(9): Table A1; Target 1095; HLA-A*30:02; S7A13; ENSG00000164893; Solute carrier family 7 member 13 (Sodium-independent aspartate/glutamate transporter 1) (X-amino acid transporter 2)
GQALLLAEY

SEQ ID NO: 103938 - protein, 8 aa, Homo sapiens
  misc_feature (1)..(8): Table A1; Target 1096; HLA-B*35:01; SAGE1; ENSG00000181433; Sarcoma antigen 1 (Cancer/testis antigen 14) (CT14)
DPYATITY

SEQ ID NO: 103939 - protein, 10 aa, Homo sapiens
  misc_feature (1)..(10): Table A1; Target 1097; HLA-A*29:02; NALP9; ENSG00000185792; NACHT, LRR and PYD domains-containing protein 9 (Nucleotide-binding oligomerization domain protein 6) (PYRIN and NACHT-containing protein 12)
FFSDFGLLWY

SEQ ID NO: 103940 - protein, 9 aa, Homo sapiens
  misc_feature (1)..(9): Table A1; Target 1098; HLA-B*51:01; PRR27; ENSG00000187533; Proline-rich protein 27
FPLATQLNV

SEQ ID NO: 103941 - protein, 9 aa, Homo sapiens
  misc_feature (1)..(9): Table A1; Target 1099; HLA-A*01:01; PRR27; ENSG00000187533; Proline-rich protein 27
YTDTGLPSY

SEQ ID NO: 103942 - protein, 10 aa, Homo sapiens
  misc_feature (1)..(10): Table A1; Target 1100; HLA-A*24:02; RFA4ENSG00000204086; Replication protein A 30 kDa subunit (RP-A p30) (Replication factor A protein 4) (RF-A protein 4)
IYPTVDREHF

SEQ ID NO: 103943 - protein, 9 aa, Homo sapiens
  misc_feature (1)..(9): Table A1; Target 1101; HLA-A*29:02; CB061; ENSG00000239605; Uncharacterized protein C2orf61
LLNPVIATY

SEQ ID NO: 103944 - protein, 9 aa, Homo sapiens
  misc_feature (1)..(9): Table A1; Target 1102; HLA-A*30:02; CB061; ENSG00000239605; Uncharacterized protein C2orf61
LLNPVIATY

SEQ ID NO: 103945 - protein, 9 aa, Homo sapiens
  misc_feature (1)..(9): Table A1; Target 1103; HLA-B*46:01; CB061; ENSG00000239605; Uncharacterized protein C2orf61
LLNPVIATY

SEQ ID NO: 103946 - protein, 10 aa, Homo sapiens
  misc_feature (1)..(10): Table A1; Target 1104; HLA-A*01:01; CB061; ENSG00000239605; Uncharacterized protein C2orf61
LTDTPIPGTY

SEQ ID NO: 103947 - protein, 11 aa, Homo sapiens
  misc_feature (1)..(11): Table A1; Target 1105; HLA-A*26:01; ROP1A; ENSG00000065371; Ropporin-1A (Cancer/testis antigen 91) (CT91) (Rhophilin-associated protein 1A)
EVIGPDGIITV

SEQ ID NO: 103948 - protein, 9 aa, Homo sapiens
  misc_feature (1)..(9): Table A1; Target 1106; HLA-B*18:01; TPTE2; ENSG00000132958; Phosphatidylinositol 3,4,5-trisphosphate 3-phosphatase TPTE2 (EC 3.1.3.67) (Lipid phosphatase TPIP) (TPTE and PTEN homologous inositol lipid phosphatase)
NESPQTNEF

SEQ ID NO: 103949 - protein, 9 aa, Homo sapiens
  misc_feature (1)..(9): Table A1; Target 1107; HLA-A*29:02; TPTE2; ENSG00000132958; Phosphatidylinositol 3,4,5-trisphosphate 3-phosphatase TPTE2 (EC 3.1.3.67) (Lipid phosphatase TPIP) (TPTE and PTEN homologous inositol lipid phosphatase)
YFAQVKHLY

SEQ ID NO: 103950 - protein, 9 aa, Homo sapiens
  misc_feature (1)..(9): Table A1; Target 1108; HLA-A*33:01; LGSNENSG00000146166; Lengsin (Glutamate-ammonia ligase domain-containing protein 1) (Lens glutamine synthase-like)
EANSMNTLR

SEQ ID NO: 103951 - protein, 9 aa, Homo sapiens
  misc_feature (1)..(9): Table A1; Target 1109; HLA-A*01:01; DMP1ENSG00000152592; Dentin matrix acidic phosphoprotein 1 (DMP-1) (Dentin matrix protein 1)
GSDDHQYIY

SEQ ID NO: 103952 - protein, 9 aa, Homo sapiens
  misc_feature (1)..(9): Table A1; Target 1110; HLA-C*02:02; LMTD1; ENSG00000152936; Lamin tail domain-containing protein 1 (Intermediate filament tail domain-containing protein 1)
AEVNVKGLF

SEQ ID NO: 103953 - protein, 10 aa, Homo sapiens
  misc_feature (1)..(10): Table A1; Target 1111; HLA-A*26:01; I22R2; ENSG00000164485; Interleukin-22 receptor subunit alpha-2 (IL-22 receptor subunit alpha-2) (IL-22R-alpha-2) (IL-22RA2) (Cytokine receptor class-II member 10)
  misc_feature (1)..(10): (Cytokine receptor family 2 member 10) (CRF2-10) (Cytokine receptor family type 2, soluble 1) (CRF2-S1) (Interleukin-22-binding protein) (IL-22BP) (IL22BP) (ZcytoR16)
ETSDIQEPYY

SEQ ID NO: 103954 - protein, 9 aa, Homo sapiens
  misc_feature (1)..(9): Table A1; Target 1112; HLA-A*02:07; SPERT; ENSG00000174015; Spermatid-associated protein (Protein chibby homolog 2)
LVIDTVTEV

SEQ ID NO: 103955 - protein, 9 aa, Homo sapiens
  misc_feature (1)..(9): Table A1; Target 1113; HLA-A*11:01; MAGB6; ENSG00000176746; Melanoma-associated antigen B6 (Cancer/testis antigen 3.4) (CT3.4) (MAGE-B6 antigen)
ASQKAIIFK

SEQ ID NO: 103956 - protein, 10 aa, Homo sapiens
  misc_feature (1)..(10): Table A1; Target 1114; HLA-A*01:01; MAGB6; ENSG00000176746; Melanoma-associated antigen B6 (Cancer/testis antigen 3.4) (CT3.4) (MAGE-B6 antigen)
ITEDLVQDKY

SEQ ID NO: 103957 - protein, 10 aa, Homo sapiens
  misc_feature (1)..(10): Table A1; Target 1115; HLA-C*02:02; MAGB6; ENSG00000176746; Melanoma-associated antigen B6 (Cancer/testis antigen 3.4) (CT3.4) (MAGE-B6 antigen)
KEMDSSGESY

SEQ ID NO: 103958 - protein, 10 aa, Homo sapiens
  misc_feature (1)..(10): Table A1; Target 1116; HLA-A*26:01; SG1C1; ENSG00000188076; Secretoglobin family 1C member 1 (Secretoglobin RYD5)
ELYEGTLGKY

SEQ ID NO: 103959 - protein, 8 aa, Homo sapiens
  misc_feature (1)..(8): Table A1; Target 1117; HLA-B*08:01; SG1C1; ENSG00000188076; Secretoglobin family 1C member 1 (Secretoglobin RYD5)
QPMHKAEL

SEQ ID NO: 103960 - protein, 9 aa, Homo sapiens
  misc_feature (1)..(9): Table A1; Target 1118; HLA-B*44:02; MEIG1; ENSG00000197889; Meiosis expressed gene 1 protein homolog
EEIENLYRF

SEQ ID NO: 103961 - protein, 9 aa, Homo sapiens
  misc_feature (1)..(9): Table A1; Target 1119; HLA-B*51:01; NANGN; ENSG00000205857; NANOG neighbor homeobox (Homeobox protein C14)
IPILQKPLI

SEQ ID NO: 103962 - protein, 11 aa, Homo sapiens
  misc_feature (1)..(11): Table A1; Target 1120; HLA-B*44:02; NANGN; ENSG00000205857; NANOG neighbor homeobox (Homeobox protein C14)
SEDEQNGKQKW

SEQ ID NO: 103963 - protein, 11 aa, Homo sapiens
  misc_feature (1)..(11): Table A1; Target 1121; HLA-B*44:03; NANGN; ENSG00000205857; NANOG neighbor homeobox (Homeobox protein C14)
SEDEQNGKQKW

SEQ ID NO: 103964 - protein, 11 aa, Homo sapiens
  misc_feature (1)..(11): Table A1; Target 1122; HLA-C*02:02; NANGN; ENSG00000205857; NANOG neighbor homeobox (Homeobox protein C14)
SEDEQNGKQKW

SEQ ID NO: 103965 - protein, 9 aa, Homo sapiens
  misc_feature (1)..(9): Table A1; Target 1123; HLA-A*02:01; NANGN; ENSG00000205857; NANOG neighbor homeobox (Homeobox protein C14)
WLTPVIPAL

SEQ ID NO: 103966 - protein, 10 aa, Homo sapiens
  misc_feature (1)..(10): Table A1; Target 1124; HLA-B*27:02; GNAT3; ENSG00000214415; Guanine nucleotide-binding protein G(t) subunit alpha-3 (Gustducin alpha-3 chain)
TLQSILAIVK

SEQ ID NO: 103967 - protein, 9 aa, Homo sapiens
  misc_feature (1)..(9): Table A1; Target 1125; HLA-C*05:01; A0A1B0GTN1; ENSG00000224960; Putative SMEK homolog 3
IADIVTSVF

SEQ ID NO: 103968 - protein, 9 aa, Homo sapiens
  misc_feature (1)..(9): Table A1; Target 1126; HLA-B*44:03; A0A1B0GTN1; ENSG00000224960; Putative SMEK homolog 3
NEAYIPKLL

SEQ ID NO: 103969 - protein, 9 aa, Homo sapiens
  misc_feature (1)..(9): Table A1; Target 1127; HLA-C*04:01; A0A1B0GTN1; ENSG00000224960; Putative SMEK homolog 3
TYDEQFQGM

SEQ ID NO: 103970 - protein, 9 aa, Homo sapiens
  misc_feature (1)..(9): Table A1; Target 1128; HLA-B*18:01; DDX4ENSG00000152670; Probable ATP-dependent RNA helicase DDX4 (EC 3.6.4.13) (DEAD box protein 4) (Vasa homolog)
DEDSIFAHY

SEQ ID NO: 103971 - protein, 9 aa, Homo sapiens
  misc_feature (1)..(9): Table A1; Target 1129; HLA-A*11:01; CC049; ENSG00000163632; Putative uncharacterized protein C3orf49
ITQGNTLLR

SEQ ID NO: 103972 - protein, 11 aa, Homo sapiens
  misc_feature (1)..(11): Table A1; Target 1130; HLA-B*44:03; TRIMM; ENSG00000179046; Probable E3 ubiquitin-protein ligase TRIML2 (EC 2.3.2.27) (RING-type E3 ubiquitin transferase TRIML2) (SPRY domain-containing protein 6) (Tripartite motif family-like
WEVDVEKATRW

SEQ ID NO: 103973 - protein, 9 aa, Homo sapiens
  misc_feature (1)..(9): Table A1; Target 1131; HLA-A*02:07; UTS2B; ENSG00000188958; Urotensin-2B (Urotensin II-related peptide) (Urotensin IIB) (U-IIB) (UIIB) (Urotensin-2 domain-containing protein)
ALPNKLEEL

SEQ ID NO: 103974 - protein, 9 aa, Homo sapiens
  misc_feature (1)..(9): Table A1; Target 1132; HLA-B*44:03; UTS2B; ENSG00000188958; Urotensin-2B (Urotensin II-related peptide) (Urotensin IIB) (U-IIB) (UIIB) (Urotensin-2 domain-containing protein)
NEIFPDKKY

SEQ ID NO: 103975 - protein, 9 aa, Homo sapiens
  misc_feature (1)..(9): Table A1; Target 1133; HLA-B*51:01; TSPY1; ENSG00000258992; Testis-specific Y-encoded protein 1 (Cancer/testis antigen 78) (CT78)
NPYFQNKVI

SEQ ID NO: 103976 - protein, 10 aa, Homo sapiens
  misc_feature (1)..(10): Table A1; Target 1134; HLA-A*30:02; Q5JUY5; ENSG00000117400; Thrombopoietin receptor
TTAPGTVHSY

SEQ ID NO: 103977 - protein, 9 aa, Homo sapiens
  misc_feature (1)..(9): Table A1; Target 1135; HLA-B*51:01; PERLENSG00000167419; Lactoperoxidase (LPO) (EC 1.11.1.7) (Salivary peroxidase) (SPO)
LPALLASLI

SEQ ID NO: 103978 - protein, 9 aa, Homo sapiens
  misc_feature (1)..(9): Table A1; Target 1136; HLA-B*44:02; TRI60; ENSG00000176979; Tripartite motif-containing protein 60 (RING finger protein 129) (RING finger protein 33)
SEFEQIRLF

SEQ ID NO: 103979 - protein, 9 aa, Homo sapiens
  misc_feature (1)..(9): Table A1; Target 1137; HLA-A*02:01; ADIGENSG00000182035; Adipogenin;
LLSQDILQV

SEQ ID NO: 103980 - protein, 11 aa, Homo sapiens
  misc_feature (1)..(11): Table A1; Target 1138; HLA-A*30:02; HORNENSG00000197915; Hornerin; ;
GQHGSGSSYSY

SEQ ID NO: 103981 - protein, 9 aa, Homo sapiens
  misc_feature (1)..(9): Table A1; Target 1139; HLA-B*44:02; CP096; ENSG00000205832; Uncharacterized protein C16orf96
AEDFKIQNW

SEQ ID NO: 103982 - protein, 10 aa, Homo sapiens
  misc_feature (1)..(10): Table A1; Target 1140; HLA-A*26:01; CP096; ENSG00000205832; Uncharacterized protein C16orf96
EIYEILSPSY

SEQ ID NO: 103983 - protein, 9 aa, Homo sapiens
  misc_feature (1)..(9): Table A1; Target 1141; HLA-A*26:01; CP096; ENSG00000205832; Uncharacterized protein C16orf96
EVASLQNKF

SEQ ID NO: 103984 - protein, 9 aa, Homo sapiens
  misc_feature (1)..(9): Table A1; Target 1142; HLA-A*11:01; CP096; ENSG00000205832; Uncharacterized protein C16orf96
GTTVDILQK

SEQ ID NO: 103985 - protein, 9 aa, Homo sapiens
  misc_feature (1)..(9): Table A1; Target 1143; HLA-B*35:01; CP096; ENSG00000205832; Uncharacterized protein C16orf96
IAAAAAAAY

SEQ ID NO: 103986 - protein, 9 aa, Homo sapiens
  misc_feature (1)..(9): Table A1; Target 1144; HLA-A*02:07; CP096; ENSG00000205832; Uncharacterized protein C16orf96
LLPPLIPSL

SEQ ID NO: 103987 - protein, 11 aa, Homo sapiens
  misc_feature (1)..(11): Table A1; Target 1145; HLA-B*35:01; CP096; ENSG00000205832; Uncharacterized protein C16orf96
YPYGDPHVIDY

SEQ ID NO: 103988 - protein, 9 aa, Homo sapiens
  misc_feature (1)..(9): Table A1; Target 1146; HLA-B*51:01; CP096; ENSG00000205832; Uncharacterized protein C16orf96
YPYGDPHVI

SEQ ID NO: 103989 - protein, 9 aa, Homo sapiens
  misc_feature (1)..(9): Table A1; Target 1147; HLA-A*29:02; TPTEENSG00000274391; Putative tyrosine-protein phosphatase TPTE (EC 3.1.3.48) (Cancer/testis antigen 44) (CT44) (Transmembrane phosphatase with tensin homology) (Tumor antigen BJ-HCC-5)
YFAQVKHLY

SEQ ID NO: 103990 - protein, 9 aa, Homo sapiens
  misc_feature (1)..(9): Table A1; Target 1148; HLA-A*11:01; NOBOX; ENSG00000106410; Homeobox protein NOBOX
RSYSPAPGK

SEQ ID NO: 103991 - protein, 9 aa, Homo sapiens
  misc_feature (1)..(9): Table A1; Target 1149; HLA-A*30:02; CCD62; ENSG00000130783; Coiled-coil domain-containing protein 62 (Protein TSP-NY) (Protein aaa)
AQKNTFVSY

SEQ ID NO: 103992 - protein, 9 aa, Homo sapiens
  misc_feature (1)..(9): Table A1; Target 1150; HLA-A*02:01; CCD62; ENSG00000130783; Coiled-coil domain-containing protein 62 (Protein TSP-NY) (Protein aaa)
TLSNTLVEL

SEQ ID NO: 103993 - protein, 11 aa, Homo sapiens
  misc_feature (1)..(11): Table A1; Target 1151; HLA-A*03:01; FATE1; ENSG00000147378; Fetal and adult testis-expressed transcript protein (Cancer/testis antigen 43) (CT43) (Tumor antigen BJ-HCC-2)
RVWNMTATRPK

SEQ ID NO: 103994 - protein, 9 aa, Homo sapiens
  misc_feature (1)..(9): Table A1; Target 1152; HLA-B*35:01; TERTENSG00000164362; Telomerase reverse transcriptase (EC 2.7.7.49) (HEST2) (Telomerase catalytic subunit) (Telomerase-associated protein 2) (TP2)
LPNTVTDAL

SEQ ID NO: 103995 - protein, 11 aa, Homo sapiens
  misc_feature (1)..(11): Table A1; Target 1153; HLA-A*29:02; ESPB1; ENSG00000169393; Epididymal sperm-binding protein 1 (Epididymal secretory protein 12) (hE12)
YLLGWTTFLLY

SEQ ID NO: 103996 - protein, 9 aa, Homo sapiens
  misc_feature (1)..(9): Table A1; Target 1154; HLA-A*03:01; S100G; ENSG00000169906; Protein S100-G (Calbindin-D9k) (S100 calcium-binding protein G) (Vitamin D-dependent calcium-binding protein, intestinal) (CABP)
RIFEKYAAK

SEQ ID NO: 103997 - protein, 9 aa, Homo sapiens
  misc_feature (1)..(9): Table A1; Target 1155; HLA-B*35:01; HSF5ENSG00000176160; Heat shock factor protein 5 (HSF 5) (Heat shock transcription factor 5) (HSTF 5)
FPTEVTYTL

SEQ ID NO: 103998 - protein, 9 aa, Homo sapiens
  misc_feature (1)..(9): Table A1; Target 1156; HLA-B*35:01; HSF5ENSG00000176160; Heat shock factor protein 5 (HSF 5) (Heat shock transcription factor 5) (HSTF 5)
NPSPSSVVF

SEQ ID NO: 103999 - protein, 9 aa, Homo sapiens
  misc_feature (1)..(9): Table A1; Target 1157; HLA-A*02:07; MAGBG; ENSG00000189023; Melanoma-associated antigen B16 (MAGE-B16 antigen)
KVLEFVAKV

SEQ ID NO: 104000 - protein, 10 aa, Homo sapiens
  misc_feature (1)..(10): Table A1; Target 1158; HLA-A*11:01; FOXR2; ENSG00000189299; Forkhead box protein R2 (Forkhead box protein N6)
SSSEQSPLQK

SEQ ID NO: 104001 - protein, 9 aa, Homo sapiens
  misc_feature (1)..(9): Table A1; Target 1159; HLA-B*44:02; E5RK72; ENSG00000215262; Potassium channel subfamily U member 1
EEFSLQKSY

SEQ ID NO: 104002 - protein, 10 aa, Homo sapiens
  misc_feature (1)..(10): Table A1; Target 1160; HLA-A*03:01; ERVV2; ENSG00000268964; Endogenous retrovirus group V member 2 Env polyprotein (HERV-V; 19q13.41 provirus ancestral Env polyprotein 2)
SVIGGPSTYK

SEQ ID NO: 104003 - protein, 9 aa, Homo sapiens
  misc_feature (1)..(9): Table A1; Target 1161; HLA-A*26:01; ERVV2; ENSG00000268964; Endogenous retrovirus group V member 2 Env polyprotein (HERV-V; 19q13.41 provirus ancestral Env polyprotein 2)
SVIGGPSTY

SEQ ID NO: 104004 - protein, 9 aa, Homo sapiens
  misc_feature (1)..(9): Table A1; Target 1162; HLA-A*26:01; TDRD1; ENSG00000095627; Tudor domain-containing protein 1 (Cancer/testis antigen 41.1) (CT41.1)
EIKGTVTEF

SEQ ID NO: 104005 - protein, 9 aa, Homo sapiens
  misc_feature (1)..(9): Table A1; Target 1163; HLA-A*02:07; TDRD1; ENSG00000095627; Tudor domain-containing protein 1 (Cancer/testis antigen 41.1) (CT41.1)
LLDHVLIEM

SEQ ID NO: 104006 - protein, 9 aa, Homo sapiens
  misc_feature (1)..(9): Table A1; Target 1164; HLA-B*44:03; MORC1; ENSG00000114487; MORC family CW-type zinc finger protein 1 (Cancer/testis antigen 33) (CT33)
AEQQPQPQF

SEQ ID NO: 104007 - protein, 10 aa, Homo sapiens
  misc_feature (1)..(10): Table A1; Target 1165; HLA-A*30:02; OPRDENSG00000116329; Delta-type opioid receptor (D-OR-1) (DOR-1)
STLPFQSAKY

SEQ ID NO: 104008 - protein, 9 aa, Homo sapiens
  misc_feature (1)..(9): Table A1; Target 1166; HLA-A*26:01; MAGB4; ENSG00000120289; Melanoma-associated antigen B4 (MAGE-B4 antigen)
EVNPTTHSY

SEQ ID NO: 104009 - protein, 9 aa, Homo sapiens
  misc_feature (1)..(9): Table A1; Target 1167; HLA-A*30:02; MAGB4; ENSG00000120289; Melanoma-associated antigen B4 (MAGE-B4 antigen)
EVNPTTHSY

SEQ ID NO: 104010 - protein, 11 aa, Homo sapiens
  misc_feature (1)..(11): Table A1; Target 1168; HLA-A*30:02; NKX24; ENSG00000125816; Homeobox protein Nkx-2.4 (Homeobox protein NK-2 homolog D)
AAAAAAAAATY

SEQ ID NO: 104011 - protein, 9 aa, Homo sapiens
  misc_feature (1)..(9): Table A1; Target 1169; HLA-A*02:01; GP119; ENSG00000147262; Glucose-dependent insulinotropic receptor (G-protein coupled receptor 119)
FLITGIVQV

SEQ ID NO: 104012 - protein, 9 aa, Homo sapiens
  misc_feature (1)..(9): Table A1; Target 1170; HLA-A*02:07; SL9C2; ENSG00000162753; Sodium/hydrogen exchanger 11 (Na(+)/H(+) exchanger 11) (NHE-11) (Solute carrier family 9 member 11) (Solute carrier family 9 member C2)
ALDVEFYTL

SEQ ID NO: 104013 - protein, 8 aa, Homo sapiens
  misc_feature (1)..(8): Table A1; Target 1171; HLA-C*04:01; SL9C2; ENSG00000162753; Sodium/hydrogen exchanger 11 (Na(+)/H(+) exchanger 11) (NHE-11) (Solute carrier family 9 member 11) (Solute carrier family 9 member C2)
IYDVSTYM

SEQ ID NO: 104014 - protein, 9 aa, Homo sapiens
  misc_feature (1)..(9): Table A1; Target 1172; HLA-B*51:01; TERB2; ENSG00000167014; Telomere repeats-binding bouquet formation protein 2
LAYHVQNEI

SEQ ID NO: 104015 - protein, 9 aa, Homo sapiens
  misc_feature (1)..(9): Table A1; Target 1173; HLA-A*26:01; SL9C1; ENSG00000172139; Sodium/hydrogen exchanger 10 (Na(+)/H(+) exchanger 10) (NHE-10) (Solute carrier family 9 member 10) (Solute carrier family 9 member C1) (Sperm-specific Na(+)/H(+) exchanger) (sNHE)
FTSSQVQRY

SEQ ID NO: 104016 - protein, 9 aa, Homo sapiens
  misc_feature (1)..(9): Table A1; Target 1174; HLA-A*26:01; ATS20; ENSG00000173157; A disintegrin and metalloproteinase with thrombospondin motifs 20 (ADAM-TS 20) (ADAM-TS20) (ADAMTS-20) (EC 3.4.24.-)
EVFPQSHHF

SEQ ID NO: 104017 - protein, 9 aa, Homo sapiens
  misc_feature (1)..(9): Table A1; Target 1175; HLA-B*35:01; MC5RENSG00000176136; Melanocortin receptor 5 (MC5-R) (MC-2)
SAWETITIY

SEQ ID NO: 104018 - protein, 10 aa, Homo sapiens
  misc_feature (1)..(10): Table A1; Target 1176; HLA-A*26:01; OLIG3; ENSG00000177468; Oligodendrocyte transcription factor 3 (Oligo3) (Class B basic helix-loop-helix protein 7) (bHLHb7) (Class E basic helix-loop-helix protein 20) (bHLHe20)
EIYGGHHSAF

SEQ ID NO: 104019 - protein, 10 aa, Homo sapiens
  misc_feature (1)..(10): Table A1; Target 1177; HLA-B*35:01; PRA10; ENSG00000187545; PRAME family member 10
YPAPLESLDY

SEQ ID NO: 104020 - protein, 10 aa, Homo sapiens
  misc_feature (1)..(10): Table A1; Target 1178; HLA-C*02:02; FGF16; ENSG00000196468; Fibroblast growth factor 16 (FGF-16)
AEVGGVFASL

SEQ ID NO: 104021 - protein, 9 aa, Homo sapiens
  misc_feature (1)..(9): Table A1; Target 1179; HLA-B*44:03; RHF2B; ENSG00000203989; Rhox homeobox family member 2B
AEAITAPLF

SEQ ID NO: 104022 - protein, 9 aa, Homo sapiens
  misc_feature (1)..(9): Table A1; Target 1180; HLA-C*02:02; RHF2B; ENSG00000203989; Rhox homeobox family member 2B
AEAITAPLF

SEQ ID NO: 104023 - protein, 9 aa, Homo sapiens
  misc_feature (1)..(9): Table A1; Target 1181; HLA-A*31:01; RHF2B; ENSG00000203989; Rhox homeobox family member 2B
AVQIWFENR

SEQ ID NO: 104024 - protein, 10 aa, Homo sapiens
  misc_feature (1)..(10): Table A1; Target 1182; HLA-A*02:07; RHF2B; ENSG00000203989; Rhox homeobox family member 2B
IVPSFTFPNV

SEQ ID NO: 104025 - protein, 10 aa, Homo sapiens
  misc_feature (1)..(10): Table A1; Target 1183; HLA-A*01:01; RHF2B; ENSG00000203989; Rhox homeobox family member 2B
QSEKEPGQQY

SEQ ID NO: 104026 - protein, 9 aa, Homo sapiens
  misc_feature (1)..(9): Table A1; Target 1184; HLA-B*44:03; RHF2B; ENSG00000203989; Rhox homeobox family member 2B
SEKEPGQQY

SEQ ID NO: 104027 - protein, 9 aa, Homo sapiens
  misc_feature (1)..(9): Table A1; Target 1185; HLA-C*02:02; RHF2B; ENSG00000203989; Rhox homeobox family member 2B
SEKEPGQQY

SEQ ID NO: 104028 - protein, 10 aa, Homo sapiens
  misc_feature (1)..(10): Table A1; Target 1186; HLA-A*03:01; A0A1B0GUY1; ENSG00000248109; Uncharacterized protein
GVLNQPGILK

SEQ ID NO: 104029 - protein, 10 aa, Homo sapiens
  misc_feature (1)..(10): Table A1; Target 1187; HLA-B*35:01; NMUR2; ENSG00000132911; Neuromedin-U receptor 2 (NMU-R2) (G-protein coupled receptor FM-4) (G-protein coupled receptor TGR-1)
LPAALSSEQM

SEQ ID NO: 104030 - protein, 9 aa, Homo sapiens
  misc_feature (1)..(9): Table A1; Target 1188; HLA-B*44:03; RBM46; ENSG00000151962; Probable RNA-binding protein 46 (Cancer/testis antigen 68) (CT68) (RNA-binding motif protein 46)
EEAQLAIRI

SEQ ID NO: 104031 - protein, 11 aa, Homo sapiens
  misc_feature (1)..(11): Table A1; Target 1189; HLA-B*18:01; Q5T1N2; ENSG00000162641; Protein AKNAD1
DEADFSEHTTY

SEQ ID NO: 104032 - protein, 10 aa, Homo sapiens
  misc_feature (1)..(10): Table A1; Target 1190; HLA-A*03:01; Q5T1N2; ENSG00000162641; Protein AKNAD1
KSYQGQSPQK

SEQ ID NO: 104033 - protein, 8 aa, Homo sapiens
  misc_feature (1)..(8): Table A1; Target 1191; HLA-B*18:01; SSX3ENSG00000165584; Protein SSX3 (Cancer/testis antigen 5.3) (CT5.3)
SEKIVYVY

SEQ ID NO: 104034 - protein, 11 aa, Homo sapiens
  misc_feature (1)..(11): Table A1; Target 1192; HLA-A*26:01; PERLENSG00000167419; Lactoperoxidase (LPO) (EC 1.11.1.7) (Salivary peroxidase) (SPO)
ETPTSRQLSEY

SEQ ID NO: 104035 - protein, 9 aa, Homo sapiens
  misc_feature (1)..(9): Table A1; Target 1193; HLA-B*51:01; C9JPU3; ENSG00000168757; Testis-specific Y-encoded protein 2
NPYFQNKVI

SEQ ID NO: 104036 - protein, 9 aa, Homo sapiens
  misc_feature (1)..(9): Table A1; Target 1194; HLA-B*44:03; GPC6A; ENSG00000173612; G-protein coupled receptor family C group 6 member A (hGPRC6A) (G-protein coupled receptor GPCR33) (hGPCR33)
QEINTKSAF

SEQ ID NO: 104037 - protein, 11 aa, Homo sapiens
  misc_feature (1)..(11): Table A1; Target 1195; HLA-A*11:01; KCNH7; ENSG00000184611; Potassium voltage-gated channel subfamily H member 7 (Ether-a-go-go-related gene potassium channel 3) (ERG-3)
  misc_feature (1)..(11): (Eag-related protein 3) (Ether-a-go-go-related protein 3) (hERG-3) (Voltage-gated potassium channel subunit Kv11.3)
ASEDNLTSLLK

SEQ ID NO: 104038 - protein, 11 aa, Homo sapiens
  misc_feature (1)..(11): Table A1; Target 1196; HLA-A*02:01; ADAM7; ENSG00000069206; Disintegrin and metalloproteinase domain-containing protein 7 (ADAM 7) (Sperm maturation-related glycoprotein GP-83)
FLYHDSTDIGL

SEQ ID NO: 104039 - protein, 9 aa, Homo sapiens
  misc_feature (1)..(9): Table A1; Target 1197; HLA-B*51:01; U3KQD4; ENSG00000105549; Testicular haploid-expressed gene protein (Theg homolog (Mouse), isoform CRA; a)
MPMSEVSQV

SEQ ID NO: 104040 - protein, 9 aa, Homo sapiens
  misc_feature (1)..(9): Table A1; Target 1198; HLA-A*02:01; U3KQD4; ENSG00000105549; Testicular haploid-expressed gene protein (Theg homolog (Mouse), isoform CRA; a)
TLTITVPAV

SEQ ID NO: 104041 - protein, 10 aa, Homo sapiens
  misc_feature (1)..(10): Table A1; Target 1199; HLA-A*30:02; TTLL2; ENSG00000120440; Probable tubulin polyglutamylase TTLL2 (EC 6.-.-.-) (Testis-specific protein NYD-TSPG) (Tubulin--tyrosine ligase-like protein 2)
ISNPLLIGRY

SEQ ID NO: 104042 - protein, 9 aa, Homo sapiens
  misc_feature (1)..(9): Table A1; Target 1200; HLA-A*24:02; TTLL2; ENSG00000120440; Probable tubulin polyglutamylase TTLL2 (EC 6.-.-.-) (Testis-specific protein NYD-TSPG) (Tubulin--tyrosine ligase-like protein 2)
KYISNPLLI

SEQ ID NO: 104043 - protein, 9 aa, Homo sapiens
  misc_feature (1)..(9): Table A1; Target 1201; HLA-A*24:02; TTLL2; ENSG00000120440; Probable tubulin polyglutamylase TTLL2 (EC 6.-.-.-) (Testis-specific protein NYD-TSPG) (Tubulin--tyrosine ligase-like protein 2)
VYQEGLVRF

SEQ ID NO: 104044 - protein, 9 aa, Homo sapiens
  misc_feature (1)..(9): Table A1; Target 1202; HLA-C*16:01; BHE23; ENSG00000125533; Class E basic helix-loop-helix protein 23 (bHLHe23) (Class B basic helix-loop-helix protein 4) (bHLHb4)
AAAAAGLAY

SEQ ID NO: 104045 - protein, 9 aa, Homo sapiens
  misc_feature (1)..(9): Table A1; Target 1203; HLA-C*16:01; NKX24; ENSG00000125816; Homeobox protein Nkx-2.4 (Homeobox protein NK-2 homolog D)
AAAAAAATY

SEQ ID NO: 104046 - protein, 9 aa, Homo sapiens
  misc_feature (1)..(9): Table A1; Target 1204; HLA-A*29:02; NKX24; ENSG00000125816; Homeobox protein Nkx-2.4 (Homeobox protein NK-2 homolog D)
GVLGANLLY

SEQ ID NO: 104047 - protein, 9 aa, Homo sapiens
  misc_feature (1)..(9): Table A1; Target 1205; HLA-C*02:02; SUN3ENSG00000164744; SUN domain-containing protein 3 (Sad1/unc-84 domain-containing protein 1)
IEAGTSESY

SEQ ID NO: 104048 - protein, 9 aa, Homo sapiens
  misc_feature (1)..(9): Table A1; Target 1206; HLA-A*11:01; CD051; ENSG00000237136; Uncharacterized protein C4orf51
TTYTGSYRK

SEQ ID NO: 104049 - protein, 9 aa, Homo sapiens
  misc_feature (1)..(9): Table A1; Target 1207; HLA-A*02:07; PTX4ENSG00000251692; Pentraxin-4;
LLDGQWHHI

SEQ ID NO: 104050 - protein, 10 aa, Homo sapiens
  misc_feature (1)..(10): Table A1; Target 1208; HLA-B*35:01; RNF17; ENSG00000132972; RING finger protein 17 (Tudor domain-containing protein 4)
LPNENFQSLY

SEQ ID NO: 104051 - protein, 11 aa, Homo sapiens
  misc_feature (1)..(11): Table A1; Target 1209; HLA-B*44:02; PDCL2; ENSG00000163440; Phosducin-like protein 2
EEDVWVIIHLY

SEQ ID NO: 104052 - protein, 9 aa, Homo sapiens
  misc_feature (1)..(9): Table A1; Target 1210; HLA-B*35:01; CP2AD; ENSG00000197838; Cytochrome P450 2A13 (EC 1.14.14.1) (CYPIIA13)
TATSTGQLY

SEQ ID NO: 104053 - protein, 9 aa, Homo sapiens
  misc_feature (1)..(9): Table A1; Target 1211; HLA-B*44:02; RHF2B; ENSG00000203989; Rhox homeobox family member 2B
SEKEPGQQY

SEQ ID NO: 104054 - protein, 8 aa, Homo sapiens
  misc_feature (1)..(8): Table A1; Target 1212; HLA-B*51:01; DYTNENSG00000232125; Dystrotelin;
MPAAAALI

SEQ ID NO: 104055 - protein, 9 aa, Homo sapiens
  misc_feature (1)..(9): Table A1; Target 1213; HLA-A*24:02; MORC1; ENSG00000114487; MORC family CW-type zinc finger protein 1 (Cancer/testis antigen 33) (CT33)
KYLYVTSSF

SEQ ID NO: 104056 - protein, 10 aa, Homo sapiens
  misc_feature (1)..(10): Table A1; Target 1214; HLA-A*03:01; V9GZ46; ENSG00000124092; Transcriptional repressor CTCFL
GTMKIHILQK

SEQ ID NO: 104057 - protein, 9 aa, Homo sapiens
  misc_feature (1)..(9): Table A1; Target 1215; HLA-A*03:01; DDX4ENSG00000152670; Probable ATP-dependent RNA helicase DDX4 (EC 3.6.4.13) (DEAD box protein 4) (Vasa homolog)
SSYVPIFEK

SEQ ID NO: 104058 - protein, 9 aa, Homo sapiens
  misc_feature (1)..(9): Table A1; Target 1216; HLA-B*35:01; S7A13; ENSG00000164893; Solute carrier family 7 member 13 (Sodium-independent aspartate/glutamate transporter 1) (X-amino acid transporter 2)
MPFAISTSL

SEQ ID NO: 104059 - protein, 9 aa, Homo sapiens
  misc_feature (1)..(9): Table A1; Target 1217; HLA-B*44:03; WDR87; ENSG00000171804; WD repeat-containing protein 87 (Testis development protein NYD-SP11)
EEASVYSQW

SEQ ID NO: 104060 - protein, 9 aa, Homo sapiens
  misc_feature (1)..(9): Table A1; Target 1218; HLA-C*02:02; WDR87; ENSG00000171804; WD repeat-containing protein 87 (Testis development protein NYD-SP11)
EEASVYSQW

SEQ ID NO: 104061 - protein, 11 aa, Homo sapiens
  misc_feature (1)..(11): Table A1; Target 1219; HLA-A*02:01; WDR87; ENSG00000171804; WD repeat-containing protein 87 (Testis development protein NYD-SP11)
RLWPEGTPIYL

SEQ ID NO: 104062 - protein, 9 aa, Homo sapiens
  misc_feature (1)..(9): Table A1; Target 1220; HLA-A*02:07; WDR87; ENSG00000171804; WD repeat-containing protein 87 (Testis development protein NYD-SP11)
VLDGVKVQL

SEQ ID NO: 104063 - protein, 9 aa, Homo sapiens
  misc_feature (1)..(9): Table A1; Target 1221; HLA-A*11:01; WDR87; ENSG00000171804; WD repeat-containing protein 87 (Testis development protein NYD-SP11)
VTQEVIRHK

SEQ ID NO: 104064 - protein, 9 aa, Homo sapiens
  misc_feature (1)..(9): Table A1; Target 1222; HLA-A*02:01; GPC6A; ENSG00000173612; G-protein coupled receptor family C group 6 member A (hGPRC6A) (G-protein coupled receptor GPCR33) (hGPCR33)
FLSDNTIEV

SEQ ID NO: 104065 - protein, 10 aa, Homo sapiens
  misc_feature (1)..(10): Table A1; Target 1223; HLA-A*24:02; GPC6A; ENSG00000173612; G-protein coupled receptor family C group 6 member A (hGPRC6A) (G-protein coupled receptor GPCR33) (hGPCR33)
NYNEAKFITF

SEQ ID NO: 104066 - protein, 8 aa, Homo sapiens
  misc_feature (1)..(8): Table A1; Target 1224; HLA-B*18:01; ACHA9; ENSG00000174343; Neuronal acetylcholine receptor subunit alpha-9 (Nicotinic acetylcholine receptor subunit alpha-9) (NACHR alpha-9)
VEWEVHGM

SEQ ID NO: 104067 - protein, 10 aa, Homo sapiens
  misc_feature (1)..(10): Table A1; Target 1225; HLA-B*44:02; LN28B; ENSG00000187772; Protein lin-28 homolog B (Lin-28B)
KEGEPVEFTF

SEQ ID NO: 104068 - protein, 11 aa, Homo sapiens
  misc_feature (1)..(11): Table A1; Target 1226; HLA-B*44:02; MAGBG; ENSG00000189023; Melanoma-associated antigen B16 (MAGE-B16 antigen)
AESPLEVPQSF

SEQ ID NO: 104069 - protein, 11 aa, Homo sapiens
  misc_feature (1)..(11): Table A1; Target 1227; HLA-A*31:01; GNAT3; ENSG00000214415; Guanine nucleotide-binding protein G(t) subunit alpha-3 (Gustducin alpha-3 chain)
TTLGIDYVNPR

SEQ ID NO: 104070 - protein, 9 aa, Homo sapiens
  misc_feature (1)..(9): Table A1; Target 1228; HLA-A*03:01; TIFAB; ENSG00000255833; TRAF-interacting protein with FHA domain-containing protein B (TIFA-like protein)
HVSPSPLIY

SEQ ID NO: 104071 - protein, 10 aa, Homo sapiens
  misc_feature (1)..(10): Table A1; Target 1229; HLA-A*24:02; TSN16; ENSG00000130167; Tetraspanin-16 (Tspan-16) (Tetraspanin TM4-B) (Transmembrane 4 superfamily member 16)
NYTDFSGSSF

SEQ ID NO: 104072 - protein, 9 aa, Homo sapiens
  misc_feature (1)..(9): Table A1; Target 1230; HLA-B*18:01; PPATENSG00000142513; Testicular acid phosphatase (EC 3.1.3.2)
YEAFLSPEY

SEQ ID NO: 104073 - protein, 9 aa, Homo sapiens
  misc_feature (1)..(9): Table A1; Target 1231; HLA-A*02:01; PO4F1; ENSG00000152192; POU domain, class 4, transcription factor 1 (Brain-specific homeobox/POU domain protein 3A) (Brain-3A) (Brn-3A) (Homeobox/POU domain protein RDC-1) (Oct-T1)
ALAAVDIAV

SEQ ID NO: 104074 - protein, 8 aa, Homo sapiens
  misc_feature (1)..(8): Table A1; Target 1232; HLA-B*18:01; SL9C1; ENSG00000172139; Sodium/hydrogen exchanger 10 (Na(+)/H(+) exchanger 10) (NHE-10) (Solute carrier family 9 member 10) (Solute carrier family 9 member C1) (Sperm-specific Na(+)/H(+) exchanger) (sNHE)
DENLIYVI

SEQ ID NO: 104075 - protein, 9 aa, Homo sapiens
  misc_feature (1)..(9): Table A1; Target 1233; HLA-A*31:01; NKX26; ENSG00000180053; Homeobox protein Nkx-2.6 (Homeobox protein NK-2 homolog F)
QVKIWFQNR

SEQ ID NO: 104076 - protein, 9 aa, Homo sapiens
  misc_feature (1)..(9): Table A1; Target 1234; HLA-B*44:02; CRGBENSG00000182187; Gamma-crystallin B (Gamma-B-crystallin) (Gamma-crystallin 1-2)
GEYPDYQQW

SEQ ID NO: 104077 - protein, 11 aa, Homo sapiens
  misc_feature (1)..(11): Table A1; Target 1235; HLA-A*11:01; D7UEQ8; ENSG00000183206; POTE ankyrin domain family member C
AVHNEDKLMAK

SEQ ID NO: 104078 - protein, 9 aa, Homo sapiens
  misc_feature (1)..(9): Table A1; Target 1236; HLA-A*31:01; D7UEQ8; ENSG00000183206; POTE ankyrin domain family member C
AVKKPFDLR

SEQ ID NO: 104079 - protein, 10 aa, Homo sapiens
  misc_feature (1)..(10): Table A1; Target 1237; HLA-B*18:01; D7UEQ8; ENSG00000183206; POTE ankyrin domain family member C
DEYGNTTLHY

SEQ ID NO: 104080 - protein, 10 aa, Homo sapiens
  misc_feature (1)..(10): Table A1; Target 1238; HLA-A*11:01; D7UEQ8; ENSG00000183206; POTE ankyrin domain family member C
ISQDEILTNK

SEQ ID NO: 104081 - protein, 8 aa, Homo sapiens
  misc_feature (1)..(8): Table A1; Target 1239; HLA-B*18:01; RTP2ENSG00000198471; Receptor-transporting protein 2 (3CxxC-type zinc finger protein 2)
LEEEVTTY

SEQ ID NO: 104082 - protein, 9 aa, Homo sapiens
  misc_feature (1)..(9): Table A1; Target 1240; HLA-A*02:07; RTP2ENSG00000198471; Receptor-transporting protein 2 (3CxxC-type zinc finger protein 2)
LVDNLITSL

SEQ ID NO: 104083 - protein, 9 aa, Homo sapiens
  misc_feature (1)..(9): Table A1; Target 1241; HLA-C*16:01; A0A0U1RRI6; ENSG00000224109; Centromere protein V-like 3
AAVSDPRVY

SEQ ID NO: 104084 - protein, 9 aa, Homo sapiens
  misc_feature (1)..(9): Table A1; Target 1242; HLA-A*11:01; PRAM4; ENSG00000243073; PRAME family member 4
ATLENLLSH

SEQ ID NO: 104085 - protein, 9 aa, Homo sapiens
  misc_feature (1)..(9): Table A1; Target 1243; HLA-A*30:02; A0A1B0GW35; ENSG00000250821; HCG2040572
TVNKLNHAY

SEQ ID NO: 104086 - protein, 9 aa, Homo sapiens
  misc_feature (1)..(9): Table A1; Target 1244; HLA-A*01:01; SACA1; ENSG00000118434; Sperm acrosome membrane-associated protein 1 (Sperm acrosomal membrane-associated protein 32)
QSEQSSVRY

SEQ ID NO: 104087 - protein, 9 aa, Homo sapiens
  misc_feature (1)..(9): Table A1; Target 1245; HLA-A*29:02; NKX24; ENSG00000125816; Homeobox protein Nkx-2.4 (Homeobox protein NK-2 homolog D)
ILSPIEETY

SEQ ID NO: 104088 - protein, 9 aa, Homo sapiens
  misc_feature (1)..(9): Table A1; Target 1246; HLA-A*02:01; LRC52; ENSG00000162763; Leucine-rich repeat-containing protein 52 (BK channel auxiliary gamma subunit LRRC52)
GLLSDLVYL

SEQ ID NO: 104089 - protein, 9 aa, Homo sapiens
  misc_feature (1)..(9): Table A1; Target 1247; HLA-A*11:01; A0A0B4J218; ENSG00000164871,ENSG00000178287; Sperm-associated antigen 11A (Sperm-associated antigen 11B) (Fragment)
GTNGFQLLR

SEQ ID NO: 104090 - protein, 9 aa, Homo sapiens
  misc_feature (1)..(9): Table A1; Target 1248; HLA-A*11:01; SG11B; ENSG00000164871; Sperm-associated antigen 11B (Human epididymis-specific protein 2) (He2) (Protein EP2) (Sperm antigen HE2)
GTNGFQLLR

SEQ ID NO: 104091 - protein, 11 aa, Homo sapiens
  misc_feature (1)..(11): Table A1; Target 1249; HLA-A*02:07; SG11B; ENSG00000164871; Sperm-associated antigen 11B (Human epididymis-specific protein 2) (He2) (Protein EP2) (Sperm antigen HE2)
LLPPRTPPYQV

SEQ ID NO: 104092 - protein, 9 aa, Homo sapiens
  misc_feature (1)..(9): Table A1; Target 1250; HLA-B*51:01; SG11B; ENSG00000164871; Sperm-associated antigen 11B (Human epididymis-specific protein 2) (He2) (Protein EP2) (Sperm antigen HE2)
VPPGIRNTI

SEQ ID NO: 104093 - protein, 9 aa, Homo sapiens
  misc_feature (1)..(9): Table A1; Target 1251; HLA-B*35:01; PRR27; ENSG00000187533; Proline-rich protein 27
VPSYPGNTY

SEQ ID NO: 104094 - protein, 10 aa, Homo sapiens
  misc_feature (1)..(10): Table A1; Target 1252; HLA-A*30:02; CP26C; ENSG00000187553; Cytochrome P450 26C1 (EC 1.14.-.-)
RLLPPVSGGY

SEQ ID NO: 104095 - protein, 8 aa, Homo sapiens
  misc_feature (1)..(8): Table A1; Target 1253; HLA-B*51:01; M4A18; ENSG00000214782; Membrane-spanning 4-domains subfamily A member 18
YPISPKVI

SEQ ID NO: 104096 - protein, 10 aa, Homo sapiens
  misc_feature (1)..(10): Table A1; Target 1254; HLA-A*11:01; A0A1B0GUY1; ENSG00000248109; Uncharacterized protein
GVLNQPGILK

SEQ ID NO: 104097 - protein, 9 aa, Homo sapiens
  misc_feature (1)..(9): Table A1; Target 1255; HLA-C*02:02; NKX24; ENSG00000125816; Homeobox protein Nkx-2.4 (Homeobox protein NK-2 homolog D)
AAAAAAATY

SEQ ID NO: 104098 - protein, 9 aa, Homo sapiens
  misc_feature (1)..(9): Table A1; Target 1256; HLA-B*51:01; GALR3; ENSG00000128310; Galanin receptor type 3 (GAL3-R) (GALR-3)
DAWLFGALV

SEQ ID NO: 104099 - protein, 9 aa, Homo sapiens
  misc_feature (1)..(9): Table A1; Target 1257; HLA-A*26:01; GALR3; ENSG00000128310; Galanin receptor type 3 (GAL3-R) (GALR-3)
DVATFAAGY

SEQ ID NO: 104100 - protein, 9 aa, Homo sapiens
  misc_feature (1)..(9): Table A1; Target 1258; HLA-A*02:01; RBM46; ENSG00000151962; Probable RNA-binding protein 46 (Cancer/testis antigen 68) (CT68) (RNA-binding motif protein 46)
QLWGHTIQV

SEQ ID NO: 104101 - protein, 9 aa, Homo sapiens
  misc_feature (1)..(9): Table A1; Target 1259; HLA-A*02:01; RBM46; ENSG00000151962; Probable RNA-binding protein 46 (Cancer/testis antigen 68) (CT68) (RNA-binding motif protein 46)
SLSPVSATL

SEQ ID NO: 104102 - protein, 9 aa, Homo sapiens
  misc_feature (1)..(9): Table A1; Target 1260; HLA-B*08:01; LDH6A; ENSG00000166800; L-lactate dehydrogenase A-like 6A (EC 1.1.1.27)
DLVQRNVSI

SEQ ID NO: 104103 - protein, 10 aa, Homo sapiens
  misc_feature (1)..(10): Table A1; Target 1261; HLA-A*11:01; ADA18; ENSG00000168619; Disintegrin and metalloproteinase domain-containing protein 18 (ADAM 18) (Transmembrane metalloproteinase-like, disintegrin-like, and cysteine-rich protein III) (tMDC III)
GSIDDGNFQK

SEQ ID NO: 104104 - protein, 9 aa, Homo sapiens
  misc_feature (1)..(9): Table A1; Target 1262; HLA-A*11:01; GPC6A; ENSG00000173612; G-protein coupled receptor family C group 6 member A (hGPRC6A) (G-protein coupled receptor GPCR33) (hGPCR33)
KAMAHLIQK

SEQ ID NO: 104105 - protein, 11 aa, Homo sapiens
  misc_feature (1)..(11): Table A1; Target 1263; HLA-A*03:01; OLIG3; ENSG00000177468; Oligodendrocyte transcription factor 3 (Oligo3) (Class B basic helix-loop-helix protein 7) (bHLHb7) (Class E basic helix-loop-helix protein 20) (bHLHe20)
RLSAESKDLLK

SEQ ID NO: 104106 - protein, 9 aa, Homo sapiens
  misc_feature (1)..(9): Table A1; Target 1264; HLA-B*35:01; CH086; ENSG00000196166; Uncharacterized protein C8orf86
QPLLHVTAY

SEQ ID NO: 104107 - protein, 9 aa, Homo sapiens
  misc_feature (1)..(9): Table A1; Target 1265; HLA-A*02:07; CD022; ENSG00000197826; Uncharacterized protein C4orf22
ALDNIVTQF

SEQ ID NO: 104108 - protein, 9 aa, Homo sapiens
  misc_feature (1)..(9): Table A1; Target 1266; HLA-A*02:01; CD022; ENSG00000197826; Uncharacterized protein C4orf22
FLDSQITTV

SEQ ID NO: 104109 - protein, 9 aa, Homo sapiens
  misc_feature (1)..(9): Table A1; Target 1267; HLA-A*02:07; CD022; ENSG00000197826; Uncharacterized protein C4orf22
FLDSQITTV

SEQ ID NO: 104110 - protein, 9 aa, Homo sapiens
  misc_feature (1)..(9): Table A1; Target 1268; HLA-A*30:02; HORNENSG00000197915; Hornerin; ;
SSSGLSSSY

SEQ ID NO: 104111 - protein, 8 aa, Homo sapiens
  misc_feature (1)..(8): Table A1; Target 1269; HLA-B*51:01; CP096; ENSG00000205832; Uncharacterized protein C16orf96
LPPLIPSL

SEQ ID NO: 104112 - protein, 9 aa, Homo sapiens
  misc_feature (1)..(9): Table A1; Target 1270; HLA-B*51:01; PCDG8; ENSG00000253767; Protocadherin gamma-A8 (PCDH-gamma-A8)
DALKQSLVV

SEQ ID NO: 104113 - protein, 10 aa, Homo sapiens
  misc_feature (1)..(10): Table A1; Target 1271; HLA-B*44:03; PCDG8; ENSG00000253767; Protocadherin gamma-A8 (PCDH-gamma-A8)
EEVQAFLQTY

SEQ ID NO: 104114 - protein, 9 aa, Homo sapiens
  misc_feature (1)..(9): Table A1; Target 1272; HLA-A*30:02; PCDG8; ENSG00000253767; Protocadherin gamma-A8 (PCDH-gamma-A8)
GTMGLSARY

SEQ ID NO: 104115 - protein, 9 aa, Homo sapiens
  misc_feature (1)..(9): Table A1; Target 1273; HLA-A*02:01; PCDG8; ENSG00000253767; Protocadherin gamma-A8 (PCDH-gamma-A8)
YLVTKVVAV

SEQ ID NO: 104116 - protein, 9 aa, Homo sapiens
  misc_feature (1)..(9): Table A1; Target 1274; HLA-B*44:03; DAZLENSG00000092345; Deleted in azoospermia-like (DAZ homolog) (DAZ-like autosomal) (Deleted in azoospermia-like 1) (SPGY-like-autosomal)
DETEIRSFF

SEQ ID NO: 104117 - protein, 9 aa, Homo sapiens
  misc_feature (1)..(9): Table A1; Target 1275; HLA-B*51:01; PP13ENSG00000105198; Galactoside-binding soluble lectin 13 (Galectin-13) (Gal-13) (Placental tissue protein 13) (PP13) (Placental protein 13)
IPPSFVKMV

SEQ ID NO: 104118 - protein, 9 aa, Homo sapiens
  misc_feature (1)..(9): Table A1; Target 1276; HLA-A*03:01; APOL5; ENSG00000128313; Apolipoprotein L5 (Apolipoprotein L-V) (ApoL-V)
RLGPLTTSH

SEQ ID NO: 104119 - protein, 11 aa, Homo sapiens
  misc_feature (1)..(11): Table A1; Target 1277; HLA-A*01:01; RNF17; ENSG00000132972; RING finger protein 17 (Tudor domain-containing protein 4)
VTDTLVEVLLY

SEQ ID NO: 104120 - protein, 9 aa, Homo sapiens
  misc_feature (1)..(9): Table A1; Target 1278; HLA-A*24:02; FATE1; ENSG00000147378; Fetal and adult testis-expressed transcript protein (Cancer/testis antigen 43) (CT43) (Tumor antigen BJ-HCC-2)
EYAGNFQGI

SEQ ID NO: 104121 - protein, 9 aa, Homo sapiens
  misc_feature (1)..(9): Table A1; Target 1279; HLA-B*51:01; MAGC1; ENSG00000155495; Melanoma-associated antigen C1 (Cancer/testis antigen 7.1) (CT7.1) (MAGE-C1 antigen)
DSYVFVNTL

SEQ ID NO: 104122 - protein, 9 aa, Homo sapiens
  misc_feature (1)..(9): Table A1; Target 1280; HLA-A*24:02; CC049; ENSG00000163632; Putative uncharacterized protein C3orf49
LYLPEPFKI

SEQ ID NO: 104123 - protein, 9 aa, Homo sapiens
  misc_feature (1)..(9): Table A1; Target 1281; HLA-A*02:07; CC049; ENSG00000163632; Putative uncharacterized protein C3orf49
YLPEPFKIA

SEQ ID NO: 104124 - protein, 9 aa, Homo sapiens
  misc_feature (1)..(9): Table A1; Target 1282; HLA-B*46:01; ZPLD1; ENSG00000170044; Zona pellucida-like domain-containing protein 1 (ZP domain-containing protein 1)
MVILGVTSF

SEQ ID NO: 104125 - protein, 8 aa, Homo sapiens
  misc_feature (1)..(8): Table A1; Target 1283; HLA-B*08:01; ACHA9; ENSG00000174343; Neuronal acetylcholine receptor subunit alpha-9 (Nicotinic acetylcholine receptor subunit alpha-9) (NACHR alpha-9)
MPAVKNVI

SEQ ID NO: 104126 - protein, 9 aa, Homo sapiens
  misc_feature (1)..(9): Table A1; Target 1284; HLA-A*29:02; NKAI3; ENSG00000185942; Sodium/potassium-transporting ATPase subunit beta-1-interacting protein 3 (Na(+)/K(+)-transporting ATPase subunit beta-1-interacting protein 3) (Protein FAM77D)
LLSLVGFVY

SEQ ID NO: 104127 - protein, 9 aa, Homo sapiens
  misc_feature (1)..(9): Table A1; Target 1285; HLA-C*02:02; C9J420; ENSG00000186038; 5-hydroxytryptamine receptor 3E (Fragment)
AELTGGSEW

SEQ ID NO: 104128 - protein, 11 aa, Homo sapiens
  misc_feature (1)..(11): Table A1; Target 1286; HLA-A*29:02; M4A18; ENSG00000214782; Membrane-spanning 4-domains subfamily A member 18
IFIIITDLSLY

SEQ ID NO: 104129 - protein, 9 aa, Homo sapiens
  misc_feature (1)..(9): Table A1; Target 1287; HLA-C*02:02; M4A18; ENSG00000214782; Membrane-spanning 4-domains subfamily A member 18
SAINPVLYY

SEQ ID NO: 104130 - protein, 10 aa, Homo sapiens
  misc_feature (1)..(10): Table A1; Target 1288; HLA-A*30:02; DC8L1; ENSG00000226372; DDB1- and CUL4-associated factor 8-like protein 1 (WD repeat-containing protein 42B)
RVAELINASY

SEQ ID NO: 104131 - protein, 9 aa, Homo sapiens
  misc_feature (1)..(9): Table A1; Target 1289; HLA-B*35:01; DC8L1; ENSG00000226372; DDB1- and CUL4-associated factor 8-like protein 1 (WD repeat-containing protein 42B)
TAASSDIEM

SEQ ID NO: 104132 - protein, 8 aa, Homo sapiens
  misc_feature (1)..(8): Table A1; Target 1290; HLA-B*18:01; A14EL; ENSG00000268223; ARL14 effector protein-like
NEYFSTKY

SEQ ID NO: 104133 - protein, 8 aa, Homo sapiens
  misc_feature (1)..(8): Table A1; Target 1291; HLA-A*33:01; ADAM7; ENSG00000069206; Disintegrin and metalloproteinase domain-containing protein 7 (ADAM 7) (Sperm maturation-related glycoprotein GP-83)
DTNIIANR

SEQ ID NO: 104134 - protein, 11 aa, Homo sapiens
  misc_feature (1)..(11): Table A1; Target 1292; HLA-A*11:01; SMC1B; ENSG00000077935; Structural maintenance of chromosomes protein 1B (SMC protein 1B) (SMC-1-beta) (SMC-1B)
QVASQEDILLK

SEQ ID NO: 104135 - protein, 8 aa, Homo sapiens
  misc_feature (1)..(8): Table A1; Target 1293; HLA-B*18:01; TRI51; ENSG00000124900; Tripartite motif-containing protein 51 (SPRY domain-containing protein 5)
IEAIRAEY

SEQ ID NO: 104136 - protein, 11 aa, Homo sapiens
  misc_feature (1)..(11): Table A1; Target 1294; HLA-A*01:01; DMRT1; ENSG00000137090; Doublesex- and mab-3-related transcription factor 1 (DM domain expressed in testis protein 1)
VSDSTYYSSFY

SEQ ID NO: 104137 - protein, 9 aa, Homo sapiens
  misc_feature (1)..(9): Table A1; Target 1295; HLA-A*02:01; X6R6V8; ENSG00000143552; Nuclear pore membrane glycoprotein 210-like
FLGPATAHL

SEQ ID NO: 104138 - protein, 9 aa, Homo sapiens
  misc_feature (1)..(9): Table A1; Target 1296; HLA-A*24:02; X6R6V8; ENSG00000143552; Nuclear pore membrane glycoprotein 210-like
IYSVRVVNF

SEQ ID NO: 104139 - protein, 11 aa, Homo sapiens
  misc_feature (1)..(11): Table A1; Target 1297; HLA-A*31:01; LGSNENSG00000146166; Lengsin (Glutamate-ammonia ligase domain-containing protein 1) (Lens glutamine synthase-like)
RVLPWADRTAR

SEQ ID NO: 104140 - protein, 9 aa, Homo sapiens
  misc_feature (1)..(9): Table A1; Target 1298; HLA-B*35:01; CG072; ENSG00000164500; Uncharacterized protein C7orf72
NPLGDIASL

SEQ ID NO: 104141 - protein, 8 aa, Homo sapiens
  misc_feature (1)..(8): Table A1; Target 1299; HLA-B*51:01; SC6A5; ENSG00000165970; Sodium- and chloride-dependent glycine transporter 2 (GlyT-2) (GlyT2) (Solute carrier family 6 member 5)
FPYVVLVI

SEQ ID NO: 104142 - protein, 9 aa, Homo sapiens
  misc_feature (1)..(9): Table A1; Target 1300; HLA-A*02:07; SC6A5; ENSG00000165970; Sodium- and chloride-dependent glycine transporter 2 (GlyT-2) (GlyT2) (Solute carrier family 6 member 5)
GLPIFFLEV

SEQ ID NO: 104143 - protein, 9 aa, Homo sapiens
  misc_feature (1)..(9): Table A1; Target 1301; HLA-B*51:01; SC6A5; ENSG00000165970; Sodium- and chloride-dependent glycine transporter 2 (GlyT-2) (GlyT2) (Solute carrier family 6 member 5)
TAYPNVTMV

SEQ ID NO: 104144 - protein, 8 aa, Homo sapiens
  misc_feature (1)..(8): Table A1; Target 1302; HLA-B*51:01; SC6A5; ENSG00000165970; Sodium- and chloride-dependent glycine transporter 2 (GlyT-2) (GlyT2) (Solute carrier family 6 member 5)
WAFVTPTI

SEQ ID NO: 104145 - protein, 11 aa, Homo sapiens
  misc_feature (1)..(11): Table A1; Target 1303; HLA-A*11:01; PERLENSG00000167419; Lactoperoxidase (LPO) (EC 1.11.1.7) (Salivary peroxidase) (SPO)
QTLEELNTVLK

SEQ ID NO: 104146 - protein, 9 aa, Homo sapiens
  misc_feature (1)..(9): Table A1; Target 1304; HLA-A*01:01; SL9C1; ENSG00000172139; Sodium/hydrogen exchanger 10 (Na(+)/H(+) exchanger 10) (NHE-10) (Solute carrier family 9 member 10) (Solute carrier family 9 member C1) (Sperm-specific Na(+)/H(+) exchanger) (sNHE)
FTSSQVQRY

SEQ ID NO: 104147 - protein, 11 aa, Homo sapiens
  misc_feature (1)..(11): Table A1; Target 1305; HLA-C*02:02; C9J420; ENSG00000186038; 5-hydroxytryptamine receptor 3E (Fragment)
AEAELTGGSEW

SEQ ID NO: 104148 - protein, 9 aa, Homo sapiens
  misc_feature (1)..(9): Table A1; Target 1306; HLA-A*29:02; PRR27; ENSG00000187533; Proline-rich protein 27
RNLPPPLYY

SEQ ID NO: 104149 - protein, 9 aa, Homo sapiens
  misc_feature (1)..(9): Table A1; Target 1307; HLA-A*02:01; MAGBG; ENSG00000189023; Melanoma-associated antigen B16 (MAGE-B16 antigen)
KVLEFVAKV

SEQ ID NO: 104150 - protein, 9 aa, Homo sapiens
  misc_feature (1)..(9): Table A1; Target 1308; HLA-B*35:01; PTX4ENSG00000251692; Pentraxin-4;
FPTGAILTL

SEQ ID NO: 104151 - protein, 10 aa, Homo sapiens
  misc_feature (1)..(10): Table A1; Target 1309; HLA-B*44:03; TULP2; ENSG00000104804; Tubby-related protein 2 (Cancer/testis antigen 65) (CT65) (Tubby-like protein 2)
NEQESLLSRY

SEQ ID NO: 104152 - protein, 8 aa, Homo sapiens
  misc_feature (1)..(8): Table A1; Target 1310; HLA-B*51:01; PRA12; ENSG00000116726; PRAME family member 12
DALLAQKV

SEQ ID NO: 104153 - protein, 10 aa, Homo sapiens
  misc_feature (1)..(10): Table A1; Target 1311; HLA-B*44:03; PRA12; ENSG00000116726; PRAME family member 12
SESDLKHLSW

SEQ ID NO: 104154 - protein, 10 aa, Homo sapiens
  misc_feature (1)..(10): Table A1; Target 1312; HLA-A*11:01; ZSC10; ENSG00000130182; Zinc finger and SCAN domain-containing protein 10 (Zinc finger protein 206)
ASQVPSHSPK

SEQ ID NO: 104155 - protein, 9 aa, Homo sapiens
  misc_feature (1)..(9): Table A1; Target 1313; HLA-B*27:02; F71F1; ENSG00000135248; Protein FAM71F1 (Protein FAM137A) (Testis development protein NYD-SP18)
LRNQLDQQF

SEQ ID NO: 104156 - protein, 9 aa, Homo sapiens
  misc_feature (1)..(9): Table A1; Target 1314; HLA-A*02:01; GPR32; ENSG00000142511; Probable G-protein coupled receptor 32
ALADFMLSL

SEQ ID NO: 104157 - protein, 9 aa, Homo sapiens
  misc_feature (1)..(9): Table A1; Target 1315; HLA-A*29:02; GPR32; ENSG00000142511; Probable G-protein coupled receptor 32
YITFVFLSY

SEQ ID NO: 104158 - protein, 9 aa, Homo sapiens
  misc_feature (1)..(9): Table A1; Target 1316; HLA-A*11:01; PO4F1; ENSG00000152192; POU domain, class 4, transcription factor 1 (Brain-specific homeobox/POU domain protein 3A) (Brain-3A) (Brn-3A) (Homeobox/POU domain protein RDC-1) (Oct-T1)
STSTVPLAH

SEQ ID NO: 104159 - protein, 9 aa, Homo sapiens
  misc_feature (1)..(9): Table A1; Target 1317; HLA-B*44:02; CRGCENSG00000163254; Gamma-crystallin C (Gamma-C-crystallin) (Gamma-crystallin 2-1) (Gamma-crystallin 3)
GEYPDYQQW

SEQ ID NO: 104160 - protein, 9 aa, Homo sapiens
  misc_feature (1)..(9): Table A1; Target 1318; HLA-A*31:01; CG033; ENSG00000170279; Uncharacterized protein C7orf33
AVAVWVHVR

SEQ ID NO: 104161 - protein, 10 aa, Homo sapiens
  misc_feature (1)..(10): Table A1; Target 1319; HLA-A*29:02; CG033; ENSG00000170279; Uncharacterized protein C7orf33
SYLDLLTLSY

SEQ ID NO: 104162 - protein, 9 aa, Homo sapiens
  misc_feature (1)..(9): Table A1; Target 1320; HLA-A*01:01; CG033; ENSG00000170279; Uncharacterized protein C7orf33
YLDLLTLSY

SEQ ID NO: 104163 - protein, 9 aa, Homo sapiens
  misc_feature (1)..(9): Table A1; Target 1321; HLA-A*24:02; V9GZ31; ENSG00000177414; Ubiquitin-conjugating enzyme E2 U (Fragment)
NYAPPVVKF

SEQ ID NO: 104164 - protein, 9 aa, Homo sapiens
  misc_feature (1)..(9): Table A1; Target 1322; HLA-A*02:07; TEX19; ENSG00000182459; Testis-expressed protein 19
GLPWRFEEL

SEQ ID NO: 104165 - protein, 9 aa, Homo sapiens
  misc_feature (1)..(9): Table A1; Target 1323; HLA-A*26:01; H9KVA5; ENSG00000187959; Putative cleavage and polyadenylation-specificity factor subunit 4-like protein
EVIAGLERF

SEQ ID NO: 104166 - protein, 9 aa, Homo sapiens
  misc_feature (1)..(9): Table A1; Target 1324; HLA-B*35:01; H9KVA5; ENSG00000187959; Putative cleavage and polyadenylation-specificity factor subunit 4-like protein
FAFEKDVEM

SEQ ID NO: 104167 - protein, 11 aa, Homo sapiens
  misc_feature (1)..(11): Table A1; Target 1325; HLA-A*26:01; 1A1L2; ENSG00000205126; Probable inactive 1-aminocyclopropane-1-carboxylate synthase-like protein 2 (ACC synthase-like protein 2)
EVASAVSAFGY

SEQ ID NO: 104168 - protein, 10 aa, Homo sapiens
  misc_feature (1)..(10): Table A1; Target 1326; HLA-A*29:02; M4A18; ENSG00000214782; Membrane-spanning 4-domains subfamily A member 18
IFSAINPVLY

SEQ ID NO: 104169 - protein, 9 aa, Homo sapiens
  misc_feature (1)..(9): Table A1; Target 1327; HLA-A*29:02; M4A18; ENSG00000214782; Membrane-spanning 4-domains subfamily A member 18
SAINPVLYY

SEQ ID NO: 104170 - protein, 10 aa, Homo sapiens
  misc_feature (1)..(10): Table A1; Target 1328; HLA-A*26:01; E5RK72; ENSG00000215262; Potassium channel subfamily U member 1
EVYDEDPFAY

SEQ ID NO: 104171 - protein, 8 aa, Homo sapiens
  misc_feature (1)..(8): Table A1; Target 1329; HLA-B*18:01; RN148; ENSG00000235631; RING finger protein 148
TENIVAVM

SEQ ID NO: 104172 - protein, 8 aa, Homo sapiens
  misc_feature (1)..(8): Table A1; Target 1330; HLA-B*18:01; ERVV2; ENSG00000268964; Endogenous retrovirus group V member 2 Env polyprotein (HERV-V; 19q13.41 provirus ancestral Env polyprotein 2)
NENSLVSF

SEQ ID NO: 104173 - protein, 9 aa, Homo sapiens
  misc_feature (1)..(9): Table A1; Target 1331; HLA-A*02:07; TRPC7; ENSG00000069018; Short transient receptor potential channel 7 (TrpC7) (Transient receptor protein 7) (TRP-7) (hTRP7)
VQDDTLHNV

SEQ ID NO: 104174 - protein, 9 aa, Homo sapiens
  misc_feature (1)..(9): Table A1; Target 1332; HLA-B*46:01; ADAM7; ENSG00000069206; Disintegrin and metalloproteinase domain-containing protein 7 (ADAM 7) (Sperm maturation-related glycoprotein GP-83)
YSHVQGISY

SEQ ID NO: 104175 - protein, 9 aa, Homo sapiens
  misc_feature (1)..(9): Table A1; Target 1333; HLA-A*26:01; CCG5ENSG00000075429; Voltage-dependent calcium channel gamma-5 subunit (Neuronal voltage-gated calcium channel gamma-5 subunit) (Transmembrane AMPAR regulatory protein gamma-5) (TARP gamma-5)
ESAGVMSVY

SEQ ID NO: 104176 - protein, 9 aa, Homo sapiens
  misc_feature (1)..(9): Table A1; Target 1334; HLA-B*35:01; SMC1B; ENSG00000077935; Structural maintenance of chromosomes protein 1B (SMC protein 1B) (SMC-1-beta) (SMC-1B)
EPYLEGISY

SEQ ID NO: 104177 - protein, 9 aa, Homo sapiens
  misc_feature (1)..(9): Table A1; Target 1335; HLA-C*16:01; S6A18; ENSG00000164363; Sodium-dependent neutral amino acid transporter B(0)AT3 (Sodium- and chloride-dependent transporter XTRP2) (Solute carrier family 6 member 18) (System B(0) neutral amino acid transporter AT3)
SASGPGLAF

SEQ ID NO: 104178 - protein, 9 aa, Homo sapiens
  misc_feature (1)..(9): Table A1; Target 1336; HLA-A*02:07; ADA29; ENSG00000168594; Disintegrin and metalloproteinase domain-containing protein 29 (ADAM 29) (Cancer/testis antigen 73) (CT73)
ILDVIGVKV

SEQ ID NO: 104179 - protein, 10 aa, Homo sapiens
  misc_feature (1)..(10): Table A1; Target 1337; HLA-A*11:01; CTSRD; ENSG00000174898; Cation channel sperm-associated protein subunit delta (CatSper-delta) (CatSperdelta) (Transmembrane protein 146)
STLTVDIANK

SEQ ID NO: 104180 - protein, 9 aa, Homo sapiens
  misc_feature (1)..(9): Table A1; Target 1338; HLA-C*16:01; DC4L2; ENSG00000176566; DDB1- and CUL4-associated factor 4-like protein 2 (WD repeat-containing protein 21C)
VVTGHQQSF

SEQ ID NO: 104181 - protein, 11 aa, Homo sapiens
  misc_feature (1)..(11): Table A1; Target 1339; HLA-B*44:03; TFDP3; ENSG00000183434; Transcription factor Dp family member 3 (Cancer/testis antigen 30) (CT30) (Hepatocellular carcinoma-associated antigen 661)
QEVVGELVAKF

SEQ ID NO: 104182 - protein, 9 aa, Homo sapiens
  misc_feature (1)..(9): Table A1; Target 1340; HLA-B*35:01; CP2AD; ENSG00000197838; Cytochrome P450 2A13 (EC 1.14.14.1) (CYPIIA13)
LPGPQQQAF

SEQ ID NO: 104183 - protein, 9 aa, Homo sapiens
  misc_feature (1)..(9): Table A1; Target 1341; HLA-A*02:01; NTM1B; ENSG00000203740; Alpha N-terminal protein methyltransferase 1B (EC 2.1.1.299) (Methyltransferase-like protein 11B) (X-Pro-Lys N-terminal protein methyltransferase 1B) (NTM1B)
YLLEKIPLV

SEQ ID NO: 104184 - protein, 10 aa, Homo sapiens
  misc_feature (1)..(10): Table A1; Target 1342; HLA-B*44:02; TDR15; ENSG00000218819; Tudor domain-containing protein 15
AENESVIIRL

SEQ ID NO: 104185 - protein, 10 aa, Homo sapiens
  misc_feature (1)..(10): Table A1; Target 1343; HLA-B*44:03; TDR15; ENSG00000218819; Tudor domain-containing protein 15
AENESVIIRL

SEQ ID NO: 104186 - protein, 10 aa, Homo sapiens
  misc_feature (1)..(10): Table A1; Target 1344; HLA-C*02:02; TDR15; ENSG00000218819; Tudor domain-containing protein 15
AENESVIIRL

SEQ ID NO: 104187 - protein, 9 aa, Homo sapiens
  misc_feature (1)..(9): Table A1; Target 1345; HLA-A*11:01; TDR15; ENSG00000218819; Tudor domain-containing protein 15
AILLQVIAK

SEQ ID NO: 104188 - protein, 9 aa, Homo sapiens
  misc_feature (1)..(9): Table A1; Target 1346; HLA-A*02:01; TDR15; ENSG00000218819; Tudor domain-containing protein 15
ALLGQVVYA

SEQ ID NO: 104189 - protein, 9 aa, Homo sapiens
  misc_feature (1)..(9): Table A1; Target 1347; HLA-A*26:01; TDR15; ENSG00000218819; Tudor domain-containing protein 15
AVITEINGY

SEQ ID NO: 104190 - protein, 9 aa, Homo sapiens
  misc_feature (1)..(9): Table A1; Target 1348; HLA-B*51:01; TDR15; ENSG00000218819; Tudor domain-containing protein 15
DARIFQLSI

SEQ ID NO: 104191 - protein, 9 aa, Homo sapiens
  misc_feature (1)..(9): Table A1; Target 1349; HLA-B*51:01; TDR15; ENSG00000218819; Tudor domain-containing protein 15
DPYEIGQTA

SEQ ID NO: 104192 - protein, 11 aa, Homo sapiens
  misc_feature (1)..(11): Table A1; Target 1350; HLA-A*26:01; TDR15; ENSG00000218819; Tudor domain-containing protein 15
DVISLMLQAGY

SEQ ID NO: 104193 - protein, 9 aa, Homo sapiens
  misc_feature (1)..(9): Table A1; Target 1351; HLA-B*44:03; TDR15; ENSG00000218819; Tudor domain-containing protein 15
EEVYISHIY

SEQ ID NO: 104194 - protein, 9 aa, Homo sapiens
  misc_feature (1)..(9): Table A1; Target 1352; HLA-A*01:01; TDR15; ENSG00000218819; Tudor domain-containing protein 15
EVDIVFVDY

SEQ ID NO: 104195 - protein, 8 aa, Homo sapiens
  misc_feature (1)..(8): Table A1; Target 1353; HLA-B*18:01; TDR15; ENSG00000218819; Tudor domain-containing protein 15
FEVEFIDY

SEQ ID NO: 104196 - protein, 11 aa, Homo sapiens
  misc_feature (1)..(11): Table A1; Target 1354; HLA-A*11:01; TDR15; ENSG00000218819; Tudor domain-containing protein 15
GSMNSNQQLFK

SEQ ID NO: 104197 - protein, 9 aa, Homo sapiens
  misc_feature (1)..(9): Table A1; Target 1355; HLA-B*35:01; TDR15; ENSG00000218819; Tudor domain-containing protein 15
IPTDSSSEF

SEQ ID NO: 104198 - protein, 10 aa, Homo sapiens
  misc_feature (1)..(10): Table A1; Target 1356; HLA-B*44:03; TDR15; ENSG00000218819; Tudor domain-containing protein 15
KEVDIVFVDY

SEQ ID NO: 104199 - protein, 9 aa, Homo sapiens
  misc_feature (1)..(9): Table A1; Target 1357; HLA-A*11:01; TDR15; ENSG00000218819; Tudor domain-containing protein 15
KTVDYFTSK

SEQ ID NO: 104200 - protein, 10 aa, Homo sapiens
  misc_feature (1)..(10): Table A1; Target 1358; HLA-A*24:02; TDR15; ENSG00000218819; Tudor domain-containing protein 15
KYVDDKVLVF

SEQ ID NO: 104201 - protein, 9 aa, Homo sapiens
  misc_feature (1)..(9): Table A1; Target 1359; HLA-B*51:01; TDR15; ENSG00000218819; Tudor domain-containing protein 15
LPKSLAVNI

SEQ ID NO: 104202 - protein, 11 aa, Homo sapiens
  misc_feature (1)..(11): Table A1; Target 1360; HLA-A*01:01; TDR15; ENSG00000218819; Tudor domain-containing protein 15
PTDSSSEFQVY

SEQ ID NO: 104203 - protein, 9 aa, Homo sapiens
  misc_feature (1)..(9): Table A1; Target 1361; HLA-B*35:01; TDR15; ENSG00000218819; Tudor domain-containing protein 15
QALLGQVVY

SEQ ID NO: 104204 - protein, 10 aa, Homo sapiens
  misc_feature (1)..(10): Table A1; Target 1362; HLA-A*11:01; TDR15; ENSG00000218819; Tudor domain-containing protein 15
QTQESTVNSK

SEQ ID NO: 104205 - protein, 9 aa, Homo sapiens
  misc_feature (1)..(9): Table A1; Target 1363; HLA-A*24:02; TDR15; ENSG00000218819; Tudor domain-containing protein 15
QYITLSETF

SEQ ID NO: 104206 - protein, 9 aa, Homo sapiens
  misc_feature (1)..(9): Table A1; Target 1364; HLA-A*02:01; TDR15; ENSG00000218819; Tudor domain-containing protein 15
RLAEIVYNI

SEQ ID NO: 104207 - protein, 9 aa, Homo sapiens
  misc_feature (1)..(9): Table A1; Target 1365; HLA-A*31:01; TDR15; ENSG00000218819; Tudor domain-containing protein 15
SAKEFLMNR

SEQ ID NO: 104208 - protein, 9 aa, Homo sapiens
  misc_feature (1)..(9): Table A1; Target 1366; HLA-B*44:03; TDR15; ENSG00000218819; Tudor domain-containing protein 15
SEFKNPFTL

SEQ ID NO: 104209 - protein, 9 aa, Homo sapiens
  misc_feature (1)..(9): Table A1; Target 1367; HLA-C*02:02; TDR15; ENSG00000218819; Tudor domain-containing protein 15
SEFKNPFTL

SEQ ID NO: 104210 - protein, 11 aa, Homo sapiens
  misc_feature (1)..(11): Table A1; Target 1368; HLA-C*02:02; TDR15; ENSG00000218819; Tudor domain-containing protein 15
SETSVSDVNSF

SEQ ID NO: 104211 - protein, 9 aa, Homo sapiens
  misc_feature (1)..(9): Table A1; Target 1369; HLA-A*03:01; TDR15; ENSG00000218819; Tudor domain-containing protein 15
SLNKKGILK

SEQ ID NO: 104212 - protein, 9 aa, Homo sapiens
  misc_feature (1)..(9): Table A1; Target 1370; HLA-A*11:01; TDR15; ENSG00000218819; Tudor domain-containing protein 15
SVNLQNFPK

SEQ ID NO: 104213 - protein, 10 aa, Homo sapiens
  misc_feature (1)..(10): Table A1; Target 1371; HLA-A*30:02; TDR15; ENSG00000218819; Tudor domain-containing protein 15
VINKPSPVTY

SEQ ID NO: 104214 - protein, 9 aa, Homo sapiens
  misc_feature (1)..(9): Table A1; Target 1372; HLA-A*02:07; TDR15; ENSG00000218819; Tudor domain-containing protein 15
VLDKLQPSL

SEQ ID NO: 104215 - protein, 9 aa, Homo sapiens
  misc_feature (1)..(9): Table A1; Target 1373; HLA-A*29:02; TDR15; ENSG00000218819; Tudor domain-containing protein 15
YGFSFYIRY

SEQ ID NO: 104216 - protein, 9 aa, Homo sapiens
  misc_feature (1)..(9): Table A1; Target 1374; HLA-B*08:01; TDR15; ENSG00000218819; Tudor domain-containing protein 15
YINEKIKVL

SEQ ID NO: 104217 - protein, 10 aa, Homo sapiens
  misc_feature (1)..(10): Table A1; Target 1375; HLA-A*02:07; TDR15; ENSG00000218819; Tudor domain-containing protein 15
YVDDKVLVFL

SEQ ID NO: 104218 - protein, 9 aa, Homo sapiens
  misc_feature (1)..(9): Table A1; Target 1376; HLA-A*02:07; TDR15; ENSG00000218819; Tudor domain-containing protein 15
YVDDKVLVF

SEQ ID NO: 104219 - protein, 10 aa, Homo sapiens
  misc_feature (1)..(10): Table A1; Target 1377; HLA-A*31:01; V9GYR9; ENSG00000225362; Cancer/testis antigen 62 (Fragment)
ATLQPRGITR

SEQ ID NO: 104220 - protein, 9 aa, Homo sapiens
  misc_feature (1)..(9): Table A1; Target 1378; HLA-A*02:01; FHL17; ENSG00000132446; Ferritin heavy polypeptide-like 17 (Cancer/testis antigen 38) (CT38)
YLHEQVKTI

SEQ ID NO: 104221 - protein, 9 aa, Homo sapiens
  misc_feature (1)..(9): Table A1; Target 1379; HLA-B*18:01; FATE1; ENSG00000147378; Fetal and adult testis-expressed transcript protein (Cancer/testis antigen 43) (CT43) (Tumor antigen BJ-HCC-2)
QEHLVIAEM

SEQ ID NO: 104222 - protein, 9 aa, Homo sapiens
  misc_feature (1)..(9): Table A1; Target 1380; HLA-A*31:01; PABP3; ENSG00000151846; Polyadenylate-binding protein 3 (PABP-3) (Poly(A)-binding protein 3) (Testis-specific poly(A)-binding protein)
NGKQIYVGR

SEQ ID NO: 104223 - protein, 9 aa, Homo sapiens
  misc_feature (1)..(9): Table A1; Target 1381; HLA-B*35:01; OTOP1; ENSG00000163982; Otopetrin-1
AAASLFEVY

SEQ ID NO: 104224 - protein, 9 aa, Homo sapiens
  misc_feature (1)..(9): Table A1; Target 1382; HLA-A*30:02; OTOP1; ENSG00000163982; Otopetrin-1
ATIAVVVVY

SEQ ID NO: 104225 - protein, 10 aa, Homo sapiens
  misc_feature (1)..(10): Table A1; Target 1383; HLA-B*35:01; OTOP1; ENSG00000163982; Otopetrin-1
HAAASLFEVY

SEQ ID NO: 104226 - protein, 8 aa, Homo sapiens
  misc_feature (1)..(8): Table A1; Target 1384; HLA-B*51:01; OTOP1; ENSG00000163982; Otopetrin-1
LPYSILAI

SEQ ID NO: 104227 - protein, 10 aa, Homo sapiens
  misc_feature (1)..(10): Table A1; Target 1385; HLA-A*30:02; CD045; ENSG00000164123; Uncharacterized protein C4orf45
ASLDSITHRY

SEQ ID NO: 104228 - protein, 10 aa, Homo sapiens
  misc_feature (1)..(10): Table A1; Target 1386; HLA-A*30:02; CD045; ENSG00000164123; Uncharacterized protein C4orf45
ASNRSLPAKY

SEQ ID NO: 104229 - protein, 10 aa, Homo sapiens
  misc_feature (1)..(10): Table A1; Target 1387; HLA-B*35:01; ZPLD1; ENSG00000170044; Zona pellucida-like domain-containing protein 1 (ZP domain-containing protein 1)
TPDPPTIISY

SEQ ID NO: 104230 - protein, 11 aa, Homo sapiens
  misc_feature (1)..(11): Table A1; Target 1388; HLA-A*03:01; GDPD4; ENSG00000178795; Glycerophosphodiester phosphodiesterase domain-containing protein 4 (EC 3.1.-.-) (Glycerophosphodiester phosphodiesterase 6) (UgpQ)
ALYPALPKSGK

SEQ ID NO: 104231 - protein, 9 aa, Homo sapiens
  misc_feature (1)..(9): Table A1; Target 1389; HLA-B*44:03; GDPD4; ENSG00000178795; Glycerophosphodiester phosphodiesterase domain-containing protein 4 (EC 3.1.-.-) (Glycerophosphodiester phosphodiesterase 6) (UgpQ)
LETDIHLSY

SEQ ID NO: 104232 - protein, 10 aa, Homo sapiens
  misc_feature (1)..(10): Table A1; Target 1390; HLA-B*18:01; NAL11; ENSG00000179873; NACHT, LRR and PYD domains-containing protein 11 (Nucleotide-binding oligomerization domain protein 17) (PAAD-and NACHT domain-containing protein 10) (PYRIN-containing APAF1-like
SEAGLTANQY

SEQ ID NO: 104233 - protein, 11 aa, Homo sapiens
  misc_feature (1)..(11): Table A1; Target 1391; HLA-A*33:01; CL040; ENSG00000180116; Uncharacterized protein C12orf40
DVFSPSHKTTR

SEQ ID NO: 104234 - protein, 9 aa, Homo sapiens
  misc_feature (1)..(9): Table A1; Target 1392; HLA-A*33:01; CL040; ENSG00000180116; Uncharacterized protein C12orf40
DYYPSSSER

SEQ ID NO: 104235 - protein, 11 aa, Homo sapiens
  misc_feature (1)..(11): Table A1; Target 1393; HLA-A*02:01; CL040; ENSG00000180116; Uncharacterized protein C12orf40
ILMEEGGIYSL

SEQ ID NO: 104236 - protein, 10 aa, Homo sapiens
  misc_feature (1)..(10): Table A1; Target 1394; HLA-A*01:01; CL040; ENSG00000180116; Uncharacterized protein C12orf40
STDEIRQSDY

SEQ ID NO: 104237 - protein, 9 aa, Homo sapiens
  misc_feature (1)..(9): Table A1; Target 1395; HLA-B*08:01; CL040; ENSG00000180116; Uncharacterized protein C12orf40
TLFERLNSL

SEQ ID NO: 104238 - protein, 9 aa, Homo sapiens
  misc_feature (1)..(9): Table A1; Target 1396; HLA-A*24:02; OTOL1; ENSG00000182447; Otolin-1;
NYSPVTGKF

SEQ ID NO: 104239 - protein, 9 aa, Homo sapiens
  misc_feature (1)..(9): Table A1; Target 1397; HLA-A*02:07; OTOL1; ENSG00000182447; Otolin-1;
TLDPADFFL

SEQ ID NO: 104240 - protein, 9 aa, Homo sapiens
  misc_feature (1)..(9): Table A1; Target 1398; HLA-B*44:03; CNGA2; ENSG00000183862; Cyclic nucleotide-gated olfactory channel (Cyclic nucleotide-gated cation channel 2) (Cyclic nucleotide-gated channel alpha-2) (CNG channel alpha-2) (CNG-2) (CNG2)
AEIAINVHL

SEQ ID NO: 104241 - protein, 9 aa, Homo sapiens
  misc_feature (1)..(9): Table A1; Target 1399; HLA-C*02:02; CNGA2; ENSG00000183862; Cyclic nucleotide-gated olfactory channel (Cyclic nucleotide-gated cation channel 2) (Cyclic nucleotide-gated channel alpha-2) (CNG channel alpha-2) (CNG-2) (CNG2)
AEIAINVHL

SEQ ID NO: 104242 - protein, 10 aa, Homo sapiens
  misc_feature (1)..(10): Table A1; Target 1400; HLA-C*02:02; CNGA2; ENSG00000183862; Cyclic nucleotide-gated olfactory channel (Cyclic nucleotide-gated cation channel 2) (Cyclic nucleotide-gated channel alpha-2) (CNG channel alpha-2) (CNG-2) (CNG2)
AEYTGAQQKL

SEQ ID NO: 104243 - protein, 10 aa, Homo sapiens
  misc_feature (1)..(10): Table A1; Target 1401; HLA-A*03:01; CNGA2; ENSG00000183862; Cyclic nucleotide-gated olfactory channel (Cyclic nucleotide-gated cation channel 2) (Cyclic nucleotide-gated channel alpha-2) (CNG channel alpha-2) (CNG-2) (CNG2)
AINVHLSTLK

SEQ ID NO: 104244 - protein, 9 aa, Homo sapiens
  misc_feature (1)..(9): Table A1; Target 1402; HLA-B*18:01; CNGA2; ENSG00000183862; Cyclic nucleotide-gated olfactory channel (Cyclic nucleotide-gated cation channel 2) (Cyclic nucleotide-gated channel alpha-2) (CNG channel alpha-2) (CNG-2) (CNG2)
DENEVATSM

SEQ ID NO: 104245 - protein, 9 aa, Homo sapiens
  misc_feature (1)..(9): Table A1; Target 1403; HLA-A*01:01; CNGA2; ENSG00000183862; Cyclic nucleotide-gated olfactory channel (Cyclic nucleotide-gated cation channel 2) (Cyclic nucleotide-gated channel alpha-2) (CNG channel alpha-2) (CNG-2) (CNG2)
FSDLQKGYY

SEQ ID NO: 104246 - protein, 9 aa, Homo sapiens
  misc_feature (1)..(9): Table A1; Target 1404; HLA-B*44:03; CNGA2; ENSG00000183862; Cyclic nucleotide-gated olfactory channel (Cyclic nucleotide-gated cation channel 2) (Cyclic nucleotide-gated channel alpha-2) (CNG channel alpha-2) (CNG-2) (CNG2)
MEVDVQEKL

SEQ ID NO: 104247 - protein, 9 aa, Homo sapiens
  misc_feature (1)..(9): Table A1; Target 1405; HLA-A*01:01; CNGA2; ENSG00000183862; Cyclic nucleotide-gated olfactory channel (Cyclic nucleotide-gated cation channel 2) (Cyclic nucleotide-gated channel alpha-2) (CNG channel alpha-2) (CNG-2) (CNG2)
VADDGVTQY

SEQ ID NO: 104248 - protein, 10 aa, Homo sapiens
  misc_feature (1)..(10): Table A1; Target 1406; HLA-A*01:01; CNGA2; ENSG00000183862; Cyclic nucleotide-gated olfactory channel (Cyclic nucleotide-gated cation channel 2) (Cyclic nucleotide-gated channel alpha-2) (CNG channel alpha-2) (CNG-2) (CNG2)
VLDPAGDWYY

SEQ ID NO: 104249 - protein, 9 aa, Homo sapiens
  misc_feature (1)..(9): Table A1; Target 1407; HLA-B*35:01; CNGA2; ENSG00000183862; Cyclic nucleotide-gated olfactory channel (Cyclic nucleotide-gated cation channel 2) (Cyclic nucleotide-gated channel alpha-2) (CNG channel alpha-2) (CNG-2) (CNG2)
YPNITDPEY

SEQ ID NO: 104250 - protein, 9 aa, Homo sapiens
  misc_feature (1)..(9): Table A1; Target 1408; HLA-A*29:02; PLET1; ENSG00000188771; Placenta-expressed transcript 1 protein
AFLTSTLLF

SEQ ID NO: 104251 - protein, 8 aa, Homo sapiens
  misc_feature (1)..(8): Table A1; Target 1409; HLA-B*18:01; PLET1; ENSG00000188771; Placenta-expressed transcript 1 protein
DEYYTITL

SEQ ID NO: 104252 - protein, 8 aa, Homo sapiens
  misc_feature (1)..(8): Table A1; Target 1410; HLA-B*18:01; PLET1; ENSG00000188771; Placenta-expressed transcript 1 protein
TEVEIQAF

SEQ ID NO: 104253 - protein, 9 aa, Homo sapiens
  misc_feature (1)..(9): Table A1; Target 1411; HLA-B*18:01; ZN560; ENSG00000198028; Zinc finger protein 560
YENVAKVGF

SEQ ID NO: 104254 - protein, 10 aa, Homo sapiens
  misc_feature (1)..(10): Table A1; Target 1412; HLA-C*02:02; A0A1B0GTN1; ENSG00000224960; Putative SMEK homolog 3
AENQGLVLKF

SEQ ID NO: 104255 - protein, 9 aa, Homo sapiens
  misc_feature (1)..(9): Table A1; Target 1413; HLA-A*02:07; F2Z2I4; ENSG00000228927,ENSG00000236424; Testis-specific Y-encoded protein 10 (Testis-specific Y-encoded protein 3)
LLDDIMAEV

SEQ ID NO: 104256 - protein, 9 aa, Homo sapiens
  misc_feature (1)..(9): Table A1; Target 1414; HLA-A*02:07; TSPY3; ENSG00000228927; Testis-specific Y-encoded protein 3
LLDDIMAEV

SEQ ID NO: 104257 - protein, 9 aa, Homo sapiens
  misc_feature (1)..(9): Table A1; Target 1415; HLA-A*01:01; AT5L2; ENSG00000249222; ATP synthase subunit g 2, mitochondrial (ATPase subunit g 2)
ATEVSTWFY

SEQ ID NO: 104258 - protein, 9 aa, Homo sapiens
  misc_feature (1)..(9): Table A1; Target 1416; HLA-A*02:01; AT5L2; ENSG00000249222; ATP synthase subunit g 2, mitochondrial (ATPase subunit g 2)
NLVEKTPAL

SEQ ID NO: 104259 - protein, 11 aa, Homo sapiens
  misc_feature (1)..(11): Table A1; Target 1417; HLA-B*35:01; AT5L2; ENSG00000249222; ATP synthase subunit g 2, mitochondrial (ATPase subunit g 2)
TPALVNAAVTY

SEQ ID NO: 104260 - protein, 9 aa, Homo sapiens
  misc_feature (1)..(9): Table A1; Target 1418; HLA-A*02:07; PTTG2; ENSG00000250254; Securin-2 (Pituitary tumor-transforming gene 2 protein)
ALDGISQVL

SEQ ID NO: 104261 - protein, 9 aa, Homo sapiens
  misc_feature (1)..(9): Table A1; Target 1419; HLA-B*35:01; PTTG2; ENSG00000250254; Securin-2 (Pituitary tumor-transforming gene 2 protein)
DAYPEIEKF

SEQ ID NO: 104262 - protein, 9 aa, Homo sapiens
  misc_feature (1)..(9): Table A1; Target 1420; HLA-B*51:01; PTTG2; ENSG00000250254; Securin-2 (Pituitary tumor-transforming gene 2 protein)
DAYPEIEKF

SEQ ID NO: 104263 - protein, 9 aa, Homo sapiens
  misc_feature (1)..(9): Table A1; Target 1421; HLA-B*44:03; PTTG2; ENSG00000250254; Securin-2 (Pituitary tumor-transforming gene 2 protein)
EEGELEKLF

SEQ ID NO: 104264 - protein, 11 aa, Homo sapiens
  misc_feature (1)..(11): Table A1; Target 1422; HLA-A*03:01; PTTG2; ENSG00000250254; Securin-2 (Pituitary tumor-transforming gene 2 protein)
KTYDAPSALPK

SEQ ID NO: 104265 - protein, 11 aa, Homo sapiens
  misc_feature (1)..(11): Table A1; Target 1423; HLA-A*11:01; PTTG2; ENSG00000250254; Securin-2 (Pituitary tumor-transforming gene 2 protein)
KTYDAPSALPK

SEQ ID NO: 104266 - protein, 10 aa, Homo sapiens
  misc_feature (1)..(10): Table A1; Target 1424; HLA-A*29:02; TRPC5; ENSG00000072315; Short transient receptor potential channel 5 (TrpC5) (Transient receptor protein 5) (TRP-5) (hTRP-5) (hTRP5)
SVYVGDALLY

SEQ ID NO: 104267 - protein, 9 aa, Homo sapiens
  misc_feature (1)..(9): Table A1; Target 1425; HLA-A*02:07; BRDTENSG00000137948; Bromodomain testis-specific protein (Cancer/testis antigen 9) (CT9) (RING3-like protein)
EMFPKFTEV

SEQ ID NO: 104268 - protein, 9 aa, Homo sapiens
  misc_feature (1)..(9): Table A1; Target 1426; HLA-A*11:01; ADAD1; ENSG00000164113; Adenosine deaminase domain-containing protein 1 (Testis nuclear RNA-binding protein)
AVVDGIQYK

SEQ ID NO: 104269 - protein, 9 aa, Homo sapiens
  misc_feature (1)..(9): Table A1; Target 1427; HLA-A*33:01; ADAD1; ENSG00000164113; Adenosine deaminase domain-containing protein 1 (Testis nuclear RNA-binding protein)
DTHAVVTAR

SEQ ID NO: 104270 - protein, 10 aa, Homo sapiens
  misc_feature (1)..(10): Table A1; Target 1428; HLA-A*26:01; ADAD1; ENSG00000164113; Adenosine deaminase domain-containing protein 1 (Testis nuclear RNA-binding protein)
EVVAIGTGEY

SEQ ID NO: 104271 - protein, 9 aa, Homo sapiens
  misc_feature (1)..(9): Table A1; Target 1429; HLA-A*11:01; ADAD1; ENSG00000164113; Adenosine deaminase domain-containing protein 1 (Testis nuclear RNA-binding protein)
ISNPVLPPK

SEQ ID NO: 104272 - protein, 10 aa, Homo sapiens
  misc_feature (1)..(10): Table A1; Target 1430; HLA-A*11:01; ADAD1; ENSG00000164113; Adenosine deaminase domain-containing protein 1 (Testis nuclear RNA-binding protein)
SISNPVLPPK

SEQ ID NO: 104273 - protein, 9 aa, Homo sapiens
  misc_feature (1)..(9): Table A1; Target 1431; HLA-A*31:01; ADAD1; ENSG00000164113; Adenosine deaminase domain-containing protein 1 (Testis nuclear RNA-binding protein)
SLAAFIIER

SEQ ID NO: 104274 - protein, 9 aa, Homo sapiens
  misc_feature (1)..(9): Table A1; Target 1432; HLA-B*35:01; MAJIN; ENSG00000168070; Membrane-anchored junction protein
HAGPNVYKF

SEQ ID NO: 104275 - protein, 10 aa, Homo sapiens
  misc_feature (1)..(10): Table A1; Target 1433; HLA-B*44:02; HYPMENSG00000187516; Huntingtin-interacting protein M (Huntingtin yeast partner M)
AESDVTRFLF

SEQ ID NO: 104276 - protein, 10 aa, Homo sapiens
  misc_feature (1)..(10): Table A1; Target 1434; HLA-B*44:03; HYPMENSG00000187516; Huntingtin-interacting protein M (Huntingtin yeast partner M)
AESDVTRFLF

SEQ ID NO: 104277 - protein, 9 aa, Homo sapiens
  misc_feature (1)..(9): Table A1; Target 1435; HLA-B*44:02; HYPMENSG00000187516; Huntingtin-interacting protein M (Huntingtin yeast partner M)
AESDVTRFL

SEQ ID NO: 104278 - protein, 9 aa, Homo sapiens
  misc_feature (1)..(9): Table A1; Target 1436; HLA-B*44:03; HYPMENSG00000187516; Huntingtin-interacting protein M (Huntingtin yeast partner M)
AESDVTRFL

SEQ ID NO: 104279 - protein, 9 aa, Homo sapiens
  misc_feature (1)..(9): Table A1; Target 1437; HLA-A*31:01; BSH ENSG00000188909; Brain-specific homeobox protein homolog
QVKTWFQNR

SEQ ID NO: 104280 - protein, 9 aa, Homo sapiens
  misc_feature (1)..(9): Table A1; Target 1438; HLA-B*51:01; BSH ENSG00000188909; Brain-specific homeobox protein homolog
YPLMPTPTL

SEQ ID NO: 104281 - protein, 9 aa, Homo sapiens
  misc_feature (1)..(9): Table A1; Target 1439; HLA-B*18:01; Q5VXJ5; ENSG00000198765; Synaptonemal complex protein 1 (Fragment)
EEETLKTLY

SEQ ID NO: 104282 - protein, 9 aa, Homo sapiens
  misc_feature (1)..(9): Table A1; Target 1440; HLA-B*44:03; Q5VXJ5; ENSG00000198765; Synaptonemal complex protein 1 (Fragment)
EEETLKTLY

SEQ ID NO: 104283 - protein, 8 aa, Homo sapiens
  misc_feature (1)..(8): Table A1; Target 1441; HLA-C*05:01; Q5VXJ5; ENSG00000198765; Synaptonemal complex protein 1 (Fragment)
IADEAVKL

SEQ ID NO: 104284 - protein, 11 aa, Homo sapiens
  misc_feature (1)..(11): Table A1; Target 1442; HLA-A*30:02; Q5VXJ5; ENSG00000198765; Synaptonemal complex protein 1 (Fragment)
KQKFGEITDTY

SEQ ID NO: 104285 - protein, 11 aa, Homo sapiens
  misc_feature (1)..(11): Table A1; Target 1443; HLA-A*29:02; Q5VXJ5; ENSG00000198765; Synaptonemal complex protein 1 (Fragment)
KVLGEKETLLY

SEQ ID NO: 104286 - protein, 10 aa, Homo sapiens
  misc_feature (1)..(10): Table A1; Target 1444; HLA-B*44:02; Q5VXJ5; ENSG00000198765; Synaptonemal complex protein 1 (Fragment)
SEEETLKTLY

SEQ ID NO: 104287 - protein, 10 aa, Homo sapiens
  misc_feature (1)..(10): Table A1; Target 1445; HLA-B*44:03; Q5VXJ5; ENSG00000198765; Synaptonemal complex protein 1 (Fragment)
SEEETLKTLY

SEQ ID NO: 104288 - protein, 10 aa, Homo sapiens
  misc_feature (1)..(10): Table A1; Target 1446; HLA-C*02:02; Q5VXJ5; ENSG00000198765; Synaptonemal complex protein 1 (Fragment)
SEEETLKTLY

SEQ ID NO: 104289 - protein, 9 aa, Homo sapiens
  misc_feature (1)..(9): Table A1; Target 1447; HLA-B*35:01; Q5VXJ5; ENSG00000198765; Synaptonemal complex protein 1 (Fragment)
TAITTSEQY

SEQ ID NO: 104290 - protein, 9 aa, Homo sapiens
  misc_feature (1)..(9): Table A1; Target 1448; HLA-A*11:01; Q5VXJ5; ENSG00000198765; Synaptonemal complex protein 1 (Fragment)
TSVDHGISK

SEQ ID NO: 104291 - protein, 9 aa, Homo sapiens
  misc_feature (1)..(9): Table A1; Target 1449; HLA-A*11:01; Q5VXJ5; ENSG00000198765; Synaptonemal complex protein 1 (Fragment)
TTSEQYYSK

SEQ ID NO: 104292 - protein, 11 aa, Homo sapiens
  misc_feature (1)..(11): Table A1; Target 1450; HLA-A*01:01; Q5VXJ5; ENSG00000198765; Synaptonemal complex protein 1 (Fragment)
VSEEETLKTLY

SEQ ID NO: 104293 - protein, 8 aa, Homo sapiens
  misc_feature (1)..(8): Table A1; Target 1451; HLA-B*51:01; RGS21; ENSG00000253148; Regulator of G-protein signaling 21 (RGS21)
DAPKEINI

SEQ ID NO: 104294 - protein, 9 aa, Homo sapiens
  misc_feature (1)..(9): Table A1; Target 1452; HLA-A*02:01; RGS21; ENSG00000253148; Regulator of G-protein signaling 21 (RGS21)
GLDAFRIFL

SEQ ID NO: 104295 - protein, 9 aa, Homo sapiens
  misc_feature (1)..(9): Table A1; Target 1453; HLA-A*02:07; RGS21; ENSG00000253148; Regulator of G-protein signaling 21 (RGS21)
GLDAFRIFL

SEQ ID NO: 104296 - protein, 8 aa, Homo sapiens
  misc_feature (1)..(8): Table A1; Target 1454; HLA-B*51:01; BLIDENSG00000259571; BH3-like motif-containing cell death inducer (Breast cancer cell protein 2)
LPIEGQEI

SEQ ID NO: 104297 - protein, 9 aa, Homo sapiens
  misc_feature (1)..(9): Table A1; Target 1455; HLA-A*24:02; TCF24; ENSG00000261787; Transcription factor 24 (TCF-24)
LYIGATGQF

SEQ ID NO: 104298 - protein, 9 aa, Homo sapiens
  misc_feature (1)..(9): Table A1; Target 1456; HLA-C*05:01; SE1L2; ENSG00000101251; Protein sel-1 homolog 2 (Suppressor of lin-12-like protein 2) (Sel-1L2)
FTDEGDQLF

SEQ ID NO: 104299 - protein, 9 aa, Homo sapiens
  misc_feature (1)..(9): Table A1; Target 1457; HLA-A*29:02; SE1L2; ENSG00000101251; Protein sel-1 homolog 2 (Suppressor of lin-12-like protein 2) (Sel-1L2)
GLHGLGLLY

SEQ ID NO: 104300 - protein, 9 aa, Homo sapiens
  misc_feature (1)..(9): Table A1; Target 1458; HLA-A*24:02; SE1L2; ENSG00000101251; Protein sel-1 homolog 2 (Suppressor of lin-12-like protein 2) (Sel-1L2)
LYIKSLPTF

SEQ ID NO: 104301 - protein, 9 aa, Homo sapiens
  misc_feature (1)..(9): Table A1; Target 1459; HLA-B*35:01; SE1L2; ENSG00000101251; Protein sel-1 homolog 2 (Suppressor of lin-12-like protein 2) (Sel-1L2)
NALGFLSSY

SEQ ID NO: 104302 - protein, 9 aa, Homo sapiens
  misc_feature (1)..(9): Table A1; Target 1460; HLA-B*44:03; R4GMQ3; ENSG00000107831; Fibroblast growth factor 8
TEIVLENNY

SEQ ID NO: 104303 - protein, 8 aa, Homo sapiens
  misc_feature (1)..(8): Table A1; Target 1461; HLA-B*18:01; NMUR2; ENSG00000132911; Neuromedin-U receptor 2 (NMU-R2) (G-protein coupled receptor FM-4) (G-protein coupled receptor TGR-1)
TEDIGPQF

SEQ ID NO: 104304 - protein, 9 aa, Homo sapiens
  misc_feature (1)..(9): Table A1; Target 1462; HLA-A*02:07; ZAN ENSG00000146839; Zonadhesin;
FLQEVITTV

SEQ ID NO: 104305 - protein, 9 aa, Homo sapiens
  misc_feature (1)..(9): Table A1; Target 1463; HLA-A*01:01; FATE1; ENSG00000147378; Fetal and adult testis-expressed transcript protein (Cancer/testis antigen 43) (CT43) (Tumor antigen BJ-HCC-2)
HGDAHLQEY

SEQ ID NO: 104306 - protein, 9 aa, Homo sapiens
  misc_feature (1)..(9): Table A1; Target 1464; HLA-A*11:01; IFNKENSG00000147896; Interferon kappa (IFN-kappa)
STKPDMIQK

SEQ ID NO: 104307 - protein, 11 aa, Homo sapiens
  misc_feature (1)..(11): Table A1; Target 1465; HLA-B*35:01; PASD1; ENSG00000166049; Circadian clock protein PASD1 (Cancer/testis antigen 63) (CT63) (OX-TES-1) (PAS domain-containing protein 1)
QPLQPSSPVAY

SEQ ID NO: 104308 - protein, 8 aa, Homo sapiens
  misc_feature (1)..(8): Table A1; Target 1466; HLA-A*02:01; PASD1; ENSG00000166049; Circadian clock protein PASD1 (Cancer/testis antigen 63) (CT63) (OX-TES-1) (PAS domain-containing protein 1)
SLGPVVQV

SEQ ID NO: 104309 - protein, 9 aa, Homo sapiens
  misc_feature (1)..(9): Table A1; Target 1467; HLA-A*30:02; KCNV2; ENSG00000168263; Potassium voltage-gated channel subfamily V member 2 (Voltage-gated potassium channel subunit Kv8.2)
AVSISTVGY

SEQ ID NO: 104310 - protein, 10 aa, Homo sapiens
  misc_feature (1)..(10): Table A1; Target 1468; HLA-B*44:03; CC185; ENSG00000178395; Coiled-coil domain-containing protein 185
EEEQLQQARW

SEQ ID NO: 104311 - protein, 9 aa, Homo sapiens
  misc_feature (1)..(9): Table A1; Target 1469; HLA-B*44:02; CC185; ENSG00000178395; Coiled-coil domain-containing protein 185
EEQLQQARW

SEQ ID NO: 104312 - protein, 9 aa, Homo sapiens
  misc_feature (1)..(9): Table A1; Target 1470; HLA-B*44:03; CC185; ENSG00000178395; Coiled-coil domain-containing protein 185
EEQLQQARW

SEQ ID NO: 104313 - protein, 10 aa, Homo sapiens
  misc_feature (1)..(10): Table A1; Target 1471; HLA-B*35:01; DSCR6; ENSG00000183145; Protein ripply3 (Down syndrome critical region protein 6)
FPVQATIDFY

SEQ ID NO: 104314 - protein, 10 aa, Homo sapiens
  misc_feature (1)..(10): Table A1; Target 1472; HLA-C*02:02; LN28B; ENSG00000187772; Protein lin-28 homolog B (Lin-28B)
KEGEPVEFTF

SEQ ID NO: 104315 - protein, 8 aa, Homo sapiens
  misc_feature (1)..(8): Table A1; Target 1473; HLA-B*18:01; CS067; ENSG00000188032; UPF0575 protein C19orf67
LEQLVLMY

SEQ ID NO: 104316 - protein, 10 aa, Homo sapiens
  misc_feature (1)..(10): Table A1; Target 1474; HLA-A*30:02; DC8L2; ENSG00000189186; DDB1- and CUL4-associated factor 8-like protein 2 (WD repeat-containing protein 42C)
RVAELINASY

SEQ ID NO: 104317 - protein, 10 aa, Homo sapiens
  misc_feature (1)..(10): Table A1; Target 1475; HLA-A*26:01; BTNL2; ENSG00000204290; Butyrophilin-like protein 2 (BTL-II)
HVAGEQMAEY

SEQ ID NO: 104318 - protein, 8 aa, Homo sapiens
  misc_feature (1)..(8): Table A1; Target 1476; HLA-B*18:01; BTNL2; ENSG00000204290; Butyrophilin-like protein 2 (BTL-II)
TEMQMEEY

SEQ ID NO: 104319 - protein, 9 aa, Homo sapiens
  misc_feature (1)..(9): Table A1; Target 1477; HLA-A*01:01; BTNL2; ENSG00000204290; Butyrophilin-like protein 2 (BTL-II)
VTEMQMEEY

SEQ ID NO: 104320 - protein, 8 aa, Homo sapiens
  misc_feature (1)..(8): Table A1; Target 1478; HLA-B*18:01; GNAT3; ENSG00000214415; Guanine nucleotide-binding protein G(t) subunit alpha-3 (Gustducin alpha-3 chain)
MEFKAVIY

SEQ ID NO: 104321 - protein, 9 aa, Homo sapiens
  misc_feature (1)..(9): Table A1; Target 1479; HLA-A*24:02; GNAT3; ENSG00000214415; Guanine nucleotide-binding protein G(t) subunit alpha-3 (Gustducin alpha-3 chain)
YYLNDLDRI

SEQ ID NO: 104322 - protein, 9 aa, Homo sapiens
  misc_feature (1)..(9): Table A1; Target 1480; HLA-A*24:02; RFPLB; ENSG00000251258; Ret finger protein-like 4B (RING finger protein 211)
RYILENHDF

SEQ ID NO: 104323 - protein, 10 aa, Homo sapiens
  misc_feature (1)..(10): Table A1; Target 1481; HLA-A*30:02; S35G6; ENSG00000259224; Solute carrier family 35 member G6 (Acyl-malonyl-condensing enzyme 1-like protein 3) (Transmembrane protein 21B)
TLQEGITGVY

SEQ ID NO: 104324 - protein, 9 aa, Homo sapiens
  misc_feature (1)..(9): Table A1; Target 1482; HLA-A*02:01; S35G6; ENSG00000259224; Solute carrier family 35 member G6 (Acyl-malonyl-condensing enzyme 1-like protein 3) (Transmembrane protein 21B)
TLQEGITGV

SEQ ID NO: 104325 - protein, 9 aa, Homo sapiens
  misc_feature (1)..(9): Table A1; Target 1483; HLA-A*33:01; TRPC7; ENSG00000069018; Short transient receptor potential channel 7 (TrpC7) (Transient receptor protein 7) (TRP-7) (hTRP7)
EYGNIPVVR

SEQ ID NO: 104326 - protein, 10 aa, Homo sapiens
  misc_feature (1)..(10): Table A1; Target 1484; HLA-A*03:01; ADAM7; ENSG00000069206; Disintegrin and metalloproteinase domain-containing protein 7 (ADAM 7) (Sperm maturation-related glycoprotein GP-83)
GIADPNQSAK

SEQ ID NO: 104327 - protein, 11 aa, Homo sapiens
  misc_feature (1)..(11): Table A1; Target 1485; HLA-A*11:01; HXB1ENSG00000120094; Homeobox protein Hox-B1 (Homeobox protein Hox-2I)
ATLELNETQVK

SEQ ID NO: 104328 - protein, 9 aa, Homo sapiens
  misc_feature (1)..(9): Table A1; Target 1486; HLA-B*46:01; TTLL2; ENSG00000120440; Probable tubulin polyglutamylase TTLL2 (EC 6.-.-.-) (Testis-specific protein NYD-TSPG) (Tubulin--tyrosine ligase-like protein 2)
SINKSGASY

SEQ ID NO: 104329 - protein, 9 aa, Homo sapiens
  misc_feature (1)..(9): Table A1; Target 1487; HLA-B*18:01; APOL5; ENSG00000128313; Apolipoprotein L5 (Apolipoprotein L-V) (ApoL-V)
EEEKLFLSY

SEQ ID NO: 104330 - protein, 9 aa, Homo sapiens
  misc_feature (1)..(9): Table A1; Target 1488; HLA-B*35:01; TSN16; ENSG00000130167; Tetraspanin-16 (Tspan-16) (Tetraspanin TM4-B) (Transmembrane 4 superfamily member 16)
FPIVGDVAL

SEQ ID NO: 104331 - protein, 11 aa, Homo sapiens
  misc_feature (1)..(11): Table A1; Target 1489; HLA-A*02:07; SPT22; ENSG00000141255; Spermatogenesis-associated protein 22 (Testis development protein NYD-SP20)
MLDDIPEDNTL

SEQ ID NO: 104332 - protein, 9 aa, Homo sapiens
  misc_feature (1)..(9): Table A1; Target 1490; HLA-C*16:01; X6R6V8; ENSG00000143552; Nuclear pore membrane glycoprotein 210-like
AAFVSSRVL

SEQ ID NO: 104333 - protein, 9 aa, Homo sapiens
  misc_feature (1)..(9): Table A1; Target 1491; HLA-A*11:01; SPI2A; ENSG00000147059; Spindlin-2A (Protein DXF34) (Spindlin-like protein 2A) (SPIN-2) (SPIN-2A)
ATGSANMTK

SEQ ID NO: 104334 - protein, 10 aa, Homo sapiens
  misc_feature (1)..(10): Table A1; Target 1492; HLA-A*30:02; TRI49; ENSG00000168930; Tripartite motif-containing protein 49 (RING finger protein 18) (Testis-specific RING-finger protein)
GVQTFTSGKY

SEQ ID NO: 104335 - protein, 9 aa, Homo sapiens
  misc_feature (1)..(9): Table A1; Target 1493; HLA-B*35:01; TRI49; ENSG00000168930; Tripartite motif-containing protein 49 (RING finger protein 18) (Testis-specific RING-finger protein)
MPQPLNPEL

SEQ ID NO: 104336 - protein, 9 aa, Homo sapiens
  misc_feature (1)..(9): Table A1; Target 1494; HLA-A*24:02; TRI49; ENSG00000168930; Tripartite motif-containing protein 49 (RING finger protein 18) (Testis-specific RING-finger protein)
NYFIDPVTI

SEQ ID NO: 104337 - protein, 10 aa, Homo sapiens
  misc_feature (1)..(10): Table A1; Target 1495; HLA-A*11:01; VCX3ENSG00000169059; Variable charge X-linked protein 3 (Variable charge protein on X with eight repeats) (VCX-8r) (Variably charged protein X-A) (VCX-A)
SSQPSPSDPK

SEQ ID NO: 104338 - protein, 10 aa, Homo sapiens
  misc_feature (1)..(10): Table A1; Target 1496; HLA-B*44:03; CNGA2; ENSG00000183862; Cyclic nucleotide-gated olfactory channel (Cyclic nucleotide-gated cation channel 2) (Cyclic nucleotide-gated channel alpha-2) (CNG channel alpha-2) (CNG-2) (CNG2)
AEYTGAQQKL

SEQ ID NO: 104339 - protein, 11 aa, Homo sapiens
  misc_feature (1)..(11): Table A1; Target 1497; HLA-A*29:02; ZN560; ENSG00000198028; Zinc finger protein 560
ILLDPVQRNLY

SEQ ID NO: 104340 - protein, 11 aa, Homo sapiens
  misc_feature (1)..(11): Table A1; Target 1498; HLA-A*11:01; GNAT3; ENSG00000214415; Guanine nucleotide-binding protein G(t) subunit alpha-3 (Gustducin alpha-3 chain)
AGESGKSTIVK

SEQ ID NO: 104341 - protein, 9 aa, Homo sapiens
  misc_feature (1)..(9): Table A1; Target 1499; HLA-A*26:01; PSG1ENSG00000231924; Pregnancy-specific beta-1-glycoprotein 1 (PS-beta-G-1) (PSBG-1) (Pregnancy-specific glycoprotein 1) (CD66 antigen-like family member F)
  misc_feature (1)..(9): (Fetal liver non-specific cross-reactive antigen 1/2) (FL-NCA-1/2) (PSG95) (Pregnancy-specific beta-1 glycoprotein C/D) (PS-beta-C/D) (CD antigen CD66f)
EIIIYGPAY

SEQ ID NO: 104342 - protein, 9 aa, Homo sapiens
  misc_feature (1)..(9): Table A1; Target 1500; HLA-A*24:02; BHMG1; ENSG00000237452; Basic helix-loop-helix and HMG box domain-containing protein 1
EYLTQAAFF

SEQ ID NO: 104343 - protein, 9 aa, Homo sapiens
  misc_feature (1)..(9): Table A1; Target 1501; HLA-A*02:07; SMC1B; ENSG00000077935; Structural maintenance of chromosomes protein 1B (SMC protein 1B) (SMC-1-beta) (SMC-1B)
SIDQIYKKL

SEQ ID NO: 104344 - protein, 11 aa, Homo sapiens
  misc_feature (1)..(11): Table A1; Target 1502; HLA-A*11:01; TDRD1; ENSG00000095627; Tudor domain-containing protein 1 (Cancer/testis antigen 41.1) (CT41.1)
IVVDKSDLIPK

SEQ ID NO: 104345 - protein, 11 aa, Homo sapiens
  misc_feature (1)..(11): Table A1; Target 1503; HLA-A*24:02; S14L3; ENSG00000100012; SEC14-like protein 3 (Tocopherol-associated protein 2)
NYPETLKFMLI

SEQ ID NO: 104346 - protein, 9 aa, Homo sapiens
  misc_feature (1)..(9): Table A1; Target 1504; HLA-A*30:02; MORC1; ENSG00000114487; MORC family CW-type zinc finger protein 1 (Cancer/testis antigen 33) (CT33)
STLKFIGQY

SEQ ID NO: 104347 - protein, 8 aa, Homo sapiens
  misc_feature (1)..(8): Table A1; Target 1505; HLA-B*51:01; H3BVE8; ENSG00000121446; Regulator of G-protein-signaling protein-like
DAPIIKEI

SEQ ID NO: 104348 - protein, 9 aa, Homo sapiens
  misc_feature (1)..(9): Table A1; Target 1506; HLA-B*51:01; H3BVE8; ENSG00000121446; Regulator of G-protein-signaling protein-like
EGNPLLLTV

SEQ ID NO: 104349 - protein, 11 aa, Homo sapiens
  misc_feature (1)..(11): Table A1; Target 1507; HLA-A*02:01; H3BVE8; ENSG00000121446; Regulator of G-protein-signaling protein-like
FLEGNPLLLTV

SEQ ID NO: 104350 - protein, 9 aa, Homo sapiens
  misc_feature (1)..(9): Table A1; Target 1508; HLA-A*29:02; H3BVE8; ENSG00000121446; Regulator of G-protein-signaling protein-like
GFWSDTILY

SEQ ID NO: 104351 - protein, 10 aa, Homo sapiens
  misc_feature (1)..(10): Table A1; Target 1509; HLA-C*02:02; H3BVE8; ENSG00000121446; Regulator of G-protein-signaling protein-like
QEMQNSKENF

SEQ ID NO: 104352 - protein, 11 aa, Homo sapiens
  misc_feature (1)..(11): Table A1; Target 1510; HLA-A*24:02; H3BVE8; ENSG00000121446; Regulator of G-protein-signaling protein-like
SYLTGSAGEEL

SEQ ID NO: 104353 - protein, 9 aa, Homo sapiens
  misc_feature (1)..(9): Table A1; Target 1511; HLA-A*24:02; H3BVE8; ENSG00000121446; Regulator of G-protein-signaling protein-like
VFADFFNTF

SEQ ID NO: 104354 - protein, 9 aa, Homo sapiens
  misc_feature (1)..(9): Table A1; Target 1512; HLA-C*02:02; NMUR2; ENSG00000132911; Neuromedin-U receptor 2 (NMU-R2) (G-protein coupled receptor FM-4) (G-protein coupled receptor TGR-1)
SEQMSRTNY

SEQ ID NO: 104355 - protein, 10 aa, Homo sapiens
  misc_feature (1)..(10): Table A1; Target 1513; HLA-B*44:03; RBM46; ENSG00000151962; Probable RNA-binding protein 46 (Cancer/testis antigen 68) (CT68) (RNA-binding motif protein 46)
MEFSGENRGY

SEQ ID NO: 104356 - protein, 9 aa, Homo sapiens
  misc_feature (1)..(9): Table A1; Target 1514; HLA-B*08:01; S22AD; ENSG00000172940; Solute carrier family 22 member 13 (Organic cation transporter-like 3) (ORCTL-3)
HPQLRKVTL

SEQ ID NO: 104357 - protein, 9 aa, Homo sapiens
  misc_feature (1)..(9): Table A1; Target 1515; HLA-B*44:03; CI131; ENSG00000174038; Uncharacterized protein C9orf131
AEAPLSQRW

SEQ ID NO: 104358 - protein, 8 aa, Homo sapiens
  misc_feature (1)..(8): Table A1; Target 1516; HLA-B*18:01; CI131; ENSG00000174038; Uncharacterized protein C9orf131
VEAPVSTF

SEQ ID NO: 104359 - protein, 11 aa, Homo sapiens
  misc_feature (1)..(11): Table A1; Target 1517; HLA-A*01:01; CI131; ENSG00000174038; Uncharacterized protein C9orf131
VSEPIADQSNY

SEQ ID NO: 104360 - protein, 9 aa, Homo sapiens
  misc_feature (1)..(9): Table A1; Target 1518; HLA-A*02:07; TEX36; ENSG00000175018; Testis-expressed protein 36
YLDSFADGL

SEQ ID NO: 104361 - protein, 10 aa, Homo sapiens
  misc_feature (1)..(10): Table A1; Target 1519; HLA-A*02:01; HORM2; ENSG00000176635; HORMA domain-containing protein 2
LLFDKEPINV

SEQ ID NO: 104362 - protein, 4 aa, Homo sapiens
  misc_feature (1)..(4): Table A1; Target 1520; HLA-A*29:02; FBX39; ENSG00000177294; F-box only protein 39
YFSH

SEQ ID NO: 104363 - protein, 11 aa, Homo sapiens
  misc_feature (1)..(11): Table A1; Target 1521; HLA-B*18:01; GNAT3; ENSG00000214415; Guanine nucleotide-binding protein G(t) subunit alpha-3 (Gustducin alpha-3 chain)
SEYQLNDSAAY

SEQ ID NO: 104364 - protein, 9 aa, Homo sapiens
  misc_feature (1)..(9): Table A1; Target 1522; HLA-B*18:01; ACSM4; ENSG00000215009; Acyl-coenzyme A synthetase ACSM4, mitochondrial (EC 6.2.1.2) (Acyl-CoA synthetase medium-chain family member 4)
DDVIISSGY

SEQ ID NO: 104365 - protein, 9 aa, Homo sapiens
  misc_feature (1)..(9): Table A1; Target 1523; HLA-A*03:01; TDR15; ENSG00000218819; Tudor domain-containing protein 15
AILLQVIAK

SEQ ID NO: 104366 - protein, 9 aa, Homo sapiens
  misc_feature (1)..(9): Table A1; Target 1524; HLA-B*46:01; TDR15; ENSG00000218819; Tudor domain-containing protein 15
LVASGLATY

SEQ ID NO: 104367 - protein, 9 aa, Homo sapiens
  misc_feature (1)..(9): Table A1; Target 1525; HLA-B*44:03; TDR15; ENSG00000218819; Tudor domain-containing protein 15
SENIDVISL

SEQ ID NO: 104368 - protein, 9 aa, Homo sapiens
  misc_feature (1)..(9): Table A1; Target 1526; HLA-A*29:02; TDR15; ENSG00000218819; Tudor domain-containing protein 15
TFPSLFSLY

SEQ ID NO: 104369 - protein, 9 aa, Homo sapiens
  misc_feature (1)..(9): Table A1; Target 1527; HLA-B*18:01; RD21L; ENSG00000244588; Double-strand-break repair protein rad21-like protein 1
EEITLRENF

SEQ ID NO: 104370 - protein, 9 aa, Homo sapiens
  misc_feature (1)..(9): Table A1; Target 1528; HLA-B*44:03; RD21L; ENSG00000244588; Double-strand-break repair protein rad21-like protein 1
EEITLRENF

SEQ ID NO: 104371 - protein, 9 aa, Homo sapiens
  misc_feature (1)..(9): Table A1; Target 1529; HLA-B*44:02; RD21L; ENSG00000244588; Double-strand-break repair protein rad21-like protein 1
EENIETERW

SEQ ID NO: 104372 - protein, 9 aa, Homo sapiens
  misc_feature (1)..(9): Table A1; Target 1530; HLA-B*44:03; RD21L; ENSG00000244588; Double-strand-break repair protein rad21-like protein 1
EENIETERW

SEQ ID NO: 104373 - protein, 9 aa, Homo sapiens
  misc_feature (1)..(9): Table A1; Target 1531; HLA-B*35:01; RD21L; ENSG00000244588; Double-strand-break repair protein rad21-like protein 1
NAIDVSEHF

SEQ ID NO: 104374 - protein, 9 aa, Homo sapiens
  misc_feature (1)..(9): Table A1; Target 1532; HLA-B*35:01; RD21L; ENSG00000244588; Double-strand-break repair protein rad21-like protein 1
NAITLPEEF

SEQ ID NO: 104375 - protein, 9 aa, Homo sapiens
  misc_feature (1)..(9): Table A1; Target 1533; HLA-A*24:02; RD21L; ENSG00000244588; Double-strand-break repair protein rad21-like protein 1
PYADIIATM

SEQ ID NO: 104376 - protein, 9 aa, Homo sapiens
  misc_feature (1)..(9): Table A1; Target 1534; HLA-B*18:01; ESX1ENSG00000123576; Homeobox protein ESX1 (Extraembryonic, spermatogenesis, homeobox 1) [Cleaved into: Homeobox protein ESX1-N; Homeobox protein ESX1-C]
DEKLTVTSL

SEQ ID NO: 104377 - protein, 10 aa, Homo sapiens
  misc_feature (1)..(10): Table A1; Target 1535; HLA-B*44:02; PRDM7; ENSG00000126856; Probable histone-lysine N-methyltransferase PRDM7 (EC 2.1.1.43) (PR domain zinc finger protein 7) (PR domain-containing protein 7)
EEAANSGYSW

SEQ ID NO: 104378 - protein, 9 aa, Homo sapiens
  misc_feature (1)..(9): Table A1; Target 1536; HLA-B*35:01; RXFP2; ENSG00000133105; Relaxin receptor 2 (G-protein coupled receptor 106) (G-protein coupled receptor affecting testicular descent)
  misc_feature (1)..(9): (Leucine-rich repeat-containing G-protein coupled receptor 8) (Relaxin family peptide receptor 2)
LPDKVFIKY

SEQ ID NO: 104379 - protein, 9 aa, Homo sapiens
  misc_feature (1)..(9): Table A1; Target 1537; HLA-A*02:01; GP119; ENSG00000147262; Glucose-dependent insulinotropic receptor (G-protein coupled receptor 119)
AVADTLIGV

SEQ ID NO: 104380 - protein, 9 aa, Homo sapiens
  misc_feature (1)..(9): Table A1; Target 1538; HLA-A*11:01; CD045; ENSG00000164123; Uncharacterized protein C4orf45
ASLDSITHR

SEQ ID NO: 104381 - protein, 9 aa, Homo sapiens
  misc_feature (1)..(9): Table A1; Target 1539; HLA-A*29:02; ZPLD1; ENSG00000170044; Zona pellucida-like domain-containing protein 1 (ZP domain-containing protein 1)
YLPGLLYKF

SEQ ID NO: 104382 - protein, 9 aa, Homo sapiens
  misc_feature (1)..(9): Table A1; Target 1540; HLA-A*30:02; SP7 ENSG00000170374; Transcription factor Sp7 (Zinc finger protein osterix)
TSLDMTHPY

SEQ ID NO: 104383 - protein, 9 aa, Homo sapiens
  misc_feature (1)..(9): Table A1; Target 1541; HLA-A*02:07; NAL11; ENSG00000179873; NACHT, LRR and PYD domains-containing protein 11 (Nucleotide-binding oligomerization domain protein 17) (PAAD-and NACHT domain-containing protein 10) (PYRIN-containing APAF1-like
ALMEVTVYL

SEQ ID NO: 104384 - protein, 9 aa, Homo sapiens
  misc_feature (1)..(9): Table A1; Target 1542; HLA-B*35:01; TR49B; ENSG00000182053; Putative tripartite motif-containing protein 49B (RING finger protein 18B)
MPQPLNPEL

SEQ ID NO: 104385 - protein, 9 aa, Homo sapiens
  misc_feature (1)..(9): Table A1; Target 1543; HLA-B*18:01; FAM9A; ENSG00000183304; Protein FAM9A
DEHTGIHTM

SEQ ID NO: 104386 - protein, 9 aa, Homo sapiens
  misc_feature (1)..(9): Table A1; Target 1544; HLA-A*02:07; TMM89; ENSG00000183396; Transmembrane protein 89
MLDALLVHI

SEQ ID NO: 104387 - protein, 9 aa, Homo sapiens
  misc_feature (1)..(9): Table A1; Target 1545; HLA-C*05:01; CNGA2; ENSG00000183862; Cyclic nucleotide-gated olfactory channel (Cyclic nucleotide-gated cation channel 2) (Cyclic nucleotide-gated channel alpha-2) (CNG channel alpha-2) (CNG-2) (CNG2)
VADDGVTQY

SEQ ID NO: 104388 - protein, 9 aa, Homo sapiens
  misc_feature (1)..(9): Table A1; Target 1546; HLA-A*11:01; H0YFA1; ENSG00000185958; Protein FAM186A (Fragment)
ASSAPTAEK

SEQ ID NO: 104389 - protein, 10 aa, Homo sapiens
  misc_feature (1)..(10): Table A1; Target 1547; HLA-B*18:01; H0YFA1; ENSG00000185958; Protein FAM186A (Fragment)
EETQILRDTF

SEQ ID NO: 104390 - protein, 10 aa, Homo sapiens
  misc_feature (1)..(10): Table A1; Target 1548; HLA-B*44:03; H0YFA1; ENSG00000185958; Protein FAM186A (Fragment)
EETQILRDTF

SEQ ID NO: 104391 - protein, 10 aa, Homo sapiens
  misc_feature (1)..(10): Table A1; Target 1549; HLA-A*03:01; H0YFA1; ENSG00000185958; Protein FAM186A (Fragment)
KVAQVPFTTK

SEQ ID NO: 104392 - protein, 10 aa, Homo sapiens
  misc_feature (1)..(10): Table A1; Target 1550; HLA-A*11:01; H0YFA1; ENSG00000185958; Protein FAM186A (Fragment)
STSSYPIAEK

SEQ ID NO: 104393 - protein, 9 aa, Homo sapiens
  misc_feature (1)..(9): Table A1; Target 1551; HLA-B*46:01; H0YFA1; ENSG00000185958; Protein FAM186A (Fragment)
VLKDVQRSY

SEQ ID NO: 104394 - protein, 9 aa, Homo sapiens
  misc_feature (1)..(9): Table A1; Target 1552; HLA-A*01:01; H0YFA1; ENSG00000185958; Protein FAM186A (Fragment)
VSEAKPSQY

SEQ ID NO: 104395 - protein, 9 aa, Homo sapiens
  misc_feature (1)..(9): Table A1; Target 1553; HLA-A*02:07; SPT21; ENSG00000187144; Spermatogenesis-associated protein 21
LLPSWVPEV

SEQ ID NO: 104396 - protein, 9 aa, Homo sapiens
  misc_feature (1)..(9): Table A1; Target 1554; HLA-C*02:02; HYPMENSG00000187516; Huntingtin-interacting protein M (Huntingtin yeast partner M)
AESDVTRFL

SEQ ID NO: 104397 - protein, 9 aa, Homo sapiens
  misc_feature (1)..(9): Table A1; Target 1555; HLA-A*11:01; RFA4ENSG00000204086; Replication protein A 30 kDa subunit (RP-A p30) (Replication factor A protein 4) (RF-A protein 4)
STVFDPVFK

SEQ ID NO: 104398 - protein, 11 aa, Homo sapiens
  misc_feature (1)..(11): Table A1; Target 1556; HLA-A*29:02; M4A18; ENSG00000214782; Membrane-spanning 4-domains subfamily A member 18
IFSAINPVLYY

SEQ ID NO: 104399 - protein, 9 aa, Homo sapiens
  misc_feature (1)..(9): Table A1; Target 1557; HLA-A*11:01; M4A18; ENSG00000214782; Membrane-spanning 4-domains subfamily A member 18
VTTYPISPK

SEQ ID NO: 104400 - protein, 9 aa, Homo sapiens
  misc_feature (1)..(9): Table A1; Target 1558; HLA-A*29:02; PSG3ENSG00000221826; Pregnancy-specific beta-1-glycoprotein 3 (PS-beta-G-3) (PSBG-3) (Pregnancy-specific glycoprotein 3) (Carcinoembryonic antigen SG5)
LFLFGVTKY

SEQ ID NO: 104401 - protein, 9 aa, Homo sapiens
  misc_feature (1)..(9): Table A1; Target 1559; HLA-B*51:01; PSG3ENSG00000221826; Pregnancy-specific beta-1-glycoprotein 3 (PS-beta-G-3) (PSBG-3) (Pregnancy-specific glycoprotein 3) (Carcinoembryonic antigen SG5)
LPKLPKPYI

SEQ ID NO: 104402 - protein, 9 aa, Homo sapiens
  misc_feature (1)..(9): Table A1; Target 1560; HLA-B*51:01; PSG3ENSG00000221826; Pregnancy-specific beta-1-glycoprotein 3 (PS-beta-G-3) (PSBG-3) (Pregnancy-specific glycoprotein 3) (Carcinoembryonic antigen SG5)
LPTTAQVTI

SEQ ID NO: 104403 - protein, 9 aa, Homo sapiens
  misc_feature (1)..(9): Table A1; Target 1561; HLA-C*01:02; ANHXENSG00000227059; Anomalous homeobox protein
QVPGGSQEL

SEQ ID NO: 104404 - protein, 9 aa, Homo sapiens
  misc_feature (1)..(9): Table A1; Target 1562; HLA-A*26:01; AP2DENSG00000008197; Transcription factor AP-2-delta (AP2-delta) (Activating enhancer-binding protein 2-delta) (Transcription factor AP-2-beta-like 1)
SVANSTVAY

SEQ ID NO: 104405 - protein, 10 aa, Homo sapiens
  misc_feature (1)..(10): Table A1; Target 1563; HLA-A*24:02; RB40L; ENSG00000102128; Ras-related protein Rab-40A-like (Ras-like GTPase)
AYAERLGVTF

SEQ ID NO: 104406 - protein, 9 aa, Homo sapiens
  misc_feature (1)..(9): Table A1; Target 1564; HLA-A*30:02; RB40L; ENSG00000102128; Ras-related protein Rab-40A-like (Ras-like GTPase)
GAQGVILVY

SEQ ID NO: 104407 - protein, 8 aa, Homo sapiens
  misc_feature (1)..(8): Table A1; Target 1565; HLA-B*51:01; RB40L; ENSG00000102128; Ras-related protein Rab-40A-like (Ras-like GTPase)
HAPGVPKI

SEQ ID NO: 104408 - protein, 9 aa, Homo sapiens
  misc_feature (1)..(9): Table A1; Target 1566; HLA-C*01:02; RB40L; ENSG00000102128; Ras-related protein Rab-40A-like (Ras-like GTPase)
NIIESFTEL

SEQ ID NO: 104409 - protein, 11 aa, Homo sapiens
  misc_feature (1)..(11): Table A1; Target 1567; HLA-B*35:01; RB40L; ENSG00000102128; Ras-related protein Rab-40A-like (Ras-like GTPase)
QAYAERLGVTF

SEQ ID NO: 104410 - protein, 9 aa, Homo sapiens
  misc_feature (1)..(9): Table A1; Target 1568; HLA-B*35:01; FNDC7; ENSG00000143107; Fibronectin type III domain-containing protein 7
APANIQVSF

SEQ ID NO: 104411 - protein, 8 aa, Homo sapiens
  misc_feature (1)..(8): Table A1; Target 1569; HLA-B*51:01; FNDC7; ENSG00000143107; Fibronectin type III domain-containing protein 7
DAFSMINV

SEQ ID NO: 104412 - protein, 9 aa, Homo sapiens
  misc_feature (1)..(9): Table A1; Target 1570; HLA-A*26:01; FNDC7; ENSG00000143107; Fibronectin type III domain-containing protein 7
DTKYNITVY

SEQ ID NO: 104413 - protein, 11 aa, Homo sapiens
  misc_feature (1)..(11): Table A1; Target 1571; HLA-A*30:02; FNDC7; ENSG00000143107; Fibronectin type III domain-containing protein 7
GQSPLGDIFNY

SEQ ID NO: 104414 - protein, 9 aa, Homo sapiens
  misc_feature (1)..(9): Table A1; Target 1572; HLA-A*11:01; FNDC7; ENSG00000143107; Fibronectin type III domain-containing protein 7
TVMVSPVAK

SEQ ID NO: 104415 - protein, 9 aa, Homo sapiens
  misc_feature (1)..(9): Table A1; Target 1573; HLA-C*01:02; FNDC7; ENSG00000143107; Fibronectin type III domain-containing protein 7
VSPVAKTGL

SEQ ID NO: 104416 - protein, 9 aa, Homo sapiens
  misc_feature (1)..(9): Table A1; Target 1574; HLA-B*51:01; GP119; ENSG00000147262; Glucose-dependent insulinotropic receptor (G-protein coupled receptor 119)
SAAASVLTV

SEQ ID NO: 104417 - protein, 11 aa, Homo sapiens
  misc_feature (1)..(11): Table A1; Target 1575; HLA-A*29:02; BOLLENSG00000152430; Protein boule-like;
AFIIKTIGQLY

SEQ ID NO: 104418 - protein, 9 aa, Homo sapiens
  misc_feature (1)..(9): Table A1; Target 1576; HLA-B*51:01; J3KNE0; ENSG00000153165; RanBP2-like and GRIP domain-containing protein 3
DAMTAFESI

SEQ ID NO: 104419 - protein, 9 aa, Homo sapiens
  misc_feature (1)..(9): Table A1; Target 1577; HLA-B*44:03; J3KNE0; ENSG00000153165; RanBP2-like and GRIP domain-containing protein 3
EESSINYTF

SEQ ID NO: 104420 - protein, 11 aa, Homo sapiens
  misc_feature (1)..(11): Table A1; Target 1578; HLA-C*04:01; J3KNE0; ENSG00000153165; RanBP2-like and GRIP domain-containing protein 3
HFDESTTGSNF

SEQ ID NO: 104421 - protein, 11 aa, Homo sapiens
  misc_feature (1)..(11): Table A1; Target 1579; HLA-A*03:01; J3KNE0; ENSG00000153165; RanBP2-like and GRIP domain-containing protein 3
KLFPGSPAIYK

SEQ ID NO: 104422 - protein, 8 aa, Homo sapiens
  misc_feature (1)..(8): Table A1; Target 1580; HLA-B*18:01; J3KNE0; ENSG00000153165; RanBP2-like and GRIP domain-containing protein 3
NEQVVFSH

SEQ ID NO: 104423 - protein, 9 aa, Homo sapiens
  misc_feature (1)..(9): Table A1; Target 1581; HLA-A*11:01; J3KNE0; ENSG00000153165; RanBP2-like and GRIP domain-containing protein 3
SQYGKMANK

SEQ ID NO: 104424 - protein, 11 aa, Homo sapiens
  misc_feature (1)..(11): Table A1; Target 1582; HLA-A*11:01; J3KNE0; ENSG00000153165; RanBP2-like and GRIP domain-containing protein 3
SVQGSAPSPRK

SEQ ID NO: 104425 - protein, 9 aa, Homo sapiens
  misc_feature (1)..(9): Table A1; Target 1583; HLA-B*51:01; J3KNE0; ENSG00000153165; RanBP2-like and GRIP domain-containing protein 3
TAFESIKSV

SEQ ID NO: 104426 - protein, 9 aa, Homo sapiens
  misc_feature (1)..(9): Table A1; Target 1584; HLA-A*11:01; J3KNE0; ENSG00000153165; RanBP2-like and GRIP domain-containing protein 3
VVVETFANK

SEQ ID NO: 104427 - protein, 9 aa, Homo sapiens
  misc_feature (1)..(9): Table A1; Target 1585; HLA-B*44:03; S4R404; ENSG00000163424; Uncharacterized protein C3orf30
SEIDQGKGY

SEQ ID NO: 104428 - protein, 9 aa, Homo sapiens
  misc_feature (1)..(9): Table A1; Target 1586; HLA-C*02:02; S4R404; ENSG00000163424; Uncharacterized protein C3orf30
SEIDQGKGY

SEQ ID NO: 104429 - protein, 10 aa, Homo sapiens
  misc_feature (1)..(10): Table A1; Target 1587; HLA-A*26:01; S35G3; ENSG00000164729; Solute carrier family 35 member G3 (Acyl-malonyl-condensing enzyme 1) (Transmembrane protein 21A)
EVVVALILQY

SEQ ID NO: 104430 - protein, 9 aa, Homo sapiens
  misc_feature (1)..(9): Table A1; Target 1588; HLA-B*51:01; ACHA9; ENSG00000174343; Neuronal acetylcholine receptor subunit alpha-9 (Nicotinic acetylcholine receptor subunit alpha-9) (NACHR alpha-9)
TAYLWIRQI

SEQ ID NO: 104431 - protein, 9 aa, Homo sapiens
  misc_feature (1)..(9): Table A1; Target 1589; HLA-A*01:01; CTSRD; ENSG00000174898; Cation channel sperm-associated protein subunit delta (CatSper-delta) (CatSperdelta) (Transmembrane protein 146)
SSEDLHVFY

SEQ ID NO: 104432 - protein, 9 aa, Homo sapiens
  misc_feature (1)..(9): Table A1; Target 1590; HLA-B*46:01; FMR1N; ENSG00000176988; Fragile X mental retardation 1 neighbor protein (Cancer/testis antigen 37) (CT37) (Sarcoma antigen NY-SAR-35)
VAHLELATY

SEQ ID NO: 104433 - protein, 9 aa, Homo sapiens
  misc_feature (1)..(9): Table A1; Target 1591; HLA-A*11:01; PRS38; ENSG00000185888; Serine protease 38 (EC 3.4.21.-) (Marapsin-2)
ATGWGLVSK

SEQ ID NO: 104434 - protein, 10 aa, Homo sapiens
  misc_feature (1)..(10): Table A1; Target 1592; HLA-A*30:02; HORNENSG00000197915; Hornerin; ;
GSSSGLSSSY

SEQ ID NO: 104435 - protein, 9 aa, Homo sapiens
  misc_feature (1)..(9): Table A1; Target 1593; HLA-A*29:02; S4R3Z8; ENSG00000203963; Uncharacterized protein C1orf141 (Fragment)
NAGPLNVLY

SEQ ID NO: 104436 - protein, 9 aa, Homo sapiens
  misc_feature (1)..(9): Table A1; Target 1594; HLA-B*35:01; S4R3Z8; ENSG00000203963; Uncharacterized protein C1orf141 (Fragment)
NAGPLNVLY

SEQ ID NO: 104437 - protein, 10 aa, Homo sapiens
  misc_feature (1)..(10): Table A1; Target 1595; HLA-A*30:02; A0A0U1RQF7; ENSG00000263201; HCG1775037
ATSPPTPGHY

SEQ ID NO: 104438 - protein, 10 aa, Homo sapiens
  misc_feature (1)..(10): Table A1; Target 1596; HLA-B*44:03; MAGAA; ENSG00000124260; Melanoma-associated antigen 10 (Cancer/testis antigen 1.10) (CT1.10) (MAGE-10 antigen)
KEVDPTGHSF

SEQ ID NO: 104439 - protein, 9 aa, Homo sapiens
  misc_feature (1)..(9): Table A1; Target 1597; HLA-B*18:01; OTORENSG00000125879; Otoraplin (Fibrocyte-derived protein) (Melanoma inhibitory activity-like protein)
DEMGVVGYF

SEQ ID NO: 104440 - protein, 9 aa, Homo sapiens
  misc_feature (1)..(9): Table A1; Target 1598; HLA-C*01:02; OCSTP; ENSG00000149635; Osteoclast stimulatory transmembrane protein (OC-STAMP)
AAPLAAGAL

SEQ ID NO: 104441 - protein, 9 aa, Homo sapiens
  misc_feature (1)..(9): Table A1; Target 1599; HLA-C*02:02; OCSTP; ENSG00000149635; Osteoclast stimulatory transmembrane protein (OC-STAMP)
AEQLVKTGW

SEQ ID NO: 104442 - protein, 9 aa, Homo sapiens
  misc_feature (1)..(9): Table A1; Target 1600; HLA-B*44:03; OCSTP; ENSG00000149635; Osteoclast stimulatory transmembrane protein (OC-STAMP)
SEGEGKELW

SEQ ID NO: 104443 - protein, 11 aa, Homo sapiens
  misc_feature (1)..(11): Table A1; Target 1601; HLA-A*30:02; PSA7L; ENSG00000154611; Proteasome subunit alpha type-7-like (EC 3.4.25.1)
RLYQTDPSGTY

SEQ ID NO: 104444 - protein, 9 aa, Homo sapiens
  misc_feature (1)..(9): Table A1; Target 1602; HLA-A*29:02; MAGA8; ENSG00000156009; Melanoma-associated antigen 8 (Cancer/testis antigen 1.8) (CT1.8) (MAGE-8 antigen)
WVQENYLEY

SEQ ID NO: 104445 - protein, 9 aa, Homo sapiens
  misc_feature (1)..(9): Table A1; Target 1603; HLA-A*33:01; SUN3ENSG00000164744; SUN domain-containing protein 3 (Sad1/unc-84 domain-containing protein 1)
ELQGPWHTR

SEQ ID NO: 104446 - protein, 9 aa, Homo sapiens
  misc_feature (1)..(9): Table A1; Target 1604; HLA-A*03:01; SSX3ENSG00000165584; Protein SSX3 (Cancer/testis antigen 5.3) (CT5.3)
GIFPKIMPK

SEQ ID NO: 104447 - protein, 11 aa, Homo sapiens
  misc_feature (1)..(11): Table A1; Target 1605; HLA-A*29:02; ESPB1; ENSG00000169393; Epididymal sperm-binding protein 1 (Epididymal secretory protein 12) (hE12)
SVFDEKQQWKF

SEQ ID NO: 104448 - protein, 9 aa, Homo sapiens
  misc_feature (1)..(9): Table A1; Target 1606; HLA-A*31:01; NGN1ENSG00000181965; Neurogenin-1 (NGN-1) (Class A basic helix-loop-helix protein 6) (bHLHa6) (Neurogenic basic-helix-loop-helix protein) (Neurogenic differentiation factor 3) (NeuroD3)
ASGPPAPAR

SEQ ID NO: 104449 - protein, 11 aa, Homo sapiens
  misc_feature (1)..(11): Table A1; Target 1607; HLA-C*02:02; TEX19; ENSG00000182459; Testis-expressed protein 19
QEGSSGMELSW

SEQ ID NO: 104450 - protein, 11 aa, Homo sapiens
  misc_feature (1)..(11): Table A1; Target 1608; HLA-A*01:01; KCNH7; ENSG00000184611; Potassium voltage-gated channel subfamily H member 7 (Ether-a-go-go-related gene potassium channel 3) (ERG-3)
  misc_feature (1)..(11): (Eag-related protein 3) (Ether-a-go-go-related protein 3) (hERG-3) (Voltage-gated potassium channel subunit Kv11.3)
VSDPAKIAIHY

SEQ ID NO: 104451 - protein, 9 aa, Homo sapiens
  misc_feature (1)..(9): Table A1; Target 1609; HLA-A*02:01; FOXE3; ENSG00000186790; Forkhead box protein E3 (Forkhead-related protein FKHL12) (Forkhead-related transcription factor 8) (FREAC-8)
SLVNLQPEL

SEQ ID NO: 104452 - protein, 9 aa, Homo sapiens
  misc_feature (1)..(9): Table A1; Target 1610; HLA-B*35:01; MAGBG; ENSG00000189023; Melanoma-associated antigen B16 (MAGE-B16 antigen)
SPLEVPQSF

SEQ ID NO: 104453 - protein, 9 aa, Homo sapiens
  misc_feature (1)..(9): Table A1; Target 1611; HLA-A*11:01; PRAM9; ENSG00000204501; PRAME family member 9/15
ATLENLLSH

SEQ ID NO: 104454 - protein, 9 aa, Homo sapiens
  misc_feature (1)..(9): Table A1; Target 1612; HLA-A*02:07; PRAM9; ENSG00000204501; PRAME family member 9/15
TLDEYLTYL

SEQ ID NO: 104455 - protein, 9 aa, Homo sapiens
  misc_feature (1)..(9): Table A1; Target 1613; HLA-B*51:01; MO2R2; ENSG00000206531; Cell surface glycoprotein CD200 receptor 2 (CD200 cell surface glycoprotein receptor-like 2) (CD200 receptor-like 2) (HuCD200R2) (CD200 cell surface glycoprotein receptor-like a)
  misc_feature (1)..(9): (CD200RLa) (Cell surface glycoprotein CD200 receptor 1-like) (Cell surface glycoprotein OX2 receptor 2)
DGYYRGIVV

SEQ ID NO: 104456 - protein, 9 aa, Homo sapiens
  misc_feature (1)..(9): Table A1; Target 1614; HLA-B*51:01; M4A18; ENSG00000214782; Membrane-spanning 4-domains subfamily A member 18
IAPDNVHVI

SEQ ID NO: 104457 - protein, 8 aa, Homo sapiens
  misc_feature (1)..(8): Table A1; Target 1615; HLA-B*08:01; E5RK72; ENSG00000215262; Potassium channel subfamily U member 1
DVVAKTSL

SEQ ID NO: 104458 - protein, 10 aa, Homo sapiens
  misc_feature (1)..(10): Table A1; Target 1616; HLA-B*44:03; PSG1ENSG00000231924; Pregnancy-specific beta-1-glycoprotein 1 (PS-beta-G-1) (PSBG-1) (Pregnancy-specific glycoprotein 1) (CD66 antigen-like family member F)
  misc_feature (1)..(9): (Fetal liver non-specific cross-reactive antigen 1/2) (FL-NCA-1/2) (PSG95) (Pregnancy-specific beta-1 glycoprotein C/D) (PS-beta-C/D) (CD antigen CD66f)
GEIIIYGPAY

SEQ ID NO: 104459 - protein, 9 aa, Homo sapiens
  misc_feature (1)..(9): Table A1; Target 1617; HLA-B*35:01; TIFAB; ENSG00000255833; TRAF-interacting protein with FHA domain-containing protein B (TIFA-like protein)
HPTLGPSAF

SEQ ID NO: 104460 - protein, 10 aa, Homo sapiens
  misc_feature (1)..(10): Table A1; Target 1618; HLA-A*33:01; ERVV2; ENSG00000268964; Endogenous retrovirus group V member 2 Env polyprotein (HERV-V; 19q13.41 provirus ancestral Env polyprotein 2)
DYRDKSPQNR

SEQ ID NO: 104461 - protein, 9 aa, Homo sapiens
  misc_feature (1)..(9): Table A1; Target 1619; HLA-A*02:01; TSN16; ENSG00000130167; Tetraspanin-16 (Tspan-16) (Tetraspanin TM4-B) (Transmembrane 4 superfamily member 16)
SLLNGFVAV

SEQ ID NO: 104462 - protein, 8 aa, Homo sapiens
  misc_feature (1)..(8): Table A1; Target 1620; HLA-B*18:01; PRD12; ENSG00000130711; PR domain zinc finger protein 12 (EC 2.1.1.-) (PR domain-containing protein 12)
AEVLAQSF

SEQ ID NO: 104463 - protein, 11 aa, Homo sapiens
  misc_feature (1)..(11): Table A1; Target 1621; HLA-A*26:01; PRD12; ENSG00000130711; PR domain zinc finger protein 12 (EC 2.1.1.-) (PR domain-containing protein 12)
EVFNEDGTVRY

SEQ ID NO: 104464 - protein, 11 aa, Homo sapiens
  misc_feature (1)..(11): Table A1; Target 1622; HLA-A*26:01; PRD12; ENSG00000130711; PR domain zinc finger protein 12 (EC 2.1.1.-) (PR domain-containing protein 12)
EVITSDILHSF

SEQ ID NO: 104465 - protein, 10 aa, Homo sapiens
  misc_feature (1)..(10): Table A1; Target 1623; HLA-A*26:01; PRD12; ENSG00000130711; PR domain zinc finger protein 12 (EC 2.1.1.-) (PR domain-containing protein 12)
EVVQIGTSIF

SEQ ID NO: 104466 - protein, 11 aa, Homo sapiens
  misc_feature (1)..(11): Table A1; Target 1624; HLA-A*11:01; PRD12; ENSG00000130711; PR domain zinc finger protein 12 (EC 2.1.1.-) (PR domain-containing protein 12)
SVLPAEALVLK

SEQ ID NO: 104467 - protein, 10 aa, Homo sapiens
  misc_feature (1)..(10): Table A1; Target 1625; HLA-A*01:01; PRD12; ENSG00000130711; PR domain zinc finger protein 12 (EC 2.1.1.-) (PR domain-containing protein 12)
TSDILHSFLY

SEQ ID NO: 104468 - protein, 9 aa, Homo sapiens
  misc_feature (1)..(9): Table A1; Target 1626; HLA-A*02:07; MSGN1; ENSG00000151379; Mesogenin-1 (Paraxial mesoderm-specific mesogenin1) (pMesogenin1) (pMsgn1)
TLADALHTL

SEQ ID NO: 104469 - protein, 9 aa, Homo sapiens
  misc_feature (1)..(9): Table A1; Target 1627; HLA-A*11:01; DDX4ENSG00000152670; Probable ATP-dependent RNA helicase DDX4 (EC 3.6.4.13) (DEAD box protein 4) (Vasa homolog)
RTMVFVETK

SEQ ID NO: 104470 - protein, 9 aa, Homo sapiens
  misc_feature (1)..(9): Table A1; Target 1628; HLA-B*44:03; TERTENSG00000164362; Telomerase reverse transcriptase (EC 2.7.7.49) (HEST2) (Telomerase catalytic subunit) (Telomerase-associated protein 2) (TP2)
REVLPLATF

SEQ ID NO: 104471 - protein, 9 aa, Homo sapiens
  misc_feature (1)..(9): Table A1; Target 1629; HLA-A*26:01; S6A18; ENSG00000164363; Sodium-dependent neutral amino acid transporter B(0)AT3 (Sodium- and chloride-dependent transporter XTRP2) (Solute carrier family 6 member 18) (System B(0) neutral amino acid transporter AT3)
ETTGKVIYF

SEQ ID NO: 104472 - protein, 9 aa, Homo sapiens
  misc_feature (1)..(9): Table A1; Target 1630; HLA-A*03:01; S6A18; ENSG00000164363; Sodium-dependent neutral amino acid transporter B(0)AT3 (Sodium- and chloride-dependent transporter XTRP2) (Solute carrier family 6 member 18) (System B(0) neutral amino acid transporter AT3)
LLFWKPLRY

SEQ ID NO: 104473 - protein, 9 aa, Homo sapiens
  misc_feature (1)..(9): Table A1; Target 1631; HLA-A*26:01; CRFM7; ENSG00000166664; CHRNA7-FAM7A fusion protein (CHRNA7-DR1) (D-10)
DSVPLIAQY

SEQ ID NO: 104474 - protein, 9 aa, Homo sapiens
  misc_feature (1)..(9): Table A1; Target 1632; HLA-B*44:03; MRO2B; ENSG00000171495; Maestro heat-like repeat-containing protein family member 2B (HEAT repeat-containing protein 7B2) (Sperm PKA-interacting factor) (SPIF)
AEAALQTLL

SEQ ID NO: 104475 - protein, 10 aa, Homo sapiens
  misc_feature (1)..(10): Table A1; Target 1633; HLA-B*44:03; MRO2B; ENSG00000171495; Maestro heat-like repeat-containing protein family member 2B (HEAT repeat-containing protein 7B2) (Sperm PKA-interacting factor) (SPIF)
AEDQGFQFSY

SEQ ID NO: 104476 - protein, 8 aa, Homo sapiens
  misc_feature (1)..(8): Table A1; Target 1634; HLA-B*18:01; MRO2B; ENSG00000171495; Maestro heat-like repeat-containing protein family member 2B (HEAT repeat-containing protein 7B2) (Sperm PKA-interacting factor) (SPIF)
DEFVVLAL

SEQ ID NO: 104477 - protein, 9 aa, Homo sapiens
  misc_feature (1)..(9): Table A1; Target 1635; HLA-A*26:01; MRO2B; ENSG00000171495; Maestro heat-like repeat-containing protein family member 2B (HEAT repeat-containing protein 7B2) (Sperm PKA-interacting factor) (SPIF)
EAISQIASF

SEQ ID NO: 104478 - protein, 9 aa, Homo sapiens
  misc_feature (1)..(9): Table A1; Target 1636; HLA-A*26:01; MRO2B; ENSG00000171495; Maestro heat-like repeat-containing protein family member 2B (HEAT repeat-containing protein 7B2) (Sperm PKA-interacting factor) (SPIF)
EVISMGTSV

SEQ ID NO: 104479 - protein, 11 aa, Homo sapiens
  misc_feature (1)..(11): Table A1; Target 1637; HLA-A*02:07; MRO2B; ENSG00000171495; Maestro heat-like repeat-containing protein family member 2B (HEAT repeat-containing protein 7B2) (Sperm PKA-interacting factor) (SPIF)
HLWDPNPKIGV

SEQ ID NO: 104480 - protein, 9 aa, Homo sapiens
  misc_feature (1)..(9): Table A1; Target 1638; HLA-A*02:07; MRO2B; ENSG00000171495; Maestro heat-like repeat-containing protein family member 2B (HEAT repeat-containing protein 7B2) (Sperm PKA-interacting factor) (SPIF)
HMDTVVVNL

SEQ ID NO: 104481 - protein, 10 aa, Homo sapiens
  misc_feature (1)..(10): Table A1; Target 1639; HLA-A*02:07; MRO2B; ENSG00000171495; Maestro heat-like repeat-containing protein family member 2B (HEAT repeat-containing protein 7B2) (Sperm PKA-interacting factor) (SPIF)
ILDDAIVQRL

SEQ ID NO: 104482 - protein, 9 aa, Homo sapiens
  misc_feature (1)..(9): Table A1; Target 1640; HLA-A*11:01; MRO2B; ENSG00000171495; Maestro heat-like repeat-containing protein family member 2B (HEAT repeat-containing protein 7B2) (Sperm PKA-interacting factor) (SPIF)
IVMGDLSTK

SEQ ID NO: 104483 - protein, 9 aa, Homo sapiens
  misc_feature (1)..(9): Table A1; Target 1641; HLA-A*01:01; MRO2B; ENSG00000171495; Maestro heat-like repeat-containing protein family member 2B (HEAT repeat-containing protein 7B2) (Sperm PKA-interacting factor) (SPIF)
LTDRDVSFY

SEQ ID NO: 104484 - protein, 9 aa, Homo sapiens
  misc_feature (1)..(9): Table A1; Target 1642; HLA-B*18:01; SL9C1; ENSG00000172139; Sodium/hydrogen exchanger 10 (Na(+)/H(+) exchanger 10) (NHE-10) (Solute carrier family 9 member 10) (Solute carrier family 9 member C1) (Sperm-specific Na(+)/H(+) exchanger) (sNHE)
DEIFNTEAM

SEQ ID NO: 104485 - protein, 10 aa, Homo sapiens
  misc_feature (1)..(10): Table A1; Target 1643; HLA-B*44:03; VCX2ENSG00000177504; Variable charge X-linked protein 2 (Variable charge protein on X with two repeats) (VCX-2r) (Variably charged protein X-B) (VCX-B)
SEVEEPLTVW

SEQ ID NO: 104486 - protein, 10 aa, Homo sapiens
  misc_feature (1)..(10): Table A1; Target 1644; HLA-A*02:01; GDPD4; ENSG00000178795; Glycerophosphodiester phosphodiesterase domain-containing protein 4 (EC 3.1.-.-) (Glycerophosphodiester phosphodiesterase 6) (UgpQ)
LLWERIELYL

SEQ ID NO: 104487 - protein, 10 aa, Homo sapiens
  misc_feature (1)..(10): Table A1; Target 1645; HLA-A*11:01; VCX1ENSG00000182583; Variable charge X-linked protein 1 (Variable charge protein on X with ten repeats) (VCX-10r) (Variably charged protein X-B1) (VCX-B1)
SSQPSPSDPK

SEQ ID NO: 104488 - protein, 9 aa, Homo sapiens
  misc_feature (1)..(9): Table A1; Target 1646; HLA-A*33:01; SAMD7; ENSG00000187033; Sterile alpha motif domain-containing protein 7 (SAM domain-containing protein 7)
EMYAIYQQR

SEQ ID NO: 104489 - protein, 10 aa, Homo sapiens
  misc_feature (1)..(10): Table A1; Target 1647; HLA-A*03:01; NPSR1; ENSG00000187258; Neuropeptide S receptor (G-protein coupled receptor 154) (G-protein coupled receptor PGR14) (G-protein coupled receptor for asthma susceptibility)
SSYNRGLISK

SEQ ID NO: 104490 - protein, 9 aa, Homo sapiens
  misc_feature (1)..(9): Table A1; Target 1648; HLA-A*02:01; CS067; ENSG00000188032; UPF0575 protein C19orf67
GLLEISQQL

SEQ ID NO: 104491 - protein, 9 aa, Homo sapiens
  misc_feature (1)..(9): Table A1; Target 1649; HLA-A*02:01; RN133; ENSG00000188050; E3 ubiquitin-protein ligase RNF133 (EC 2.3.2.27) (RING finger protein 133) (RING-type E3 ubiquitin transferase RNF133)
VLITAVVEV

SEQ ID NO: 104492 - protein, 9 aa, Homo sapiens
  misc_feature (1)..(9): Table A1; Target 1650; HLA-A*02:07; SG1C1; ENSG00000188076; Secretoglobin family 1C member 1 (Secretoglobin RYD5)
FMDFLQTLL

SEQ ID NO: 104493 - protein, 11 aa, Homo sapiens
  misc_feature (1)..(11): Table A1; Target 1651; HLA-B*44:03; SPNXD; ENSG00000196406; Sperm protein associated with the nucleus on the X chromosome D (Cancer/testis antigen 11.4) (CT11.4) (Nuclear-associated protein SPAN-Xd) (SPANX-D) (SPANX family member D)
SESSTILVVRY

SEQ ID NO: 104494 - protein, 9 aa, Homo sapiens
  misc_feature (1)..(9): Table A1; Target 1652; HLA-A*26:01; ONEC3; ENSG00000205922; One cut domain family member 3 (One cut homeobox 3) (Transcription factor ONECUT-3) (OC-3)
EAPGLGGTY

SEQ ID NO: 104495 - protein, 9 aa, Homo sapiens
  misc_feature (1)..(9): Table A1; Target 1653; HLA-B*35:01; AMELY; ENSG00000099721; Amelogenin, Y isoform
MPVPGQQSM

SEQ ID NO: 104496 - protein, 11 aa, Homo sapiens
  misc_feature (1)..(11): Table A1; Target 1654; HLA-A*02:07; H3BVE8; ENSG00000121446; Regulator of G-protein-signaling protein-like
FLEGNPLLLTV

SEQ ID NO: 104497 - protein, 9 aa, Homo sapiens
  misc_feature (1)..(9): Table A1; Target 1655; HLA-C*02:02; H2BWT; ENSG00000123569; Histone H2B type W-T (H2B histone family member W testis-specific)
AESEGTKAV

SEQ ID NO: 104498 - protein, 9 aa, Homo sapiens
  misc_feature (1)..(9): Table A1; Target 1656; HLA-C*16:01; H2BWT; ENSG00000123569; Histone H2B type W-T (H2B histone family member W testis-specific)
AESEGTKAV

SEQ ID NO: 104499 - protein, 11 aa, Homo sapiens
  misc_feature (1)..(11): Table A1; Target 1657; HLA-A*11:01; CRIS1; ENSG00000124812; Cysteine-rich secretory protein 1 (CRISP-1) (AEG-like protein) (ARP) (Acidic epididymal glycoprotein homolog)
RVVPPASNMLK

SEQ ID NO: 104500 - protein, 11 aa, Homo sapiens
  misc_feature (1)..(11): Table A1; Target 1658; HLA-A*01:01; CRIS1; ENSG00000124812; Cysteine-rich secretory protein 1 (CRISP-1) (AEG-like protein) (ARP) (Acidic epididymal glycoprotein homolog)
TTDDDITTDHY

SEQ ID NO: 104501 - protein, 9 aa, Homo sapiens
  misc_feature (1)..(9): Table A1; Target 1659; HLA-C*01:02; CRIS1; ENSG00000124812; Cysteine-rich secretory protein 1 (CRISP-1) (AEG-like protein) (ARP) (Acidic epididymal glycoprotein homolog)
VVPPASNML

SEQ ID NO: 104502 - protein, 9 aa, Homo sapiens
  misc_feature (1)..(9): Table A1; Target 1660; HLA-B*51:01; CRIS1; ENSG00000124812; Cysteine-rich secretory protein 1 (CRISP-1) (AEG-like protein) (ARP) (Acidic epididymal glycoprotein homolog)
YPVSWSSVI

SEQ ID NO: 104503 - protein, 9 aa, Homo sapiens
  misc_feature (1)..(9): Table A1; Target 1661; HLA-A*03:01; X6R6V8; ENSG00000143552; Nuclear pore membrane glycoprotein 210-like
STASIFLAY

SEQ ID NO: 104504 - protein, 9 aa, Homo sapiens
  misc_feature (1)..(9): Table A1; Target 1662; HLA-B*44:03; OCSTP; ENSG00000149635; Osteoclast stimulatory transmembrane protein (OC-STAMP)
AEQLVKTGW

SEQ ID NO: 104505 - protein, 11 aa, Homo sapiens
  misc_feature (1)..(11): Table A1; Target 1663; HLA-A*11:01; CCD83; ENSG00000150676; Coiled-coil domain-containing protein 83
ATQNAVKLIDK

SEQ ID NO: 104506 - protein, 9 aa, Homo sapiens
  misc_feature (1)..(9): Table A1; Target 1664; HLA-A*01:01; CCD83; ENSG00000150676; Coiled-coil domain-containing protein 83
DTDMKYLLY

SEQ ID NO: 104507 - protein, 9 aa, Homo sapiens
  misc_feature (1)..(9): Table A1; Target 1665; HLA-A*33:01; CCD83; ENSG00000150676; Coiled-coil domain-containing protein 83
EYKNVGSER

SEQ ID NO: 104508 - protein, 11 aa, Homo sapiens
  misc_feature (1)..(11): Table A1; Target 1666; HLA-A*01:01; CCD83; ENSG00000150676; Coiled-coil domain-containing protein 83
GTEFGDTDMKY

SEQ ID NO: 104509 - protein, 10 aa, Homo sapiens
  misc_feature (1)..(10): Table A1; Target 1667; HLA-B*44:03; CCD83; ENSG00000150676; Coiled-coil domain-containing protein 83
TEFGDTDMKY

SEQ ID NO: 104510 - protein, 10 aa, Homo sapiens
  misc_feature (1)..(10): Table A1; Target 1668; HLA-C*02:02; MAGA8; ENSG00000156009; Melanoma-associated antigen 8 (Cancer/testis antigen 1.8) (CT1.8) (MAGE-8 antigen)
KEVDPAGHSY

SEQ ID NO: 104511 - protein, 9 aa, Homo sapiens
  misc_feature (1)..(9): Table A1; Target 1669; HLA-A*29:02; SL9C2; ENSG00000162753; Sodium/hydrogen exchanger 11 (Na(+)/H(+) exchanger 11) (NHE-11) (Solute carrier family 9 member 11) (Solute carrier family 9 member C2)
IVFSEEFEY

SEQ ID NO: 104512 - protein, 8 aa, Homo sapiens
  misc_feature (1)..(8): Table A1; Target 1670; HLA-B*08:01; PLS2ENSG00000163746; Phospholipid scramblase 2 (PL scramblase 2) (Ca(2+)-dependent phospholipid scramblase 2)
DVKMKAVM

SEQ ID NO: 104513 - protein, 9 aa, Homo sapiens
  misc_feature (1)..(9): Table A1; Target 1671; HLA-A*29:02; OTOP1; ENSG00000163982; Otopetrin-1
YLYPFNIEY

SEQ ID NO: 104514 - protein, 11 aa, Homo sapiens
  misc_feature (1)..(11): Table A1; Target 1672; HLA-A*11:01; ADAD1; ENSG00000164113; Adenosine deaminase domain-containing protein 1 (Testis nuclear RNA-binding protein)
SSISNPVLPPK

SEQ ID NO: 104515 - protein, 10 aa, Homo sapiens
  misc_feature (1)..(10): Table A1; Target 1673; HLA-B*35:01; ESPB1; ENSG00000169393; Epididymal sperm-binding protein 1 (Epididymal secretory protein 12) (hE12)
FPFTYKGSVY

SEQ ID NO: 104516 - protein, 9 aa, Homo sapiens
  misc_feature (1)..(9): Table A1; Target 1674; HLA-A*30:02; ZPLD1; ENSG00000170044; Zona pellucida-like domain-containing protein 1 (ZP domain-containing protein 1)
STIPGVSAY

SEQ ID NO: 104517 - protein, 11 aa, Homo sapiens
  misc_feature (1)..(11): Table A1; Target 1675; HLA-A*02:01; MRO2B; ENSG00000171495; Maestro heat-like repeat-containing protein family member 2B (HEAT repeat-containing protein 7B2) (Sperm PKA-interacting factor) (SPIF)
HLWDPNPKIGV

SEQ ID NO: 104518 - protein, 9 aa, Homo sapiens
  misc_feature (1)..(9): Table A1; Target 1676; HLA-B*18:01; ATS20; ENSG00000173157; A disintegrin and metalloproteinase with thrombospondin motifs 20 (ADAM-TS 20) (ADAM-TS20) (ADAMTS-20) (EC 3.4.24.-)
DENGQSASY

SEQ ID NO: 104519 - protein, 10 aa, Homo sapiens
  misc_feature (1)..(10): Table A1; Target 1677; HLA-B*44:03; TMPS7; ENSG00000176040; Transmembrane protease serine 7 (EC 3.4.21.-) (Matriptase-3)
AEVELIDQTL

SEQ ID NO: 104520 - protein, 9 aa, Homo sapiens
  misc_feature (1)..(9): Table A1; Target 1678; HLA-B*35:01; TMPS7; ENSG00000176040; Transmembrane protease serine 7 (EC 3.4.21.-) (Matriptase-3)
LPIRSSILY

SEQ ID NO: 104521 - protein, 9 aa, Homo sapiens
  misc_feature (1)..(9): Table A1; Target 1679; HLA-A*11:01; TMPS7; ENSG00000176040; Transmembrane protease serine 7 (EC 3.4.21.-) (Matriptase-3)
STYGIITSR

SEQ ID NO: 104522 - protein, 9 aa, Homo sapiens
  misc_feature (1)..(9): Table A1; Target 1680; HLA-A*31:01; TMPS7; ENSG00000176040; Transmembrane protease serine 7 (EC 3.4.21.-) (Matriptase-3)
STYGIITSR

SEQ ID NO: 104523 - protein, 9 aa, Homo sapiens
  misc_feature (1)..(9): Table A1; Target 1681; HLA-A*11:01; TMPS7; ENSG00000176040; Transmembrane protease serine 7 (EC 3.4.21.-) (Matriptase-3)
VVADVSNNK

SEQ ID NO: 104524 - protein, 10 aa, Homo sapiens
  misc_feature (1)..(10): Table A1; Target 1682; HLA-A*11:01; TMPS7; ENSG00000176040; Transmembrane protease serine 7 (EC 3.4.21.-) (Matriptase-3)
VVADVSSNNK

SEQ ID NO: 104525 - protein, 8 aa, Homo sapiens
  misc_feature (1)..(8): Table A1; Target 1683; HLA-B*18:01; FMR1N; ENSG00000176988; Fragile X mental retardation 1 neighbor protein (Cancer/testis antigen 37) (CT37) (Sarcoma antigen NY-SAR-35)
LELATYEL

SEQ ID NO: 104526 - protein, 9 aa, Homo sapiens
  misc_feature (1)..(9): Table A1; Target 1684; HLA-A*24:02; TR49B; ENSG00000182053; Putative tripartite motif-containing protein 49B (RING finger protein 18B)
NYFIDPVTI

SEQ ID NO: 104527 - protein, 9 aa, Homo sapiens
  misc_feature (1)..(9): Table A1; Target 1685; HLA-A*29:02; OTOL1; ENSG00000182447; Otolin-1;
SIFTGFLLY

SEQ ID NO: 104528 - protein, 8 aa, Homo sapiens
  misc_feature (1)..(8): Table A1; Target 1686; HLA-B*18:01; TRIML; ENSG00000184108; Probable E3 ubiquitin-protein ligase TRIML1 (EC 2.3.2.27) (RING finger protein 209) (RING-type E3 ubiquitin transferase TRIML1) (Tripartite motif family-like protein 1)
DESLIYSF

SEQ ID NO: 104529 - protein, 9 aa, Homo sapiens
  misc_feature (1)..(9): Table A1; Target 1687; HLA-B*44:03; TRIML; ENSG00000184108; Probable E3 ubiquitin-protein ligase TRIML1 (EC 2.3.2.27) (RING finger protein 209) (RING-type E3 ubiquitin transferase TRIML1) (Tripartite motif family-like protein 1)
SEDLKSVKY

SEQ ID NO: 104530 - protein, 11 aa, Homo sapiens
  misc_feature (1)..(11): Table A1; Target 1688; HLA-A*02:07; TRIML; ENSG00000184108; Probable E3 ubiquitin-protein ligase TRIML1 (EC 2.3.2.27) (RING finger protein 209) (RING-type E3 ubiquitin transferase TRIML1) (Tripartite motif family-like protein 1)
TLDPATANAYL

SEQ ID NO: 104531 - protein, 11 aa, Homo sapiens
  misc_feature (1)..(11): Table A1; Target 1689; HLA-A*30:02; TRIML; ENSG00000184108; Probable E3 ubiquitin-protein ligase TRIML1 (EC 2.3.2.27) (RING finger protein 209) (RING-type E3 ubiquitin transferase TRIML1) (Tripartite motif family-like protein 1)
VLQSEDEQGSY

SEQ ID NO: 104532 - protein, 9 aa, Homo sapiens
  misc_feature (1)..(9): Table A1; Target 1690; HLA-A*03:01; KCNH7; ENSG00000184611; Potassium voltage-gated channel subfamily H member 7 (Ether-a-go-go-related gene potassium channel 3) (ERG-3) (Eag-related protein 3)
  misc_feature (1)..(9): (Ether-a-go-go-related protein 3) (hERG-3) (Voltage-gated potassium channel subunit Kv11.3)
RLYSGTARY

SEQ ID NO: 104533 - protein, 11 aa, Homo sapiens
  misc_feature (1)..(11): Table A1; Target 1691; HLA-A*11:01; OVCH1; ENSG00000187950; Ovochymase-1 (EC 3.4.21.-)
VTSGEYSLFQK

SEQ ID NO: 104534 - protein, 9 aa, Homo sapiens
  misc_feature (1)..(9): Table A1; Target 1692; HLA-A*03:01; FGF16; ENSG00000196468; Fibroblast growth factor 16 (FGF-16)
NTYASTLYK

SEQ ID NO: 104535 - protein, 9 aa, Homo sapiens
  misc_feature (1)..(9): Table A1; Target 1693; HLA-A*03:01; PROF3; ENSG00000196570; Profilin-3 (Profilin III)
GVHGGILNK

SEQ ID NO: 104536 - protein, 9 aa, Homo sapiens
  misc_feature (1)..(9): Table A1; Target 1694; HLA-A*11:01; PROF3; ENSG00000196570; Profilin-3 (Profilin III)
GVHGGILNK

SEQ ID NO: 104537 - protein, 10 aa, Homo sapiens
  misc_feature (1)..(10): Table A1; Target 1695; HLA-A*30:02; DMBX1; ENSG00000197587; Diencephalon/mesencephalon homeobox protein 1 (Orthodenticle homolog 3) (Paired-like homeobox protein DMBX1)
GGLLGPSHSY

SEQ ID NO: 104538 - protein, 9 aa, Homo sapiens
  misc_feature (1)..(9): Table A1; Target 1696; HLA-A*29:02; HORNENSG00000197915; Hornerin; ;
TVIDVFYQY

SEQ ID NO: 104539 - protein, 10 aa, Homo sapiens
  misc_feature (1)..(10): Table A1; Target 1697; HLA-A*26:01; TDR15; ENSG00000218819; Tudor domain-containing protein 15
EYFPKSVSEY

SEQ ID NO: 104540 - protein, 9 aa, Homo sapiens
  misc_feature (1)..(9): Table A1; Target 1698; HLA-B*35:01; TDR15; ENSG00000218819; Tudor domain-containing protein 15
LVASGLATY

SEQ ID NO: 104541 - protein, 11 aa, Homo sapiens
  misc_feature (1)..(11): Table A1; Target 1699; HLA-B*44:03; TDR15; ENSG00000218819; Tudor domain-containing protein 15
SETSVSDVNSF

SEQ ID NO: 104542 - protein, 9 aa, Homo sapiens
  misc_feature (1)..(9): Table A1; Target 1700; HLA-A*11:01; MORC1; ENSG00000114487; MORC family CW-type zinc finger protein 1 (Cancer/testis antigen 33) (CT33)
ASSQSTPVK

SEQ ID NO: 104543 - protein, 10 aa, Homo sapiens
  misc_feature (1)..(10): Table A1; Target 1701; HLA-A*11:01; MORC1; ENSG00000114487; MORC family CW-type zinc finger protein 1 (Cancer/testis antigen 33) (CT33)
GTMSTISPSK

SEQ ID NO: 104544 - protein, 9 aa, Homo sapiens
  misc_feature (1)..(9): Table A1; Target 1702; HLA-B*51:01; AMELX; ENSG00000125363; Amelogenin, X isoform
TPLKWYQSI

SEQ ID NO: 104545 - protein, 11 aa, Homo sapiens
  misc_feature (1)..(11): Table A1; Target 1703; HLA-A*02:07; RNF17; ENSG00000132972; RING finger protein 17 (Tudor domain-containing protein 4)
SLPSPGELYAV

SEQ ID NO: 104546 - protein, 9 aa, Homo sapiens
  misc_feature (1)..(9): Table A1; Target 1704; HLA-B*44:02; RXFP2; ENSG00000133105; Relaxin receptor 2 (G-protein coupled receptor 106) (G-protein coupled receptor affecting testicular descent)
  misc_feature (1)..(9): (Leucine-rich repeat-containing G-protein coupled receptor 8) (Relaxin family peptide receptor 2)
TEDIGSKGY

SEQ ID NO: 104547 - protein, 9 aa, Homo sapiens
  misc_feature (1)..(9): Table A1; Target 1705; HLA-C*02:02; RXFP2; ENSG00000133105; Relaxin receptor 2 (G-protein coupled receptor 106) (G-protein coupled receptor affecting testicular descent)
  misc_feature (1)..(9): (Leucine-rich repeat-containing G-protein coupled receptor 8) (Relaxin family peptide receptor 2)
TEDIGSKGY

SEQ ID NO: 104548 - protein, 10 aa, Homo sapiens
  misc_feature (1)..(10): Table A1; Target 1706; HLA-A*11:01; LGSNENSG00000146166; Lengsin (Glutamate-ammonia ligase domain-containing protein 1) (Lens glutamine synthase-like)
GTEQLTITGK

SEQ ID NO: 104549 - protein, 9 aa, Homo sapiens
  misc_feature (1)..(9): Table A1; Target 1707; HLA-A*24:02; STRA8; ENSG00000146857; Stimulated by retinoic acid gene 8 protein homolog
LYMQIINFF

SEQ ID NO: 104550 - protein, 9 aa, Homo sapiens
  misc_feature (1)..(9): Table A1; Target 1708; HLA-A*11:01; TRI48; ENSG00000150244; Tripartite motif-containing protein 48 (RING finger protein 101)
SGISQVFQR

SEQ ID NO: 104551 - protein, 9 aa, Homo sapiens
  misc_feature (1)..(9): Table A1; Target 1709; HLA-B*51:01; CNTP5; ENSG00000155052; Contactin-associated protein-like 5 (Cell recognition molecule Caspr5)
DSLPRLTSV

SEQ ID NO: 104552 - protein, 10 aa, Homo sapiens
  misc_feature (1)..(10): Table A1; Target 1710; HLA-B*44:03; MAGA8; ENSG00000156009; Melanoma-associated antigen 8 (Cancer/testis antigen 1.8) (CT1.8) (MAGE-8 antigen)
KEVDPAGHSY

SEQ ID NO: 104553 - protein, 9 aa, Homo sapiens
  misc_feature (1)..(9): Table A1; Target 1711; HLA-C*02:02; OTOP1; ENSG00000163982; Otopetrin-1
AAASLFEVY

SEQ ID NO: 104554 - protein, 9 aa, Homo sapiens
  misc_feature (1)..(9): Table A1; Target 1712; HLA-B*46:01; OTOP1; ENSG00000163982; Otopetrin-1
HAKDIIQSF

SEQ ID NO: 104555 - protein, 9 aa, Homo sapiens
  misc_feature (1)..(9): Table A1; Target 1713; HLA-B*18:01; PRDM9; ENSG00000164256; Histone-lysine N-methyltransferase PRDM9 (EC 2.1.1.43) (PR domain zinc finger protein 9) (PR domain-containing protein 9)
DEEQNLVAF

SEQ ID NO: 104556 - protein, 10 aa, Homo sapiens
  misc_feature (1)..(10): Table A1; Target 1714; HLA-B*44:03; PRDM9; ENSG00000164256; Histone-lysine N-methyltransferase PRDM9 (EC 2.1.1.43) (PR domain zinc finger protein 9) (PR domain-containing protein 9)
EEAANNGYSW

SEQ ID NO: 104557 - protein, 10 aa, Homo sapiens
  misc_feature (1)..(10): Table A1; Target 1715; HLA-C*02:02; PRDM9; ENSG00000164256; Histone-lysine N-methyltransferase PRDM9 (EC 2.1.1.43) (PR domain zinc finger protein 9) (PR domain-containing protein 9)
EEAANNGYSW

SEQ ID NO: 104558 - protein, 10 aa, Homo sapiens
  misc_feature (1)..(10): Table A1; Target 1716; HLA-B*44:03; PRDM9; ENSG00000164256; Histone-lysine N-methyltransferase PRDM9 (EC 2.1.1.43) (PR domain zinc finger protein 9) (PR domain-containing protein 9)
EEQNLVAFQY

SEQ ID NO: 104559 - protein, 9 aa, Homo sapiens
  misc_feature (1)..(9): Table A1; Target 1717; HLA-C*16:01; FSHRENSG00000170820; Follicle-stimulating hormone receptor (FSH-R) (Follitropin receptor)
AFSDRTNAL

SEQ ID NO: 104560 - protein, 9 aa, Homo sapiens
  misc_feature (1)..(9): Table A1; Target 1718; HLA-B*35:01; FSHRENSG00000170820; Follicle-stimulating hormone receptor (FSH-R) (Follitropin receptor)
DAAGFFTVF

SEQ ID NO: 104561 - protein, 8 aa, Homo sapiens
  misc_feature (1)..(8): Table A1; Target 1719; HLA-B*51:01; FSHRENSG00000170820; Follicle-stimulating hormone receptor (FSH-R) (Follitropin receptor)
DAAGFFTV

SEQ ID NO: 104562 - protein, 9 aa, Homo sapiens
  misc_feature (1)..(9): Table A1; Target 1720; HLA-B*35:01; FSHRENSG00000170820; Follicle-stimulating hormone receptor (FSH-R) (Follitropin receptor)
FPIFGISSY

SEQ ID NO: 104563 - protein, 9 aa, Homo sapiens
  misc_feature (1)..(9): Table A1; Target 1721; HLA-C*02:02; MRO2B; ENSG00000171495; Maestro heat-like repeat-containing protein family member 2B (HEAT repeat-containing protein 7B2) (Sperm PKA-interacting factor) (SPIF)
AEAALQTLL

SEQ ID NO: 104564 - protein, 9 aa, Homo sapiens
  misc_feature (1)..(9): Table A1; Target 1722; HLA-B*35:01; MRO2B; ENSG00000171495; Maestro heat-like repeat-containing protein family member 2B (HEAT repeat-containing protein 7B2) (Sperm PKA-interacting factor) (SPIF)
EAISQIASF

SEQ ID NO: 104565 - protein, 11 aa, Homo sapiens
  misc_feature (1)..(11): Table A1; Target 1723; HLA-A*11:01; LDH6B; ENSG00000171989; L-lactate dehydrogenase A-like 6B (EC 1.1.1.27)
SVADLTESILK

SEQ ID NO: 104566 - protein, 11 aa, Homo sapiens
  misc_feature (1)..(11): Table A1; Target 1724; HLA-A*02:01; LDH6B; ENSG00000171989; L-lactate dehydrogenase A-like 6B (EC 1.1.1.27)
TLWEIQNKLKL

SEQ ID NO: 104567 - protein, 10 aa, Homo sapiens
  misc_feature (1)..(10): Table A1; Target 1725; HLA-A*03:01; CTSRD; ENSG00000174898; Cation channel sperm-associated protein subunit delta (CatSper-delta) (CatSperdelta) (Transmembrane protein 146)
VVNQGKGMFK

SEQ ID NO: 104568 - protein, 10 aa, Homo sapiens
  misc_feature (1)..(10): Table A1; Target 1726; HLA-A*11:01; TSYL6; ENSG00000178021; Testis-specific Y-encoded-like protein 6 (TSPY-like protein 6)
ASLTTDGSLK

SEQ ID NO: 104569 - protein, 9 aa, Homo sapiens
  misc_feature (1)..(9): Table A1; Target 1727; HLA-B*51:01; OTOL1; ENSG00000182447; Otolin-1;
LAIAGMNTI

SEQ ID NO: 104570 - protein, 9 aa, Homo sapiens
  misc_feature (1)..(9): Table A1; Target 1728; HLA-A*29:02; PSG9ENSG00000183668; Pregnancy-specific beta-1-glycoprotein 9 (PS-beta-G-9) (PSBG-9) (Pregnancy-specific glycoprotein 9) (PS34) (Pregnancy-specific beta-1 glycoprotein B)
  misc_feature (1)..(9): (PS-beta-B) (Pregnancy-specific beta-1-glycoprotein 11) (PS-beta-G-11) (PSBG-11) (Pregnancy-specific glycoprotein 11) (Pregnancy-specific glycoprotein 7) (PSG7)
LYLFGVTKY

SEQ ID NO: 104571 - protein, 9 aa, Homo sapiens
  misc_feature (1)..(9): Table A1; Target 1729; HLA-B*35:01; PRS38; ENSG00000185888; Serine protease 38 (EC 3.4.21.-) (Marapsin-2)
HPIGGDVAL

SEQ ID NO: 104572 - protein, 9 aa, Homo sapiens
  misc_feature (1)..(9): Table A1; Target 1730; HLA-B*51:01; GTR7ENSG00000197241; Solute carrier family 2, facilitated glucose transporter member 7 (Glucose transporter type 7) (GLUT-7)
FAYIAGHSI

SEQ ID NO: 104573 - protein, 9 aa, Homo sapiens
  misc_feature (1)..(9): Table A1; Target 1731; HLA-A*02:07; GTR7ENSG00000197241; Solute carrier family 2, facilitated glucose transporter member 7 (Glucose transporter type 7) (GLUT-7)
MVDGAVHWL

SEQ ID NO: 104574 - protein, 9 aa, Homo sapiens
  misc_feature (1)..(9): Table A1; Target 1732; HLA-A*29:02; CP2AD; ENSG00000197838; Cytochrome P450 2A13 (EC 1.14.14.1) (CYPIIA13)
IVFGDRFDY

SEQ ID NO: 104575 - protein, 11 aa, Homo sapiens
  misc_feature (1)..(11): Table A1; Target 1733; HLA-B*44:03; X6R7K4; ENSG00000203910; Chromosome 1 open reading frame 146 (Uncharacterized protein C1orf146)
EEIFLAKIEKF

SEQ ID NO: 104576 - protein, 9 aa, Homo sapiens
  misc_feature (1)..(9): Table A1; Target 1734; HLA-A*11:01; X6R7K4; ENSG00000203910; Chromosome 1 open reading frame 146 (Uncharacterized protein C1orf146)
STEEIFLAK

SEQ ID NO: 104577 - protein, 9 aa, Homo sapiens
  misc_feature (1)..(9): Table A1; Target 1735; HLA-A*24:02; GNAT3; ENSG00000214415; Guanine nucleotide-binding protein G(t) subunit alpha-3 (Gustducin alpha-3 chain)
IYSNTLQSI

SEQ ID NO: 104578 - protein, 9 aa, Homo sapiens
  misc_feature (1)..(9): Table A1; Target 1736; HLA-B*18:01; GPX5ENSG00000224586; Epididymal secretory glutathione peroxidase (EC 1.11.1.9) (Epididymis-specific glutathione peroxidase-like protein) (EGLP) (Glutathione peroxidase 5) (GPx-5) (GSHPx-5)
DEKGTIYDY

SEQ ID NO: 104579 - protein, 9 aa, Homo sapiens
  misc_feature (1)..(9): Table A1; Target 1737; HLA-B*18:01; GPX5ENSG00000224586; Epididymal secretory glutathione peroxidase (EC 1.11.1.9) (Epididymis-specific glutathione peroxidase-like protein) (EGLP) (Glutathione peroxidase 5) (GPx-5) (GSHPx-5)
NEYVSFKQY
